United States Patent Application Publication US 2004/0031072 A1 - sequence listing, part 32

SEQ ID NO: 155022 - protein, 49 aa, Glycine max
  Clone ID: PAT_MRT3847_111005C.1.pep
IVHDKEFLWVILFILSGWLIINKDWSYFRILKNPYPILIPILFMNFGIS

SEQ ID NO: 155023 - protein, 171 aa, Glycine max
  Clone ID: PAT_MRT3847_111006C.1.pep
MGRSRLEPIRLEEDPNQRSRRKKNAASGENSESGAAGQGAGEGKKALYHCNYCNKDITGKIRIKCAMCPDFDLCIECFSVGAEVTPHKSSHPYRGMDNLSFPLICPDWNADDEILLLEGIEMYGLGNWTEVAEHVGTKNKESCIEHYRNVYLNSPYFPGPDMSYDGGKNRK

SEQ ID NO: 155024 - protein, 92 aa, Glycine max
  unsure (1)..(92): unsure at all Xaa locations
  Clone ID: PAT_MRT3847_111007C.1.pep
PAKEHQGKPKKMDAPYTQTIYPQYNEVQAHIATNLIKLPLDYFXTTKGSMLDLKISQSKIALSNNTVGGTILHSDLLTNFFTKRLFLTTLHL

SEQ ID NO: 155025 - protein, 176 aa, Glycine max
  unsure (1)..(176): unsure at all Xaa locations
  Clone ID: PAT_MRT3847_111008C.1.pep
LKHPYSARVLAEIFTKEVVHLHGVPASVLSDEDPIFVSSFWKELLXLPGTYLKMSTSYHPXIDGQTVNHCLETFLRCFVADQPKMXVQWLSWAEYWYNTNFHASTGTTPFEVVYGRKPPVLNRFLPGEVRVEAVRRELQDRDEALKQLKYQLQRAPNRKKDQADCKRKDRQFALGE

SEQ ID NO: 155026 - protein, 105 aa, Glycine max
  Clone ID: PAT_MRT3847_111009C.1.pep
QFSKGQLGVKFKPFSKYPPCYKDMSFWISESFTENNLCEVVRGIAGDLVEEVQLIDNFTNKKGMTSHCYRIAYRSMERSLTDEEINDLQWKVREQVQSKLNVVLR

SEQ ID NO: 155027 - protein, 54 aa, Glycine max
  Clone ID: PAT_MRT3847_11100C.1.pep
LARHQPYIATSYIQCLACACLLSIQATSCVHYMSSLCVLLVSSKSVLVPLRVRP

SEQ ID NO: 155028 - protein, 63 aa, Glycine max
  Clone ID: PAT_MRT3847_111010C.1.pep
REYLKELYIRRWFTVCRGCYCKGRWETLIEIDTRVETYNEISSGLGKEQAPDRETHIRRISVL

SEQ ID NO: 155029 - protein, 78 aa, Glycine max
  unsure (1)..(78): unsure at all Xaa locations
  Clone ID: PAT_MRT3847_111011C.1.pep
MAGKGQGSALRMDLXTTYSCAAAWKHDRIELSXNDQRNRTTPXFMLFTDTERIICEAANNQVVMNPMNTELDAKRLNG

SEQ ID NO: 155030 - protein, 85 aa, Glycine max
  unsure (1)..(85): unsure at all Xaa locations
  Clone ID: PAT_MRT3847_111012C.1.pep
EVEVIHHSMRFRGIWASLLSALFLILXPYLDAYPLRLLPHSQCAQLPFLLPIFQVSTLRLVSSLSSSRGSSKNARKIHSKKHLII

SEQ ID NO: 155031 - protein, 90 aa, Glycine max
  Clone ID: PAT_MRT3847_111013C.1.pep
MQVETNRLTYGTNAKDDEEEDSGASSSSSEELYDEKLCCICYDEQRSSFFVPCGHCATCYDCAQRILDEESIVCPICRRLIHKVRRLYHN

SEQ ID NO: 155032 - protein, 92 aa, Glycine max
  Clone ID: PAT_MRT3847_111014C.1.pep
YGGASCYGSTKNGGKWERPYETGDAKHVTLFLRHTAYAADDQLLRTIGKWQIAQLYNNAHRHQWTDLINRIYMSRPGTFAIAYFEIHMNFLY

SEQ ID NO: 155033 - protein, 37 aa, Glycine max
  Clone ID: PAT_MRT3847_111015C.1.pep
PMHKNNRHSESPSKKGQDLIFTLCFHLSHLCYRRKGP

SEQ ID NO: 155034 - protein, 140 aa, Glycine max
  Clone ID: PAT_MRT3847_111016C.1.pep
PGEISRAFQGRRKLGLDQRLNGKALPIFTLVHGIMAITKKNDGYYFPQTNYEILKWAQLIWRTLILPKDGPKPLVEKMDFTKTSKKKWKGVLVQFFPRKPKGEVGLGGVPFSFLGKDLHGPKFLPSFFCQWTRHLVVKLP

SEQ ID NO: 155035 - protein, 104 aa, Glycine max
  unsure (1)..(104): unsure at all Xaa locations
  Clone ID: PAT_MRT3847_111017C.1.pep
GQRRRGGANPRLINPPKHLRREHVATAWPTRLTAFCWXSLSGWIPLEAHTYEKIDTSXQRTYRNVYTPKDMMTGKTVALKKVPFDNLEPDSVKFMAREILILRP

SEQ ID NO: 155036 - protein, 42 aa, Glycine max
  Clone ID: PAT_MRT3847_111018C.1.pep
DIMVFFKARSPHLISLCCLFSLLTVSLVSFFFHICFALLLLR

SEQ ID NO: 155037 - protein, 41 aa, Glycine max
  Clone ID: PAT_MRT3847_111019C.1.pep
NRHLFSFRTPSNRSQSSVINITWPSFWLLTDILHTKGQTLY

SEQ ID NO: 155038 - protein, 67 aa, Glycine max
  Clone ID: PAT_MRT3847_11101C.1.pep
VIPMFLKPDTSSIHKKIWILVFQPTTYPNFILVDSNPYKWWHAWTQLYYPYYIPFKFSYQMHDLDLY

SEQ ID NO: 155039 - protein, 103 aa, Glycine max
  unsure (1)..(103): unsure at all Xaa locations
  Clone ID: PAT_MRT3847_111020C.1.pep
AALPGTAGTRLWGAISEPISQQTVWHQMATVGAPLNLDSSRQSFXTFSSDLVGGGIVEDETGDRITRNTGSLQVSTLLWVCGHXKGCIMQKTVRTRNAAVKTP

SEQ ID NO: 155040 - protein, 59 aa, Glycine max
  unsure (1)..(59): unsure at all Xaa locations
  Clone ID: PAT_MRT3847_111021C.1.pep
ARIRSGKFQSGGFQHIANPFMVLGGQXIPPCYVKKEQPRTFTPKEYTGGGFTNHIRSSP

SEQ ID NO: 155041 - protein, 223 aa, Glycine max
  Clone ID: PAT_MRT3847_111022C.1.pep
MAKPKRISLRIFALLLLISTSSFQLLRASDDADDDAIFYDSFDEDFEDRWVVSQKDEYSGVWKHAKSEGHDDYGLLVSEKARKYAIVKELDEAVSLKDETVVLQFETRLQNGLECGGAYLKYLRPQEAGWKSKEFDNESPYSIMFGPDKCGATNKVHFIFKHKNPKSGEYVEHHLKNPPSVPSDKLSHVYTAILKPDNELQILIDGEQRRKVNFLSADDFEPP

SEQ ID NO: 155042 - protein, 101 aa, Glycine max
  Clone ID: PAT_MRT3847_111023C.1.pep
WFDHLLFLLLTALCVSNKMNLFWKQIHWFLVRNWYGFHCQTQICVRHLKPFKYTSYLSLGLCACLVYFVIHNFSSINNFFNYRTTPKPPGNITVTNPNYFL

SEQ ID NO: 155043 - protein, 76 aa, Glycine max
  Clone ID: PAT_MRT3847_111024C.1.pep
SRPAWRGRKRKPGRYDVGEGEARKKVLRPRAGMYGQVNSLQGGEYYSRGAELPPGESNVKAELPNGARPRTGGLPQ

SEQ ID NO: 155044 - protein, 49 aa, Glycine max
  Clone ID: PAT_MRT3847_111025C.1.pep
SQKSPTSMYPRPATLSISLNHGLKCVASNKMCILDNTMLRCVTVSGLAL

SEQ ID NO: 155045 - protein, 63 aa, Glycine max
  Clone ID: PAT_MRT3847_111026C.1.pep
FPLLPQLALLHHYKNYVRCHVWAPTPPVLGRSLVLGVSPGAPPLQMTEFWHFARSSVLNMFPV

SEQ ID NO: 155046 - protein, 43 aa, Glycine max
  Clone ID: PAT_MRT3847_111027C.1.pep
KAGNFNPSPLPIPIMGKCIFPPWSISFPFMTLSPYLGVSPVFQ

SEQ ID NO: 155047 - protein, 66 aa, Glycine max
  Clone ID: PAT_MRT3847_111028C.1.pep
KHRISQLKLKLQITYCQFSKKVSCYAFLSLPWISNICICTSVVTRAMPGYGFLIIQKKIFVNNVLL

SEQ ID NO: 155048 - protein, 145 aa, Glycine max
  unsure (1)..(145): unsure at all Xaa locations
  Clone ID: PAT_MRT3847_111029C.1.pep
FFGVLAPSQLLVALLYALFEGVGLVSLVPSVPSPVVGFVGGASAVVGSPCVGVRVSPLSRWCFAWDSGSEWMVFACCCCCACVWRVEPFTGFAFQFQRVVGLLVRWLTFRXCQCGPLWSPVSLSGQKGXRVGXPGFSGSVPRGFP

SEQ ID NO: 155049 - protein, 75 aa, Glycine max
  Clone ID: PAT_MRT3847_11102C.1.pep
KVSTQEYKSYFSYLQCKLKLEVGDSQQRGRSKFSHSEKASYFLFLLQWSCLLRMATWTFLRRLSLNCLLDVVTTL

SEQ ID NO: 155050 - protein, 59 aa, Glycine max
  Clone ID: PAT_MRT3847_111030C.1.pep
KNFPNFSPGKTLAQFYPSPNSIPLNPLPYNSQFTLVQSLFIPIGQHGKQPKVPSKVLFP

SEQ ID NO: 155051 - protein, 320 aa, Glycine max
  Clone ID: PAT_MRT3847_111032C.1.pep
ESPLVVNAGMDIKGVVAEIQKDKNTPLVQKVFTAEYSLICKISDYKKPYISFMDGITMGFGIGLSGHCRYRIITERTVLAMPENGIGLFPDVGFAHIAAQSPGEGSVGAYLGLTGKRISTPSDAIYLGLGTHYVPSGKLGSFKEALLATNFSQDPHQDIKVLLARYESNPESEAQLKLLLPQIVSTFGGNKSVTEIIEELKKHQSSTDPNVVEWANEALQGLGKGAPFSLFLTNKYFSLVASAVGNNDGELSTLSGVMKTEYRIALRSSLRHDFSEGVRAVLVDKDQNPKWKPSSLEEIDPSEVEAVFKPLGPEVGELRV

SEQ ID NO: 155052 - protein, 34 aa, Glycine max
  Clone ID: PAT_MRT3847_111033C.1.pep
QNGETVLTRPVSFFESYNLTTQTYYLAIRNIPMY

SEQ ID NO: 155053 - protein, 180 aa, Glycine max
  Clone ID: PAT_MRT3847_111034C.1.pep
SIINPVNQDPASPSDPSSIPANQDLASPSDPSSIRANQDPVSPSDPSASPVTEDLSLHTIVPPSTVTHQPLAPYFRHCRGREWAVQAIDQHGNTKEIQVTKADVFLMPPGQHIVVPFDGQLRAYGDAATLLSGACGRIVTDSKNVPINFESWTKVPKSYKDNCFNILKTLFHFQASESTA

SEQ ID NO: 155054 - protein, 171 aa, Glycine max
  Clone ID: PAT_MRT3847_111035C.1.pep
MGACFSCNSSSTLKNIRVVHLNGYVEDFDQPISVRQVIGYPQKHFVCTSTQLLSPCSTSMNGDTHLQPGQVYFMLPYSVLHADVSPVDLAGLAKRLTAIAKSGPLSSQTQTFWNSPSRSPGRVGVAEQYGVGMMNIGGKSPSKVQPWKPILDTITEKPFHKRTEPDLQESC

SEQ ID NO: 155055 - protein, 263 aa, Glycine max
  unsure (1)..(263): unsure at all Xaa locations
  Clone ID: PAT_MRT3847_111036C.1.pep
MGTTTDLNFDYVLSQRKAFDETKAGVKGLVDVGVKNVPTFFHHQTEKFEKASNIGNKSHVIPIIDLADIDKDPSKRQGLVDIVKKASETWGFFQVINHDIPLSVLEEMKNGVKRFHEMDTEAKKEFYSRDRSKSFLYNSNFDLYGSQPAINWRDSCRCLLYPDTPKPEELPVVCRDILLEYRKHIMRLGILLLELFSEALSLSPNYLKDIGCADGLLAVCHYYPSCAEPDLTMGITMHSDNDFFTILLQDHIGCLQLRLKNXW

SEQ ID NO: 155056 - protein, 55 aa, Glycine max
  Clone ID: PAT_MRT3847_111037C.1.pep
MLLLLSDLVLPKQWEGVCLFTFKVYHLRPEIRLTIHKYLTRRSKITWEPYVALGL

SEQ ID NO: 155057 - protein, 57 aa, Glycine max
  Clone ID: PAT_MRT3847_111038C.1.pep
IGHFLIAQWYPHDINKDDPLVMARQEQERLSKLEMLKRRGKGPPKKGQGRRAAKRNK

SEQ ID NO: 155058 - protein, 52 aa, Glycine max
  Clone ID: PAT_MRT3847_111039C.1.pep
ILDDACHVFCYWKQKQSCISSVKIMIPERAEAVVIAFCLTLSSCNSTFSTTF

SEQ ID NO: 155059 - protein, 42 aa, Glycine max
  Clone ID: PAT_MRT3847_11103C.1.pep
QQAENLYLLTGATHSWYLKAAIATQITATARYAIYVIKAGPA

SEQ ID NO: 155060 - protein, 81 aa, Glycine max
  Clone ID: PAT_MRT3847_111040C.1.pep
RFLNGINPADFSYLPFGFGRRGCPGSSLALTLKQVTLASLIQCFQWKIKAGEKLCMEKASSFFTGLAKPLLCYPITRFNPF

SEQ ID NO: 155061 - protein, 118 aa, Glycine max
  Clone ID: PAT_MRT3847_111041C.1.pep
PRAEFGTREREREREREREREREREREREREREREREREREREREREREREREREREREREREREREREREREREREREFGTRFGTRALGGGVTLGIWGVGTLRSGGLPAQGEEWYPL

SEQ ID NO: 155062 - protein, 264 aa, Glycine max
  Clone ID: PAT_MRT3847_111042C.1.pep
MDLLLELKTALEPFRETLLFTIPLTLLLLGIVSRIRRKTAPYPPGPKGLPLIGNMNIMNQLTHKGLANLAKQYGGVLHLRIGFLHMVAISNAEAAREVLQVQDNIFSNRPATIAISYLTYDRADMAFAHYGPFWRQMRKICVMKLFSRKRAESWNTVRDEVDFIIRSVTNNLGSPVNVGELVFNLTKNIIYRAAFGSSSQEGQDEFISILQEFSKLFGAFNVADFVPFLGWVDPQGLNKRLVKARASLDSFIDKIIDEHVQKGG

SEQ ID NO: 155063 - protein, 247 aa, Glycine max
  Clone ID: PAT_MRT3847_111043C.1.pep
GNHAAALALAAKLRGIPSYIVIPKNAPTCKIENVKRYGGQVVWSEASVQSREEIANKVWQESGAIFIHPYNDGRILSGQGTISLEILEQAPQIDTLVVPISGGGLISGIALAAKSINPAIRIFAAEPKGADDAAQSKAAGRIIRLPETNTIADGLRAFLGDFTWPVVRDLVEEIITVEDSEIIKAMKLCFEILKVVVEPSGAIGLAAVLSDTFQKNPAWKDCNHIGIVVSGGNVDLAMLWDSLNKGK

SEQ ID NO: 155064 - protein, 82 aa, Glycine max
  Clone ID: PAT_MRT3847_111044C.1.pep
PSFPQMSSNCSLHLSLIRDFILVLSLRHTCEPRYHCANIPRNVSTDLEIFDTASMARPLWESLLGCSITLQTNLSIQQHCAV

SEQ ID NO: 155065 - protein, 302 aa, Glycine max
  Clone ID: PAT_MRT3847_111045C.1.pep
NDDDDDDDDNDLDLEWDEDETEEDGSEHGPKLHQKRKFKIKWRLMMEWILFLNILACLVCSLTISSITNMHLLGLEIWRWCVMAMVTFSGRLVSGWVVGLTVFILERNFMLREKVLYFIYGLRNSIRNCMWLGLVLLSYWSMVFNDVQKKNHKFLNKVFQALVAVLVGATIWLVKIVLVKMLASSFHVTTYFDRMKESVFHHYILETLSGPPMEDAEEVLRQHHLAGSKSMPARWNAKNLYKSKRFGSRKIDMEKLRKLSMESTATAWSVKRLVNYVRSSGLSTISRTVDDFGNAESEISSE

SEQ ID NO: 155066 - protein, 166 aa, Glycine max
  Clone ID: PAT_MRT3847_111046C.1.pep
KRRLRREMREQKKQQMKLPKRETSRQQREKMSQERRVNKANLKQKMGHKTMQQMKLPKRETSRQQREKMSQERRVNKANLKQKMGHKTMARRRVMVEQIKDTIRSVDHITTPLAGKTKVTASTTAQYVEEKSAQAKNATVGSMEKTTEDAKGREKAGTKGQIKKWW

SEQ ID NO: 155067 - protein, 105 aa, Glycine max
  Clone ID: PAT_MRT3847_111047C.1.pep
MGDALNEVQHMGGAPAASPKRDITLLEGDKDFELHNGIEFESHEAAYSFYQEYAKSMGFTTSIKNSRRSKKTKEFIDAKFACSRYGVTPESDSGSSRRPSVKDTD

SEQ ID NO: 155068 - protein, 144 aa, Glycine max
  Clone ID: PAT_MRT3847_111048C.1.pep
MNPSCRFSSTKHSPFLHNSHTHLSKTTSPYVFLGHSHSQKPFLLSPPITTKPYPFNNILRFRNIKLSYPFATLSSFAEGEQQENQEGTETPPSNDELGGIAKAFNISSRTASAISICMALAVLTFPLFMTSLGQGMVLKNKVLS

SEQ ID NO: 155069 - protein, 76 aa, Glycine max
  Clone ID: PAT_MRT3847_111049C.1.pep
QKPSPKLGRFLMVWLVIYVDQILGDTALWSGVQNIISSNNKFHFYGTVQVNLSLVIHYIRWLLLYAITVSSSCYLV

SEQ ID NO: 155070 - protein, 78 aa, Glycine max
  Clone ID: PAT_MRT3847_11104C.1.pep
CCCHLGAKLGPPRSMYTLDLSMWLGLLTAWHLCSEREHPGSECPKRQEIETAGSLTTESGNRHSVTSVGCYWEEAEPT

SEQ ID NO: 155071 - protein, 67 aa, Glycine max
  Clone ID: PAT_MRT3847_111050C.1.pep
SQHIGAVYKDQIFSMGWVHNQSHASLSVMSLPPCKSKMLRLVRLAGTVSFFVPCREVIRCPYVSWMV

SEQ ID NO: 155072 - protein, 80 aa, Glycine max
  Clone ID: PAT_MRT3847_111051C.1.pep
RKTDLCALESLIHGPLLRYSAHAQVHPQPRTGTLSHGPQFPTLQPVKRFQRQAPWLAPIAPHIHERLCMSVTFQDTLLMR

SEQ ID NO: 155073 - protein, 103 aa, Glycine max
  Clone ID: PAT_MRT3847_111052C.1.pep
NHSRTFLSHSSWDGPPRRFPLVTGTCGRDRNVGVTDTWRARKTWPTDASSQCTFIPGGRTSQIKRDTVNDLEVDSEGVDRVITRRTSVELTVNRYGKLIYADA

SEQ ID NO: 155074 - protein, 55 aa, Glycine max
  Clone ID: PAT_MRT3847_111053C.1.pep
FLFFFFFILHLTNFLLFLTHKMNIISQCFFPPYFYHERPKRQYFIDLHCKNYNLY

SEQ ID NO: 155075 - protein, 120 aa, Glycine max
  Clone ID: PAT_MRT3847_111054C.1.pep
TTRTSTRSEFISERNPSSSEGHSFIPPKPKTMSFSHHRRSQSEMHFRISDNFDLEVDLSPSHHFQYPAPLLQDSGSIPQSPQPETARSAHHRSNSADASYSFLVDGIEAKKALSPDKLAE

SEQ ID NO: 155076 - protein, 144 aa, Glycine max
  Clone ID: PAT_MRT3847_111055C.1.pep
MSRPGDWNCRSCQHLNFQRRDSCQRCGDAKYGDRVDFGGFGGRGGSSFGLTGSDVRPGDWYCAAANCGAHNFASRSSCFKCGAFKDDLAGSYNSSDILRSRAFGGSGRPGWKSGDWICSRSGCNEHNFASRMECFKCSAPRDTY

SEQ ID NO: 155077 - protein, 64 aa, Glycine max
  Clone ID: PAT_MRT3847_111056C.1.pep
GGQHLGHKKLKGLLLFKGIKAQLKKKGGVSQTPGFILLKWPKRGEKQLFKKVFPKQGKEGDISC

SEQ ID NO: 155078 - protein, 382 aa, Glycine max
  Clone ID: PAT_MRT3847_111057C.1.pep
MACETKSWLVMFLVFLVANCMQHCVHGVSQVPCLFIFGDSMSDSGNNNELPTTSKSNFRPYGIDFPLGPTGRYTNGRTEIDIITQFLGFEKFIPPFANTSGSDILKGVNYASGGSGIRNETGWHYGAAIGLGLQLANHRVIVSEIATKLGSPDLARQYLEKCLYYVNIGSNDYMGNYFLPPFYPTSTIYTIEEFTQVLIEELSLNLQALHDIGARKYALAGLGLIGCTPGMVSAHGTNGSCAEEQNLAAFNFNNKLKARVDQFNNDFYYANSKFIFINTQALAIELRDKYGFPVPETPCCLPGLTGECVPDQEPCYNRNDYVFFDAFHPTEQWNLLNALTSYNSTTNSAFTYPMDIKHLVDHEIKMELELTNESTSQLSATE

SEQ ID NO: 155079 - protein, 40 aa, Glycine max
  Clone ID: PAT_MRT3847_111058C.1.pep
RQDSQFIHLIHSTLSFNSVAGHYLIHIQLTIISTPCERLQ

SEQ ID NO: 155080 - protein, 75 aa, Glycine max
  Clone ID: PAT_MRT3847_111059C.1.pep
PLLFGDSCVFQRGWLGPSLSQNPPREQYPKGRLSLLFIELGGQESKAVFLFLESFNYPSSDACRASPFFVFFLDA

SEQ ID NO: 155081 - protein, 309 aa, Glycine max
  unsure (1)..(309): unsure at all Xaa locations
  Clone ID: PAT_MRT3847_11105C.1.pep
MIFASNPNPKNVYLIGGLQLEFPYQPYGSQFAFMARVISTLNLTQKEGHCHALLKSPSGTGKSLSLLCSSLAWQHHYKPHHTNLKPASEETNDPLXSGGGFVLEEVSLSSFSEIPDHTQTEINNKKQKKKEAPTIYYASXRRTHSQISQVVRELRKTAYRVPMVVLAWQKHYCTTKNIIGKENIYDECKLLLKDQATGCPXFKNAHKVKGHPSLQKGGCNVVHDIEDLVKVGQLVKGCCSCSXSMSNDAQLVFCPYNYINNPVIWAPMEVDIKIIYGFRMSFTNHQLHAIQCCSNMEDITRDASSVDNE

SEQ ID NO: 155082 - protein, 133 aa, Glycine max
  Clone ID: PAT_MRT3847_111060C.1.pep
VDVHEGPSSRVCTAGGDIGFKYFSHTEDKADPGSFWFDIQAAKAFLAQRWKEAISSEHVTLVICPDSEPPGCEEIQDLKTAACQSSDMDGCDIVANADKRLPATSKVAKSKPRLKKSEKGTKIKYIPKQKTNT

SEQ ID NO: 155083 - protein, 79 aa, Glycine max
  Clone ID: PAT_MRT3847_111061C.1.pep
LVFFFFFFFFFFFFFFFMTHANILIQNAIYNKEKRINIVWNLISERDLETKSLWCNDFELHFIPFCRLLAAAELTSGAC

SEQ ID NO: 155084 - protein, 392 aa, Glycine max
  unsure (1)..(392): unsure at all Xaa locations
  Clone ID: PAT_MRT3847_111062C.1.pep
MACETKSWLVMFLVFLVANCMQHCVHGVSQVPCLFIFGDSMSDSGNNNELPTTSKSNFRPYGIDFPLGPTGRYTNGRTEIDIITQFLGFEKFIPPFANTSGSDILKGVNYASGXDLGAAIGLGLQLANHRVIVSEIATKLGSPDLARQYLEKCLYYVNIGSNDYMGNYFLPPFYPTSTIYTIEXVTQVLIEELSLNLQAXHDIWSXRKYALGLGLGLIGCTPGMVSAHGTNGSCAEEQNLAAFNFNNKLKARVDQFNNDFYYANSKFIFINTQALAIELRDKYGGSNXATFSIIEVCFPVPETPCCLPGLTGECVPDQEPCYNRNDYVFFDAFHPTEQWNLLNALTSYNSTTNSAFTYPMDIKHLVDHEIKTELELTNESTSQLKKKKKKRA

SEQ ID NO: 155085 - protein, 109 aa, Glycine max
  Clone ID: PAT_MRT3847_111063C.1.pep
PKTKIKLLFGPWGFFRDPKLISGRHQSNFRGPFFHIGGLKKLRKGKDLIPFCSGWETSSFINTGHSSGWKAMGKTTPWGFFWPKKREKWTPLVGLSNGKREPNFGSFET

SEQ ID NO: 155086 - protein, 87 aa, Glycine max
  Clone ID: PAT_MRT3847_111064C.1.pep
VCDGLSSSQHGGLQSPWAANPGQVSMADIVRMGRPQAKASMPNSSLHSGSHQNDFALPSASQNNLHSVQVHASKLSETNNDHGFAID

SEQ ID NO: 155087 - protein, 73 aa, Glycine max
  Clone ID: PAT_MRT3847_111065C.1.pep
FFTPCFMLPHIHIIYLTSFNNSIYYITFIHNSPYSTISSASSLIIISYPQLFLLYFFLTLTTINILYILHIYH

SEQ ID NO: 155088 - protein, 73 aa, Glycine max
  Clone ID: PAT_MRT3847_111066C.1.pep
KHNLRLGLALQKVGGEVFKIGPLATLNKFHLLGCQPGVELILKNVGFPENLERGVHAASEYYRAPFPMVPSRI

SEQ ID NO: 155089 - protein, 66 aa, Glycine max
  Clone ID: PAT_MRT3847_111067C.1.pep
TTMKSNIYPQAHKARTQPAQNLGKYLNGKRQQIYKNYLWLARWRWWWWWLVNCCCCMLLLALPLKG

SEQ ID NO: 155090 - protein, 105 aa, Glycine max
  Clone ID: PAT_MRT3847_111068C.1.pep
ARVGTRTKPLEQILIRLILYKYSSSSLLYRRRHNNLSRRITDKSTTTAFISFYKSSQHVHVSLQPLRDRTGPEVEVFFVPRKRYEFQAQRGSHLFLRRVQNRRKR

SEQ ID NO: 155091 - protein, 119 aa, Glycine max
  Clone ID: PAT_MRT3847_111069C.1.pep
MLMEVAVELEDDLFFADLSKQISQLIMDEDEDPLPTCPPDSLQTFPGSIYPPPQSGFLYEQALIRQSKGTGVFIPQSTQPRRKHRKGRSSSNAKYQKQTQDTKTVSQVPITSSFKPKNG

SEQ ID NO: 155092 - protein, 62 aa, Glycine max
  Clone ID: PAT_MRT3847_11106C.1.pep
YFCVWVFLQRGYSHINHNHSNSLATNYFINISDCSLSQPIISQPHYTDYITPYSPLQYYLST

SEQ ID NO: 155093 - protein, 121 aa, Glycine max
  Clone ID: PAT_MRT3847_111070C.1.pep
NDGCVRADQIDLKSIDEQLERHLSKVLMKQKEEDDAGSDHSRHSSSFATATKFKSVAGSAGATTFKKQRQEWEIDPSNLIIKSVIARGTFGTVHRGIYDGQDVAGKFDPFFARLQKLHVLF

SEQ ID NO: 155094 - protein, 61 aa, Glycine max
  Clone ID: PAT_MRT3847_111071C.1.pep
SFRGSYSSSRQRQLPLLASVSSKGQKVSKRMPSFRPSFMFFSGMRGSLMGLPLCFRTGIFL

SEQ ID NO: 155095 - protein, 191 aa, Glycine max
  unsure (1)..(191): unsure at all Xaa locations
  Clone ID: PAT_MRT3847_111072C.1.pep
MIPPQIGNLSKLRYLDLSDNDFEGMAIPSLRGASSSVTHLGRSDTAFLGWFPALVGLRPERLFLPWSWXSFPSLLGAFTPSTLLLLSPTGPRGMCPPQIGNLSNLVYLDLSSDVANGTVPSQIGNLSKLRYLDLSYNDFEGMAIPSFLCAMTSLTHLDLSHTGFMGKIPSQIGNLSNLAILALEVILLSKM

SEQ ID NO: 155096 - protein, 44 aa, Glycine max
  Clone ID: PAT_MRT3847_111073C.1.pep
ICRPLSEDETRLHTPVVIWCNEYRIEFLAVQYIYLQTDLLNFFT

SEQ ID NO: 155097 - protein, 84 aa, Glycine max
  Clone ID: PAT_MRT3847_111074C.1.pep
LRYDFWRWGGKPSADISQTNEFPPTPFVNSCKGNFGIIFNTEPAGYLTHNSLTQSPRGVKKIKKNPPGGFSPSTKKRGVEFVGN

SEQ ID NO: 155098 - protein, 71 aa, Glycine max
  unsure (1)..(71): unsure at all Xaa locations
  Clone ID: PAT_MRT3847_111075C.1.pep
GPLLXXXXQXPXPXTPXXVPXRRGFTXSXXYXITXQMXXLPRSLPGWPATAXXHXGXXPXPXAIXXCSXXX

SEQ ID NO: 155099 - protein, 79 aa, Glycine max
  Clone ID: PAT_MRT3847_111076C.1.pep
ITNRYHESKPNITKKKTNKGRPPLMALAPPLFISVPGPQGHPVSHFGSLLKPGRINEKTCSLGKIVFRSISPQNSGPKP

SEQ ID NO: 155100 - protein, 52 aa, Glycine max
  Clone ID: PAT_MRT3847_111077C.1.pep
LEYFLGFMGFPHRYLSYSLHKGTLGVYLGWHTQQRAFKPKYVTLSGYYCFQN

SEQ ID NO: 155101 - protein, 57 aa, Glycine max
  Clone ID: PAT_MRT3847_111078C.1.pep
KGDLLPGVYRKYRNSMDRILNLQRTMKADVFSFIFQLPNPLRSWDVGDTRAPNIFTD

SEQ ID NO: 155102 - protein, 61 aa, Glycine max
  Clone ID: PAT_MRT3847_111079C.1.pep
IYILLYLIDRVKLFLVRSDCCLILKHLSDNLHNNISIFFLYICNTKFLYRGLIRNYSKFKL

SEQ ID NO: 155103 - protein, 43 aa, Glycine max
  Clone ID: PAT_MRT3847_11107C.1.pep
YCISVYGIHKFGLCPAFCMMSTTRAWSARSASTFRPSSSRIPS

SEQ ID NO: 155104 - protein, 91 aa, Glycine max
  Clone ID: PAT_MRT3847_111080C.1.pep
ALPLLLLLLLFLFSPSAAEIKSQTINSDSRPMILLEKFGFTHKGYVSIAVSSVSVGVLSSSVQPESSRLGFFLLNEEALLQVLMEIQQNPL

SEQ ID NO: 155105 - protein, 263 aa, Glycine max
  unsure (1)..(263): unsure at all Xaa locations
  Clone ID: PAT_MRT3847_111081C.1.pep
MSASRFIKCVTVGDGAVGKTCLLISYTSNTFPTDYVPTVFDNFSANVVVDGSTVNLGLWDTAGQEDYNRLRPLSYRGADVFILAFSLISKASYENIAKKVYFFGSRIQLXDLRDDKQFFMDHPGAVPITTAQGEELRKLIGAPAYIECSSKTQQGCVTVNWVEEDERGEESSICRQSPKKQFQHRRVRCWCHPSSRSNGSPWLLNPIKSKSFCFCYWVLDTFLLLLLPRLLPKTLRPRPSNPRNLSSFSTRPVHSATRLQWLR

SEQ ID NO: 155106 - protein, 309 aa, Glycine max
  Clone ID: PAT_MRT3847_111082C.1.pep
MVEDNSIGKQSTIIKFKHCRCSLLVLSFNKAPMASPWLARPPSNPYSTVSGTRDLDDFLLKLLYTSFSQDAQTKAFKPKELVLFQYQACAFCNKVAAFLDYYDIPFKVVEVNPINKKEIKWSDYKKVPILTVDGEQIVDSSDIIDKLIKRIHPDYDLNAEEEKKWRQWVDNHLVHVLSPNIYRNVPEALESFDYITTQGNFSFSERLVAKYGGAAAMYFVSKKLKKKHNITDERAALYGAAEQWVDALKGRKFLGGLDPNLADLAVFGVLRPIRHLKSGRDMLEHTRIGKWFSQMDRVVGQSSRVSEQS

SEQ ID NO: 155107 - protein, 102 aa, Glycine max
  unsure (1)..(102): unsure at all Xaa locations
  Clone ID: PAT_MRT3847_111083C.1.pep
RQLSFTVRAIQLXKPTYQVIQPVYGDPFIAXLESPVTFTPLIAWYLSNLPAYMTRSXGPLLSRIYVGLSHGYLLVGPFVNAGPLRNTEITGHAGSLVVGGLV

SEQ ID NO: 155108 - protein, 189 aa, Glycine max
  unsure (1)..(189): unsure at all Xaa locations
  Clone ID: PAT_MRT3847_111084C.1.pep
YRLYSRFRACRCAKISFYSAFRRKRTRCVRGLRWARGCVGEIRVNXRELTMKIQVAGQNVILKGDPSIYCSVASLKTIYKYNILQDAADNLLTKIQDKEHILQPKLQEVLQLSFKSFSENPEXLPPKRRHDRAIILKEGVXITNVRPYRYXIMNVTLNAKIIKPSINHYSSPVILIRKKKXGLRFYIDY

SEQ ID NO: 155109 - protein, 134 aa, Glycine max
  Clone ID: PAT_MRT3847_111085C.1.pep
GQEDYNRLRPLSYRGADVFILAFSLISKASYENIAKKWIPELRHYAPGVPIILVGTKLDLRDDKQFFMDHPGAVPITTAQGEELRKLIGAPAYIECSSKTQQNVKAVFDAAIKVVIQPPKLKKKRKTQKACSIL

SEQ ID NO: 155110 - protein, 235 aa, Glycine max
  Clone ID: PAT_MRT3847_111086C.1.pep
MSFQFNFDFISPFLCNSLQFSLSYRGIVAVWKQISDLKMSASRFIKCVTVGDGAVGKTCLLISYTSNTFPTDYVPTVFDNFSANVVVDGSTVNLGLWDTAGQEDYNRLRPLSYRGADVFILAFSLISKASYENIAKKWIPELRHYAPGVPIILVGTKLDLREDKQFFMDHPGAVPITTTQGEELRKLIGAPAYIECSSKTQQNVKAVFDAAIKVVLQPPKQKKKKRKAQKACSIL

SEQ ID NO: 155111 - protein, 31 aa, Glycine max
  Clone ID: PAT_MRT3847_111087C.1.pep
DIKFKFNLPHMIPQPQISRGSSPLFEQRRTL

SEQ ID NO: 155112 - protein, 78 aa, Glycine max
  Clone ID: PAT_MRT3847_111088C.1.pep
PTRPAPSPRFSSVQTMSQTVDAGVAKKLGWGKAEGKCLPWSGVSGRTAAGYSYSALGHHRTHSRGQLRGLKRGFRGAS

SEQ ID NO: 155113 - protein, 48 aa, Glycine max
  Clone ID: PAT_MRT3847_111089C.1.pep
VVVPVWCMANYPHVHVDLSFMDMICALVPRLTKRQLSLRSLPKKKKRR

SEQ ID NO: 155114 - protein, 98 aa, Glycine max
  unsure (1)..(98): unsure at all Xaa locations
  Clone ID: PAT_MRT3847_11108C.1.pep
GSLVVATVAKRRQRAGTHDGGSEGRRGHASWIPYXAPREQAQRAEVYFDFFPVEVDRSEXGAHIGEXKSGVYVPLPTKTNLVETPKEWQLDLPCDKNP

SEQ ID NO: 155115 - protein, 75 aa, Glycine max
  unsure (1)..(75): unsure at all Xaa locations
  Clone ID: PAT_MRT3847_111090C.1.pep
RVGFAANCLESNGNSEDTIEFCISXNISCGINRLLFSLKDVNKQVILLMINLIIMMMVKNIYMGRIKVKHHMLYS

SEQ ID NO: 155116 - protein, 107 aa, Glycine max
  unsure (1)..(107): unsure at all Xaa locations
  Clone ID: PAT_MRT3847_111091C.1.pep
KRQTHINLAHGYKRPLFLKSEAARMDQVNIAQCEAETILAKSKATAXGLAVLSKSMKENGXPDAICLTIAEQYIQSFSNISXRGHIYXLTRFACNPAHMIDQALTMC

SEQ ID NO: 155117 - protein, 137 aa, Glycine max
  Clone ID: PAT_MRT3847_111092C.1.pep
LIQKSIHRFSVTLKLSFIVELAQTMEVTEKCDVFSFGVLSLEIITGKHPGDLISSLFSSSSSATMTFNLLLIDVLDQRLPQPLKSVVGDVILVASLAFSCISENPSSRPTMDQVSKKLMGKSPLAEQFPAIRLGQLF

SEQ ID NO: 155118 - protein, 68 aa, Glycine max
  Clone ID: PAT_MRT3847_111093C.1.pep
WPPKVDIPTVVPFQLGAPLPNWPVTFLPGPELPAVPKVPIPEVIVITAKIIPGVPRTYPATTTNLATG

SEQ ID NO: 155119 - protein, 260 aa, Glycine max
  Clone ID: PAT_MRT3847_111094C.1.pep
GSSSSRFGSSSNRQRRRPKRYTEREFVEAVSDNETDFDSDDDIVGEAVYDEEYLKKRKQKRMSSSGSEGDEEYQWDEYNVEDDEEEDDDDDDDSLSISEDSDKPLKVKQLRGRTRRETKLRSVGEIQSGLRRSKRATKNRINYRQCEASESETELIKSEKSNSSADHSDPSENGEYMMESEDSDGSDNEEQEKKVDEPVPYPAVEENEQNQPPEKLSSPGQEEVESSTGKRRFLDLNELAPSTGFDDGPNTIMKDEDNDY

SEQ ID NO: 155120 - protein, 63 aa, Glycine max
  Clone ID: PAT_MRT3847_111095C.1.pep
MIRGLDTARSGVVLAQNRRQKQSILDCKNLPIACYFLVHDFLRERKSLSVLGTDFESHDVWHS

SEQ ID NO: 155121 - protein, 88 aa, Glycine max
  Clone ID: PAT_MRT3847_111096C.1.pep
RFFHVGFFFLLSLMGFPFTFLFLGGPLAFVGFRELLPLWFFKSVYPFNFLYSVHGGKFLILGGWGGFLGWVFCECWLGMFFNAFWLAP

SEQ ID NO: 155122 - protein, 48 aa, Glycine max
  Clone ID: PAT_MRT3847_111097C.1.pep
LLDIIIPYFLKGAFDLLRRHDKQNNTEQVIKSYDNLLYYMLFDGQCTL

SEQ ID NO: 155123 - protein, 56 aa, Glycine max
  Clone ID: PAT_MRT3847_111098C.1.pep
MDKSYSKGYGKKKKKGKKKKKKKKKKKKKKKKKKKKKKKKKKKKKKKKLTVLKNKN

SEQ ID NO: 155124 - protein, 68 aa, Glycine max
  Clone ID: PAT_MRT3847_111099C.1.pep
RRSSRLPGFDSDSNFVLPDSVFDQISLLLPQMASYLQRNMPLGSLSNRALVPGTRISNPRAGSPAMKG

SEQ ID NO: 155125 - protein, 146 aa, Glycine max
  Clone ID: PAT_MRT3847_11109C.1.pep
EKKSMCNCLIDLCVNLDVPDRARDLLDLGLTLEIYTDIQSRSQAKWSLHLKRLSVGAALTALSVWINDLSKTLELGEELPPLLGINTGGGKHRFSDKVLPTVFELYLKELKAPFHKAANKAGWFLATSEAATSWLQSRGSVVVLPQ

SEQ ID NO: 155126 - protein, 86 aa, Glycine max
  unsure (1)..(86): unsure at all Xaa locations
  Clone ID: PAT_MRT3847_1110C.1.pep
ARARVPSSGGALLXLXFXXXKXPGGLFFWTQNPPXPKKVRKKKQWAGLYYLLARAKIKTGEPRAALIYLSIENNPLGLKLTGPRTF

SEQ ID NO: 155127 - protein, 57 aa, Glycine max
  Clone ID: PAT_MRT3847_111100C.1.pep
RYMVNLPCTPFLHRFQLSSVGSAFKVRSIDWRVSQFYMIHFFCKARSRWPCMQVLLV

SEQ ID NO: 155128 - protein, 134 aa, Glycine max
  unsure (1)..(134): unsure at all Xaa locations
  Clone ID: PAT_MRT3847_111101C.1.pep
MNHDDDVVIDIEAILEGTEPHVTKECCIYKVPFHIRRLREDAYTPKVVSIGPFNHNRHVHLQNMEKHKLMYCKAFLKRTKTSSDSWMSYIEGVEPKFRRCYSETLEFRKKELVKIIFVDSGXILELXWRSCSEW

SEQ ID NO: 155129 - protein, 81 aa, Glycine max
  Clone ID: PAT_MRT3847_111102C.1.pep
SCHIHGCMLLQFPNEISPKATLDLFNISTHIIQNSNLSIVLNLLSICQTIPFNLPRCLLRSLFEPPSLILISLSHSLMIAT

SEQ ID NO: 155130 - protein, 39 aa, Glycine max
  Clone ID: PAT_MRT3847_111103C.1.pep
PELSMKSIITFHCSSLPSLILLQPRDAQKYGFPRSPLSV

SEQ ID NO: 155131 - protein, 133 aa, Glycine max
  unsure (1)..(133): unsure at all Xaa locations
  Clone ID: PAT_MRT3847_111104C.1.pep
MADKAVTIRTRMFMTTRLLSGKQFVIDVLHPGSANXFKAELKEKLRRMYDEKDTNPVFAFKFRTHFGGGKSTGFGXNLYDSVENAKKCEPKYRLIRKXEXSRKQMKERKNRAKKIRGVQKTKASDAAKTGKKK

SEQ ID NO: 155132 - protein, 104 aa, Glycine max
  unsure (1)..(104): unsure at all Xaa locations
  Clone ID: PAT_MRT3847_111105C.1.pep
EECMIKSKDLQNYADKAKNIHEQLFQILKEIAYFHGEMVSLKNYNALHYIGLLKILNNFDKKTGAIIRLPFIHKDLQQAFFTTYLLXTLGKDXETMLNHLFPDN

SEQ ID NO: 155133 - protein, 49 aa, Glycine max
  Clone ID: PAT_MRT3847_111106C.1.pep
VWNWVENRETTRKSCDLLCCINFQRMTFNGDMCVTSRVLMMIFVRQLIT

SEQ ID NO: 155134 - protein, 71 aa, Glycine max
  unsure (1)..(71): unsure at all Xaa locations
  Clone ID: PAT_MRT3847_111107C.1.pep
ARNSARGXXXXMPSXXXXXXXXHXTXXQXXXIXQXPELQAGGXNXXQXGHGXLXDXPWWXKMXTCXXXIXA

SEQ ID NO: 155135 - protein, 354 aa, Glycine max
  Clone ID: PAT_MRT3847_111108C.1.pep
MSRSQDPHPSRSFFPFGNPFRMISPKGSRMSPQLLAVLQAFEATLAERLKNLMPKSKDEILTLSWMTLAMKSLCESHNDIRTLMTALELPVSDWEDKWIDVYLDISSKLLDICNAFSSELSRLNQGNLPLKCALHNLDSASSKQYLRACSLLDDWRQHVSSRNPRIEKCSSMLDNLVGSLDLPKVKNSAKGKVLMQAMYGVKVETVFICRVFTAAFSGSSKKLSDLNVADIHSWAPDFRRLQDLVNEEIRVRFSGGKFTVLNELEAVDASVKILYPTIQAGVDTVETEWLVKTVEELRAGAEKLSQGIDLLAKGVDGFFQAVMTSRDTLLSSVRFDKTVNDRSPGRNRDMQVVH

SEQ ID NO: 155136 - protein, 71 aa, Glycine max
  Clone ID: PAT_MRT3847_111109C.1.pep
MSRSQDPHPSRSFFPFGNPFRMISPKGSRMSPQLLAVLQAFEATLAERLKNLMPKSKDEILTLSWMTLAMK

SEQ ID NO: 155137 - protein, 117 aa, Glycine max
  Clone ID: PAT_MRT3847_11110C.1.pep
EIFVMLLEPLIAVFSILSYADFYQLAGVVAVEVTGGPEETKHTGREDIPCPTPKGRVPDATKGSDHLRDAYGKTMGIKNRDIAALSGGHTIGAAHKERSGFEGAWTSNTRTCDNPYF

SEQ ID NO: 155138 - protein, 87 aa, Glycine max
  unsure (1)..(87): unsure at all Xaa locations
  Clone ID: PAT_MRT3847_111110C.1.pep
LGLLPLDPEYGESDLXKWVEATXDHIGLDDVIDPTLDIQFTEEISTVLTVGLYCTNSLAITRPSMRGVVQKLIEGTVLPKSLRGKLS

SEQ ID NO: 155139 - protein, 100 aa, Glycine max
  unsure (1)..(100): unsure at all Xaa locations
  Clone ID: PAT_MRT3847_111111C.1.pep
DPFEGVRGKVIDLQMATWSTSKIFGLEHVLHGGHSAHLVGKTLLIFCGRDAERTLLXDLNMLDLEPITXTXIYAVGVRTNGTTVDAAREHDERYLLIFGG

SEQ ID NO: 155140 - protein, 123 aa, Glycine max
  Clone ID: PAT_MRT3847_111112C.1.pep
KALTERAVKVVEEVKFFPNYAHHVATSDHAGDILKRVYMIPEERVHIILNGVDQHIFRPNVSKGKDFKKRHGIPDSKSLVIGLAGRLVKDKGHPLMFEALKQIIEDNSTLQESSMAVAAGDGP

SEQ ID NO: 155141 - protein, 75 aa, Glycine max
  Clone ID: PAT_MRT3847_111113C.1.pep
LILFLVFRSYLMTEKRKEEKKVSIYFYLFVRKIAALLVLEASLLVSPTVSTINCIFLMSCMPYNSICTVIVFFSG

SEQ ID NO: 155142 - protein, 151 aa, Glycine max
  Clone ID: PAT_MRT3847_111114C.1.pep
LPHMGKVRSRKHALQFLRVADELISTSDNRGIITFADGDAFEKVKNNLNFRSFFDGHLVHYQALLESMESHFPTSFSEARIAMEKLFLQPCISSLDWLQTWEEMKRGGHLEEETSLEGCQLSKNILMEIREVLRGSDGSYQARIEGQHDNE

SEQ ID NO: 155143 - protein, 73 aa, Glycine max
  Clone ID: PAT_MRT3847_111115C.1.pep
KGLTDDCYCFTWNNFFWHLANQFVFQFLYKGLHLVQPVFWYLKKDGDFIWWVSSPLDVLALLSPLQQMDDVSF

SEQ ID NO: 155144 - protein, 363 aa, Glycine max
  Clone ID: PAT_MRT3847_111116C.1.pep
MVNLSGCTSFLCQSLPSVQSVVSSTGDRLTYTVEPNQLVGSEDQQFVSRTQDNIIYANDLSSSPCIHRIDSTEMQEPSDVVKDDSKLVPVNSFGCGSDAKQTSYPTDEKPNVPTEQEDTGALCYEPPRFPSLDIPFLSCDLIQSGGDMQQEFSPLGIRHLMSASMNMNLTPFRLWDSPSRDDSPDALLKSAAKTFTGTPSILKKRNRDLLSPLSDKRIDKRLEIEMTSTLIKNFSRLDVMFDDNETPVADLLPASSMQKRDSGTSVEGDKGSCRQAVKVEQVEDKKKSAILNDKKSEDDSGDNNSLDKIKQQPLDVDSEIKNDASAAAEIVQQPSGILVEHDMNDLLLYSPDQVNLKSEKVLV

SEQ ID NO: 155145 - protein, 110 aa, Glycine max
  unsure (1)..(110): unsure at all Xaa locations
  Clone ID: PAT_MRT3847_111117C.1.pep
GTDERPPQTRPAATRKADPTTNPEKRNTRRAGASQPETTPRXTEPPXTTTXPSGPNTNTNNNTXTRGTTKTTRTRSPRNPTXRRRPKPTMPRPXPTGQPPTPPRRATTTA

SEQ ID NO: 155146 - protein, 168 aa, Glycine max
  unsure (1)..(168): unsure at all Xaa locations
  Clone ID: PAT_MRT3847_111118C.1.pep
LTIPDGVDKTSASLQFRKLAHCDFLKRNFKHMSNVLWVAPEDKASLWSQXLHYVSCIICXMQEADLVYLVNVVRELYLHRPEEARQLRRKALSRIVWLLTADVPTIAQIEEFHSMHRMMTAPDSSDYVDLLLSIDLLGLQGVSKAFTNKIAFDDXLVLANTQEFFDGN

SEQ ID NO: 155147 - protein, 374 aa, Glycine max
  Clone ID: PAT_MRT3847_111119C.1.pep
MLSLRRPILQFPAMTNKRKRSQKHTPPPPPPSTPPTPQTQARHSLNTAKARAWAPLSLTRHELSLPLTFPTGQTFLWKNTAPSQYTGVVGPHLISLKHLQNGDVSYCLHSPSHSDTAETALLDFLNATVSLADLWKTFSASDARFAELAHHLSGARVLRQDPFECLIQFLCSSNNNIGRITKMVNYVSSLGTHVGDVGEFQFHAFPSLEQLSSVSEQQLRDAGFGYRAKYIIGTINALKSKPGGGEEWLRSLRKMELRDVISALCTLPGVGPKVAACIALFSLDQHHAVPVDTHVWRIATKYLLPELAGSQLTPKLCDRVAEAFVTKYGKYAGWAQTLLFIAELPSQKALLPSHLLTVKQRNAAKIEGSEEEVD

SEQ ID NO: 155148 - protein, 117 aa, Glycine max
  Clone ID: PAT_MRT3847_11111C.1.pep
EKNCIYMKQKGIINLGNTFSLFGNLCILPTGHPSTQGHPNKTTSDVGHLGTFRKENSFQGMGSPPKRLRAPTVSEKNSHPLGALAIAAIDPVAGPALPWGVTPTLPLGSPTFAMKPP

SEQ ID NO: 155149 - protein, 81 aa, Glycine max
  unsure (1)..(81): unsure at all Xaa locations
  Clone ID: PAT_MRT3847_111120C.1.pep
MEKKSIAGLCFLFLVLFVARKLLLLXEVVVQTEAKTCENLADTYRGPCFTTGSCDDHCKNKEHLLRGRCRDDFRCWCTKNC

SEQ ID NO: 155150 - protein, 69 aa, Glycine max
  Clone ID: PAT_MRT3847_111121C.1.pep
KQKLVLWESAVGNRHTGGWVKATHQGKGGCLCNNIKQIQREFGPQNLRRSLASKVCKKFSWHMGTGTLL

SEQ ID NO: 155151 - protein, 203 aa, Glycine max
  Clone ID: PAT_MRT3847_111122C.1.pep
MAELDLSKKVADRYLKREVLGEGTYGVVYKAIDTQTGQTVAIKKIRLGKQKEGVNFTALREIKLLKELKDPNIIELIDAFPHKGNLHLVFEFMETDLEAVIRDRNIVLSPSDIKSYLQMTLKGLAICHKKWVLHRDMKPNNLLIGSNGQLKLADFGLARVFGSPDRRFTHQVFARWYRAPELLFGTKQYGPGVDVWAAACIFA

SEQ ID NO: 155152 - protein, 132 aa, Glycine max
  Clone ID: PAT_MRT3847_111123C.1.pep
RPRVRFPLLPWLLTPYNRVNEEDSFGSAERAFNTAHDNAMGLLGDAFARLRASWRLLAASRKWKRDCVEHLPFVLVAGCLLHNFVLKFNEAMPDEGVEKEEGLPSFDGVEDESAVRVRDALALHLSRLSLRK

SEQ ID NO: 155153 - protein, 132 aa, Glycine max
  unsure (1)..(132): unsure at all Xaa locations
  Clone ID: PAT_MRT3847_111124C.1.pep
LPFGQKGRKIKGTMAGMEKNGSDINSNTSAGGTEDQGRGFIGRGSDALTFVFSKIPIQLIRXTNVDGGKGKRGKRTGXRGKITLPTXGGGEPGXDETREWDGDXGDPGDXSMKKFVQXELYRGAPILGEVAE

SEQ ID NO: 155154 - protein, 148 aa, Glycine max
  Clone ID: PAT_MRT3847_111125C.1.pep
MSASADQISECFQIFDKDNDGKVSIEDLGNALRSLGKNPTNAELKSIRDELGTKDFDLATLKGVYRKPIKTPTEQLKEMVDAFKALDKEGNGTIQEAELRQLLLNLGDSLTTPEVEELMKEVTVANDGGISYESFVDMIVNGYPLASS

SEQ ID NO: 155155 - protein, 158 aa, Glycine max
  Clone ID: PAT_MRT3847_111126C.1.pep
MPFISKIQRQSDYTLFGSATPIVIDNGASYFRIGWAGETQPRVVFRNIVQRPRHKTTGETVTIVGDHDPALLKYFDCTRSGPRSAFDSNVVYQFEIMEYILDFGFDRLGATGSEIDHPVLITECVCNPVQSRSKMGELLFETYGVPSIAFGVDAAFSL

SEQ ID NO: 155156 - protein, 308 aa, Glycine max
  unsure (1)..(308): unsure at all Xaa locations
  Clone ID: PAT_MRT3847_111127C.1.pep
MDEHSLSNGTHEVSPDKGHTLPILKKILDLGAKIQDLKKQHITLCDEVKLTSESFPGNDILKSVQLLGAEYEVLKRKYVEESSERRRLYNEVIELKGNIRVFCRCRPLNESEIANGSAVSVVNFESSSDELQVICSDSSKKHFKFDYVFRPEDNQETVFEQTIPIVTSVLDGYNVCIFAYGQTGTGKTFTMEGTPQHRGVNYRTLEELFRISEERNDVIKYELFVSMLEVYNEKXIRDLLVENSVEPTLPLEPKRAPDGSQLVPGLLEACGYGSDLVSESLQSGPPARSVGPASPIALCSRSHCFVRV

SEQ ID NO: 155157 - protein, 63 aa, Glycine max
  Clone ID: PAT_MRT3847_111128C.1.pep
LKRMLQPLRVIITMDYEQHFILIMISHSHFIKRDSLWQKRTFLRRAAEDEEQVNMTLISNFDD

SEQ ID NO: 155158 - protein, 262 aa, Glycine max
  unsure (1)..(262): unsure at all Xaa locations
  Clone ID: PAT_MRT3847_111129C.1.pep
KKLFFGDETPALNALQTLADLSLMMPISTMESESSIQLKGERMVADKNNRSALPEATSTSHKRHKLKYSVVPKIEVLTSKESKTGKEPTKDTNALSESKEKLPFADTAWKRKRKSMGSKVASAKLDSYPSGPLKDEALDDGNKPVVKGKHTDQAFTLPKQLKTVKSSESSLCSDQKDLTVSTAEIPLLNEVSLPTKQRKRKMILQRTSLPKEKSSDYILKSQSNKYSTLKAKLSSCLASXMVRRWFILKWYYSAIDYPWFAK

SEQ ID NO: 155159 - protein, 58 aa, Glycine max
  Clone ID: PAT_MRT3847_11112C.1.pep
VSRAFSCAAVLVGLFYHPCVAAGVSSLASCGCARGTVPCVFYFIGVAAQTDTYYCDEY

SEQ ID NO: 155160 - protein, 289 aa, Glycine max
  Clone ID: PAT_MRT3847_111130C.1.pep
MAVSTFQAAPPKPTLGSSLLSRRMKHVPFSLSFFSAPKTISSYRPILRIRAIDAAQPFDYESRMAQQFHDSQKLKIAIVGFGNFGQFLAQTLVRQGHTVLAHSRSDHSLAAQQLGVTFFPNPHDLCEEHPEVILLCSSIISTQRVLLTLPLQRLKRSTLFVDVLSVKEFPKNLLLHALPPDFDVLCTHPMFGPQSAPRAWTGLPFVYEKVRIGAHDDRRIARCEKFLGIFAREGCRMVEMSCADHDKLAAGSQFITHTVGRVLEMLTVKSTPINTKGYESLLNLVGDTC

SEQ ID NO: 155161 - protein, 78 aa, Glycine max
  unsure (1)..(78): unsure at all Xaa locations
  Clone ID: PAT_MRT3847_111131C.1.pep
GFIRIIGSPTVVPSXGGELYSLQGPKVLSVQNPQSKVNRPPPLVFLYFXNISLCFCFLKFYHXVFLVFVFGIQWKLMD

SEQ ID NO: 155162 - protein, 147 aa, Glycine max
  Clone ID: PAT_MRT3847_111132C.1.pep
MTACQDWPEPVIRVQALAASGLATIPERFIKPKSQRPTNSNNYAPKTNSSQIGHHKNNTTNSNIPVIDMKHIYGGDEGKRAETLRLVSEACQEWGFFQVVNHGVSHELMKGAREVWREFFHQPLDVKEVYANTPLTYEGYGSRLGVK

SEQ ID NO: 155163 - protein, 51 aa, Glycine max
  unsure (1)..(51): unsure at all Xaa locations
  Clone ID: PAT_MRT3847_111133C.1.pep
XNXKKXXFWGGQMKPKLLFYCFFTKLLVPPQNFHKRINFPKCSHIPACQAS

SEQ ID NO: 155164 - protein, 52 aa, Glycine max
  Clone ID: PAT_MRT3847_111134C.1.pep
SLSHIGGNARRLIYFILHLMIEKRYMYLLCLIFMSVFAYSTSFFFRACYTNS

SEQ ID NO: 155165 - protein, 132 aa, Glycine max
  Clone ID: PAT_MRT3847_111135C.1.pep
HASVETEKRGIAFDQLLTIPEQDEWVYSDGKSTTCVAFILSMYKAAGIFGPISSSIQVTEFTIRDAYMLRIFEDNQTRLPRWCNNENDRLPFCQILGEYRMELPGYNTLDPYANMNEHCPSLPPTYDRPLKC

SEQ ID NO: 155166 - protein, 129 aa, Glycine max
  Clone ID: PAT_MRT3847_111136C.1.pep
IETEKRGIAFDQLLTIIRLEEWVYSDGKSTTCVAFILSMYKAAGIFGPISSSIQVTEFTIRDAYMLRIFEDNQTRLPRWCNNENDRHPFCQILGEYRMELPGYNTLDPYANMNEHCPSLPPTYDRPLKC

SEQ ID NO: 155167 - protein, 105 aa, Glycine max
  Clone ID: PAT_MRT3847_111137C.1.pep
MASSLLLAVVSVLDLGAFALAVAAEQRRNTASLNKDRAGRNYWQYDSDIATGLGVGSLIILDASQEIIMDVTGCLCCGRAMRPSGSRSWSICLFITSWYVLIAKS

SEQ ID NO: 155168 - protein, 170 aa, Glycine max
  Clone ID: PAT_MRT3847_111138C.1.pep
MAEISNSPPTSNPVEENTQTPKTTRNTKPGVKRLIISVTVLFSFILGFPLLWKSVKIYRAPLPFDRVDSFSSQIESKPLSFPCRFLAIFIGFDFMVSNGNVGAAIERKMSDLSHGGDCGGCGGNYSVSVAVGGGGIDAVYFGGKLRGNDEDADELVKSVVSEYGGGNMYS

SEQ ID NO: 155169 - protein, 76 aa, Glycine max
  Clone ID: PAT_MRT3847_111139C.1.pep
FFSSWRLWSKNNNLTIFLLIKQHLQEQRVLNNNKRITAEYNNYCTPRPPFITTKKIVSTTFRKKKKILCGGLQASN

SEQ ID NO: 155170 - protein, 53 aa, Glycine max
  Clone ID: PAT_MRT3847_11113C.1.pep
NKACNSVGIKLRVATMSNSNSKVFFMLYILKARYFFGHHQLKYATHMKRKCRC

SEQ ID NO: 155171 - protein, 36 aa, Glycine max
  Clone ID: PAT_MRT3847_111140C.1.pep
LYWNIPQYSAIILLLKMLRDENCFMSSEFVSGFGLG

SEQ ID NO: 155172 - protein, 40 aa, Glycine max
  Clone ID: PAT_MRT3847_111141C.1.pep
LQQQPPTLILLGDETNIDSRKTNYLIYLSRTQKLRNLNYS

SEQ ID NO: 155173 - protein, 35 aa, Glycine max
  Clone ID: PAT_MRT3847_111142C.1.pep
IKEREKQYAFLLVKSTPCFPSPLGAQDYHHHISLS

SEQ ID NO: 155174 - protein, 83 aa, Glycine max
  unsure (1)..(83): unsure at all Xaa locations
  Clone ID: PAT_MRT3847_111143C.1.pep
RERLSIGVVPDGDVKIGKRPPRTLSSIARCAIGDFADSTIVSLCVIRLVFTNEKGEIVFGICSXFLCDLKPKNEGTITAPVGN

SEQ ID NO: 155175 - protein, 37 aa, Glycine max
  Clone ID: PAT_MRT3847_111144C.1.pep
NRSPSKVSIPSVSPFLPALLLRSENDINNCKQSQRSS

SEQ ID NO: 155176 - protein, 107 aa, Glycine max
  Clone ID: PAT_MRT3847_111145C.1.pep
MITRSNLVEQLREYQIRSKHDWASVSFFSSTSSNITTSRVDVVLFVIWELVILAFLVFSVVSLYFKHIRLAFILVCITILLLLCMKITKQVRLARKKRRRMLLPLSM

SEQ ID NO: 155177 - protein, 77 aa, Glycine max
  unsure (1)..(77): unsure at all Xaa locations
  Clone ID: PAT_MRT3847_111146C.1.pep
LTKNNRGYMIIYLTPRGMNVPLKRKGPFLKLGETNNKGTFGENKKLEHVSELMGLLKCYPSLVLNKGFSYAARFXFP

SEQ ID NO: 155178 - protein, 80 aa, Glycine max
  Clone ID: PAT_MRT3847_111147C.1.pep
FKCPSILFFLRRWVSVLPLYLVMLDKLENMDVFMVETVGTYFGMSMLSAIFQIGLLGPGLMWFVREFKILFVICVVEKFW

SEQ ID NO: 155179 - protein, 60 aa, Glycine max
  Clone ID: PAT_MRT3847_111148C.1.pep
PTRPDNISYSSFVEFDQGAGGDINRCNASLAVSDVYIMTAADITHNVGAHIYSYLKATSY

SEQ ID NO: 155180 - protein, 43 aa, Glycine max
  Clone ID: PAT_MRT3847_111149C.1.pep
HQKADLAIDASNKEELRAVRLVKSASNATFVLVSQCKIECRVR

SEQ ID NO: 155181 - protein, 87 aa, Glycine max
  Clone ID: PAT_MRT3847_11114C.1.pep
PNSYVNICASLFLENVELEFPDEFRSHVMWIQDWRTMKTSNSISYYNNDATLHNENFELIFPEEFPILFPLALGLALLESKLFQFHM

SEQ ID NO: 155182 - protein, 82 aa, Glycine max
  unsure (1)..(82): unsure at all Xaa locations
  Clone ID: PAT_MRT3847_111150C.1.pep
MGEVLCNAHMEHLAEDLNEESEVQILDYMIGQGTQWVNLNHDVTYRPGRPDMMLISGGRDFYAVXSRGGGFCICGKRAYAHA

SEQ ID NO: 155183 - protein, 141 aa, Glycine max
  Clone ID: PAT_MRT3847_111151C.1.pep
PPGTPPPRFIRGLSFPLPRAGPYHRVGICHQLAGHTCEDFPLEWCRGFSIVFSGVPSAEWFRPTEGFAPPSFGGFVFSEAPPVGYTSGPAFPCLEFMAGGGFYYFYGVLPPRGGLVFHPPPLFLVVCSRSPSVGSLDQDLL

SEQ ID NO: 155184 - protein, 78 aa, Glycine max
  unsure (1)..(78): unsure at all Xaa locations
  Clone ID: PAT_MRT3847_111152C.1.pep
XSXXXXXXMXXXRXXTXMXTDTGXSXXSXTXSIXXSXXXXXXXXIRXVXRXXXXXXXCXRXSXXXXXSRXXMSSXLXX

SEQ ID NO: 155185 - protein, 387 aa, Glycine max
  unsure (1)..(387): unsure at all Xaa locations
  Clone ID: PAT_MRT3847_111153C.1.pep
LGYEVKGQEEKVLKLKKALYGLKQALRAWNVRIDKYLXDKNFIKCPYEHALYIKAQSGDILIVCLYVDDLIFTGNNPSMFEEFKKDMSNEFEMTNMGLMAYYLGIEVKQEDKGIFITQEGYAKEVLKKFKMDDANPIGTPMEYGNKLSKHEKGENVDPTLYKSLVGSLRYLTCTRPDILYVVGVVSRYMETPTTTHFKVAKRILQYIKGTTNFGLHYYSYDNYNIVGYSDSDWSGDLDDRKSTTGFVFFMGDTAFTWMSKKQPIVTLSTCEAEYVAATSCVCHAIWLRNLLKELKMPQEEPMEICVDNKSALALAKNPVFHERSKHIDTRYHFIRECIEKKEVKLKYVMSQVQAADIFTKPLKLETFVKLRSMLGVXKSSLRGDVEI

SEQ ID NO: 155186 - protein, 73 aa, Glycine max
  unsure (1)..(73): unsure at all Xaa locations
  Clone ID: PAT_MRT3847_111154C.1.pep
TNRVSRSTTTTIMMGSCGPAFLSAFATLLKESREPGTTSTASVTTTLKRVPEQAEDXLSHRTGHQPARLGRVG

SEQ ID NO: 155187 - protein, 224 aa, Glycine max
  Clone ID: PAT_MRT3847_111155C.1.pep
ARAHIINMALHNAASDAAGKADVAMDKATKPLLGQFTDPDHATGHPIHPATVHWPIAFLSTNLVVGAIPVSAIPGAIANSRFFPPVTAFPAIAHYAGIAGLAFSLPSIITGFGEEYQMIRNQIKQNGSLSKVISDAWNKADEGGTKLYMTSKHASLNTVVAGIVGWNVFRSFKHPQHLLPSSNMAASAIAIPIFFYSAQIGGKLVYEPGYGVQRQGEGKKFKDQ

SEQ ID NO: 155188 - protein, 78 aa, Glycine max
  Clone ID: PAT_MRT3847_111156C.1.pep
SPGNASFHSSPHRSLSACVMWLISHPMPQERVFLIGDNQMHEQASFSRCCSPGIGGYQSVNPPINGIATVVNIRIKKY

SEQ ID NO: 155189 - protein, 43 aa, Glycine max
  Clone ID: PAT_MRT3847_111157C.1.pep
VKKILQTRSQMPKDTSSTRKLRLLQVPKRRVNIRLRAVRPQNS

SEQ ID NO: 155190 - protein, 45 aa, Glycine max
  Clone ID: PAT_MRT3847_111158C.1.pep
SVTNKLTYNFLSHNLNQSIQYQYKIKLEQDQNDSYILNGTLIKQF

SEQ ID NO: 155191 - protein, 64 aa, Glycine max
  Clone ID: PAT_MRT3847_111159C.1.pep
AVVTTHITLRPTTLTRKHPRKAIVSHNFNHYSSKMARTVMMVLCAAFACIVNVSPYSKAITLCQ

SEQ ID NO: 155192 - protein, 73 aa, Glycine max
  Clone ID: PAT_MRT3847_11115C.1.pep
RTPHARSLCSPPPSPICAQAQRERVGSSSLRPDLRLPGRTAWLGGSENFTACALCGEADAFHYISNCEQLCTY

SEQ ID NO: 155193 - protein, 69 aa, Glycine max
  Clone ID: PAT_MRT3847_111160C.1.pep
FPWVGPRVRVFCNIRCCGLVICLGLGFPQTVVYLYISGRVESFLFEDSFILGHSHCVFTFQQIFIWKIF

SEQ ID NO: 155194 - protein, 60 aa, Glycine max
  Clone ID: PAT_MRT3847_111161C.1.pep
ELPPTTSTYLKFAFCLISLFIFLSIFSFFYKVGPPKPPFLGFFFTLSKIFAHTRCLFFFL

SEQ ID NO: 155195 - protein, 66 aa, Glycine max
  Clone ID: PAT_MRT3847_111162C.1.pep
AVDIPLAKVPFAFRVQRTQSRPSSKVFLSSSSIQKLHFCDVKVLCVPTPLRTNWFLVVRNTLEHFT

SEQ ID NO: 155196 - protein, 53 aa, Glycine max
  unsure (1)..(53): unsure at all Xaa locations
  Clone ID: PAT_MRT3847_111163C.1.pep
ANWXAXSGYQVMTXWKAXRXPMXIXCXXXCXXXWXDXXDLLNINAGIVKTLCT

SEQ ID NO: 155197 - protein, 53 aa, Glycine max
  Clone ID: PAT_MRT3847_111164C.1.pep
SAGCSEGPQLASSSTQVDRSCPKGHSSSLRRRVNRAWQYSSEDQLSSQVFLHE

SEQ ID NO: 155198 - protein, 160 aa, Glycine max
  unsure (1)..(160): unsure at all Xaa locations
  Clone ID: PAT_MRT3847_111165C.1.pep
VNLTTLNNMCAYGLNPGISGSRLLGTIPQCISQHTVCNQMAALRTPLNFDSNRHSFRQFYIDLLGGGILVDKTGDWITLIQNSPISNLLRVAACKRGCLMVNIEMSGNAPDKXSDWASLVQVYXTYSNSAEHFDACXWTNSEPHTXEMFVPINVCSTNNG

SEQ ID NO: 155199 - protein, 130 aa, Glycine max
  Clone ID: PAT_MRT3847_111166C.1.pep
YVPWTVVAAQTESLYEGGEIVPGKRLFKRVFWSFGPCINGFAYCKLIVQVDGTWLYGKYTGTLLIATAQDRANHIFPIAYAIVEGETTSAWGVFLKNLRRHVTPQINICLISYRHSSIISAYNNPSNLWV

SEQ ID NO: 155200 - protein, 65 aa, Glycine max
  Clone ID: PAT_MRT3847_111167C.1.pep
LNPLKIQSGGRLTLTNSLMYPHKHDPVTVHRRHVRCPQEINLSSNTRELVAMRMEKRKGNHFHWI

SEQ ID NO: 155201 - protein, 81 aa, Glycine max
  Clone ID: PAT_MRT3847_111168C.1.pep
TVIIDEKQTRFTPGQISYSIIFNNPTLSLLLIEHPPSNQPSYYPPHSFIQNSLLYHTPLNHKQSNKTQITKPFDLFTASTN

SEQ ID NO: 155202 - protein, 63 aa, Glycine max
  unsure (1)..(63): unsure at all Xaa locations
  Clone ID: PAT_MRT3847_111169C.1.pep
HLRDFYIRAFTKGWFSLCGEXILLSFASAAPSIESLQLQDCHINTPTWLFGVFFNYGAQYKVL

SEQ ID NO: 155203 - protein, 80 aa, Glycine max
  Clone ID: PAT_MRT3847_11116C.1.pep
AKNRPPHLIQSLTAVKSPQKKDNPPPLGIDCINVPNKHTRDQIVFHPWRETDQNFPRQSVVGKKNLNILFLLPPPKEIIF

SEQ ID NO: 155204 - protein, 87 aa, Glycine max
  unsure (1)..(87): unsure at all Xaa locations
  Clone ID: PAT_MRT3847_111170C.1.pep
MSVKFAALALXLLXSXLLQXARCQSDSEDVVEXAXESSDIXIVGXXVQDFGDGTFXXAPXIETISVFPKXSARLITAGXEETXLLXG

SEQ ID NO: 155205 - protein, 104 aa, Glycine max
  Clone ID: PAT_MRT3847_111171C.1.pep
RAEAELFAEAQVEADGQEHPLWKVKVVLVVANDERDGLLVDMAYIYPKRALQLCGLLVALLCYLFVICPYPWSTKCFLLIFCFLSLFVFFSGRHLNYLLLLITL

SEQ ID NO: 155206 - protein, 83 aa, Glycine max
  unsure (1)..(83): unsure at all Xaa locations
  Clone ID: PAT_MRT3847_111172C.1.pep
MSWQEYXNHHLLCEIESNHLTHTPIICQDGSLCAQNTNFPQIKPEEITAINNDFNEPRSLAPTGLSIGGTKYIVIQGEPITVI

SEQ ID NO: 155207 - protein, 93 aa, Glycine max
  Clone ID: PAT_MRT3847_111173C.1.pep
RVGGRVGGRVGQETIASLKQQLADALELRNFSPVVNHSQNFSGTKDYCGELHLDRGNVTVNNSNEGIHLQAQYRVMTYEWQEEHIITVGSTTE

SEQ ID NO: 155208 - protein, 154 aa, Glycine max
  Clone ID: PAT_MRT3847_111174C.1.pep
QRNSLPLPPSLLAFKFASSLFPYMYPDLDTCLHDEMAVTTFKVPPSECCGNKKMERKPSGRRRVFVQLDCEDQDLDFTTNIEEKLTVMPPFQVGARNGNIRNTLSRLEESMMEDEAESEGELPVGGGEYNGPVLNGVPNVSNFLCLLQTRELVK

SEQ ID NO: 155209 - protein, 126 aa, Glycine max
  Clone ID: PAT_MRT3847_111175C.1.pep
GKREEANLNASSEGGSGREFLCQASTNVECRRLMSQRRVFSINNHIKFCKIEKTLKSSHMTTAYSTTQISLNGTAATSEMSPDNTSFFNLQKEPKFHNSLYQSLRPWLTTLPSQYEREIEVTVAPP

SEQ ID NO: 155210 - protein, 631 aa, Glycine max
  unsure (1)..(631): unsure at all Xaa locations
  Clone ID: PAT_MRT3847_111176C.1.pep
MYPDLDTCLHDEMAVTTFKVPPSECCGNKKMERKPSGRRRVFVQTETGCVLGMELDRRDNAHTVKRKLQVAFNVPSKLTYXGDMVLKNDLSVVRNDSPLLLTRTFLHRSSSTPCLSPTGRDLLQRDQSGPIEVIGCSDMFSGTKQLVEDIMKALKGIEPXPIQRLLYFRNSNGENAAIVKPTDEEPYAPNNPKGFVGKALGQPGLKRSVRVGETGFREVAAYLLDHDHFANVPSTALVKVTHSIFNINDRVNGSMHHNKKQISKIASLQQFIPHDFDASDHGTSSFSVAAVHRIGILDVRILNTDRHAGNLLVRKLEGFGRFDQVELFPIDHGLCLPETLEDPYFEWIYWPQASIPFSDDELDYIYHLDPFRDSEMLRMELPMIREACLRVLVLCTIFLKESAAFGLCLAEIGDMMSREFQGLDEEPSELELICIEAKKLLDQEELFSFEAEVGDKDVTQFQLDCEDQDLDFTTNIEEKLTVMPPFQVGARNGNIRNTLSRLEESMMEDEAESEGELPVGGGEYNGPVLNGVPNVSKLSVSLQNTRTSEKSRQQMGVKQKSDFLAGTSSGNTTVNELPASSSFVKLTDMDEERWNQFLENFQRLLIPDFVNYKRGNVSKKQRQRLGTSCQF

SEQ ID NO: 155211 - protein, 242 aa, Glycine max
  unsure (1)..(242): unsure at all Xaa locations
  Clone ID: PAT_MRT3847_111177C.1.pep
MSTLDATRAELGLLVLYLGKAEARDKICRAIQYGSKFLSNGEPGTAQNVDKTTSLARKVFRLFKFVNDLHALISPTPQGTPLXPLILLGKSENAVLSNFLFLDPSGLLGRNRHLPGINEHTRTILSQIFSLMGKPGSSVVVEKXSLSVGETCEGLSSSMKKLEKDLKNKNKYDNEQYRAKLNKSNERTLSLIKAGIDTVVAVGLLQLAPKTVTPRVTGAFGFVSSLISCYQLLPAPAKSKTL

SEQ ID NO: 155212 - protein, 65 aa, Glycine max
  Clone ID: PAT_MRT3847_111178C.1.pep
FFPDMDHHLLEKALQDCGNDIDSAIRSLNQLRLGAPPPPSLDSTPIASDTAPPQLQGESVKLLKL

SEQ ID NO: 155213 - protein, 81 aa, Glycine max
  Clone ID: PAT_MRT3847_111179C.1.pep
TQLSLKKKAYMNLSAHGLSTNRSPILLLTRISFMPNILVLKNPSILIHLVWAKIPCGHTLYRGTERVQNVPTWPSQLRPQT

SEQ ID NO: 155214 - protein, 132 aa, Glycine max
  Clone ID: PAT_MRT3847_11117C.1.pep
MATMTGVSLSSPRVFFNASPSPQNTYAVKFAVPLSQGMRLGSVRLGRVMRIRPVRAAPERISEKVEESIKNAQEACAGDPTSGECVAAWDEVEELSAAASHAKYKQKEKDSDPLETYCKGNPETIECKTFED

SEQ ID NO: 155215 - protein, 60 aa, Glycine max
  Clone ID: PAT_MRT3847_111180C.1.pep
LRGLIYALRTSCWVLWERQEFHYRVDSKSLEACGIQSLSTDHWLKTIFRSNPSIRLDHIF

SEQ ID NO: 155216 - protein, 44 aa, Glycine max
  Clone ID: PAT_MRT3847_111181C.1.pep
ESSDSARGSKNLCLHESIFVLSLTISPYNSDNSVSIIVIKSPIF

SEQ ID NO: 155217 - protein, 78 aa, Glycine max
  Clone ID: PAT_MRT3847_111182C.1.pep
TWKAVPLNLPKVPIPLHSPIPHCQKSQKNNHNHQALSSYFLATRPRTVCKEVTTNLNFHCAKDSRPSKKLSHVNRTCH

SEQ ID NO: 155218 - protein, 48 aa, Glycine max
  Clone ID: PAT_MRT3847_111183C.1.pep
SFCYHGFRFFSQLAAHTHVNYNNHMNPSHQEQVTGKESLLAFGEHVIS

SEQ ID NO: 155219 - protein, 39 aa, Glycine max
  Clone ID: PAT_MRT3847_111184C.1.pep
TCLDRVRPYIRARFILAWSGSTLPPGNPRVSGPRKGSGG

SEQ ID NO: 155220 - protein, 68 aa, Glycine max
  unsure (1)..(68): unsure at all Xaa locations
  Clone ID: PAT_MRT3847_111185C.1.pep
EIHFTTRQESHWXSSMTRATTTSSRDITEKNKRRREPKGKQAPKTAVPDHVTTHTPKEEEEDARPAAV

SEQ ID NO: 155221 - protein, 51 aa, Glycine max
  Clone ID: PAT_MRT3847_111186C.1.pep
PQARPPGRPRFCVKHIPLLGVDLLNRPYMLVTIIFSDKKVTRASNGEIGLG

SEQ ID NO: 155222 - protein, 55 aa, Glycine max
  Clone ID: PAT_MRT3847_111187C.1.pep
YTPNVWIGNLKLTDKRNWRLKSSFHFPIHVTKRFYLKFLNNIIYILNFGSLTSMD

SEQ ID NO: 155223 - protein, 56 aa, Glycine max
  unsure (1)..(56): unsure at all Xaa locations
  Clone ID: PAT_MRT3847_111188C.1.pep
CTFALRRYPPMPFKAVEFNXLANASDLHSLLAEERFSGGNQASQERFRIMPAPTDI

SEQ ID NO: 155224 - protein, 101 aa, Glycine max
  unsure (1)..(101): unsure at all Xaa locations
  Clone ID: PAT_MRT3847_111189C.1.pep
PXXPXXLXXXXFKKXIXSXILPXNXXTXETXFTXIXPXXXTXHXXENXYPFXYPSXXXSXVHQLTNXXPPXFFFFFVISNQLLLXFVLXXNSELTYXCXXX

SEQ ID NO: 155225 - protein, 422 aa, Glycine max
  unsure (1)..(422): unsure at all Xaa locations
  Clone ID: PAT_MRT3847_11118C.1.pep
MASALGTSSIAVLPSRYFSSSSSKPSIHTLSLTSGQNYGRKFYGGIGIHGIKGRAQLSVTNVATEVNSVEQAQSIASKESXQRPVYPFSAIVGQDEMKLCLLLNVIDPKIGGVMIMGDRGTGKSTTVRSLVDLLPEIKVVAGDPYNSDPQDPEFMGVEVRERVLQGEELSVVLTKINMVDLPLGATEDRVCGTIDIEKALTEGVKAFEPGLLAKANRGILYVDEVNLLDDHLVDVLLDSAASGWNTVEREGISISHPARFILIGSGNPEEGELRPQLLDRFGMHAQVGTVRDAELRVKIVEERGRFDKNPKEFRDSYKAEQEKLQQQITSARSVLSSVQIDQDLKVKISKVCAELNVDGLRGDIVTNRAAKALAALKERDKVSAEDIATVIPNCLRHRLRKDPLESIDSGLLVTEKFYEVFS

SEQ ID NO: 155226 - protein, 92 aa, Glycine max
  unsure (1)..(92): unsure at all Xaa locations
  Clone ID: PAT_MRT3847_111190C.1.pep
QSCRTGEVVRETCTWMHYYWFLTRDGTEFLTTYLNLPSXIVPGTGKKQASPNKRPVRGPPRDQPTGPPGXAGERRFGGDRDRYRGGPRGPGG

SEQ ID NO: 155227 - protein, 80 aa, Glycine max
  Clone ID: PAT_MRT3847_111191C.1.pep
ALHVIYRLMRVAFANNSTRCQRLVVHQGPGMTGLSPSLGPPSMALGSGPPLSTLIRTTIRTPRSTDVHGGLFPVRSPLLT

SEQ ID NO: 155228 - protein, 76 aa, Glycine max
  Clone ID: PAT_MRT3847_111192C.1.pep
PLGTLKTPTYAFSYQDVPTPTGVSLKCHSYHTRWPTIEQMWMPHTTYLLLWDSTGPTCWAKLKNRHAQINDSNAPS

SEQ ID NO: 155229 - protein, 80 aa, Glycine max
  Clone ID: PAT_MRT3847_111193C.1.pep
RPYCFVSQTVIDHDYVRILYFACVYIGLFSWLLYDSLCIHPLIYYILDPIKNKKIYLLFLCRNLSDNGRPPKNMLVHPAI

SEQ ID NO: 155230 - protein, 73 aa, Glycine max
  Clone ID: PAT_MRT3847_111194C.1.pep
YYSVSCEHKFQSFNFIFIIVETITFLNYINVCYLIFFILFTAINVYNTKSSSSCQSSSYTNKAIVISTYLQDI

SEQ ID NO: 155231 - protein, 121 aa, Glycine max
  Clone ID: PAT_MRT3847_111195C.1.pep
PGRPTRPQVNTPQRQPATNGGNKNKAGEKTPRNDEKQPQDTQPSRKDPATDPDAPGAGKTEKRKAHEKAKSTAEATPQKPEPTEKPPTDDSHDHDPDPTNQAQNPRKDGKKPNANNAETTT

SEQ ID NO: 155232 - protein, 71 aa, Glycine max
  unsure (1)..(71): unsure at all Xaa locations
  Clone ID: PAT_MRT3847_111196C.1.pep
KLRGLGNTAASSDGSSSGTFFRAVLLVRRGKYDEAREYVXRARKCLATELAALVLESYERAYSNMVRVQQL

SEQ ID NO: 155233 - protein, 69 aa, Glycine max
  Clone ID: PAT_MRT3847_111197C.1.pep
SKIKITSFLLLCSHWICSISIYIVYIETNTLLFVLLYVYCLFEMHNYFDEIIFHDGMNLNQLICMRKCS

SEQ ID NO: 155234 - protein, 497 aa, Glycine max
  Clone ID: PAT_MRT3847_111198C.1.pep
MASSLATILVALPQTPQCRSTFRSDPPKLSLTLKPKATVTCKATLSTTLETSIQQQQQQDDQKQKPVAEVWRKIHGEDNWAGLLDPMDPVMRGELTRYGEMAQACYDAFDFDPYSKYCGSCRFPLPEFFDSLGMTNVGYTMTRYLYATANINLPNFFRKSRWPHKMWSKHANWAGFIAVSDDETSKRLGRRDIVISWRGTVTHVEWVADLLNFLKPISPDIPCSDRKVKVEAGFLDLYTDREPGCGYCKYSAREQVLGEVKRLMEKYADEEVSVTIAGHSLGSAMAILSAFDIVETGVNVGKDGRKAHVSVFSFSGPRVGNVRFKERLEGELGIKVLRVHNAHDMVPQSPGLIFNEDSPQWLLKLVEGWFPWCYLHVGEELQLDHKKSPFLNPDGDASCAHNLEAHLHLLDGYHGKNRGFERTSERDLALVNKDCDFLKDEHSVPPRWRQDLNKNMVRTEDGRWVLADRPLAQDPHEDIDHHLGELGLASSHTHTHN

SEQ ID NO: 155235 - protein, 45 aa, Glycine max
  Clone ID: PAT_MRT3847_111199C.1.pep
IHVPVDPTLMLIASYQAFPVVIILKTQYTAVTITFGTQLQSQHRT

SEQ ID NO: 155236 - protein, 49 aa, Glycine max
  Clone ID: PAT_MRT3847_11119C.1.pep
HHMPNNIPEFILWDFCNFKYLCPLKGITGNPISGLGSPKNLAKGEMRRF

SEQ ID NO: 155237 - protein, 128 aa, Glycine max
  Clone ID: PAT_MRT3847_1111C.1.pep
APLRSLGILLQIPLIFLYFLFKPQPYRATLIRYLSFTVDGRKINTDVIKVDVKLAVNKMGASLDLKPDGWGVPRRILTMEMRPAGTGIGIMEEFLMVVTIEHPLNQTEYGVNRAFGTDHGTMRDAELA

SEQ ID NO: 155238 - protein, 53 aa, Glycine max
  Clone ID: PAT_MRT3847_111200C.1.pep
ISCLILVTDGYLPTIFHPWIPLTNSLPPTGNGLIVSFGEMIIDFVLIVFCLFI

SEQ ID NO: 155239 - protein, 48 aa, Glycine max
  Clone ID: PAT_MRT3847_111201C.1.pep
CLSLRTSVWGECLKFIRPAIKIPKFCTSSQLKLFLLTFGGSLRTFIGL

SEQ ID NO: 155240 - protein, 166 aa, Glycine max
  Clone ID: PAT_MRT3847_111202C.1.pep
MGNSESMYESQDNFYQHPPSYYNSYHQPSPYAENSENTTYHEPSSYAWNSSNTTYYQSSTYAGSSENTRHQHTRQPTYIADNFSSLDQVVSSLRESCLESSNLILGIDFTKSNEWTGKHSFHRKSLHHIGNTPNPYEQAISIVGHTLSSFDEDNLIPCFGFGDAST

SEQ ID NO: 155241 - protein, 65 aa, Glycine max
  unsure (1)..(65): unsure at all Xaa locations
  Clone ID: PAT_MRT3847_111203C.1.pep
MKGKRPGXGGNPYRKFIGLGFKTPKEATYGSYLDKKCPFTGNVSIRGRILAGTCHSAKMNMNSPV

SEQ ID NO: 155242 - protein, 111 aa, Glycine max
  Clone ID: PAT_MRT3847_111204C.1.pep
RHEGEEEKRRMRVQKKLLEQRNREQKPFFGSRPSPVRPVSSSKSGGPCANGGANAPLNRGVSFNAPQNGTGSPSKNGKRETRLFAPVNYGAKSKKKAASHVFGVEPLRASP

SEQ ID NO: 155243 - protein, 121 aa, Glycine max
  Clone ID: PAT_MRT3847_111205C.1.pep
VNIIQPIFFYFFWFLHGKYSKKILGACWYLLSIERQEACWRSVCDLEKSFCQYGFFDCHRVKDALRVSWFMASNITNLCSPNANDDFYQFGIYADAVTSKVTSSAFFNKYFFCLWWGLRNL

SEQ ID NO: 155244 - protein, 137 aa, Glycine max
  unsure (1)..(137): unsure at all Xaa locations
  Clone ID: PAT_MRT3847_111206C.1.pep
VSSLFFFFFRCPSFCRLVLSGFAGGALASFLFVASSPLSAFSLGCLLGLLWFLVGGSPVXSLSFCFCRFALLGVAVFCLGGGFGSFFLHPPPRPFFSCFVSKILXRFPFSLSSXFPXLVXSLKIXESXKTKSCLXLS

SEQ ID NO: 155245 - protein, 27 aa, Glycine max
  Clone ID: PAT_MRT3847_111207C.1.pep
PLLIFRTLHYGMSGSKSVTSRQQFDAI

SEQ ID NO: 155246 - protein, 76 aa, Glycine max
  Clone ID: PAT_MRT3847_111208C.1.pep
RSFTLEPRVSIMSKGSSKAQWTAHAPNRIRRTHSDHATHRSVQAVKGESAAKSQSVKRRTIASSEVETATQLLATI

SEQ ID NO: 155247 - protein, 65 aa, Glycine max
  Clone ID: PAT_MRT3847_111209C.1.pep
EQSADIVLPVLPEFSSGIIYTAYLYRRPRTQFRLSSRPYTDAHCARSLTVVTRKNPVGTPLSHPA

SEQ ID NO: 155248 - protein, 77 aa, Glycine max
  unsure (1)..(77): unsure at all Xaa locations
  Clone ID: PAT_MRT3847_11120C.1.pep
DRVRFETLEIEIASENQHAKLLLPYHDRDDQLQKHEPLVAXYRQLYALERWLKIPPSERTITTNVLLVSLMKHLEKD

SEQ ID NO: 155249 - protein, 52 aa, Glycine max
  Clone ID: PAT_MRT3847_111210C.1.pep
EGVKRRAMEWNLGAILEGFEVGWKGKLGLNLLGRPFFFFCLFFFFDMSQPKL

SEQ ID NO: 155250 - protein, 39 aa, Glycine max
  Clone ID: PAT_MRT3847_111211C.1.pep
RIRQIFFMSFKRNLVNMIMPWDNIRSANMLALSQVPNSR

SEQ ID NO: 155251 - protein, 47 aa, Glycine max
  Clone ID: PAT_MRT3847_111212C.1.pep
RRRSPNYLRLAFHASQLNRKSCRFPYYVTINTMPLLSLHVIHGRSLF

SEQ ID NO: 155252 - protein, 126 aa, Glycine max
  Clone ID: PAT_MRT3847_111213C.1.pep
GDRKRAFFGGVWNQMWLSCVQLFNIDEAPQLLEEARGILEQEGGPCHHDTLEVYRNLAATYDAMGRVRDAIEILEYVLHLRDEHLAPANPDFEDEKRRLADLLKQARITRYPKVHSLENLIDPDSK

SEQ ID NO: 155253 - protein, 64 aa, Glycine max
  Clone ID: PAT_MRT3847_111214C.1.pep
NVFQVRYEYIGNLVPSHVITLQITMCPLHGFNVGGLTRAPSCPRLRNLVFLSCGIKFQVKMPPP

SEQ ID NO: 155254 - protein, 84 aa, Glycine max
  Clone ID: PAT_MRT3847_111215C.1.pep
MNGDNHPEKCFYEDESLQIMKAKEFGVTYILGHSLEKAKNSSSILKKFAIDVVFGFLSKNCRESDAVLDVPHTSLLEVGMTYYV

SEQ ID NO: 155255 - protein, 75 aa, Glycine max
  Clone ID: PAT_MRT3847_111216C.1.pep
KYIFILFTLINKIISPYLFNYKNLIIFLKFDLFLKNECYTISAHCAKKRKEVGYYSKTETTISSHWLSKAYKTKL

SEQ ID NO: 155256 - protein, 156 aa, Glycine max
  Clone ID: PAT_MRT3847_111217C.1.pep
FFFFFFFFFFFFFFFFFFFFFLKKRDQAKAKNLPTKRGTLSGKKKFLSRKPPAIPGKKKPPKFIRKTNKSKQRGHQRKPTPQGISGAQKAPPKKNLFSGKGDNGSPKGGFSHWKGPFQTTLLLASRKGSFGKQTQKEPQISPSERDWAPQKNSGPT

SEQ ID NO: 155257 - protein, 54 aa, Glycine max
  Clone ID: PAT_MRT3847_111218C.1.pep
FSFSLKPRFFSCLVLNIVLARPKITHKMWRLLTHGQYLHVTCEQTSYKGHPLTK

SEQ ID NO: 155258 - protein, 72 aa, Glycine max
  Clone ID: PAT_MRT3847_111219C.1.pep
TNASILSRDAVVSPTSLMSHLLVSQTKVEVSMPAVDETILRSDLTANPLALGDLRARVAVRSRSPCSRYAYR

SEQ ID NO: 155259 - protein, 496 aa, Glycine max
  Clone ID: PAT_MRT3847_11121C.1.pep
MLSSTFSDMRSGAARTGRILITRPNLILPGRTAWLGGSENFTACAFCGEADALKKTLGHERLTPVIVAILFSSPVMASALGTSSIAVLPSRYFSSSSSKPSIHTLSLTSGQNYGRKFYGGIGIHGIKGRAQLSVTNVATEVNSVEQAQSIASKESQRPVYPFSAIVGQDEMKLCLLLNVIDPKIGGVMIMGDRGTGKSTTVRSLVDLLPEIKVVAGDPYNSDPQDPEFMGVEVRERVLQGEELSVVLTKINMVDLPLGATEDRVCGTIDIEKALTEGVKAFEPGLLAKANRGILYVDEVNLLDDHLVDVLLDSAASGWNTVEREGISISHPARFILIGSGNPEEGELRPQLLDRFGMHAQVGTVRDAELRVKIVEERGRFDKNPKEFRDSYKAEQEKLQQQITSARSVLSSVQIDQDLKVKISKVCAELNVDGLRGDIVTNRAAKALAALKGRDNVSAEDIATVIPNCLRHRLRKDPLESIDSGLLVTEKFYEVFS

SEQ ID NO: 155260 - protein, 57 aa, Glycine max
  Clone ID: PAT_MRT3847_111220C.1.pep
QILFQSNLQLEKISKIINKKKKKIIKRKASIAYIITKEVRTLQKPCAIAVTQNKLST

SEQ ID NO: 155261 - protein, 44 aa, Glycine max
  Clone ID: PAT_MRT3847_111221C.1.pep
NLFEFNISFLFFTIFVYTLNTFTWSFVCIFFSLKSFSLYYQVMT

SEQ ID NO: 155262 - protein, 73 aa, Glycine max
  Clone ID: PAT_MRT3847_111222C.1.pep
TGEGWRYQGCDLSSNAMWTQTPTVALNTEAESTIRSTMLGHCLQNETMRDAELPNLQTPRTKNLVFSGQLRFA

SEQ ID NO: 155263 - protein, 243 aa, Glycine max
  unsure (1)..(243): unsure at all Xaa locations
  Clone ID: PAT_MRT3847_111223C.1.pep
SWDILQISSKIFYFTLKGLDLTVPLDKTQLDNSETNMDNKIKTSFAGARLHIENLFFLDSPSLKLKILNLEKDPACFCLWEDQPIDASQKKWTAGVSQLTLSLEASTGKLGHQNSLGWTAGLWRCVNLRDASIEVAMVTADGNPLLKVPPPGGIVRVGIACEQYLSNTSVEQLFFVLDLYAYFGRVSEKIEIAGKKKQLKDVRNKSFSGKLMDKIPSDTSVTLTLKNXQLQFLEPSSVNAEGM

SEQ ID NO: 155264 - protein, 62 aa, Glycine max
  Clone ID: PAT_MRT3847_111224C.1.pep
EKCSDERIRYQKTPSWLLNMIGVLESIIFRNKALMLWWGFLKFKPPSHKMVIKGLNLSVRCL

SEQ ID NO: 155265 - protein, 74 aa, Glycine max
  Clone ID: PAT_MRT3847_111225C.1.pep
KGKCEEKKLNLTNSSSNPCVCTTKYILHSPDQITEAWKPRFLDSHLFKPMTALRQKSYLSFNSNAGFRNGLSRV

SEQ ID NO: 155266 - protein, 115 aa, Glycine max
  Clone ID: PAT_MRT3847_111226C.1.pep
MSQPRFIVMTFPCLALVLLLHTLLPICNGLSVVDLINLSETEVMTKRVCTKALESVWQSQKWTQRAIGEFWKRDMVPCDRAGASYYNFHARPANPYNRGCEVITGCARGVQGIKT

SEQ ID NO: 155267 - protein, 128 aa, Glycine max
  Clone ID: PAT_MRT3847_111227C.1.pep
MSQPRFIVMAFPRLALVLLLHTLLPICNGLLVVDLNLSETAVMTKRVCTKSIGECLAEPEMDSESNRRVLEGVQHIKYISYETLKRDMVPCDRAGASYYNCHARPANPYNRGCEVITGCARGVQGIKT

SEQ ID NO: 155268 - protein, 218 aa, Glycine max
  Clone ID: PAT_MRT3847_111228C.1.pep
MAAIDDLSELADSMRQAAALLADEDVDESSNSRRPSTFLNVVALGNVGAGKSAVLNSLIGHPVLPTGENGATRAPICIDLQRDTSLSSKSIILQIDNKSQLVSASALRHSLQDRLSKSSSGKGRDQIYLKLRTSTAPPLKLVDLPGLDQRIMDESLVSEYAEHNDAILLVIVPAAQAPEIASSRALKYAKEYDGEGTRTIGIISKIDQAASDQKALAG

SEQ ID NO: 155269 - protein, 167 aa, Glycine max
  unsure (1)..(167): unsure at all Xaa locations
  Clone ID: PAT_MRT3847_111229C.1.pep
MAAIEDLSELADSMRQAAALLADEDVDESSTNSRRPSTFLNVVALGNVGAGKSAVLNSLIGHPVLPTGENGATRAPICIDLLRDTSLSSKSIILQIDNKSQQVSASALRRSLQDRLSKSSTGKGRDQIYLKLRTSTAPPLKLVDLPGXLDQRIMDESLVSEYAEHND

SEQ ID NO: 155270 - protein, 167 aa, Glycine max
  unsure (1)..(167): unsure at all Xaa locations
  Clone ID: PAT_MRT3847_11122C.1.pep
FGLAKIGPKEGEEHVATRVMGTFGYCAPESIXLIQHRQKSVLYSFGVVLEALMSITRVLGNANGTESQNLIFWAQPLFKDRTKFTLMADPLLKGQFPVKGLFQALAVAAMCLQEEPDTRPYMDDVVTALAHLAVHRVEEKDIAGESVICAGHVESFRAISSAGSGRT

SEQ ID NO: 155271 - protein, 92 aa, Glycine max
  Clone ID: PAT_MRT3847_111230C.1.pep
MSFYEGVLKLGENNHRTAFEFRFEELFSNEEWCALSLAERQKQEKAFRCEVNKREYIRMPFSSENDAKNKLFNIVYAYNAVKKFKQAEDSRN

SEQ ID NO: 155272 - protein, 64 aa, Glycine max
  Clone ID: PAT_MRT3847_111231C.1.pep
LAIGRDSQTWGTSRLSQCVHLEVLPHVVRTVLPSLLPAHSLSIERDSSPPILCSIKYLKRKKKE

SEQ ID NO: 155273 - protein, 67 aa, Glycine max
  Clone ID: PAT_MRT3847_111232C.1.pep
YQVIIQTRVSRFSVLGASILLLLHSLEQMSLFLQEPTDSHEYTRRRATFLIALRCAGNVVERHSEPS

SEQ ID NO: 155274 - protein, 86 aa, Glycine max
  unsure (1)..(86): unsure at all Xaa locations
  Clone ID: PAT_MRT3847_111233C.1.pep
TNNPDADGSGSVFRRRLQLRMYGNMYRIMFYTEFEGEEDPIFQRLRALNGQRRRSAHSLXYNYNDLITILRPCLKGNLDICKEVNE

SEQ ID NO: 155275 - protein, 84 aa, Glycine max
  unsure (1)..(84): unsure at all Xaa locations
  Clone ID: PAT_MRT3847_111234C.1.pep
RLRRDDRRGTSNLVLMPNLVLHGLILYLPALMRSQDSCTDSQAXYYASRDCYRNPRGACCFGKYRKTANRWKRGKSVNAMIEWK

SEQ ID NO: 155276 - protein, 72 aa, Glycine max
  Clone ID: PAT_MRT3847_111235C.1.pep
RTHAYVSSEFGSSSTTHCKVGSVVSVGWLRSKKAVDWRLFRNIFMAWFVTVPISGVISAAIMAVFKHIILPV

SEQ ID NO: 155277 - protein, 46 aa, Glycine max
  Clone ID: PAT_MRT3847_111236C.1.pep
MDDTGFALGYAGVNNVHYSINSQGSFSNICSTMISLQFGGAGLNRT

SEQ ID NO: 155278 - protein, 57 aa, Glycine max
  Clone ID: PAT_MRT3847_111237C.1.pep
LICSCLDWFLLHTFLHFFSSFSIEFNKTLSISWFPHIFTFVFLALMFRVGTRCCFLE

SEQ ID NO: 155279 - protein, 43 aa, Glycine max
  Clone ID: PAT_MRT3847_111238C.1.pep
STLSLNGFFFSVISRHSSVTCFIISINKKPCKHDFYYTRFVFV

SEQ ID NO: 155280 - protein, 209 aa, Glycine max
  Clone ID: PAT_MRT3847_111239C.1.pep
NSFYFLVSSYIYFCIFSFNVQGWHSRAARAARAARAVRVSNTLGMSHPRAAIYSFCVTMFQSLLLGIVFMTVIFLSKDEFAKIFTNSKDMIRAVADLAYLLGVSMVINSASHVMSGVAVGSGWQVMVGYINLACYYIVGLPIGIFLGFNQHLGVKGLWGGTMCGRILQMLVLLVIIWKTNWSKEVEQTAHRMRIWSINNLHSNDMGNVT

SEQ ID NO: 155281 - protein, 50 aa, Glycine max
  Clone ID: PAT_MRT3847_11123C.1.pep
HCIPNPFLHAYFIHSPKNLSSLDYPLNHQLLNLHYYQLYSTAIHTGAATS

SEQ ID NO: 155282 - protein, 47 aa, Glycine max
  Clone ID: PAT_MRT3847_111240C.1.pep
KNSGRIISVSIIQLAFTTNLIFDHFITNMLFEFINANLENLKRNASN

SEQ ID NO: 155283 - protein, 261 aa, Glycine max
  Clone ID: PAT_MRT3847_111241C.1.pep
MALGKYARVDGRRSSSWCSTVTVVVFVALCLVGVWMMTSSSVVPVRNGDEAQENKNQVKEQTEPTEVKEAVSEVSNSNMRQFEDNPGDLPEDATKGDSNVASEDNSNLSDKQEEKSEENPVERSSDDTKSEDVEDKKTEEEGSNTENESNSDSTENSKDSDETSTKESDSDENEKKSDSDESEKQSNDTDETTDTKIEEKVEESDNKESDENSSEKNINDDTKQKSSKEVYPSGAQSELQEESTAETGSWSTQAAQSKNEK

SEQ ID NO: 155284 - protein, 810 aa, Glycine max
  unsure (1)..(810): unsure at all Xaa locations
  Clone ID: PAT_MRT3847_111242C.1.pep
MALGKYARVDGRRSSSWCSTVTVVMFVALCLVGVWMMTSSSVVPVRNGDEAQENKNQVKEQAEVKEAVSEVSNSNTRQFEDNPGDLPEDATKGDSNVTFEDNSNSSDKQEKLEENPVERSSDDTKTEDVDDKKTEEEGSNTENESNSDSVENNKDSDETSTKESDSDESEKKPDSDDNKKSDSDESEKQSDDSDEPPNTRIEEKVXESDNKESDENFIEKNTNDDTKQKTSKEVYPSGAQFELHEESTTETGSWSTQAAESKNEKESQESSKQATGYKWKLCNVTAGPDFIPCLDNWKAIRSLRSTKHYEHRERHCPEEPPTCLVPVPEGYKRPIEWPKSREKIWYYNVPHTKLAKVKGHQNWVKVMGEYLTFPGGGTQFKHGALHYIDFIQETEPDIAWGKRTRVILDVGCGVASFGGFLFDRDVLAMSLAPKDEHEAQVQFALERGIPAISAVMGTKRLPFPGKVFDVVHCARCRVPWHIEGGKLLLELNRVLRPGGFFVWSATPIYQKLPEDVEIWKAMKTLTKAMCWEVVSISKDPVNGVGVAVYRKPTSNECYEQRSKNEPPLCPDSDDPNAAWNIQLQACLHKAPVSSKERGSKLPELWPARLIKVPYWLSSSQVGVYGKPAPQDFTADYEHWKRVVSKSYLDGMGIKWSNVRNVMDMRSIYGGFAAALRDLNVWVMNVVTIDSPDTLPIIYERGLFGIYHDWCESFSTYPRTYDLLHADHLFSKLKKRCNLAAVVAEADRILRPEGKLIVRDTVEIIEELESMARSMQWKVRMTYSKDKEGLLCVEKSKWRPKEQEKLEYAIA

SEQ ID NO: 155285 - protein, 43 aa, Glycine max
  Clone ID: PAT_MRT3847_111243C.1.pep
FNLYLLSPIRPSSTSLTLFFIFSLVNLHLSSPNYDMIQLHNRI

SEQ ID NO: 155286 - protein, 87 aa, Glycine max
  unsure (1)..(87): unsure at all Xaa locations
  Clone ID: PAT_MRT3847_111244C.1.pep
DSDSRACIAEAGAIPVLVRFLNAENPSLQVNAVTTILNMSILEANKTKIMETDGALNGIXEVLISGATWEAKANAAXTVFSLSGVAA

SEQ ID NO: 155287 - protein, 212 aa, Glycine max
  unsure (1)..(212): unsure at all Xaa locations
  Clone ID: PAT_MRT3847_111245C.1.pep
VGAVVAFGSXXXXXGGQXXISEVGLDESQXXCVMMHRDXXXRXXXCXYPSHVAVVLKRLNSSFRSHPCLLKNKLLYSPLGXIFILQPDEKTSPPHPLLPRGSAFYALDNTKGGYSPSVLRTFLNQPHPSGALSDAAAYGSEGTIVRDHDSSRYVKAINGVLRKHSKITVGRMRKQRINQLWPLLTSPSPHSWSHEQNLERCSLRTKEIVTGV

SEQ ID NO: 155288 - protein, 202 aa, Glycine max
  Clone ID: PAT_MRT3847_111246C.1.pep
RYLGIRLERLIANGTEAEAGLIPVFPSLTFPNHYSIATGLYPAYHGIINNHFTDPLSGEPFYMGNSHDPKWWLGEPLWETVVKNGLKAATYFWPGSEVNKGPWSCPFNYCRHYNSSVAFEDRVDAVLGYFDLPSDQIPDFMTLYFEDPDHQGHKVGADDPLITEAVARIDRMVGRLIRGLEERGVFEDVSIIMVGDHGMVGT

SEQ ID NO: 155289 - protein, 56 aa, Glycine max
  Clone ID: PAT_MRT3847_111247C.1.pep
QHSPSPYPHPYHSNHHHPHSSAQIHSNSNLISWKHHQHYSDAAAAGTGADPPHPGV

SEQ ID NO: 155290 - protein, 133 aa, Glycine max
  unsure (1)..(133): unsure at all Xaa locations
  Clone ID: PAT_MRT3847_111248C.1.pep
MEERVVPKRPREEETLEHKDASLDSYELLESSSKRHMPYNHILSLLESEEEDSTQDLSPLITALQQEITNCANDSDTLLSQHNLTNTTTTTNNNLESCSSSTTQYSSNMVEEHDDKEGVMRHLLEAXDDELGI

SEQ ID NO: 155291 - protein, 47 aa, Glycine max
  unsure (1)..(47): unsure at all Xaa locations
  Clone ID: PAT_MRT3847_111249C.1.pep
PNLKGKSLATLIQQGMAGGKNKPKLQALKDEXLSKAQLKTLSEAGIE

SEQ ID NO: 155292 - protein, 86 aa, Glycine max
  unsure (1)..(86): unsure at all Xaa locations
  Clone ID: PAT_MRT3847_11124C.1.pep
ERGIANLKSKEFXAAVEDLSPCVQLGRDNKSAXTYLXLSSIGEYKKSEEAHLKSLQIDRNFLEAWEHLTQVSIKVQPYYTDSCLLC

SEQ ID NO: 155293 - protein, 266 aa, Glycine max
  unsure (1)..(266): unsure at all Xaa locations
  Clone ID: PAT_MRT3847_111250C.1.pep
MRALLLLQLQALTSRVSLSSSTFVRGKSLWFDANRDNSQVRRIWSSTPVCMGRRSSKIAGRKGAQDAKKAKLYSRIGKEVVSAVKRGGPNVTSNSVLAAVLEKAKELDVPKDIVERNMKRASEKGQEAYIEKVYEVYGYGGVSMVVEVSTDKIHRSVAKIREVIKDYGGKMADSGSVTFKFKRVRVVNIKATNADKDQLLAIALDAGAEDVIEPPTYEDDTEEDRYYKIVGSSENFSSILSKLRSIDFEXDNSSELLPNTLVVVCF

SEQ ID NO: 155294 - protein, 61 aa, Glycine max
  Clone ID: PAT_MRT3847_111251C.1.pep
AVLYLRSCLFEVTPASYPTNADISDLLSSANRPDCPTQILPCRPGNSTVSSVPLIWARAMS

SEQ ID NO: 155295 - protein, 87 aa, Glycine max
  Clone ID: PAT_MRT3847_111252C.1.pep
SPASHFSLFCDGFVVGRNHSRWCGWWIALTFAIWKHRNLLIFQGIPFVSSKVMDDALFLAWSWSKARDKDFNIPFNHWSSNLMEAFA

SEQ ID NO: 155296 - protein, 86 aa, Glycine max
  Clone ID: PAT_MRT3847_111253C.1.pep
EGGPGFFGERGPPFKKGGVKGFKRAPTGFFRGAKKGFTGKGGSISRFFLKKKGPGYLGKLIFFLGGGKFNPHPFWVFFKGSARAYV

SEQ ID NO: 155297 - protein, 44 aa, Glycine max
  unsure (1)..(44): unsure at all Xaa locations
  Clone ID: PAT_MRT3847_111254C.1.pep
IPANNKGNHSIGWLFWLLTRMVLQMLGTIRPGXKWLXMVDLFLY

SEQ ID NO: 155298 - protein, 493 aa, Glycine max
  Clone ID: PAT_MRT3847_111255C.1.pep
MDRSEYQIEDDNLKLKVIFLPFLSISHIIPIVDMARIFAMHDVDVTIITTTSNAALFQSSISRGQNIRTHVMKFPAEQVGLPVGVETFSADTPPDMSPKIYAGLEILRPEIENLFKELQADCIVSDMFHPWTVDTAEKLGIPRIIFYAASVLSRCAVHSLEQHEVHTKVECDSEKFTLVGLPHELEMTRLQLPDWMRKPNMYAMLMKVVNDSARKSFGAVFNSFHELEGDYEEHYKRVCGTKCWSLGPVSMWVNHDDLDKVERGHHVKTQGEEEGWLEWLNKKKEGSVLYVSFGSLNRFPSDQLVEIAHALESSGYDFIWVVARDNDEGENSFMEEFEERVKGSKKGYLIWGWAPQLLILENRAIGGMVSHCGWNTVVESMNVGLPMVTWPLFAEHFFNEKLVVDVLKIGVPVGTKEWRNWNEFGSEVVTREEIEKAIGVVMDGGEEGEGMRQRAKALSNAAKKAIKLGGSSHNNMMELIRELKELKLRRKPQ

SEQ ID NO: 155299 - protein, 80 aa, Glycine max
  unsure (1)..(80): unsure at all Xaa locations
  Clone ID: PAT_MRT3847_111256C.1.pep
HXSLPXSXSSSAHHARXYFXEGLLSTXAAVXPIVAXXXAAGFSSRGLLLTAFLLTWASDDXXRRGLGTPXTTSXWKWXCG

SEQ ID NO: 155300 - protein, 74 aa, Glycine max
  Clone ID: PAT_MRT3847_111257C.1.pep
ILGITQHIWAFLNFKHRTKPVLRKVVIYPGYNEGGLIANSCRILSGNSIVTERAVPLAPNKNKVHVKTISGLEP

SEQ ID NO: 155301 - protein, 217 aa, Glycine max
  unsure (1)..(217): unsure at all Xaa locations
  Clone ID: PAT_MRT3847_111258C.1.pep
MVCIRKATVKDLLAMQACNLFCLPENYQMKYYLYHILSWPQLLYVAEDYNGRIVGYVLAKMEEETTDCHGHITSLAVLRTHRKLGLATKLMTAAQNAMEQACHCPLSFPLDATXYLFVWILSLTQVFGAEYVSLHVRKSNRAAFNLYTETLGYKIHDVEAKYYADGEDAYDMRKQLKGKQHHHHHHNHHHHHHHRHEHGGGCVFRGGPRGMLQKPPD

SEQ ID NO: 155302 - protein, 100 aa, Glycine max
  Clone ID: PAT_MRT3847_111259C.1.pep
AAGAHHLPPPCWCILCPHTDSYPQAQANGFLKGSLHLRGGRNPPPQGPKFPTQKTPNRPLPGPRREGDKDKRRKRPAMDKQKVQANIALSSFIISPTTQN

SEQ ID NO: 155303 - protein, 88 aa, Glycine max
  Clone ID: PAT_MRT3847_11125C.1.pep
ISAYECMNKRESANLRKFQLLASDVVSVFDLLLRYQSPMISLSVKSKGKTKNNIKTFSSISISFSDLLTLQIAILLLIFGSYLHTLFS

SEQ ID NO: 155304 - protein, 69 aa, Glycine max
  Clone ID: PAT_MRT3847_111260C.1.pep
KLKIPKKVAFLIWRAMRNRLPTKDNLRMHGIIVEESEAVCPFCHQQCETLNHISITCEVVHKLWMECYR

SEQ ID NO: 155305 - protein, 78 aa, Glycine max
  Clone ID: PAT_MRT3847_111261C.1.pep
MAETAVAFLLDHLVKLLSEEATILGKVHKEVEEIKNQLERINSYIRDAEKKQLSDDQSSVKSWLKSLRNVAFEMEDVI

SEQ ID NO: 155306 - protein, 80 aa, Glycine max
  unsure (1)..(80): unsure at all Xaa locations
  Clone ID: PAT_MRT3847_111262C.1.pep
LELEXSCXXGLSLFXINXDXVSRALQFPLAILXLIXXTPXSGAFGKXXTNVXTAIXRXXSLNLXQGSVGQXNMIMXRFXR

SEQ ID NO: 155307 - protein, 220 aa, Glycine max
  unsure (1)..(220): unsure at all Xaa locations
  Clone ID: PAT_MRT3847_111263C.1.pep
MESMESCVPPGFRFHPTDEELVGYYLRKKVFFXKIDLDVIREIDLYRIEPWDLQERCRIGYEEQNEWYFFSHKDKKYPTGTRTNRATMAGFWKATGRDKAVYERAKLIGMRKTLVFYKGRAPNGQKSDWIMHEYRLESDENGPPQEEGWVVCRAFKKKTTGQTKTINIEGWESSYFYDEASGATSTLVDPIELISRQSQSFLAHNFMCKQELEADNLTCM

SEQ ID NO: 155308 - protein, 148 aa, Glycine max
  unsure (1)..(148): unsure at all Xaa locations
  Clone ID: PAT_MRT3847_111264C.1.pep
MKKSTLCSKRPGSCTNTRPGTPNYLDATDAMHKGXRTERAPLHTSAARKPDGAILMSLNNGRTLPSKWEXAERWILMSDNRDSRTRRDSLPAPNRRRKSKRGPLGPPGAAADAYYSMNSHAMPYLERAKYKSFIERSVYAAVKIPTAA

SEQ ID NO: 155309 - protein, 49 aa, Glycine max
  Clone ID: PAT_MRT3847_111265C.1.pep
VENLIDLPLMFPMHDTKVLVTNLSSNINNLDMDKPKAVKFSQPYHPLLN

SEQ ID NO: 155310 - protein, 184 aa, Glycine max
  Clone ID: PAT_MRT3847_111266C.1.pep
KSLVAALIPLQKDSEVPSHVLMGIPDGTAGFPLSPLGEACLRMDLTALHEVMEKIGYKDDEGAATELSFQMWTNQMQETLNSRKKGDAAFRHKDFKTAIDSYTMFIDVGTMVSPTIYARRSLCYLMSNMPDEALNDAMQAQVISPVWYIAFYLQAVALLALGKENDAQVALKEGSSLETKKNTN

SEQ ID NO: 155311 - protein, 37 aa, Glycine max
  unsure (1)..(37): unsure at all Xaa locations
  Clone ID: PAT_MRT3847_111267C.1.pep
VLSISNTGSSSFVSXNDSHMTXXLNKLXXCXPXRKIY

SEQ ID NO: 155312 - protein, 274 aa, Glycine max
  Clone ID: PAT_MRT3847_111268C.1.pep
MRAKLFVFPIRGRNWCFSRTIDHSLSASHASSQSPSTLKDLWTNINVGDKPLNTKTELFVDYIANKMNNAWIGLEKAPEGSFKNKIHGLGLRLLSRVKPSEIFLKSISKEITSVEIIYPSSLNAQLVRRRLRHIAVRGAVIHRNYLYGLVSLIPLTSALSILPLPNVPFFWVLFRTYSHWRALQGSERLFQLVSDNSKTSNTCTYEKKTEHKESKSQRHSSNEPCWVLRPSKELENLVHLEDGQESLSQHAIINICKIYDLNPVDVIKYEKSVF

SEQ ID NO: 155313 - protein, 38 aa, Glycine max
  unsure (1)..(38): unsure at all Xaa locations
  Clone ID: PAT_MRT3847_111269C.1.pep
KIFKPACPKPXSYAYDHPTTIAPCPKATYFLPFSPHRP

SEQ ID NO: 155314 - protein, 58 aa, Glycine max
  Clone ID: PAT_MRT3847_11126C.1.pep
LKDREGVLRRWHGGGGRSPRRYMLAGKRSRAVRWKRQQVVIPYFLHSLINVGRRVGVV

SEQ ID NO: 155315 - protein, 213 aa, Glycine max
  unsure (1)..(213): unsure at all Xaa locations
  Clone ID: PAT_MRT3847_111270C.1.pep
MGKVLTLICGFVTIERMVARVXLKRDNGELDVVDDPFITTDYMTYLCKYNSVHGHWXHHDVTANDYNTLLFCDWADTVFEXRNPEEIPCEYTAADIIVESTGVFTDKDKAAAHLNAGAKKVIISAPSKDAPMFDVGVNEHQYKPELDIISNASCTTNCLAPLAKAINDRFDIDEGLMTTVHSITATHKTVDEPSAKDWRGGRAASFNIIPSIT

SEQ ID NO: 155316 - protein, 81 aa, Glycine max
  unsure (1)..(81): unsure at all Xaa locations
  Clone ID: PAT_MRT3847_111271C.1.pep
MGKVKIGINGFGRIGRLVARVALERDDVXLVAVNDPFITTDYMTYMFKYDSVHGHWKHHDVTLKDEKTLLXVTASTIFDKL

SEQ ID NO: 155317 - protein, 338 aa, Glycine max
  Clone ID: PAT_MRT3847_111272C.1.pep
MGKVKIGINGFGRIGRLVARVALQRDDVELVAVNDPFITTDYMTYMFKYDSVHGHWKHHDVTVKDEKTLLFGDKPVTVFGHRNPEEIPWKSTGADIIVESTGVFTDKDKAAAHLKGGAKKVIISAPSKDAPMFVVGVNEHEYKPELDIISNASCTTNCLAPLAKVINDRFGIVEGLMTTVHSITATQKTVDGPSAKDWRGGRAASFNIIPSSTGAAKAVGKVLPALNGKLTGMAFRVPTVDVSVVDLTVRLEKEASYDEIKNAIKEESEGKLKGILGYTEDDVVSTDFVGDSRSSIFDAKAGIALNKNFVKLVSWYDNEWGYSSRVIDLLVIVAKKSF

SEQ ID NO: 155318 - protein, 341 aa, Glycine max
  unsure (1)..(341): unsure at all Xaa locations
  Clone ID: PAT_MRT3847_111273C.1.pep
MGKVKIGINGFGRIGRLVARVALQRDDVELVAVNDPFITTDYMTYMFKYDSVHGHWKHHDVTVKDEKTLLFGDKAVTVFGHRNPEEIPWGSTGADIIVESTGVFTDKDKAAAHLKGGAKKVIISAPSKDAPMFVVGVNEHEYKPELDIISNASCTTNCLAPLXAKVINDRFGIVEGLMTTVHSITATXQKTVDGPSAKDWRGGRAASFNIIPSSTGAAKAVGKVLPALNGKLTGMAXFRVPTVDVSVVDLTVRLEKEASYDEIKNAIKEESEGKLKGILGYTEDDVVXTDFVGDNRSSIFDAKAGIALNKNFVKLVSWYDNEWGYSSRVIDLLVIVAKKSF

SEQ ID NO: 155319 - protein, 59 aa, Glycine max
  Clone ID: PAT_MRT3847_111274C.1.pep
GDGELEHYCSKEGSLVPLPAARSMSAGAALSCENQMRYEADSEEFILALRVCISAAYRG

SEQ ID NO: 155320 - protein, 73 aa, Glycine max
  Clone ID: PAT_MRT3847_111275C.1.pep
KLPTANQTKSRVVIRPLDPSVCTQLSPEETNTFRYWLTLCAWRPYADYHCHNHNQLKKKFLGYGSRVPYRYII

SEQ ID NO: 155321 - protein, 338 aa, Glycine max
  Clone ID: PAT_MRT3847_111276C.1.pep
MGKVKIGINGFGRIGRLVARVALQRDDVELVAVNDPFITTDYMTYMFKYDSVHGHWKHHDVTVKDEKTLLFGDKPVTVFGHRNPEEIPWGSTGADIIVESTGVFTDKDKAAAHLKGGAKKVIISAPSKDAPMFVVGVNEHEYKPELDIISNASCTTNCLAPLAKVINDRFGIVEGLMTTVHSITATQKTVDGPSAKDWRGGRAASFNIIPSSTGAAKAVGKVLPALNGKLTGMAFRVPTVDVSVVDLTVRLEKEASYDEIKNAIKEESEGKLKGILGYTEDDVVSTDFVGDSRSSIFDAKAGIALNKNFVKLVSWYDNEWGYSSRVIDLLVFVAKKSF

SEQ ID NO: 155322 - protein, 338 aa, Glycine max
  Clone ID: PAT_MRT3847_111277C.1.pep
MGKVKIGINGFGRIGRLVARVALQRDDVELVAVNDPFITTDYMTYMFKYDSVHGHWKHHDVTVKDEKTLLFGDKPVTIFGHRNPEEIPWGSTGADIIVESTGVFTDKDKAAAHLKGGAKKVIISAPSKDAPMFVVGVNEHEYKPELDIISNASCTTNCLAPLAKVINDRFGIVEGLMTTVHSITATQKTVDGPSAKDWRGGRAASFNIIPSSTGAAKAVGKVLPALNGKLTGMAFRVPTVDVSVVDLTVRLEKEASYDEIKNAIKEESEGKLKGILGYTEDDVVSTDFIGDSRSSIFDAKAGIALNKNFVKLVSWYDNEWGYSSRVIDLLVFVAKKSL

SEQ ID NO: 155323 - protein, 45 aa, Glycine max
  Clone ID: PAT_MRT3847_111278C.1.pep
KIFELTLNTLSKQLLPILHVLQQNLLRQIFSCYKRSTSLHDLHYT

SEQ ID NO: 155324 - protein, 116 aa, Glycine max
  Clone ID: PAT_MRT3847_111279C.1.pep
MTDYWRNIGFFICVLSIFPLVCFCATFVPVDNYLIDCGATASTSVGTRNFIADNNKDLLSTQEDILATTSLKSVTSSSDDLPLYQTARVFTGSSKYTFKIKQKGRHWIRLYFFPHL

SEQ ID NO: 155325 - protein, 113 aa, Glycine max
  unsure (1)..(113): unsure at all Xaa locations
  Clone ID: PAT_MRT3847_11127C.1.pep
VLCKRDAGWFVHSHDVLGGHTLRNLLGGVVKLQEVQXNHDEDSSQPTRPNLAFLXQNRFNYFETPTGLLNTSYDGXEVQQSKVPHSDDPHVYRNDCYANYAHWNSYQIEQLQD

SEQ ID NO: 155326 - protein, 107 aa, Glycine max
  Clone ID: PAT_MRT3847_111280C.1.pep
SVIPTYYPCEIPRGNLKYHPRIRRATMAAEFLEETGGLAVQHQGSDSWVWKHDSNGIYSTRSAYKFLLGEVRGESEDGSFSLLWKLKYHPRQRYLHGGSSKTVYQRS

SEQ ID NO: 155327 - protein, 183 aa, Glycine max
  unsure (1)..(183): unsure at all Xaa locations
  Clone ID: PAT_MRT3847_111281C.1.pep
MAKPRKPKNNEDPKPENSGAVVHHQKLCLSIDIDKRQVHGYTELEIAVPEIGIVGLHAENLGIESVCVDGEPTEFEYYPHHQQQGEDEKRFSSVCSPSSAADAAVSVYMSALEKELVPNLLINCCKPSKAESEQQQEQQPTSENGFHSSAEPKQNVRTVRIDYWIEKAETGIHFRNXLLHTDN

SEQ ID NO: 155328 - protein, 84 aa, Glycine max
  Clone ID: PAT_MRT3847_111282C.1.pep
VAPLVGQGFFFLSPPRLFFFFFCEFLFFSGTPFSREFLNLFFVSLYVKMVGLPETVRNFLVGPPVRKKKKKFTKKKKKKKKSLP

SEQ ID NO: 155329 - protein, 34 aa, Glycine max
  Clone ID: PAT_MRT3847_111283C.1.pep
GCEKTTEGVPINKLIRFEGNFGINTVGLQRNHNC

SEQ ID NO: 155330 - protein, 65 aa, Glycine max
  Clone ID: PAT_MRT3847_111284C.1.pep
LCYKKTGADQIVTVWSAPNYCYRCGNVAAILELDGNLTKQFRVFEAAPQESRGTPAKKPAPDYFL

SEQ ID NO: 155331 - protein, 34 aa, Glycine max
  Clone ID: PAT_MRT3847_111285C.1.pep
CEVQVHMIGTRTTMILIYYHHHSYESLHKILARS

SEQ ID NO: 155332 - protein, 45 aa, Glycine max
  Clone ID: PAT_MRT3847_111286C.1.pep
RLREDDRRDCQLSPTCLFYIFFILFIIYPSHKVKLLTAVNWVQFF

SEQ ID NO: 155333 - protein, 351 aa, Glycine max
  Clone ID: PAT_MRT3847_111287C.1.pep
MDGGCVTDETTTSSDSLSVPPPSRVGSVASAVVDPDGCCVSGEAESRKLPSSKYKGVVPQPNGRWGAQIYEKHQRVWLGTFNEEDEAARAYDIAALRFRGPDAVTNFKPPAASDDAESEFLNSHSKFEIVDMLRKHTYDDELQQSTRGGRRRLDADTASSGVFDAKAREQLFEKTVTPSDVGKLNRLVIPKQHAEKHFPLSGSGDESSPCVAGASAAKGMLLNFEDVGGKVWRFRYSYWNSSQSYVLTKGWSRFVKEKNLRAGDAVQFFKSTGPDRQLYIDCKARSGEVNNNAGGLFVPIGPVVEPVQMVRLFGVNLLKLPVPGSDGVGKRKEMELFAFECCKKLKVIGAL

SEQ ID NO: 155334 - protein, 60 aa, Glycine max
  unsure (1)..(60): unsure at all Xaa locations
  Clone ID: PAT_MRT3847_111288C.1.pep
MTAHRKDGHSSIYYLGRSAGPVHHRRQDCSHWCTPXVPDTWNELLYALLLKHETAHRGNL

SEQ ID NO: 155335 - protein, 255 aa, Glycine max
  Clone ID: PAT_MRT3847_111289C.1.pep
DAVTNFKPLAGADDAEAEFLSTHSKSEIVDMLRKHTYDNELQQSTRGGRRRRDAETASSGAFDAKAREQLFEKTVTPSDVGKLNRLVIPKQHAEKHFPLSGSGGGALPCMAAAAGAKGMLLNFEDVGGKVWRFRYSYWNSSQSYVLTKGWSRFVKEKNLRAGDAVQFFKSTGLDRQLYIDCKARSGKVNNNAAGLFIPVGPVVEPVQMVRLFGVDLLKLPVPGSDGIGVGCDGKRKEMELFAFECSKKLKVIGAL

SEQ ID NO: 155336 - protein, 149 aa, Glycine max
  Clone ID: PAT_MRT3847_11128C.1.pep
KYPSIILIITNDQAVGETPNPNNKKPTLLKNHKIYYREGRKKHTTTEHTKPKQTKALTKKTELKQNKPQTLPQKTKKTLEARPAHKKKKTTPQPRNKENSKKPMPAPQPGSQVFNKKQTLTYCARHGPPIGHILTEKNPPPPQKKKKNS

SEQ ID NO: 155337 - protein, 59 aa, Glycine max
  Clone ID: PAT_MRT3847_111290C.1.pep
CFSIVPSAFARILTRAWVLALACFAIIIRGLFFVCAPCLSHIGERMAYSFRSCPSRCVS

SEQ ID NO: 155338 - protein, 153 aa, Glycine max
  unsure (1)..(153): unsure at all Xaa locations
  Clone ID: PAT_MRT3847_111291C.1.pep
FRCPCTKAMTMPFNPYPCAAAWSLESLKRSGSYWDIIRGTGWTDTPMHDVXVTIDRLIPSQECVPRTYCVENPQNPYVLNRWMGKLSFPQGTFQQXKRLPLSIGGGAGAQNVIVMNMPNAVFSMRTYAVGDVGYEVLKMTAAYIKGTASFLCP

SEQ ID NO: 155339 - protein, 456 aa, Glycine max
  Clone ID: PAT_MRT3847_111292C.1.pep
MASKPGILTNWPWKPLGCFKWVILTPWIAHSTYSFLVSDAKERDLGYFLIFPYMMVRMLHDQVWITLSRHRTAKGKNRIVDKGIEFEQVDRESNWDDQILFNGIIFYIGYMLVPESSHMPLWRTDGVLITALLHAGPVEFLYYWLHRALHHHFLYSRYHSHHHSSIVTEPITSVIHPFAEHIAYFVLFAIPLYTTVVARTASIASYAGYLAYIDFMNNLGHCNFECIPKAIFTAFPFLKYLMYTPSFHSLHHTQFRTNYSLFMPIYDYIYGTMDKTTDTTYEIALKREESSPDVVHLTHLTTPESIYHLRLGFASLASRPQSSTWYLYLMWPFTLWSILVTWFYGQTFVMERNAFKMLNLQSWVIPRFHVQYLFKWQSETLNKLIEEAILQAELSKVKVLSLGLSNQGDLLNKYGELYIKKYPELKIKNVDGSSLSVAIVLNSIPKEASQVLFCGK

SEQ ID NO: 155340 - protein, 39 aa, Glycine max
  Clone ID: PAT_MRT3847_111293C.1.pep
RSHQLNVDYAPRALISLLLSQVGKMRLQMVVIEEGILLN

SEQ ID NO: 155341 - protein, 65 aa, Glycine max
  unsure (1)..(65): unsure at all Xaa locations
  Clone ID: PAT_MRT3847_111294C.1.pep
SCHTKINSILSALCGHLASPWMHPYGCXLKPRCLEHCTLESQCQGIVHYNLYPACAIAQDQYGNY

SEQ ID NO: 155342 - protein, 86 aa, Glycine max
  Clone ID: PAT_MRT3847_111295C.1.pep
DTSSNQSSPYIDFHQSFQSLPNFFFLLTVSILFAIFYVKHLKDLFCILPLVYENSITLILLHLLMQSKIKFLSSRSDSRRIKEEDR

SEQ ID NO: 155343 - protein, 79 aa, Glycine max
  unsure (1)..(79): unsure at all Xaa locations
  Clone ID: PAT_MRT3847_111296C.1.pep
RTVIHXRHESLMEQIPAVDKLNATKVNKVAENVNRTQSGVGDSKLLTDGKXLEGKNTPVYXVSAGENHVVQLPLMAHEE

SEQ ID NO: 155344 - protein, 58 aa, Glycine max
  Clone ID: PAT_MRT3847_111297C.1.pep
RYAVNKFPMSLGLQVAATVKRPVATGAKNRNIIAAESDTLVDLTVAVCYIPITLTVEV

SEQ ID NO: 155345 - protein, 74 aa, Glycine max
  Clone ID: PAT_MRT3847_111298C.1.pep
TNTGHSLDDVRYKSVKLTKTLQGWVNQQDLNEGYDTVTVIPKQSLLRHTKVASLLNEFPLRPRVWLPHVGEDLD

SEQ ID NO: 155346 - protein, 51 aa, Glycine max
  Clone ID: PAT_MRT3847_111299C.1.pep
VNMTNLVKGPIRYLQISFVLEVKMVVLRYNQCSTHCKTNSVHSLGKLVFTH

SEQ ID NO: 155347 - protein, 103 aa, Glycine max
  Clone ID: PAT_MRT3847_11129C.1.pep
TLQFMPLLHRHLLPPICFVLHHASLMLLVTSSVLCCYHRQFVPLKRSTIALELMWRRLLHKSLEKYTSVRCSPWWSETQSLVSNKTLNKQLFTVGIFSNFNSS

SEQ ID NO: 155348 - protein, 149 aa, Glycine max
  unsure (1)..(149): unsure at all Xaa locations
  Clone ID: PAT_MRT3847_1112C.1.pep
IPLLLPXLLILCTGSGVSYEQTQSFLASVAAEQTHRITCSXTRIGXSCATWLQQKPVQARCLLIYKDSERSSGIPERFSGSSSWTTVTLTISGAHADDEADYYCFCVVDDNLRLFGGGTKLTVLGQPKAAPSVTLFPPSSEELQANKAT

SEQ ID NO: 155349 - protein, 242 aa, Glycine max
  Clone ID: PAT_MRT3847_111300C.1.pep
MANTNLEDVPSLDLMTELLRRLKCSSKPDKRLILIGPPGSGKGTQSPIIKDEYCLCHLATGDMLRAAVAAKTPLGVKAKEAMDKGELVSDDLVVGIIDEAMKKPSCQKGFILDGFPRTVVQAQKLDEMLQNQGVKVDKVLNFAIDDAILEERITGRWIHPSSGRTYHTKFAPPKVLGVDDVTGEPLIQRKDDTAAVLKLRLEAFHKQTEPVIDYYSKKGLVANLHAEKPPKEVTVEVEKVLS

SEQ ID NO: 155350 - protein, 45 aa, Glycine max
  unsure (1)..(45): unsure at all Xaa locations
  Clone ID: PAT_MRT3847_111301C.1.pep
GSLXGXKXGPRVXXXXXLEXLXKPXIMGLFNVXAGLXSPKXXLRA

SEQ ID NO: 155351 - protein, 851 aa, Glycine max
  unsure (1)..(851): unsure at all Xaa locations
  Clone ID: PAT_MRT3847_111302C.1.pep
MAPDPNRAGTSASANAAKDDAVAKKKVENEDLSDEDLALKQQLELYVERVQDPDQGLQKVALESMRQEIRTSTSSMTSVPKPLKFLRPHYGTLKTYYETMAESDLKKYLADILSVLALTMSAEGERESLKYRLLGSEGDIGSWGHEYVRNLAGEIAQEYAKRQSEEAPIDDLMELVQQIVAFXMKHNAEPEAVDLLMEVEDLDMLRXHVDKTNFKRTCLYLTSSARYLPGPDDMLVLDIAYSIYKQFEKYPNALQIALFMDNMQHVRESVXTRCNDELREEAVLFLVITTGIPAXLFCVRIAQGLVHLGKGLLTLNPYHSDRFLLSPTALAGLITMLHACLDMKAIVLGKYHYVLYFLVLAMQPRMLLTVDENLKPLSVPVRVGQAVDVVGQAGRPKTITGFQTHSTPVLLAAGDRAELATEKYIPLSPILEGFVIXEGESRLQGRVRGTTVVMLFSFVPSFREKLTGVLNDSKASLEVLAFAAISLGLIYVGSCNEEIAQAIIYTLMDRSESELGEPLTRLLPLGLGLLYLGKQDSVEATAEVSKTFNEKIRKYCDMTLLSCAYAGTGNVLKVQNLLGHCSQHLDKGETHQGPAVLGIAMVAMAEELGLEMAIRSLEHLLQYGEQNIRRAVPLALGLLCISNPKVNVMDTLSRLSHDTDSEVAMAAVISLGLIGAGTNNARIAGMLRNLSSYYYKDTSLLFCVRIAQGLVHLGKGLLTLNPYHSDRFLLSPTALAGLITMLHACLDMKAIVLGKYHYVLYFLVLAMQPRMLLTVDENLKPLSVPVRVGQAVDVVGQAGRPKTITGFQTHSTPVLLAAGDRAELATEKYIPLSPILEGFVILKENPDYREE

SEQ ID NO: 155352 - protein, 210 aa, Glycine max
  unsure (1)..(210): unsure at all Xaa locations
  Clone ID: PAT_MRT3847_111303C.1.pep
MASSDPISSRHYTYNRKQKSLGLLCTNFLSLYNRDTVHLIGLDDAATRLGVERRRIYDIVNVLESIGVLSRKAKNQYTWRGFAAIPLTLQDLKEEGLKENSNSLRGPGNHDKVSDDEDDEETQSNPAATGSQSDKLNPNSTLAKPLKNRHQLLRFENRREKSLALLTQNFVKLSGCSNAELISLDXGCKLLLGDAHNTSVMRTKGRRLYD

SEQ ID NO: 155353 - protein, 189 aa, Glycine max
  Clone ID: PAT_MRT3847_111304C.1.pep
MSVIGAYSHFLYGEVYQRDQQCPQYLVSGRGYFFSHKSGCGNIWVGSRKSEGKIIKRRNFRVEAMWPDLSRPSELEMEEINDSEQLDQILVHAQQNSQPILIDWMATWCRKCIYLKPKLEKLAPEYQDKVKFYFVDVNKVPQTLVKRGNISKMPTIQLWKDGEMKEEVIGGHKAWLVIEEVKEMIQKYL

SEQ ID NO: 155354 - protein, 350 aa, Glycine max
  unsure (1)..(350): unsure at all Xaa locations
  Clone ID: PAT_MRT3847_111305C.1.pep
METLCSALVFPSFRITTSAFSKCGIRASIAVEQQTSQTKVALLKIGTRGSPLALAQAYETRDKLMASHAELAEEGAIQIVIIKTTGDKILSQPLADIGGKGLFTKEIDEALINGDIDIAVHSMKDVPTYLPDKTILPCNLPREDVRDAFISLSAASLADLPSGSIVGTASLRRKSQILHRYPSLNVEENFRGNVQTRLRKLSEGIVQATLLALAGLKRLNMTEXVTSILSIDDMLPAVAQGAIGIACRSNDDKMAEYLASLNHEETRLAVSCERAFLEKLEGSCRTPIAGYASRNEDGNCLFRGLVASPDGIRVLETSRIGPYAFEDMIKMGKDAGEELLSRAGPGFFSR

SEQ ID NO: 155355 - protein, 75 aa, Glycine max
  Clone ID: PAT_MRT3847_111306C.1.pep
PRVRRSFLFASWLCPHCGHGLRQSPAVVRVILVALPCHRTVTSFPLLWLFSTAVNLPSLYECLIFGNNSSCITCA

SEQ ID NO: 155356 - protein, 49 aa, Glycine max
  Clone ID: PAT_MRT3847_111307C.1.pep
TAFFCRSAQRTGRLVQHWVTPHCFHCLRLLQKKHFYLINVYLFFFNFIF

SEQ ID NO: 155357 - protein, 118 aa, Glycine max
  unsure (1)..(118): unsure at all Xaa locations
  Clone ID: PAT_MRT3847_111308C.1.pep
RELHHNDIFIFGIDNTVLSNIPYYEKHGYGVEEXNETLYDEWVNMGDTPALPETLNYYNKLLPSDFKTGFLSGXFLDKMAVTDANLKMAGLHTWEQLCPXDPYLITSNALSYELSVRE

SEQ ID NO: 155358 - protein, 73 aa, Glycine max
  Clone ID: PAT_MRT3847_111309C.1.pep
KSHLFQFLFILFSFFFFLFFFFFFFFLFFFFFFFHFLTILYHISLILYHPSKLKKYTKHIIQLTSTRIASVIL

SEQ ID NO: 155359 - protein, 68 aa, Glycine max
  unsure (1)..(68): unsure at all Xaa locations
  Clone ID: PAT_MRT3847_11130C.1.pep
ETAGVELPFSFRGGSCSTCAGKMSSGEVDQSEGSFLXENQMGEGYVLTCISYPKADCVIHTHKEEELY

SEQ ID NO: 155360 - protein, 111 aa, Glycine max
  unsure (1)..(111): unsure at all Xaa locations
  Clone ID: PAT_MRT3847_111310C.1.pep
GILGDLYEEIMENNHPALEDHRGPLATLFEGCKPCGKLGDHPVKRCLNQMDRPYNFGENQISQMWGLTXKPLFTPRGKRGRNYPTHPFEEKEHLGLLHPFFKKIKNLPFLF

SEQ ID NO: 155361 - protein, 60 aa, Glycine max
  Clone ID: PAT_MRT3847_111311C.1.pep
RVSKALDDSRGEHARHLEIPPLRNIMVVHTVCLLLHFLQAISVALIARTSFTSDLIIILL

SEQ ID NO: 155362 - protein, 120 aa, Glycine max
  unsure (1)..(120): unsure at all Xaa locations
  Clone ID: PAT_MRT3847_111312C.1.pep
ARGLLVLFVFLQATAILMRSIRLIQSALRPLAYSERMACFGVETCGAEEDXSLHADFIDLCQKGGDASKKAXFSLATSDIDVSGASAESAPKRLTFEEMHRRTYLGVNGTGSTNLCSTIG

SEQ ID NO: 155363 - protein, 63 aa, Glycine max
  Clone ID: PAT_MRT3847_111313C.1.pep
DLRNLADGENMPDFCILQEPHSHVKVNIGGKIIPERRQGNMIRGNSSQNRDDVLRLLSQVVFT

SEQ ID NO: 155364 - protein, 48 aa, Glycine max
  Clone ID: PAT_MRT3847_111314C.1.pep
TDHYLQSYVNLFTNLIESTTVLSFESRQKQFKSYLCNLDYKYAEISSC

SEQ ID NO: 155365 - protein, 97 aa, Glycine max
  unsure (1)..(97): unsure at all Xaa locations
  Clone ID: PAT_MRT3847_111315C.1.pep
VLFFNPVSYTYVPCNPPPYTAIISPVPKPTYPKQANSPKDTIKISVCADVXGSDNCRLWKPPKYPCCNLIEGLAHLXAALCLYTALNNTVFALLMKI

SEQ ID NO: 155366 - protein, 61 aa, Glycine max
  Clone ID: PAT_MRT3847_111316C.1.pep
VVTFANFTCNQTLLEAVEGLDRIDIIYSVIGLGGQRSSFMQELALKNGSAPELKITGFVLP

SEQ ID NO: 155367 - protein, 50 aa, Glycine max
  Clone ID: PAT_MRT3847_111317C.1.pep
FSSPLQSQPISPLPLLIFRRAVNQGDPVTWHCRLAQPGNHKSLAKSPHNK

SEQ ID NO: 155368 - protein, 62 aa, Glycine max
  Clone ID: PAT_MRT3847_111318C.1.pep
LKHYGNIKVLQDTLFARVSAAQTDGVSETSRASHWLVHTNIILSTSQNVTTLHITQRHYYEL

SEQ ID NO: 155369 - protein, 41 aa, Glycine max
  Clone ID: PAT_MRT3847_111319C.1.pep
LIHHHLTGHCPRKIHISEEYYSEYFANMPLPKLPKWLIGPR

SEQ ID NO: 155370 - protein, 71 aa, Glycine max
  Clone ID: PAT_MRT3847_11131C.1.pep
IQVQTYLCISKYNLNSKYNFKINLQSYNIFSNLKPTTHSIGYFFGFSDYSQFLESFFFSVLIGLIGLNTSS

SEQ ID NO: 155371 - protein, 49 aa, Glycine max
  Clone ID: PAT_MRT3847_111320C.1.pep
IADLSLSQTSVRSLPFNFGYCELVLEIPGQPESPGLCWKGHRSRSTRIP

SEQ ID NO: 155372 - protein, 48 aa, Glycine max
  Clone ID: PAT_MRT3847_111321C.1.pep
TEFGLRWAYTTLPICLYIQGPQQVLPLYLLRLVTPFSVSSLSAPEFNT

SEQ ID NO: 155373 - protein, 35 aa, Glycine max
  Clone ID: PAT_MRT3847_111322C.1.pep
NGCFTNFIYKILIQDRDGYFTNHNFNLVLTVLSNI

SEQ ID NO: 155374 - protein, 47 aa, Glycine max
  Clone ID: PAT_MRT3847_111323C.1.pep
HACAQVRASTEGDSRVNIITCLEERSKPHTQVYLVIFDLLWRSCYVI

SEQ ID NO: 155375 - protein, 55 aa, Glycine max
  Clone ID: PAT_MRT3847_111324C.1.pep
AIKDEGKAWNYRPWYKPPLDYYLRKDLYTHWQSKLFNMKGGMKQPVDSEAVLYTV

SEQ ID NO: 155376 - protein, 53 aa, Glycine max
  Clone ID: PAT_MRT3847_111325C.1.pep
EDNTTELVFSIKKHSSFVGFILSAFSQFLKYPLAKTVCTYTPLILHENGIICY

SEQ ID NO: 155377 - protein, 49 aa, Glycine max
  Clone ID: PAT_MRT3847_111326C.1.pep
LELKRYLKRNLRYSTRTSPKDRAGHNLEPPHSRHSHDPAKNRPPTTRKT

SEQ ID NO: 155378 - protein, 76 aa, Glycine max
  unsure (1)..(76): unsure at all Xaa locations
  Clone ID: PAT_MRT3847_111327C.1.pep
FKIYLVKFXRRREGKTDYRARIRLINQEKNKYNPPKYRFVVRFSNKDIVAQIISASIAGDIVLAAAYAHELPRYGL

SEQ ID NO: 155379 - protein, 272 aa, Glycine max
  Clone ID: PAT_MRT3847_111328C.1.pep
MAKGATSKLNIAIIHPDLGIGGAERLIVDAAVELASQGHKVHVFTAHHDKNRCFEETVAGTFPVTVHGSFLPRHIFYRLHALCAYLRCLFVAFCVLFMWHSFDVILADQVSVVIPILKLKRSTKVVFYCHFPDLLLAQHSTFIRRMYRKPIDLAEEITTGMADLILVNSKFTASTFANTFKYLDAKGIRPAVLYPAVNVDQFNEPSSFKLNFLSINRFERKKNIQLAISAFAMLNSPEGVLKHKDITNASLTIARGFDKRLKENVEYSEELK

SEQ ID NO: 155380 - protein, 41 aa, Glycine max
  Clone ID: PAT_MRT3847_111329C.1.pep
AVYTDLRSFIMSAGTLSYLMPTLLWFKLLMIFLRLETPVLI

SEQ ID NO: 155381 - protein, 130 aa, Glycine max
  unsure (1)..(130): unsure at all Xaa locations
  Clone ID: PAT_MRT3847_11132C.1.pep
SDNNIGPPDTLYEGGFFNAIMSFPSNYPNSPPSVKFTSEIWHPNFYPDGRVCKLIFPPPGEFPYRFEFIRDWXRPINGDEASILTMIAWLYSRDYDITKSVEAAEEXWRDRRDEFKKKVSRCVRKSQEML

SEQ ID NO: 155382 - protein, 244 aa, Glycine max
  unsure (1)..(244): unsure at all Xaa locations
  Clone ID: PAT_MRT3847_111330C.1.pep
MNWDAPIAMADQGDLQERDGIVLDRSKMDKSRVSKSEMKRVLLTKSSEDKMQKYGGSKAGSRVVPYQEDESQDSVPVSIVSKDLQRNDKESEDLSLIRDQLHQIEKQQSSLLDLLQKFMGSSQNGMRSRXVHGLELALDEISYDLAISSGRMTKPDPHGNTCCMLPGAEFLSSKFWRKTHGRDSITRFSRSGGTPSLAAMNYQANRDAETKLANHRFRPDGGFITNPLAEIHTNSRNFATSEIA

SEQ ID NO: 155383 - protein, 172 aa, Glycine max
  Clone ID: PAT_MRT3847_111331C.1.pep
MAAKKKNGGGNGNNKENEDSTITVVLKVEMHCDGCASKIIKHLRCFQGVETVKADSDAGKVTVTGKVDPTKVRDNLAEKKKNKGGGGGDKNENIEDGIEKIEYNRMEYLAPPAFGFGYGPYGGGYGHGHGHGHGNIGGYSYVPVYPEQMHFHLHAPPPQIFSDENPNACSVM

SEQ ID NO: 155384 - protein, 43 aa, Glycine max
  Clone ID: PAT_MRT3847_111332C.1.pep
TNGRISVNPTPDPVVIRQVWASSLESELRLNREVIDHYPFMTM

SEQ ID NO: 155385 - protein, 86 aa, Glycine max
  unsure (1)..(86): unsure at all Xaa locations
  Clone ID: PAT_MRT3847_111333C.1.pep
RLEVSLKKVSGIQAASPEPENINAALQETEVPYISIACDLIKETXLSAEPAPNFSDYSEMAKVEQPVPDHSELVEDSSPDSERDDL

SEQ ID NO: 155386 - protein, 124 aa, Glycine max
  unsure (1)..(124): unsure at all Xaa locations
  Clone ID: PAT_MRT3847_111334C.1.pep
LINYYYYYLVCLLVWLIGHELGHDDAGVQEMAIDKEKEMVTVKGTMDVKALAENLMEKLKRRVEVVPSKXKKDKECGGGDDEKEVSGKKKNKGGGGGDKNENIEDGIEKIEYNRMEYLAPPAFG

SEQ ID NO: 155387 - protein, 305 aa, Glycine max
  Clone ID: PAT_MRT3847_111335C.1.pep
MAAKKKNGGGNGNNKENEDSTITVVLKVEMHCDGCASKIIKHLRCFQGVETVKADSDAGKVTVTGKVDPTKVRDNLAEKIRKKVELVSPQPKKEQENEKENKDAKANNKSENNKTQDKKTKDKEVVTTAVLKLALHCQGCLDRIGKTVLKTKGVQEMAIDKEKEMVTVKGTMDVKALAENLMEKLKRRVEVVPPKKDKEGGGGDDEKEVSGKKKNKGGGGGDKNENIEDGIEKIEYNRMEYLAPPAFGFGYGPYGGGYGHGHGHGHGNIGGYSYVPVYPEQMHFHLHAPPPQIFSDENPNACSVM

SEQ ID NO: 155388 - protein, 253 aa, Glycine max
  Clone ID: PAT_MRT3847_111336C.1.pep
MDRNCFSLTKKSSALCLTHWNPIKRKPEHPCVVAMLRTPSDNITGETRKTNAYKDNLFDRLAIHHLSKSVQEATGLGNNKSGYESLVEAATVAKMKFDPIQQQEVIIQALHRAFPKPILSLIKTLLPPSKLSREYFAVFTTLFFAWLVGPSEVRESEVNGRREKNVVYVTKCRFLEETNCVGMCINLCKMPSQSFIKDTLGMPVNMVPNFDDMSCEMIFGQEPPASTDDPALKQPCYKLCKAYKKHGTDCLSS

SEQ ID NO: 155389 - protein, 309 aa, Glycine max
  Clone ID: PAT_MRT3847_111337C.1.pep
CDTSDSESVSLELHDIPGGEDAFELCAKFCYGIAINISAHNFVSALCAAKFLRMNDSIEKGNFVGKLESFFNSCILEGWKDSIAALQTTATLPEWSENLGIVRKCIDSIIEKILTPPPQVKWSYTYTRPGYTRLEHHSVPKDWWTEDVSDLDIDLFRCIIMAIRSTYVLPPQLIGEALHVYACRWLPGLTKIKSSGSSASQTEESKEKNRKILETIVSMIPADRGSVSVGFLFRLLSISIHLGVSSVTKTELIRRASLQFEEATVSDLLYPSTCSSDQNYYDTELVLAVLETFLKLWKRMSPGAVDNSY

SEQ ID NO: 155390 - protein, 88 aa, Glycine max
  Clone ID: PAT_MRT3847_111338C.1.pep
LSGRLCRCQRLRLGFLLGGCLPPFCLCCSSSGHVVSWGFAQFSSLVLIDFARHARSLLVLLRLLVPVYAPPSLGWCLSPMPLRSLPLR

SEQ ID NO: 155391 - protein, 78 aa, Glycine max
  Clone ID: PAT_MRT3847_111339C.1.pep
PQPLTEQKNQKTKDTTNFFQILRRRTNNSSFVRNTGGHTIPTTTLLYLHGPHKKLSPSPKKNPKAARLGYSSVPFRVI

SEQ ID NO: 155392 - protein, 86 aa, Glycine max
  unsure (1)..(86): unsure at all Xaa locations
  Clone ID: PAT_MRT3847_11133C.1.pep
SNCMIMSWHRNQLQLHGVDDVPVKFITGDVGLLYTNPGMNXEYINDGGFKKDVPSLEEVVVLKGICTLQQSHLCAGFPGISMLERE

SEQ ID NO: 155393 - protein, 63 aa, Glycine max
  Clone ID: PAT_MRT3847_111340C.1.pep
RQHAPAAASRGLRGPLFLYRACRLQYFRSLDRILACTHVFVALTTNQSGELRASSTSSKTLFG

SEQ ID NO: 155394 - protein, 192 aa, Glycine max
  unsure (1)..(192): unsure at all Xaa locations
  Clone ID: PAT_MRT3847_111341C.1.pep
MNCRNLLVLELRESEVDDICGHWLSHFPDSYTSLVSLNISCLGNEVNLSALERLVSRCPNLQTLRLNRAVPLDRLATLLRGAPQLVELGTGAYTTEMRPEVFTNLAEAFSGCKQLKGLSGFWDVLPSYLPAVYPICSNLTSLNLSYATIQSPDLIKLVGQCESLQRLWVLDYIEDAXXEVIAASCXDLRELR

SEQ ID NO: 155395 - protein, 70 aa, Glycine max
  Clone ID: PAT_MRT3847_111342C.1.pep
ARAGQIELDSPKLLSLDTEAHVFCCSALLGDTRVYCSQGSSFQIVSSTKMSTSKAWLLMLNMMLISTLRI

SEQ ID NO: 155396 - protein, 92 aa, Glycine max
  Clone ID: PAT_MRT3847_111343C.1.pep
LLLVTLPLQIKLSSVQLANMYMKRVASELEILSGPKKEPTREFLILQGVHFAFRVHQFAGGFDTESMKVFEELRSRIHAPPPGEDNNNQKRS

SEQ ID NO: 155397 - protein, 67 aa, Glycine max
  Clone ID: PAT_MRT3847_111344C.1.pep
HVSNVLLMMPRATTYSGVVPIGCGAQDKDSTRFRGQSNCFGTPPVQSCTWNMQSRVHLLPARLQLLH

SEQ ID NO: 155398 - protein, 66 aa, Glycine max
  Clone ID: PAT_MRT3847_111345C.1.pep
ACTRTVTRNSVRGFLLWIGSVTVGTVFSKVAILRRKRTNWYQVPKLSYIGKDEPFYFSLSNPLRYI

SEQ ID NO: 155399 - protein, 87 aa, Glycine max
  unsure (1)..(87): unsure at all Xaa locations
  Clone ID: PAT_MRT3847_111346C.1.pep
XKXQSFLTQLGLPXTLLRREIYGSRLDDRFGLAKAESETRMRDAMFFQVGCDGWXGEDGVVKFXVNLPNGTSVFNKVVFXGGGGVLS

SEQ ID NO: 155400 - protein, 147 aa, Glycine max
  unsure (1)..(147): unsure at all Xaa locations
  Clone ID: PAT_MRT3847_111347C.1.pep
AFGFLDLPCDKISSVLTTTAERLVGTEHEGFDPFLGGIQKYATPMMPLDEEILSKVVQDLVEEWFDCVDEEDSFVEVSLSAALIGVEGLDYMVRIPLATXSRRFTSMCFSRKNGEYWHKGVSVFVDGEXMTLISVTSVEEAYNKLIS

SEQ ID NO: 155401 - protein, 149 aa, Glycine max
  unsure (1)..(149): unsure at all Xaa locations
  Clone ID: PAT_MRT3847_111348C.1.pep
LTLPFSSSIPPLLNRTYRSLSHLKQFPKSHPCPLWSSSFSFCLHTLRKSTSPLRASSSLSTPSMAASSLDEGNPLLQNFVFPPFDVVEPKHVRPGIRALLGKLEHELEELERSVEPSWPKLVEPLEKIIDQLSVVWGMXNHLKGCKDSS

SEQ ID NO: 155402 - protein, 59 aa, Glycine max
  Clone ID: PAT_MRT3847_111349C.1.pep
DNHYLWKTILYTIIWGLNSTLSCPYILIKFFNYSKDTLNTAKTFDFSFILLYCLHHLYL

SEQ ID NO: 155403 - protein, 33 aa, Glycine max
  Clone ID: PAT_MRT3847_11134C.1.pep
KHSKEVRIMMTTIVSLVDGLGQARSIRIVANGK

SEQ ID NO: 155404 - protein, 221 aa, Glycine max
  unsure (1)..(221): unsure at all Xaa locations
  Clone ID: PAT_MRT3847_111350C.1.pep
AAEEDHAERDYDSEDQTHHNHPNSQPHVEAEVLSDHGVQISQFPAVIKRSVNRPHSSVTAIVALERALESGDNKAQSALDAPILENVSHGQLQALSSVPSDNFALDCDSSFVITPPPILEGRGVVKRFGTKVLVVPMHSDWFSPATVHRLERQVVPHFFLGKSPDHTPXEKYMECRNCIVAXAMEDPGMRITVSDVRVCWLGLWLKDLTRIGRFLDHWXNY

SEQ ID NO: 155405 - protein, 49 aa, Glycine max
  Clone ID: PAT_MRT3847_111351C.1.pep
ETTNLWKKMYFVREGIHKVWMHNRQKLDIKMLIIIYPGECKLLRKLLSV

SEQ ID NO: 155406 - protein, 111 aa, Glycine max
  Clone ID: PAT_MRT3847_111352C.1.pep
EEPGTTHAPEIVNRHSTRATKGKKKNKEGGHKTLATDAQATQQGRPAEQETANKEAPRQKARTGAEKAHSAKDSTSPDEDRDRTTAKGEEATAPRDATTKKKTEDATKQKT

SEQ ID NO: 155407 - protein, 74 aa, Glycine max
  unsure (1)..(74): unsure at all Xaa locations
  Clone ID: PAT_MRT3847_111353C.1.pep
LGYLSVTSGASPVSRKIGIDSTVQGLVDEFEXNAMPVKGGCDVXAAAAIAAVNHELTRQMIPRTIDIVGPGGVL

SEQ ID NO: 155408 - protein, 49 aa, Glycine max
  Clone ID: PAT_MRT3847_111354C.1.pep
LNVIHLFVLPKLFLRKICMSFLLNYFPVIPDLKIKEKEKKADFLISCCI

SEQ ID NO: 155409 - protein, 117 aa, Glycine max
  unsure (1)..(117): unsure at all Xaa locations
  Clone ID: PAT_MRT3847_111355C.1.pep
NAGLAEHLALDYVCNRXTVMSMSVQHVNALSEGLDRSHKVHTICLHMTNGXXGPSQPQSGFVDKLGEVXGYGFWLYTPFPYGNAFLGXYGHTFNELVVPSIHKFGRHIIDVVFAQVW

SEQ ID NO: 155410 - protein, 101 aa, Glycine max
  unsure (1)..(101): unsure at all Xaa locations
  Clone ID: PAT_MRT3847_111356C.1.pep
VMLKVPLLMIILAAVTVARMELSFFKSDHSSSYDDDESAIPCWDLCMCTRSLPPPCRXEDIRLCSCHSDGQSCMCTRSQPGQCRCLDTNXLRYKPCKSRDD

SEQ ID NO: 155411 - protein, 109 aa, Glycine max
  unsure (1)..(109): unsure at all Xaa locations
  Clone ID: PAT_MRT3847_111357C.1.pep
LHLVXCSEXXXTFVNXXXSXFXXXTPXGGNTPIXPNPVXXPQXXXIMGLXXXAXXXKVXQGSXXVXXLRKVXWLXRNXLSIRSXXGFXNGLGFXFALLXXFKGRPXGAK

SEQ ID NO: 155412 - protein, 48 aa, Glycine max
  Clone ID: PAT_MRT3847_111358C.1.pep
SGSTSIGAPYYTPTLVPCSTVSFNLDHPKLKTEPRDHFIRQLLDLDQN

SEQ ID NO: 155413 - protein, 78 aa, Glycine max
  Clone ID: PAT_MRT3847_111359C.1.pep
PLFFGSVGDKKKRLYFHASSWFLTVPDARVFSVYYVGHKDICSLFMRQKRLSGVCIPSGLEAKRNLIIQSVYEFSFAR

SEQ ID NO: 155414 - protein, 126 aa, Glycine max
  unsure (1)..(126): unsure at all Xaa locations
  Clone ID: PAT_MRT3847_11135C.1.pep
GSLSRSSFAAATSRNNRHFPTRFRPNPSTRPSFPPFPGSEPAPACARVFQPGPVRFFSEDELDVELGRLLALLPEEMRRRVSDHPELPQLIEVVMDLGRKPLXRVPTGDFVISEYPITVQDIEHAT

SEQ ID NO: 155415 - protein, 49 aa, Glycine max
  Clone ID: PAT_MRT3847_111360C.1.pep
NTCKLQLEMYVQRPFIEATHQFFLSIGKPQPSYKRQRCSHIMAKTISQF

SEQ ID NO: 155416 - protein, 252 aa, Glycine max
  Clone ID: PAT_MRT3847_111361C.1.pep
MEGVPHPIPRTVEEVFTDFKGRRAGLIKALTTDVEKFYQQCDPEKENLCLYGFPNETWEVNLPVEEVPPELPEPALGINFARDGMQEKDWLSLVAVHSDSWLLAVAFYFGARFGFGKNERKRLFQMINDLPTIFELVTGSAKQSKDQPAAHNNGSKCKSSGKSRQSESQAKGMKMSAPPKEEDESGEEEEEDDEQGATCGACGDNYGTDEFWICCDMCERWFHGKCVKITPAKAEHIKQYKCPSCSNKRVRV

SEQ ID NO: 155417 - protein, 51 aa, Glycine max
  Clone ID: PAT_MRT3847_111362C.1.pep
FGSGVFVCPVVQWDNQVIGDGKKGPITQAFLNLIVEDMKSGPPPVCKPVPY

SEQ ID NO: 155418 - protein, 48 aa, Glycine max
  Clone ID: PAT_MRT3847_111363C.1.pep
CCRKFRICPVSVAQLTWSTLIFILNKEIVPTLSLYCMCDITRMISCSI

SEQ ID NO: 155419 - protein, 38 aa, Glycine max
  Clone ID: PAT_MRT3847_111364C.1.pep
FGRIHGTGRFFNFSPGWFGKLPHLTFKYNTLLIKWMSF

SEQ ID NO: 155420 - protein, 77 aa, Glycine max
  Clone ID: PAT_MRT3847_111365C.1.pep
VWRIGGGMQILVKTLTGKVFTLEVESADTSDNVKVKIQNKEGFPPSQQRLIYAGKQVEEERTLVDYTIQKESTLHLV

SEQ ID NO: 155421 - protein, 51 aa, Glycine max
  Clone ID: PAT_MRT3847_111366C.1.pep
ITVLISYFFDLKTLPIHYAIILDHTYESMTWFRHDLIILISTRIGTQPRQE

SEQ ID NO: 155422 - protein, 70 aa, Glycine max
  Clone ID: PAT_MRT3847_111367C.1.pep
ASGGVCCVRHRGTLGALYLGLPALLREPTSSNALFLQCSNYHPFAKSLLRSSAKEFPNNRNYFPKTRRRF

SEQ ID NO: 155423 - protein, 70 aa, Glycine max
  Clone ID: PAT_MRT3847_111368C.1.pep
PTRFFRSTPPSPQRSDVVFSCGGVFHNTKVCMPEHDEKIDEVRDQERPPLRSITKALYEYKEENIGEDTV

SEQ ID NO: 155424 - protein, 61 aa, Glycine max
  unsure (1)..(61): unsure at all Xaa locations
  Clone ID: PAT_MRT3847_111369C.1.pep
XNPFLSSALXFXXFLLSTRKXLLTXXXXXASWIQFEEPXXGXEPXITTXCXXSPTDXXQLV

SEQ ID NO: 155425 - protein, 101 aa, Glycine max
  Clone ID: PAT_MRT3847_11136C.1.pep
RFAKKICHIFLINISLHEEINISKSKRYSQTIDVPTLMTDVTMAPKQMLTSMAKLIPIMTNNTAFSKPTSQFPVPPAQITHTQKTDPYPYETTTTRLGAHA

SEQ ID NO: 155426 - protein, 65 aa, Glycine max
  Clone ID: PAT_MRT3847_111370C.1.pep
MIMFFYKQFQDNIELFCQTRRNINTVLNEMRTMPGIMSQMPPFPVFMNEELASSILPNKSEAANY

SEQ ID NO: 155427 - protein, 334 aa, Glycine max
  Clone ID: PAT_MRT3847_111371C.1.pep
MDLQNTVKEALNALYHHPDDAVRMQADRYLQDFQRTLDAWQVGDNLLHDPSSNLETLIFCSQTLRSKVQRDFEELPSTAFRPLRDSLNTLLKKFHKGPPKVRTQISIAVAALAVHVPAEDWGDGGIVKWLRDEMDSHPEYIPGFLELLTVLPEEVLNYKIAARPERRRQFEKELTSQMEIALNILTACLSISELKEQVLEAFASWLCLFHGIPGSVLSSHPLVLTALSSLNSELLSEASVNVISELIHYTTAGNIDGVSANMPLIQVIVPQVMNLKVQLGDSTKDEEDVKAIARLFADMGDSYVELIATGSNESMLIVHALLEVASHPEYDIAS

SEQ ID NO: 155428 - protein, 61 aa, Glycine max
  unsure (1)..(61): unsure at all Xaa locations
  Clone ID: PAT_MRT3847_111372C.1.pep
MRCLDFGWLHRCIIGLDIKLLQDAMGQTLLTLPLNQQYMLFMEWFRHFLSHXTECSNLNKA

SEQ ID NO: 155429 - protein, 184 aa, Glycine max
  unsure (1)..(184): unsure at all Xaa locations
  Clone ID: PAT_MRT3847_111373C.1.pep
MRPKIFLFGDSITQDSFAEGGWGASLANHFSRTVDVVLRGYSGYNTRWVLKVLEKVFAATQHGDGGINGAPVAITIFFGANDACLPDRYGAFQHVPLLEYKQNLHSIVSFFVKQWPTTHILLITTPPIDEEARLRYPYAYNPQGLPERTNEAAGEYATACIAVAEXCGVPVIDLWTKCQQCPDW

SEQ ID NO: 155430 - protein, 208 aa, Glycine max
  unsure (1)..(208): unsure at all Xaa locations
  Clone ID: PAT_MRT3847_111374C.1.pep
ILISFYVSPLSDFESKNLIIEVINKSVKLHKITRHLVKHCSLFSWFSSLISVARQRLNGNENKLFLKHVLVALKVSNDVISSGGISKWLQNHGLEQLMELSSNLFNFLFQDATLTNETVVLVNPFLRMIASVLKLSQKRKIYQPHFTLSIEGLYQMYQAGSVCNQAIKSIKPELALXGILMNAPPVSIXMMNQERLQSFLIRATTTAL

SEQ ID NO: 155431 - protein, 75 aa, Glycine max
  Clone ID: PAT_MRT3847_111375C.1.pep
RLLPSVRRGQHSLMPFPSPLYTAGKAYSGTQSSVIICPPKWPEEISVRRSLSYIYLRIFNIKRRLSVNKKRSFFL

SEQ ID NO: 155432 - protein, 69 aa, Glycine max
  Clone ID: PAT_MRT3847_111376C.1.pep
VTPTPAHAAVLSYVSQNQRKHTLRKNWFCARCLDLLNKLILFVVQRIKKWLDHLEQGTFDYASVLNTIL

SEQ ID NO: 155433 - protein, 48 aa, Glycine max
  Clone ID: PAT_MRT3847_111377C.1.pep
CLVKALYVKWVSPPRHSTYLRCWPLPGLINLLPLFHIYQFKTKKKGRP

SEQ ID NO: 155434 - protein, 28 aa, Glycine max
  Clone ID: PAT_MRT3847_111378C.1.pep
KYPPGFSTKSIRLVEFPPSQPGLSVAIV

SEQ ID NO: 155435 - protein, 51 aa, Glycine max
  Clone ID: PAT_MRT3847_111379C.1.pep
KKNEVFLDVVDSVYILATSNGQIIRSDFVPALKISPYMDRMPEYKLLFNVL

SEQ ID NO: 155436 - protein, 61 aa, Glycine max
  Clone ID: PAT_MRT3847_11137C.1.pep
DKVIRYFFNLQRFYCYLELKSKDPDVAVPPLDDTLKKVTEPDADLLLPIKSVIDSFRRSLE

SEQ ID NO: 155437 - protein, 62 aa, Glycine max
  Clone ID: PAT_MRT3847_111380C.1.pep
ESKLIQSNRNRTNYNLGLTKVCPEAEAKNPSGQAIILQIGFTRDVKRKIVLKDTGEGRLGLL

SEQ ID NO: 155438 - protein, 68 aa, Glycine max
  Clone ID: PAT_MRT3847_111381C.1.pep
SRFPAPSSVSKLVPRVGELEGFEPQMEIRPQRYPECFHRGGFHKGKSCQKLPPGVNGLFFEQDRVVVF

SEQ ID NO: 155439 - protein, 146 aa, Glycine max
  Clone ID: PAT_MRT3847_111382C.1.pep
GKRISYFDFMDGCIYISSSDDDLEEIDDQGRTLPQWATTTVKSLDNGGWSRRDSFSRGANSSNPSSSNVYNHSQVKPQTPPVSSTNTLNHRIARRDEPSYHAQNGNTSQHQTVNSRISNNHGADYEKMSSQQAFKRTLQSSLQPSA

SEQ ID NO: 155440 - protein, 192 aa, Glycine max
  Clone ID: PAT_MRT3847_111383C.1.pep
MSKVLDLNPVDDVKELKPETETVLKMSKDLELKIVKSVEELKPEKETELKISKDMELETVKNVEELKPENETELKMSKDWEWRTVKNVEELKPEKEAELIVSKSIEEVKLLKAIEEMKLKLDGLESKLNESGVTISKLTEERMLSNQETKILQEKLADLINKGPRKVQVGFPLLYVCMVALICVFLGYRLHS

SEQ ID NO: 155441 - protein, 73 aa, Glycine max
  unsure (1)..(73): unsure at all Xaa locations
  Clone ID: PAT_MRT3847_111384C.1.pep
GLKEFVKAAIGQPRLLVRVVLVRVXTSWNAILVPXFGSMHXELIPMLVGFFTSKIATFAQAIEEAIPVLTRKT

SEQ ID NO: 155442 - protein, 74 aa, Glycine max
  Clone ID: PAT_MRT3847_111385C.1.pep
HAYARILLYKKRFIDRWNVTAFSLSHSSSSHSTAVEDRFPEHSHQVLPQITPTAFPFYHLRQYLNYYHQLLFPN

SEQ ID NO: 155443 - protein, 525 aa, Glycine max
  unsure (1)..(525): unsure at all Xaa locations
  Clone ID: PAT_MRT3847_111386C.1.pep
MANDDCCATQLIDGDGEFNVAGLDNFIRTVNLASCGLSYAVVAIMGPQSSGKSTLMNHLFHTSFREMDAFRGRSQTTKGIWIAKCVGIEPSTIAMDLEGTDGRERGEDDTAFEKQSALFALAISDIVLINXWCHDIGREQAANKPLLKTVFQVMMRLFSPRKTTLLFVIRDKTKTPLENLEPILREDIQKIWDGIRKPQAHLHTPLCEFFNVEVTALSSYEDKEDKFKEEVAQLRQRFFHSIAPGGLAGDRRGVVPASAFSISAQQIWKVIRENKDLDLPAHKVMVATVRCEEIANEKLNRLRSDKGWLELEEAIELGPVRGFGEKLSSIIDACLSQYDEEAIFFDEAVRNAKRKQLESKALDLVYPAYTTLLGHIRSKALDDFKTKLEQSLNNGEGFASSVRTWTQSIMLQFDKASADAAVRQANWGASKVRDKLHRDIDSHTSSMRSTKLSEITANFEKKLAKALTEPVESLFEAGGKDTWLSIRELLKRETEIAVSELSASVAGCELDEDTVERMQQSLMDY

SEQ ID NO: 155444 - protein, 130 aa, Glycine max
  unsure (1)..(130): unsure at all Xaa locations
  Clone ID: PAT_MRT3847_111387C.1.pep
MGIFLAQNKKRHSGPVLTGTVPHPDEKDQSLNSTFASRYVREPLSHFIMPXNSIPTDSSFHIINDDLMLDGAPKLNSASIVTTWIDPAYHKLIMSSLNKNYGNIDKYPVTTVLQNLYLNXLSNLFHAPIS

SEQ ID NO: 155445 - protein, 75 aa, Glycine max
  Clone ID: PAT_MRT3847_111388C.1.pep
YFAMIGLFKNSLKSKKSGLKCESYKMIFSCPVKMKNPPKQKKFFPSFFFFSPRFFSPFDFFFSFFSWSRICIVFP

SEQ ID NO: 155446 - protein, 94 aa, Glycine max
  Clone ID: PAT_MRT3847_111389C.1.pep
KDLSLLFTWGHVNCKPNKPSKIKIKNTNLQFHRFPSFATESPHRSVTFAYETIITNIGTIVSFIFSSTYYTQNFETKFNDPPKLNAKKRMIMFS

SEQ ID NO: 155447 - protein, 141 aa, Glycine max
  unsure (1)..(141): unsure at all Xaa locations
  Clone ID: PAT_MRT3847_11138C.1.pep
MLVYEFMSNGTLRDHLSVTAKDPVTFAIVIFSIIDGRMGSYPSEHVEKFLTLAMKCCEDEPEARTRMAEVVXRELENIWSTMPESDTKRAEFMSSDSGKADSHSTPSSSSASASIMKTPFVSGDVSGSDLVSGVIPSIKPR

SEQ ID NO: 155448 - protein, 42 aa, Glycine max
  Clone ID: PAT_MRT3847_111390C.1.pep
FVGQGPEFQLLNGIRKFLNAKACVYFISKKLGVSFQFLTFKG

SEQ ID NO: 155449 - protein, 115 aa, Glycine max
  Clone ID: PAT_MRT3847_111391C.1.pep
TTKAPSLKSVFFSNRIAHSGQNIHQKNTLLLEHSCHTMLITLNFSMSSGTRCSTDATMLMSHWLKHGCLYADTINVLYRASTCSRSNPGLCSNMTYAASSRAPDCRTGSSAATAA

SEQ ID NO: 155450 - protein, 59 aa, Glycine max
  Clone ID: PAT_MRT3847_111392C.1.pep
NSTHFTHYYDTQKRCGNFQKGRAYLTRGLCLTSFIESNKPTIERKHQFQDHASGYPHFP

SEQ ID NO: 155451 - protein, 96 aa, Glycine max
  Clone ID: PAT_MRT3847_111393C.1.pep
YFSFFFFFFLLPPFQVGLVLDGYIGCSDSPTSLGDKPTPGWHPRFSGSGKGHRKEPAEAEEEQQPLLLKLEQGLALEGVSHFSSADLKDPVAGEEV

SEQ ID NO: 155452 - protein, 36 aa, Glycine max
  Clone ID: PAT_MRT3847_111394C.1.pep
VGGYVSISADKLLLCVSTTFYSSPLLIYPMASVQTE

SEQ ID NO: 155453 - protein, 465 aa, Glycine max
  unsure (1)..(465): unsure at all Xaa locations
  Clone ID: PAT_MRT3847_111395C.1.pep
LRSKTRANIKVTAXVRKDAADPTHTCAMEFDNFVLITGESEAVKRALFAVSSIMYKFGPREDISLDTAVPEAPPRIIIPXPDVPVYPPGGLYPASDPIVTPRAVPQIIGATNVPDLQGYADAENSWPLYSSALPVVSGVGASRSEELIIRMLCPSDKIGRVIGKGGSTIKSMRQASGAHIEVDDSKANFDECLIIITTTESPSDLKSMAVEAVLLMQGKINDEDDTTVSIRLLVPSKVIGCIIGKSGSIINEIRKRTKADVRISKGDKPKCADARPELVEVGGSVDCVRDALIQIILRLRDDVLRERDTGHNPSIGAESLYPGSAGLSLPSMMHSVPPVAAPMVYDHRAESGAGLGMLSSSSLYGGYGSLSMGDNGYGSMSSYATKLYGGLPPPSTLDMLIPANAVGKVLGKGGANIANIRKISGASIEISDNKSARGDRIALISGTPEQKRAAENLIQAFIMAT

SEQ ID NO: 155454 - protein, 132 aa, Glycine max
  Clone ID: PAT_MRT3847_111396C.1.pep
EKIIEVNRNKILSPSLLSFRRGIAYKLFVGASFLTLGLSFYTTENALSEAFSNYGQVIEAKIVTDRVSDRSKGFGFVTFASQDEAENAIEDMKGKTLNGRVIFVDYAKPNINTRGEIPIARGPPEPTSTPDT

SEQ ID NO: 155455 - protein, 111 aa, Glycine max
  unsure (1)..(111): unsure at all Xaa locations
  Clone ID: PAT_MRT3847_111397C.1.pep
VVVLRTLMIMRSHNKNRLPYTLSVNHFDDWTWQEIKXHRLRAAQNXSATPNGNHKLTDAVRPPPKDWRKEGIERGGKDQGSXCGSCCDXAQLAALQPAYAQTFGKTISLSE

SEQ ID NO: 155456 - protein, 102 aa, Glycine max
  Clone ID: PAT_MRT3847_111398C.1.pep
NRIPKFLGYFERVLKGNEKGEGKFLVGDKLSYADTTLWNVLSGLLFAFPKEMEARKGDYELLFGTFYESVKEASGIKEYLASERRKPFSMGVFRHYPELDRQ

SEQ ID NO: 155457 - protein, 90 aa, Glycine max
  unsure (1)..(90): unsure at all Xaa locations
  Clone ID: PAT_MRT3847_111399C.1.pep
LLVGNQKETVGEAPLLFPKKRILFKIFHSGKGQKHGNEPVKGVYNATPXNFFFFFLEDPLELGIPSACVSPTLLSKVYWQKEFVSSPTIK

SEQ ID NO: 155458 - protein, 61 aa, Glycine max
  Clone ID: PAT_MRT3847_11139C.1.pep
KCGFFGMLCVKSRQYILLKIHDFHQHMLVRHRLHAPVTCEFGHRSSIQVLLSPSIPKLAAM

SEQ ID NO: 155459 - protein, 150 aa, Glycine max
  unsure (1)..(150): unsure at all Xaa locations
  Clone ID: PAT_MRT3847_1113C.1.pep
TTTRPINCFHSPEKEHRNPLHRCGFLYTPDLSFFFNPSFLFNRSHSSFCKSLQRVVLKAGTAVVTPTDSILSLGKLRTLSYHLKXLNNTYYDVILETSGAYPLGRQRLRYRTLVNTTFSDLQNPQRDLYRKAFAALPQSTLIALYDIMFS

SEQ ID NO: 155460 - protein, 160 aa, Glycine max
  Clone ID: PAT_MRT3847_111400C.1.pep
MGFPVGYTELMLPKVFLQVLSVLGLIRKLITVLLCYMGFHDFFESDIAWPERAPEFQSVWAVLIREILPVVKFSEMEMEMAEAPESCAVCLYEFEGEDEIRRLTNCRHIFHRGCLDRWMGYDQRTCPLCRTPFIPHHMQAAFNDRLWAASGIPDFYYNHE

SEQ ID NO: 155461 - protein, 102 aa, Glycine max
  unsure (1)..(102): unsure at all Xaa locations
  Clone ID: PAT_MRT3847_111401C.1.pep
VCSVSSTFCLLEANALPGLIRLLHGEVHATAYEAIQTLSTLVLEDFPQRGARVLHESNAMRPLLEILNWGTDSLKSEAIGLLEKVFVSXEMFEYYGTRARLS

SEQ ID NO: 155462 - protein, 146 aa, Glycine max
  unsure (1)..(146): unsure at all Xaa locations
  Clone ID: PAT_MRT3847_111402C.1.pep
KALHTELLPLRKRNRNSVEALPNKYLGENTLNFKHLSRGTNIPFNAFYALRACKHETLPSFKLPAADKWKXRDSLSQILIRLYIDTTYXGSGTIEIAKDLNEGETYKETSDIHWKDXRDQIEVSALXIQEPMTYYDEGETYEDELT

SEQ ID NO: 155463 - protein, 153 aa, Glycine max
  Clone ID: PAT_MRT3847_111403C.1.pep
FFFFFFFFFFFFFFFFFFFFFFLKKGKNGPHGIWRGRLEHNPRGEKTKFFLPGGPPPLTGPPKKGGQRKGGARAQKKTPPQPWGGGPPMPPPSKSIPNSQGGVGGKKPTPLPFTGGKAFKRGINWALGRAKPARVRVPHPGGALFPSQIFTGE

SEQ ID NO: 155464 - protein, 64 aa, Glycine max
  Clone ID: PAT_MRT3847_111404C.1.pep
EDMFWALSEAAFVPLFLLPSLSHICISTFYLFALTYIYIYIYIYIYIYDFGFVSFRLKNIKICM

SEQ ID NO: 155465 - protein, 90 aa, Glycine max
  Clone ID: PAT_MRT3847_111405C.1.pep
LSSTEQMVLCFFHPLLPHSLRTAAPSPPFLPSLPPFFVSWMHLMNGGDPHLRGCVGALSLRTLFTGLLHSALVHCLPPRRFPPIHAYELP

SEQ ID NO: 155466 - protein, 136 aa, Glycine max
  unsure (1)..(136): unsure at all Xaa locations
  Clone ID: PAT_MRT3847_111406C.1.pep
MATWCMRAPLFPLLKKAPFITGKRRRRAWFHCCSSPQAWQPSRKKKVAMLVAYVGTNYRGLQMQHDEHSLSTIEKELETAIFKAGGIRESNFGDLQKIGWARSSRTDKGVHSLATIISFKMEXPENACDGDPYGFG

SEQ ID NO: 155467 - protein, 55 aa, Glycine max
  unsure (1)..(55): unsure at all Xaa locations
  Clone ID: PAT_MRT3847_111407C.1.pep
GTAINPPVTIWPAVVNWTLTHPWIXWAGPLNGGGNPGLVFQGVFINPTPEQVSPP

SEQ ID NO: 155468 - protein, 88 aa, Glycine max
  Clone ID: PAT_MRT3847_111408C.1.pep
CPSSFIKVINVGYLGSVTFEGTFPFTKVLFSPKVFGRLNLFRKVLNARLTMSISAILSMIIVYLSCSIPSSFSARPGAWFGEKYKNLL

SEQ ID NO: 155469 - protein, 57 aa, Glycine max
  Clone ID: PAT_MRT3847_111409C.1.pep
SFFNSTFIFNSTNPNFIHLICLHKLSNLHTKSFARLITTKAVPTNLSTGIVVISITH

SEQ ID NO: 155470 - protein, 93 aa, Glycine max
  unsure (1)..(93): unsure at all Xaa locations
  Clone ID: PAT_MRT3847_11140C.1.pep
VLIGIDNGSPKRPQLVKGNMHLFSVDQQRSQALKAHAASFAQFKVTGNKNPSVLISFASKTVNAGQVISKLHVIPLXAKPRTPSFTKKQTENF

SEQ ID NO: 155471 - protein, 42 aa, Glycine max
  Clone ID: PAT_MRT3847_111410C.1.pep
PQRRPYSPIHHPDINPSLNAQNSPGPQGMTCTCQTNCAIMMY

SEQ ID NO: 155472 - protein, 47 aa, Glycine max
  Clone ID: PAT_MRT3847_111411C.1.pep
KHKSQHSYRKDLDFNARDMKQILLVQNQIYLEEERERELLGGWKTTK

SEQ ID NO: 155473 - protein, 171 aa, Glycine max
  Clone ID: PAT_MRT3847_111412C.1.pep
GNLARGAIFRGNHLGPGTHRGALGVGGNKSYPKIALVVFWGQKILGPLKLPLLSYKKKKKGRALFLFFLCLKKGFSGAGCVLGFLLAKHGFLGENFVHFPHWGPLGGGGVNNDKGDCHTPLDSLTGGGSRLWVKLFLGDERIKKRGGWISFFLRKKINNKPKRTKRKRKKR

SEQ ID NO: 155474 - protein, 155 aa, Glycine max
  Clone ID: PAT_MRT3847_111413C.1.pep
PTQTKTPQTYTTTQVEEPHYEPSNESSYTDKISSATTAIADKAITAKNVVASKLGYGDDTTEKTQTNHKEENTSNEKPSTITSATSAKNTVSSDHQENTGSAKPSTISSATSAIADKAISAKNTVSSKLGYADNNTETTQASHQENTQPSTISLA

SEQ ID NO: 155475 - protein, 121 aa, Glycine max
  unsure (1)..(121): unsure at all Xaa locations
  Clone ID: PAT_MRT3847_111414C.1.pep
MNSRFQLLSTTTKGDHDQGKDLALVKVNVPCAVDGLTXSYTPTALLEYDLQKDRWLIVEYLVRMFXRAHNVNQPQEKDLXEGNSSFDIKYRSRVEKVCSTKAQFVSGKTVKYDIIGAGSHS

SEQ ID NO: 155476 - protein, 76 aa, Glycine max
  Clone ID: PAT_MRT3847_111415C.1.pep
LSVHKTIESTIASACGTLLHSSTDPDEYDRVQGQTLRYPLVRCTTTSSSALTITDAIYAEELVRTAIPADSPGLGI

SEQ ID NO: 155477 - protein, 39 aa, Glycine max
  Clone ID: PAT_MRT3847_111416C.1.pep
YPHYLMTDLVPLFIPMNIFKLTSYIKIIVNILTLRPTLY

SEQ ID NO: 155478 - protein, 66 aa, Glycine max
  unsure (1)..(66): unsure at all Xaa locations
  Clone ID: PAT_MRT3847_111417C.1.pep
QILSKIVAVFAEILCAGNNLANEXTVSRMINLLRQLQQTLPPSTLASTWSSLQPQQQLALQSILSS

SEQ ID NO: 155479 - protein, 77 aa, Glycine max
  Clone ID: PAT_MRT3847_111418C.1.pep
TSCAVVVLGLCIFNIPLGFKMRFFLNAPRSRCLHMQNVDPVCGEMFFFSSREHHGYALSRQPRSWQLVGFLLIQVIA

SEQ ID NO: 155480 - protein, 568 aa, Glycine max
  unsure (1)..(568): unsure at all Xaa locations
  Clone ID: PAT_MRT3847_111419C.1.pep
FTAILVNANDKSNRMLRAKAMECISLVGMAVGKEKFRDDXAKQVMDVLMSLQQSQLDADDPTASYMLQAWARLCKCLGQDFLPYMGFVMPPLLQSAQLKPDVTITSADSDTEFDEEDDSIETITLGDKRIGIKTSVLEEKATACNMLCCYADELKEGFFPWIDQVAFTLVPLLKFYFHEEVRKAAVSAMPELLSSAKSAVEKGQSQGRDKTYVKQLSDYIIPNLVEALHKEPEVEICASMLDALNECIQVSGSHLDEKQVRSIVDEIKQVLTASSSRKHERAERAKEEDFDAEERELLNEENEQEEELFDQVGDCLGTLIKTFRTSFLPFFDDLSSYLTPMFGKDKTSEERRIAICIFDDVAEHGREAALKYYDSFLPFLLEACNDEYPDVRQAAVYGVGVCAEFGGSVFSPLVGEALSRLDAVIRHPNALHADNIMAYDNAVSALGKICQFHRDSINAAQVVPAWLSCLPIKGDLIEAKVVHDQLCSMVERSDRELIGPNNQYLSKIVAVFAEILCAGNNLANEQTVSRMINLLRQLQQTLPPSTLASTWSSLQPQQQLALQSILSS

SEQ ID NO: 155481 - protein, 147 aa, Glycine max
  Clone ID: PAT_MRT3847_11141C.1.pep
ERDVFAWTTMISAHVRDGDMASAGRLFDEMPEKNVATWNAMIDGYGKLGNAESAEFLFNQMPARDIISWTTMMNCYSRNKRYKEVIALFHDVIDKGMIPDEVTMTTVISACAHLGALALGKEVHLYLVLQGFDLDVYIGSSLIDMYA

SEQ ID NO: 155482 - protein, 57 aa, Glycine max
  Clone ID: PAT_MRT3847_111420C.1.pep
NLPLVNDVGVNSVNIEGESKDRVVVIGEDVDAANLTSCMRKKVGHTELVTVVELKGK

SEQ ID NO: 155483 - protein, 81 aa, Glycine max
  unsure (1)..(81): unsure at all Xaa locations
  Clone ID: PAT_MRT3847_111421C.1.pep
FSKTNAWATGEEGYSKLTVELEKRVNTRDGIECPKEEKQTQRKKFDKPKNRKCTIIPMEINPVERQKXKNLARYIMKKRDK

SEQ ID NO: 155484 - protein, 175 aa, Glycine max
  Clone ID: PAT_MRT3847_111422C.1.pep
FSKNQQQLGGKVRLIVTGSAPIAPEVLQDLRIAFGTTIIEGYGQTECTAMVTVTWPGDVDGGHCGAPAACSLVKLADVPELNYFTSDRKGEVLVKGPSVTKGYYRDAEKTVELFDENGFLHTGDIGQLLPDGRLKIIDRKKHIFKLAQGEYVAPEKIKCVMCNAHLSKQFCDGDS

SEQ ID NO: 155485 - protein, 78 aa, Glycine max
  Clone ID: PAT_MRT3847_111423C.1.pep
IQVKLMWKICYTATNYIYDCINTNNGGAHTTRGYEPPNQRETKGEACTTKYGICRKQQRGPTTWNAGVGPSSQKRLRP

SEQ ID NO: 155486 - protein, 66 aa, Glycine max
  Clone ID: PAT_MRT3847_111424C.1.pep
LMASPDASGMSPTRADGSSIQQAGWRQTYAEEDSCTVRAWYALKGALRSSASGSIMIEQLTAAPQV

SEQ ID NO: 155487 - protein, 57 aa, Glycine max
  Clone ID: PAT_MRT3847_111425C.1.pep
QMQSQATLNQQLPQALHKPLRDYELKMQYPYRIITSSTTNMRIKYPFPQEYLVQTEL

SEQ ID NO: 155488 - protein, 86 aa, Glycine max
  unsure (1)..(86): unsure at all Xaa locations
  Clone ID: PAT_MRT3847_111426C.1.pep
DQTVTNEHVVADLQHHVNRPVDRSKFLXWNNIFQRKPSGRFGTGGPHDETGLTGRAIIIDTYGGLGAHGGSALSRKDPTKVDRSDG

SEQ ID NO: 155489 - protein, 94 aa, Glycine max
  unsure (1)..(94): unsure at all Xaa locations
  Clone ID: PAT_MRT3847_111427C.1.pep
QSHPTTTTTHTPHTLMXXRAKKNNNTTSMAPHIVVLLLXXPSGXEXWPRFKRDXXLGXXRXETGXXXFXXQLXGEXFSXIGRDLKXEXXWXGFS

SEQ ID NO: 155490 - protein, 70 aa, Glycine max
  Clone ID: PAT_MRT3847_111428C.1.pep
PAKIVNPKVNQRNRTICYGKTIKYSKCLCMLGIGGSCVPVSLRPMFVGYNLQSSTIKFSNRPTGVSLVLK

SEQ ID NO: 155491 - protein, 98 aa, Glycine max
  unsure (1)..(98): unsure at all Xaa locations
  Clone ID: PAT_MRT3847_111429C.1.pep
SAXXGXXXXGGSVPXGGXACXPVAGVVCAAGAPPXGGLLPGXLGCRLVNPPPGGGLPPIAPKRVLCALRRCRSSFXASLGSSXXCASCSXASXRSLCS

SEQ ID NO: 155492 - protein, 99 aa, Glycine max
  Clone ID: PAT_MRT3847_11142C.1.pep
VLPLYTTPCHHYHCLMNDIIALVQHSPNGHVNDLLKCCLQLNQMVSSLPAIMRKFQIQLCRKSQERVFSVLEVMYGPRPESSHYSQIFSLPTHQIQILL

SEQ ID NO: 155493 - protein, 50 aa, Glycine max
  Clone ID: PAT_MRT3847_111430C.1.pep
KKAFSFNLILFIYCYYNKKNSLQIKINYIYIYIYIYIYIYIYIYIYIYIY

SEQ ID NO: 155494 - protein, 160 aa, Glycine max
  Clone ID: PAT_MRT3847_111431C.1.pep
HASDGCEKTQKGTAARRRQKGTAARRRQKGVSSHATQSCLSTFLSQNLCFCVGYIYIKLTSPKPNHISFHFFFLVHPVTMSQTVVLKVGMSCEGCVGAVKRVLGKLDGVESYDIDLKEQKVVVKGNVQPDTVLATVSKTGKKTTFWEGETAASETSTATA

SEQ ID NO: 155495 - protein, 139 aa, Glycine max
  Clone ID: PAT_MRT3847_111432C.1.pep
MAALATNSKTSFQPESDVHITYEDQQMINKFARHNAKLDELKEEIKTKKEYLTNLQDACDELALLEGDVEKVPFFMGESFITQNFEDTQSSLEEAKSRAESEMAEIDQKCGDIKEIMSDLRAKLYAKFGNHINLEADDD

SEQ ID NO: 155496 - protein, 103 aa, Glycine max
  unsure (1)..(103): unsure at all Xaa locations
  Clone ID: PAT_MRT3847_111433C.1.pep
DIPVIPAGYPVVVNNTANLNFFATGINTENTQRGFLAGSQANXVISRIPSRVPQLAFRGSAQGGEKLLYFQIESNIVDAQPPKKKKGNQARKGLLSSNLRAFF

SEQ ID NO: 155497 - protein, 118 aa, Glycine max
  unsure (1)..(118): unsure at all Xaa locations
  Clone ID: PAT_MRT3847_111434C.1.pep
ISXNXYXXXEFXLDXLXSSXHXNPLPTXLXXTPXXXSXSXXXNXXPPNXXPXPXSXXKXXXTXNTTXHXTSXXXXTXXXHXXHXXTAPXXTATXTXXXSXXXQQXXQTXRXXXPXXXN

SEQ ID NO: 155498 - protein, 92 aa, Glycine max
  Clone ID: PAT_MRT3847_111435C.1.pep
FIYVSNVAKYDLSDPEHNNYVKDLTYVPSELPCTIVTISPLVVAHLTELPFEKRHDFWQSFVVRDREVGNLIWGTYDLVGLISYFTYGEHET

SEQ ID NO: 155499 - protein, 85 aa, Glycine max
  Clone ID: PAT_MRT3847_111436C.1.pep
GGPLPTCAYLFFNNNLAFLPVTPRCASKNKVKAILLTGPILQINQICMNAILSLKRYMPCESKIMFPRSEEPCFIPFNFPVLPPL

SEQ ID NO: 155500 - protein, 63 aa, Glycine max
  Clone ID: PAT_MRT3847_111437C.1.pep
LMAKVTGHLLALTKRTVIVVAVWFVGYSDEPHAVVSRHDGDCKETWYDSRIDLSKLRPYVTLA

SEQ ID NO: 155501 - protein, 76 aa, Glycine max
  Clone ID: PAT_MRT3847_111438C.1.pep
QQILFLFFSIFNLSFSIFFNHISIVRFEHPQACQVTTANNTISRFQSQTHAICTCALNDMAVILICCVSASDVQYL

SEQ ID NO: 155502 - protein, 94 aa, Glycine max
  unsure (1)..(94): unsure at all Xaa locations
  Clone ID: PAT_MRT3847_111439C.1.pep
XVSXXLYXAXXXDGVXLXLXSCLXXFXXXXCFLMCFFRWNLGVSSLFPXXFWRSLVLFAFLXLSSSSSLXXXCAXLXGVXXXLGHSFXXCFXPR

SEQ ID NO: 155503 - protein, 145 aa, Glycine max
  Clone ID: PAT_MRT3847_11143C.1.pep
REIHDQVSWTSLITGFSINRQGRDAFLLFKEMLGTQVTPNCFTFASVISACVGQNGALEHCSTLHAHVIKRGYDTNNFVVSSLIDCYANWGQIDDAVLLFYETSEKDTVVYNSMISGYSQNLYSEDALKLFVEMRKKNLSPTDHT

SEQ ID NO: 155504 - protein, 86 aa, Glycine max
  Clone ID: PAT_MRT3847_111440C.1.pep
LPQIHYTKQNITQAKHIIAHNPRLLCLINNHLPYHCGLPMILLTLSNGKKDQAFGVKGSMAKRQEHKVMMIFVAVGVDNIHCDESN

SEQ ID NO: 155505 - protein, 79 aa, Glycine max
  Clone ID: PAT_MRT3847_111441C.1.pep
LPQIHYTKQNITQAKHIIAHNPRLLCLINNHLPYHCGLPMILLTCSMLRFSRDFQEYDKTMSSAYRTFSLTLNRHKTLE

SEQ ID NO: 155506 - protein, 71 aa, Glycine max
  unsure (1)..(71): unsure at all Xaa locations
  Clone ID: PAT_MRT3847_111442C.1.pep
MTLILHQNNPHSIQSLTDAXNALKLHHITYCSLDVLYYRVSYTKKTVPLLNETQVGLDYPIENYTAYGYLT

SEQ ID NO: 155507 - protein, 49 aa, Glycine max
  Clone ID: PAT_MRT3847_111443C.1.pep
TPLSTTPKLITYKSIKAHIDIEKGKSNIVKSYLHTRLTAAAHCDRCDVS

SEQ ID NO: 155508 - protein, 326 aa, Glycine max
  Clone ID: PAT_MRT3847_111444C.1.pep
MGRMPCCEKVGLNKGPWKTEEDEKLVAYVERHGPGNWRSVPAKAGLQRCGKSCRLRWINYLNPNIKRGSFSLEEHRTIVQLHSLLGNKWSIIAAHLPKRTDNDIKNYWNTNIKKGLIGKGLDPLTYKPIKSNTFQAYGGNFLDPSIDTTNMNHVAQSESAQIEAEARESMLQFGSLPSHLPGLILSKIPTQPFPSSASLLTQRINTTYDMYALVLATNHLDLHPPPFTDPESFPSRKLLPSVSTSVGQSTDPESSLSYDGIGYNMIDNSSSQMQMTMECYATNFEDDDVMIALEAFGIARFEGIQELFDGHTTIEVLINESFERDV

SEQ ID NO: 155509 - protein, 265 aa, Glycine max
  Clone ID: PAT_MRT3847_111445C.1.pep
SVPGCILEDFVRWYSPPDWSESEGSSEDRDSFYGGESMSSRGQLSLRMQKEGNLWRELWETSKSVPAVKQTPLYDEDLAVEDILDAFEDIQPSELFGQLFVSLLSFGFAIAETMLSGDIDLSKLFNDCKEYIVTTCQSDRFHEKIDELVQMYETVEKMLLNPDEALKMKHMEESTMTTDESKRRFSTGEPKHRFKRLSHIFGGKDKLLTRPVCKNEVNDEETQIRHSFSSFFDSKSSLFSKKPPKPGNLYPAEQPLSLESDRTVI

SEQ ID NO: 155510 - protein, 57 aa, Glycine max
  Clone ID: PAT_MRT3847_111446C.1.pep
KALQSLEALIRWPSLHEHRSHFFVNVNLNYKRENGAFVLQITINKKLLWFSKKKKKK

SEQ ID NO: 155511 - protein, 110 aa, Glycine max
  Clone ID: PAT_MRT3847_111447C.1.pep
PGKKTPPPNHPKNQGGWGLALYEEYPGPNSPRGAFGPLWPPPQTSNGTRPWEKKGLFPNPLKKYKWGPVSPRKAPPPRGGFPKKRTPFYAPSQRPFKNFSPGGAGESPNF

SEQ ID NO: 155512 - protein, 88 aa, Glycine max
  unsure (1)..(88): unsure at all Xaa locations
  Clone ID: PAT_MRT3847_111448C.1.pep
MLEKDLPASIFVRXFSERLILERGXIIGAEGTSYHYGLFFFDGFFPRAYPNVPAKGHYHSGGVRLNPNLDACGKVCLNLLNTWSGSKN

SEQ ID NO: 155513 - protein, 39 aa, Glycine max
  Clone ID: PAT_MRT3847_111449C.1.pep
IQDCISFVFRSLMMYNIIQNKPERLISMTRCYSLCHPKA

SEQ ID NO: 155514 - protein, 126 aa, Glycine max
  unsure (1)..(126): unsure at all Xaa locations
  Clone ID: PAT_MRT3847_11144C.1.pep
TRPIDFLEFWPSEIAAAVAASVLKESQVIEIDKAXTDLLVVEKGRVLKCVELIRDLSLINVAASLGSKVPYVPQSPIGVLDAGCLSYKSDELTVGSSCPNSSHNTSNPNPTKRSKPDEPSNGTSNS

SEQ ID NO: 155515 - protein, 70 aa, Glycine max
  unsure (1)..(70): unsure at all Xaa locations
  Clone ID: PAT_MRT3847_111450C.1.pep
ASPDRACSLAKQAFVEGIAGLDPLXEESSLGCAVVRQLLGDSLTLWTXHRQEDGAHAIRDAAPTGGWARH

SEQ ID NO: 155516 - protein, 92 aa, Glycine max
  Clone ID: PAT_MRT3847_111451C.1.pep
GSSLIIVGKGRFPSNMVAGLAERQAEHAELGPIGDVLTSSENVVSSVMVIQQHDVASVDDAPVYKVHGKHDKVNDSDSSHKVGISISNDNVV

SEQ ID NO: 155517 - protein, 59 aa, Glycine max
  unsure (1)..(59): unsure at all Xaa locations
  Clone ID: PAT_MRT3847_111452C.1.pep
MATTGYDENGDNRGGMWVLEQKIDHPMDEQAERLKNSLRXERLFTLLLLRLAYPRLGVL

SEQ ID NO: 155518 - protein, 96 aa, Glycine max
  Clone ID: PAT_MRT3847_111453C.1.pep
VLLHHSSKSNPFCQSNYSSIFWNKIRKKVFQPSRLEHKLVPLLYTLLILPSQECSSSLGTSISNLGPTHIPHSPHQVLLTHPPTVPRPHNNLRPRT

SEQ ID NO: 155519 - protein, 66 aa, Glycine max
  Clone ID: PAT_MRT3847_111454C.1.pep
WEETSRECYPDLPCAISPRLLTTTNKRLESADHEGYNAFVGAIANYCSYIMPVGDQHLSKEAHDME

SEQ ID NO: 155520 - protein, 58 aa, Glycine max
  Clone ID: PAT_MRT3847_111455C.1.pep
DFHCYSDNPDYKPCVHDYHAIWNMLLDFLQTLLDDEPCRILKLCSCRLNACKRTALPN

SEQ ID NO: 155521 - protein, 41 aa, Glycine max
  Clone ID: PAT_MRT3847_111456C.1.pep
SRSRIQKRRNKKSYRKERILDTECSLKWAERLLIVIWSYSI

SEQ ID NO: 155522 - protein, 323 aa, Glycine max
  Clone ID: PAT_MRT3847_111457C.1.pep
MANHSSSFGGRSGVRVVVAGDRATGKSSLIAAIATESFAEAVPPVLPPTLLPPDLYPDAVPLTVVDTPSSLEKQRKRNEELKGADVVVLTYACNDTASFSRLSSYWFPELQKLEVKVPVIVVGCKLDLRDESQQVSLECVMTQLLQQFKEIVTCIECSAATQYQVPEVFYFAQKAVLHPVDPLYDHESQALKDRCVRALRRIFVLCDRDMDEALNDTELNEFQVRCFNAPLQSSEIAGVKTVVQQKVPEGFNSHGLTFPGFIYVHNMFLKKGRPETLWAVLRDFGYDNNLKLMDDFLPIPSKRALDQVIDSFFVLCCPPVWFK

SEQ ID NO: 155523 - protein, 90 aa, Glycine max
  unsure (1)..(90): unsure at all Xaa locations
  Clone ID: PAT_MRT3847_111458C.1.pep
YLSLSFSLFQLLVTXTMLLLFPPLSQLASQTRLPLPFPVKAKVKLKVVSEADAFPSFLPKEVHRIKDPFARNLPCGFTDFXFLLGSLKIL

SEQ ID NO: 155524 - protein, 109 aa, Glycine max
  Clone ID: PAT_MRT3847_111459C.1.pep
CLNWPDSTVSWKAGSLCEVVLARLIEHVMVRNPSDCLFLLENICKALGYFGEYDQNRGICLQLISTIYESLILPMQFDSVKHHLIQLSDGNMNKWIPFAQNWIRKPPKK

SEQ ID NO: 155525 - protein, 62 aa, Glycine max
  Clone ID: PAT_MRT3847_11145C.1.pep
VSRGPSSKEEGATNPSGGSEVLKVMYTGRVIQNHRNGSIARAFKHQQLRDLHPYPLVNSLIL

SEQ ID NO: 155526 - protein, 37 aa, Glycine max
  Clone ID: PAT_MRT3847_111460C.1.pep
AGQNINIILSQKLNCSRQNMFILLCPFPNIIKKTKNS

SEQ ID NO: 155527 - protein, 197 aa, Glycine max
  Clone ID: PAT_MRT3847_111461C.1.pep
VREKTGVLFAYGLLLMKQQDLQEARNRLARGLQLTHTYLGNLQFVSQYLTILGSLALALHDTVQAREILRSSLTLAKKLYDIPTQIWVLSVLTALYKELGERGNEMENAEYQNKKLEDLQRRLANAHASIYHIEIIDKVRLEVHQLNDLDIKRAMADPTMGVNLDIPESIGLSAPLSAPSSSRLVDIDTRRRGKRRI

SEQ ID NO: 155528 - protein, 40 aa, Glycine max
  Clone ID: PAT_MRT3847_111462C.1.pep
GFKFVAARQEETKLTAGFYDIKTLLIGHQKIKYWAVNYHL

SEQ ID NO: 155529 - protein, 72 aa, Glycine max
  Clone ID: PAT_MRT3847_111463C.1.pep
MSAKRAILTWLLLLNTVTRQVINIFINNAYDSLRDANVVIDGEMPPRENNLKTKMSCHKRKMSRKLIQLNLG

SEQ ID NO: 155530 - protein, 185 aa, Glycine max
  Clone ID: PAT_MRT3847_111464C.1.pep
GAGTASAWALPGLVGFYPRAESPGVGVWSSAVRGAFWGRWCPGVWGGLPSATEDSSGTSWFMGTIASVQVLDPIRWPNSPWRLLQVSCLGPVLLQQPLRVSPWLRACGPTGPLALPAAFSPPRKKLRFPLDVQFPIPSFSGNPFGSSSSSSPFCCLSDNAPAGIQGARHSQIGISLSDLHLNNKL

SEQ ID NO: 155531 - protein, 63 aa, Glycine max
  Clone ID: PAT_MRT3847_111465C.1.pep
HTPLCRVLGIASYSKSRAALTPTTRKLFKLLYEKSLRKILSCSPKPRVCYTAFDTPWAEHFSF

SEQ ID NO: 155532 - protein, 72 aa, Glycine max
  Clone ID: PAT_MRT3847_111466C.1.pep
HSGIRVGDTKSTRNLVEHQHFRVDPRQDCNRWARTRRTDNCLKKIEEPGGQILLVRDGWCAEALPPYCALTV

SEQ ID NO: 155533 - protein, 88 aa, Glycine max
  unsure (1)..(88): unsure at all Xaa locations
  Clone ID: PAT_MRT3847_111467C.1.pep
GGWTXEAQKRRKGNXTPADAREDXXRNAATKQTNGDXTKKDAXGATXTKTENNKGPRTAQKGDTATRKAXGPDEDRXAGXNXXQDTNK

SEQ ID NO: 155534 - protein, 60 aa, Glycine max
  Clone ID: PAT_MRT3847_111468C.1.pep
GRAQGKDIKPGDSKRLIRYLKVEDVIYVSQNFRNMHDAWDGLDNLKPFFRRNGEYICHGR

SEQ ID NO: 155535 - protein, 228 aa, Glycine max
  Clone ID: PAT_MRT3847_111469C.1.pep
RGIGSFNIPPASLATFVTLSMLVCVVLYDRFFVKIMQRFTKNPRGITLLQRIGIGLIIHIVIMVVASLTERYRLRVAKEHGLVENGGQVPLSIFILLPQYVLMGAADAFVEVAKIEFFYDQAPESMKSLGTSYSMTTLGIGNFLSTFLLTTISHVTKKHGHRGWVLNNLNASHLDYYYALLAILNFLNFIFFMVVTKFYVYRAEISDSIKVLEEELKEKTSNQVIPRD

SEQ ID NO: 155536 - protein, 138 aa, Glycine max
  Clone ID: PAT_MRT3847_11146C.1.pep
IKLKKQKKKGGLFWGSHFFSPVLAPFNFFFFAPFFYFLAGLFTTSFWKNPGVSQFNCLGKIPLFPSWGYKKKAPPDPLFQKLPPLIGNWDPPFFGPLNRGGWGVTPQGPLSFGGPLRPPLFLFFPFFFARFRGFSRKA

SEQ ID NO: 155537 - protein, 332 aa, Glycine max
  Clone ID: PAT_MRT3847_111470C.1.pep
IMPFWRIWNPAGSGGRGVIGVLEANFVEPAHDKQGFERTLVLSRLESKLIQMQKKYWSTNCYKIGYASNRSKIQIRDSADKEASPDYFPESSQSKRKYSTTDGKAPPLTSDKLHSYSNQKRIQKQTEKYRVYINGQSSVSPKRKVQSSSEQSSSDDEVSEVLPKKKTQKLSTAEKSFENENGCFQHTTSRGKTSQYTPGSKLEGKGVNDGEQPLSDNDLLTLEQLKKENRELKERFQRKEEDILGQVLQDLQHEKDRCKSLETQLIDAEKKLEELTNEQETLIDVFAEERDRRDAEEKKLRNKLEEASNTIRELLDKTRKLERKSSSGKPDR

SEQ ID NO: 155538 - protein, 80 aa, Glycine max
  Clone ID: PAT_MRT3847_111471C.1.pep
NTASLLNIWYNLKKNSTHKIMHNYVLSFTCFFILYIYILKKNLLATKKIRKTILYFNYSKTFSNKIKWKDLMDENFGDKA

SEQ ID NO: 155539 - protein, 91 aa, Glycine max
  unsure (1)..(91): unsure at all Xaa locations
  Clone ID: PAT_MRT3847_111472C.1.pep
VAASNGLIAHHLSGVGNGDRGLAIIYGEDFEXVKSRTRVVPFAAILDGCQEFXKDLXKEFISLPSLTVSAITLGAXFAPPLMQADSFNLHW

SEQ ID NO: 155540 - protein, 78 aa, Glycine max
  unsure (1)..(78): unsure at all Xaa locations
  Clone ID: PAT_MRT3847_111473C.1.pep
YASDHAYDHAYDPFVLGGRIGRLTFPYGTFRSXKDMSVSIRGGAVADNAHLMNWQNAGLSKWKYFAGHLLFDGCKMTD

SEQ ID NO: 155541 - protein, 479 aa, Glycine max
  Clone ID: PAT_MRT3847_111474C.1.pep
PNPRIFASTIQVISFGEHLERNTDGTLTAVQTLASTALCGIIHSVLGGQPLLILGVAEPTVLMYTFLYDFAKGRKDLGHKLFLPWTGWVCVWTAVLLFLLAILGACSIINRFTRLAGELFGLLIAMLFMQQAIRGLVEEFGVPQSQREGTNQIALQSSWLFGNGMFALVLSFGLLFTALRSRKARSWRYGAGWLRGFVADYGVPLMILVWTAVSYIPTNKVPRGIPRRLFSPNPWSPGAYSNWTVIKEMLNVPLIYIIGAFIPATMIAVLYYFDHSVASQLAQQKEFNLRKPSSYHYDLLLLGFLTILCGLIGIPPSNGVIPQSPMHTKSLATLKHQLLRNKLVSAARKSMQKNMNLCQLYRNMQEAYDQMQTPLARQIPPALGLKELKESTIQLASSHGYIDSPVDEAVFDVYKDVDDLLPVEVKEQCLSNLLHALMDAACVAAMPLLKKIPTSVLWGYFAFMANESLPGNQFWERIL

SEQ ID NO: 155542 - protein, 147 aa, Glycine max
  unsure (1)..(147): unsure at all Xaa locations
  Clone ID: PAT_MRT3847_111475C.1.pep
ASAKAADAITTPSTQRNGSLXGSTKASLLRGRKLKANSGTAPAGARSSTTERAEAEPDRPLRIPGSTPPPGLEGRMPGDGGCEPPGLGTDPESPRGNVQAQLAHCRRANEGAAGSYTPESRTKTATLDTPPWNTGGEREYFTDNYHT

SEQ ID NO: 155543 - protein, 79 aa, Glycine max
  Clone ID: PAT_MRT3847_111476C.1.pep
QTTSTISGVFPWFPIVPQVITSSRSSRVPFLPSSATNYFGSSRHFLPSVSAWNTPALAFPTLQPFITQTRNKVNISLHM

SEQ ID NO: 155544 - protein, 75 aa, Glycine max
  Clone ID: PAT_MRT3847_111477C.1.pep
RANPLPVLSLGSRSSSCSLRNSIRTGHTLLASPIIRMLGLILSRLLIHYILCQAPFPVLSLSRTACFNLFYVPPF

SEQ ID NO: 155545 - protein, 427 aa, Glycine max
  Clone ID: PAT_MRT3847_111478C.1.pep
MKFQDYEPPSSPKHMIPKVTLLAILVILIFAITPLWYPLLSYSTSHLKINKNNIPSSSSHDQGQEENLPSTYVEKCDIFSGEWVPNPKAPYYTNKTCWAIHEHQNCIKYGRPDSEFMKWRWKPSECELPIFNPFQFLEIVKGKSMAFVGDSVGRNQMQSMICLLSRVEWPIDVSYTTDEYFKRWKYPSYNFTMATFWTPHLVRSKMADSHGPSNTGLFNLYLDEFDEKWSTQMVVLAYIVLDGGHWFYRPMVFYEKQKIVGCHYCLLENVPDLTMFYGYRKAFRTAFKAIDSLENFKGIVFLRTFAPSHFENGKWNQGGNCVRTKPFRSNETRLESTNLELYMIQLEEFKKAEKEGRKKGLKLKLLDTTQAMLLRPDGHPSRYGHWPQENVTLYNDCVHWCLPGPIDTWSDFLLEMLKMEGMRSAIS

SEQ ID NO: 155546 - protein, 49 aa, Glycine max
  Clone ID: PAT_MRT3847_111479C.1.pep
QMNLYFDDNKIGKNNLICLILENSFFYYKKNVTLFLLFSKQTFKKIKTT

SEQ ID NO: 155547 - protein, 47 aa, Glycine max
  Clone ID: PAT_MRT3847_11147C.1.pep
MGRLFVTHLEGQIYTCKHCRTHLALYEDIVSKAFHSRHGRAYLFSKV

SEQ ID NO: 155548 - protein, 45 aa, Glycine max
  Clone ID: PAT_MRT3847_111480C.1.pep
GSSGSSCSRIRAATFFLYFRSSCSSDLSPIIPQKTKKKISQMNLI

SEQ ID NO: 155549 - protein, 225 aa, Glycine max
  unsure (1)..(225): unsure at all Xaa locations
  Clone ID: PAT_MRT3847_111481C.1.pep
GTDAADALEVIALLXRTKQGVNYTYPPWSALAEMPSSLELLVCCLAEGHSLVQEKAIKILSRLCGDQPVVLGDLLSASSKSIGSLANRIMNSSSLEVKIGGSSLLICAAKEKKKLSMDSLDASGYLKPLIYSLVEMIKQNCSYSSLEIEVVTSKGFMERNSFQEVDEFDIPDPATSLGSTIAMWLLSVIASFHIKSKLTIMEAGGLEALFDKLARHTSNPQVHYI

SEQ ID NO: 155550 - protein, 63 aa, Glycine max
  Clone ID: PAT_MRT3847_111482C.1.pep
KKKKKKKKKKKKKKKKKKKKKKKKKKKKKKKKKKKKKGGAVLRDPILLPRACNALAFFWGPLI

SEQ ID NO: 155551 - protein, 121 aa, Glycine max
  Clone ID: PAT_MRT3847_111483C.1.pep
MAFSSTLLLLLVAMFVFSAVAQSPASSPEFAAAPPKTATPSPSSSMSPPAAAPSPSSSVVSSPPSPPTSVPASSPSPSISPSSISSPPSDAPAPSENAAVSNGFAAVGSVVVGLVAAASIM

SEQ ID NO: 155552 - protein, 65 aa, Glycine max
  Clone ID: PAT_MRT3847_111484C.1.pep
KALLTGDPLKTPPLFKHTTLLKWFKKTQSLMPPGGETLKAKKPSTKQGFNRNLWLSCLNIKTYLF

SEQ ID NO: 155553 - protein, 66 aa, Glycine max
  Clone ID: PAT_MRT3847_111485C.1.pep
ASIVRRILMMCLLGHYIWSPNFRTFIKVDSSRCLSWSILRGEYILDSCSTRSCSVTTRYGYYPDVW

SEQ ID NO: 155554 - protein, 70 aa, Glycine max
  Clone ID: PAT_MRT3847_111486C.1.pep
DLQLCTNLRNPITYPIFLFTKKMIKYGPSHIELLESILRSLDGPYLGQAHAIMPKARAQNHTSKHVCTTL

SEQ ID NO: 155555 - protein, 75 aa, Glycine max
  unsure (1)..(75): unsure at all Xaa locations
  Clone ID: PAT_MRT3847_111487C.1.pep
MFLSFLLLNTWNNILHVLPQTYALTFFLFGHSLLDNTNNNYLFTTNRAYSYPYXIHYTTHRATVLFFNDLNIPNI

SEQ ID NO: 155556 - protein, 62 aa, Glycine max
  Clone ID: PAT_MRT3847_111488C.1.pep
MNRKFGGGKQPTGTPSLAWSCVVVVFSLLAGASVVHNIFKPNLTLPPVDGVDSNKQKHDEKE

SEQ ID NO: 155557 - protein, 61 aa, Glycine max
  Clone ID: PAT_MRT3847_111489C.1.pep
HKPLLYPEDRGTVPLLRSLLRLFQNPLTISSSVFHAHAWLSIIQCECSNLRPSFRFCSREE

SEQ ID NO: 155558 - protein, 111 aa, Glycine max
  Clone ID: PAT_MRT3847_11148C.1.pep
SFLGPPTIFFPKRPLKKKPSLKNPPMGNENFGPARKKKNFRKKQTKINPFWGKPRGKPAKLKIDLGSSKAPKGAGKNPRGPKKTGFFGKGGPKEGFWGTGGVFFIKKNPGG

SEQ ID NO: 155559 - protein, 93 aa, Glycine max
  Clone ID: PAT_MRT3847_111490C.1.pep
KMATRGSKPRFVLIIVLPLLLSLMCQEIVATGRLRSKEGCTSTGIECNVKVTGSHDPLEMDEYGQAYVSPPHDDYDYDFYRKHGDIPSPGVGH

SEQ ID NO: 155560 - protein, 64 aa, Glycine max
  Clone ID: PAT_MRT3847_111491C.1.pep
DPPTSCGAGPVAEHMFHWQERIMGPPDSSYAGGVFLVTIHFAPDYPFKPPKVAFKIKVFDPDIN

SEQ ID NO: 155561 - protein, 70 aa, Glycine max
  unsure (1)..(70): unsure at all Xaa locations
  Clone ID: PAT_MRT3847_111492C.1.pep
MSTKQGGKAXPLKKPKSDKKDYDEIDVANIRERXEEDKALEELIAQALHKASLESSVLKKSGKNKGLFIM

SEQ ID NO: 155562 - protein, 63 aa, Glycine max
  Clone ID: PAT_MRT3847_111493C.1.pep
EICPVFESSPKLGDITKIILKIIFFPIIKKYHKKIYFLKKNHKKIDYQSNKQKIQKYLQFLKH

SEQ ID NO: 155563 - protein, 55 aa, Glycine max
  Clone ID: PAT_MRT3847_111494C.1.pep
NSEPDTGWCQEGGLKCGHGCREKKIENSPYKKGTFFLSYSIYIYKKEERKRQAKK

SEQ ID NO: 155564 - protein, 57 aa, Glycine max
  Clone ID: PAT_MRT3847_111495C.1.pep
MGDKKKKAQMFVKLVSAAGTGFFYVKRKPRQFTEKLEFRKYDPRVNRHVLFTEAKMK

SEQ ID NO: 155565 - protein, 66 aa, Glycine max
  Clone ID: PAT_MRT3847_111496C.1.pep
GPKKNGPPFFLTRNPLPSPWVILQKTGVLMTPRFNLKKQTPSRGPVWEFFFLNLEQNNQDCPFPCF

SEQ ID NO: 155566 - protein, 74 aa, Glycine max
  Clone ID: PAT_MRT3847_111497C.1.pep
MNLRFQLLSTTTNGDFVQGKHLAMDKVNVTCAAVGLTSSHTPTPLLESGSHNDRRLTGLHLLTRCITDPLLTFT

SEQ ID NO: 155567 - protein, 84 aa, Glycine max
  Clone ID: PAT_MRT3847_111498C.1.pep
SDLMMEMNILASSFSGYAKPFVRVNPSLLTLRASSLRHDYPLASKIVVKSNILFSPSYPSILFNVNTYLMHALLLSIVLVLFEP

SEQ ID NO: 155568 - protein, 72 aa, Glycine max
  Clone ID: PAT_MRT3847_111499C.1.pep
VGLKLGNLLVSITSLCSVHVTLTGVKVLGFMLMRTEKGFWYSLWTIHYMLSLRKLTHGMHEASAFNYHDVRD

SEQ ID NO: 155569 - protein, 30 aa, Glycine max
  Clone ID: PAT_MRT3847_11149C.1.pep
FTTARDMWSFGCIAAELHTGLPLLPGASEF

SEQ ID NO: 155570 - protein, 94 aa, Glycine max
  unsure (1)..(94): unsure at all Xaa locations
  Clone ID: PAT_MRT3847_1114C.1.pep
LAYSSQFGSSRXXVXXTGSNFNXRXPXXPXXSKVXXPXXSLSRXILYTKGXXDKISVVVXAXXDDIRVYEVXALKXTAXRFTXTAXARIXXGWW

SEQ ID NO: 155571 - protein, 165 aa, Glycine max
  Clone ID: PAT_MRT3847_111500C.1.pep
DGFPITQRTFQISPSMPTMDTGVIWWSKVYDRETEKKVFNYVVHCTQNSNLAEWFICNTTYELEPKALSFVPKLLPVGPLLRSYDNTNTNASSLGQFWEEDHSCLNWLNQQPHGSELYVAFGSFTHFDQNQFNELALGLDLTSRPFLWVVREDNKLEYPNEFLGN

SEQ ID NO: 155572 - protein, 94 aa, Glycine max
  Clone ID: PAT_MRT3847_111501C.1.pep
KKFIAPVGPLTHFFNIFLARLPGFLLGPGWNHLKTRPFKVGKEPKTLSNLFFVTPKQQIKGLCFPKHHHGSQGIWGTRRATLWELKKGPVLCPG

SEQ ID NO: 155573 - protein, 43 aa, Glycine max
  unsure (1)..(43): unsure at all Xaa locations
  Clone ID: PAT_MRT3847_111502C.1.pep
TYVCIRFERILRFRHRECLXXEDSXRYXLGSCPTGTCAFNICW

SEQ ID NO: 155574 - protein, 58 aa, Glycine max
  Clone ID: PAT_MRT3847_111503C.1.pep
KKELPFFFFLQVRLAFFGGLGSGVAGPIFSMVKPGPLFQKDLEGLKNFRPPPQGDWPP

SEQ ID NO: 155575 - protein, 78 aa, Glycine max
  Clone ID: PAT_MRT3847_111504C.1.pep
RSPFIPFPFWTLALKKKFVQLLSPPHCKCSSGHYLSCKKVNVEIGPPPLTKMEGLVTRFKVNFIWPEPPLMIFEVPPP

SEQ ID NO: 155576 - protein, 467 aa, Glycine max
  unsure (1)..(467): unsure at all Xaa locations
  Clone ID: PAT_MRT3847_111505C.1.pep
MNMMRRLKSIASGRTSVSSDPGGDCTTKRVKFDQETEGKVNEETYPNERCGKDQEQYVDALKESSNSNVPSVTRTEKSGFDQLPKELNEMKIGDDKGXNNNEKDMEGTILNGNGTETGEISTTAIGGRDGQPMRTLRDTDACLPNGRPFSPLFNFTAQELADAPDELRXVSYLSMQDRELQVMRMLDHTNVLRLKHCFYSTAEKDDLYLNLVLEYVPETVYRVSKHYVRMHQHMPIINVQLYTYQICRGLNYLHHVIGVCHRDIKPQNLLVNPQTHQLKVCDFGSAKMLVPGEPNISYICSRYYRAPELIFGATEYTTAIDIWSAGCVLAELLVGHPMFPGESGVDQLVEIIKILGTPTREVMLRETTEGTEFKFPQIKAHPWHKVFHKKMPSEAVDLVSRMLQYSPNLRCTALEACAHPFFDDLREPNACLPNGRPLPPLFNFTAQELADAPDELRRRLIPEHARS

SEQ ID NO: 155577 - protein, 35 aa, Glycine max
  Clone ID: PAT_MRT3847_111506C.1.pep
RKPSSRLTTEVAHNAAAALNGSDHMRAANGQARLD

SEQ ID NO: 155578 - protein, 49 aa, Glycine max
  Clone ID: PAT_MRT3847_111507C.1.pep
ATVNFWVASFLHEFEWVPSDEKGVDLTEVLKLSSEMANPLTVKVRPRRG

SEQ ID NO: 155579 - protein, 165 aa, Glycine max
  Clone ID: PAT_MRT3847_111508C.1.pep
CPTRPYGCEKTTEGKAVIKETLRLHPATPVLIPRESMQDTKVMGYDIAAGTQVLVNAWAISVDPSYWDQPLEFQPERHLNSSIDIKGHDFQFIPFGAGRRGCPGIAFAMLLNELVLANIVHQFDWAVPGGLLGEKALDLSETTGLSVHKKLPLMALASPHHLSQN

SEQ ID NO: 155580 - protein, 48 aa, Glycine max
  Clone ID: PAT_MRT3847_111509C.1.pep
FSRLFKLIQLTFQSRLCAKQCFIIAICLCKLGLTFEVLSLFIQVCSPF

SEQ ID NO: 155581 - protein, 42 aa, Glycine max
  Clone ID: PAT_MRT3847_11150C.1.pep
FSAHNLARTTNGIGRTRPYERDSSKEGTDERENHHRSPRTGS

SEQ ID NO: 155582 - protein, 64 aa, Glycine max
  Clone ID: PAT_MRT3847_111510C.1.pep
QLSCKSPMNNNLTFLCMVIIFPYKVIGKKRYIMQSINYIDTHKPKNAEEEELAEKREREEWSRS

SEQ ID NO: 155583 - protein, 97 aa, Glycine max
  unsure (1)..(97): unsure at all Xaa locations
  Clone ID: PAT_MRT3847_111511C.1.pep
RLRKTTEGVFGMMGSGLFTVLFGLGYWLDVHVLGFFVGVQIVCGVFQSIGCPCVFTVVGXCLGTTKKVINGXWNSHTSVGGIIIGQLVAQGPLEFGL

SEQ ID NO: 155584 - protein, 65 aa, Glycine max
  Clone ID: PAT_MRT3847_111512C.1.pep
LEARRSLPSSFSTGTFRRRRSGGTSTALTPASNARSTAAIRVRTSYSLSICSATYAYLTGALNSL

SEQ ID NO: 155585 - protein, 126 aa, Glycine max
  Clone ID: PAT_MRT3847_111513C.1.pep
PPLGFKRPFPRFSAPREPLCLGFPKVGFSRFITPFGFGGGFYFPRAGPGHKRFFFWRLGVKRFPPQVGAPGKKTPCFLKGPHWPPPVFRGFFMARAPFPPKFPLGGGGPPGWFPGFFFLGEIFVLW

SEQ ID NO: 155586 - protein, 71 aa, Glycine max
  Clone ID: PAT_MRT3847_111514C.1.pep
FSTFWGCFYSVSKKLFRLGCLIFWWLVSYMGWCCCIAALLYIWNSFFKKGGFADKIVFLTQKIRILFLWRG

SEQ ID NO: 155587 - protein, 115 aa, Glycine max
  Clone ID: PAT_MRT3847_111515C.1.pep
MTMGDHNNWGTSELSLNNQYQNHNQVGLDVPKFKSVQPPSLLFSPSSISPSSYFNFSSAFSPSEFLNSPLFFPSPNIFASPTTEALVGQSFNWRNGSGEEQQRGKEDEKNYSDFS

SEQ ID NO: 155588 - protein, 90 aa, Glycine max
  Clone ID: PAT_MRT3847_111516C.1.pep
MVRVSKEVLQKAAKTLSDILVCPLSKQPLRYCQESNSLISDAIGVAFPIKNGIPCLVPRDGKVLEEEDASKPDHDINLSAVNEENRGRSA

SEQ ID NO: 155589 - protein, 46 aa, Glycine max
  unsure (1)..(46): unsure at all Xaa locations
  Clone ID: PAT_MRT3847_111517C.1.pep
SHASVHQASFADYXASTSFLFPGHGAQAVXMGKDALNVPAWTCSTG

SEQ ID NO: 155590 - protein, 49 aa, Glycine max
  Clone ID: PAT_MRT3847_111518C.1.pep
DHTTGRYDIRPTFYKVLRIIHDILPLSFVHIRHTQYFVLIMTIITFHSI

SEQ ID NO: 155591 - protein, 72 aa, Glycine max
  Clone ID: PAT_MRT3847_111519C.1.pep
HPIHQPSKKMHSPPRRNYVGRNSRGLEINTRFMGSAYSRSAPHFFERGVRSLPFSMIRRHRKIANLLAPELD

SEQ ID NO: 155592 - protein, 44 aa, Glycine max
  Clone ID: PAT_MRT3847_11151C.1.pep
KLFLAIPLTTQAYNNFCPHFQLFNLVSSLPSKSLDLKIIKKQND

SEQ ID NO: 155593 - protein, 58 aa, Glycine max
  Clone ID: PAT_MRT3847_111520C.1.pep
IRLELEPNRLETASKDYLFLSSPPTCPAGSPSGTWGCPSSIKFLTLSCYKTYFLSFNI

SEQ ID NO: 155594 - protein, 135 aa, Glycine max
  Clone ID: PAT_MRT3847_111521C.1.pep
MEAAENDSVVLETTEPSSSHGSDGDDHLRQSSDVLAKGLSSMLSSVINDFDFRAQQTLQSQNHLSSVIDRLTGELDQLLEDAPLPFIMQHAAKISSVRKRVSSLNSLLKSIQGRIDNIDRMLSFGTTHGIEKNNH

SEQ ID NO: 155595 - protein, 68 aa, Glycine max
  Clone ID: PAT_MRT3847_111522C.1.pep
NETTRGTRNRRCSTGDRSSTPANFRSLHLLHRRLCHADIHIGICSWNLVVRVYKDHWSKIVIDGLRSA

SEQ ID NO: 155596 - protein, 61 aa, Glycine max
  Clone ID: PAT_MRT3847_111523C.1.pep
AVMPFLCAYLLLLESDLSTKCDYVIAATCTKLLSFYSIHSIRIVKYKGLSLWSLQRVHNSH

SEQ ID NO: 155597 - protein, 137 aa, Glycine max
  Clone ID: PAT_MRT3847_111524C.1.pep
MQTSLTFAAPNVVPLAQTKSFSHVAIFPTNLKAPRSSPRYSPIRVAIVEPDTSTVDYNSAFSVFPAEACETVGGEACMAEMYPEVKLQPEAKTPRVVTENVEREYLEYDDPKTVFRGEACDDLGGTFCETEYQKGVY

SEQ ID NO: 155598 - protein, 139 aa, Glycine max
  Clone ID: PAT_MRT3847_111525C.1.pep
GKTGFLSNFLKKIGETLFPKKGKKLLKGSPCKTLKAMATGTSVCPKKRTINFPTAQNSLLWENIFRLTLEIRQAKRKCEKRMRFVIGGMLLLSFRQAKGKVSSSSSAGLSSTANALIVVGLFQQERMDYHYDEGNEGRP

SEQ ID NO: 155599 - protein, 123 aa, Glycine max
  Clone ID: PAT_MRT3847_111526C.1.pep
SSYSRPPSFFLFFSFLFFLFCVFFKHFGGKNTLLKHMLIMSKTKTFFSFKRTKILPPPPLLMNKNQWKNPFKPFFLIPKTSYTLPFLTQPLSDLFLDHGNYSKEAPFAPPNFAFFSSHKGVWS

SEQ ID NO: 155600 - protein, 55 aa, Glycine max
  Clone ID: PAT_MRT3847_111527C.1.pep
DSQWINANQIQNVIQTQSISCKINISQSCQSSPRYKWYLINKWACDCLRINSGNA

SEQ ID NO: 155601 - protein, 68 aa, Glycine max
  Clone ID: PAT_MRT3847_111528C.1.pep
PGRPRARGAIAQRGEIRLCEKYNRESLEQKLRTHQLKLSALKLESKTQLYFLLSGVRETHCKDIMRNG

SEQ ID NO: 155602 - protein, 233 aa, Glycine max
  Clone ID: PAT_MRT3847_111529C.1.pep
MDQKVDFSAPHSMGTTIIGVTYNGGVVLGADSRTSTGVYVANRASDKITQLTDNVYVCRSGSAADSQIVSDYVRYFLHQHTIQLGQPATVKVAANLVRLLAYNNKNFLQTGLIVGGWDKYEGGQIYGVPLGGTIVQQPFAIGGSGSSYLYGFFDQAWKEGMTKDEAEDLVKKAVSLAIARDGASGGVVRTVIINSEGVTRNFYPGDQLPLWHEEMEAHNSLLDILGVPEPMSM

SEQ ID NO: 155603 - protein, 51 aa, Glycine max
  Clone ID: PAT_MRT3847_11152C.1.pep
PVRIPGRPRVRYTLRTEVIPGRFLMTDCCECLTRFYYSSGQLPELQACKAL

SEQ ID NO: 155604 - protein, 46 aa, Glycine max
  unsure (1)..(46): unsure at all Xaa locations
  Clone ID: PAT_MRT3847_111530C.1.pep
MHSLFIMWAAKKITLKRSDREAFXVEEAVALESHTIKHMIEDDCAD

SEQ ID NO: 155605 - protein, 105 aa, Glycine max
  Clone ID: PAT_MRT3847_111531C.1.pep
EDDRRGTSLEDLPPPTPGADPRATNNPATTRTVSAVVVTEPPKTVASSAGPGPRQLPPPPPPPPNPSTGHLTANTTQTLSFRLVGPPPSVRLRQTTLGQAPGHGP

SEQ ID NO: 155606 - protein, 91 aa, Glycine max
  unsure (1)..(91): unsure at all Xaa locations
  Clone ID: PAT_MRT3847_111532C.1.pep
VGKVNFSPGGKPFFFKGNPFSPFGGGGFFMGAARASTLSGPPLALVXRGLAPXGTGLSFGPPHHFFGWGPFGGFGFSRALFFVSPSPLLKG

SEQ ID NO: 155607 - protein, 116 aa, Glycine max
  Clone ID: PAT_MRT3847_111533C.1.pep
MASSEADSRLSQVVVPALEKIVKNASWRKHAKLAHECKSVIESLSHQQAPPPPGSPSDTEPETAVPGPLQDGGPVEFSLAESESILAPLINAAVSGVLKIADPAVDAIQKLIAHGY

SEQ ID NO: 155608 - protein, 50 aa, Glycine max
  Clone ID: PAT_MRT3847_111534C.1.pep
QRGIPEYITFLEHFLVVLASQITVKEARWGQKSKDHHHLRPTLNQEIIMF

SEQ ID NO: 155609 - protein, 43 aa, Glycine max
  Clone ID: PAT_MRT3847_111535C.1.pep
RREDFEMLLKGSLSELDWLSEAYPLSEEVSSLSEYPSVVFSQP

SEQ ID NO: 155610 - protein, 139 aa, Glycine max
  Clone ID: PAT_MRT3847_111536C.1.pep
FYPAFTRSHNGGFFQTNRGPITNIAAGRPEEATHPDTLKADLAEFISTFIFVFAGSGSDISYYKLTDNGAATLAGLISSYIAHAFPLYVAVFIGANICGGHMNPSVTFCAFRGCNITFLRGIVYVIGQLLRFIVGSLLL

SEQ ID NO: 155611 - protein, 57 aa, Glycine max
  unsure (1)..(57): unsure at all Xaa locations
  Clone ID: PAT_MRT3847_111537C.1.pep
GASMNQAVSLDPLXVTWSWTHHWVYRVGPFIGAAIAAVIYDNIFIGDDGHEPLSSSD

SEQ ID NO: 155612 - protein, 86 aa, Glycine max
  Clone ID: PAT_MRT3847_111538C.1.pep
NPNQLPPRSTTSQTTMNKIVLFAALFAFFFILIEAAPMKIVPQPAAPAPKASVCDACTEVIGLLESAGLLTNSTATQIETALNQVC

SEQ ID NO: 155613 - protein, 77 aa, Glycine max
  Clone ID: PAT_MRT3847_111539C.1.pep
MASLMLSSPAVTTDNRAGAGMVAPFTGLKSMAGFPTRKTINDITSIASTGGRVLCMQVRPPLGKKTFETLSYLPDLD

SEQ ID NO: 155614 - protein, 35 aa, Glycine max
  Clone ID: PAT_MRT3847_11153C.1.pep
TMALKSNTILKKSDSTMIILCHYNTLKTNTTTLQF

SEQ ID NO: 155615 - protein, 60 aa, Glycine max
  Clone ID: PAT_MRT3847_111540C.1.pep
ASTIFIMFSMPVHPTQHSHFYYIEFILLLAFTTQYLVPYIIDLMQYNFPISLSTFWLQIT

SEQ ID NO: 155616 - protein, 90 aa, Glycine max
  Clone ID: PAT_MRT3847_111541C.1.pep
MKLVFGTLLLCSLLLSFSFLEPVIAYEDSSYCSNKCADRCSSAGVKDRCVKYCGICCAECKCVPSGTYGNKHECPCYRDKLNKKGKPKCP

SEQ ID NO: 155617 - protein, 90 aa, Glycine max
  Clone ID: PAT_MRT3847_111542C.1.pep
MKLVFATLLLCSLLLSSSFLEPVIAYEDSSYCSNKCSDRCSSAGVKDRCLRYCGICCAECKCVPSGTYGNKHQCPCYRDKLNKKGKPKCP

SEQ ID NO: 155618 - protein, 339 aa, Glycine max
  Clone ID: PAT_MRT3847_111543C.1.pep
MSWGLGWKRPSEIFHLTLSYGIDDPPENLARTSTSSRSSSSSSSSSSSSGSISSILSQDQDLGFRIELDWSASDDEDQVALKLQSQLMVALPMPQDTVVVELRPRDDDESVVDLGMKLVKRREPLRAVTMAKAVASGQQSDGTGILIRLLRSDLPSSMPPNVGDAVAGSGHHWTSLAALSLCGCGLSVLPVELTQLPHLEKLYLDNNRLTVLPPELGELRSLKVLRIDNNMLVSVPAELRQCMQLVELSLEHNKLVKPLLDFRAMAELRVLRLFGNPLEFLPEILPLHKLRHLSLANIRIVADENLRSVNVQIEMENSSYFGASRHKLSAVFSVIFRFF

SEQ ID NO: 155619 - protein, 104 aa, Glycine max
  Clone ID: PAT_MRT3847_111544C.1.pep
MSVKNLYIEKYVAGGSMFHSANSLTSCANYVSNDHTQPPPNMSNLNLDEDDDHDDDDYLVSNSYVEESLDEDDSVDGISDTDNEVPDMIPPVRIVHPAEGMNSS

SEQ ID NO: 155620 - protein, 60 aa, Glycine max
  Clone ID: PAT_MRT3847_111545C.1.pep
KLIFCKQFNLYFRNAIKLFLFIFLYLDVHLLLLNKSRNMKPRKSGGIGPSNWSDSTIGEY

SEQ ID NO: 155621 - protein, 60 aa, Glycine max
  Clone ID: PAT_MRT3847_111546C.1.pep
CNTTLPGGLILLDTKALWNDCLLLLSMGQVPKSLKVIKMDFYMNKALWKKVRNEPAQRML

SEQ ID NO: 155622 - protein, 104 aa, Glycine max
  Clone ID: PAT_MRT3847_111547C.1.pep
LGYPSTNMESYLANSSYGPSDCQDICWKNCSCIAYSDYDGNNETGCTFYHWNSTKGTNLASGGMKFRLLVKNTDRKGKSTIISQLPIYHFNLFHNFFNSNTKSC

SEQ ID NO: 155623 - protein, 221 aa, Glycine max
  Clone ID: PAT_MRT3847_111548C.1.pep
MEEEAKVVLLGARFSMFEMRVKIALAEKGIKYEYMEQDLTNKSTLLQEMNPIHKKIPVLIHHGRPICESLIIVEYIDMVWDNNCPLLPSDPYHKAQARFWADFVDQKVYHASKRVWISKGDEKEVAKKDFLESLKQLEEFLGDKPYFGGDTFGFVDVALIPFYCWFYTYETFGNFKVEGEYPKLISWAKRCMQKESVSETLADEREVYEAVLDYKNKFILN

SEQ ID NO: 155624 - protein, 89 aa, Glycine max
  Clone ID: PAT_MRT3847_111549C.1.pep
SCYSVCDQYSWLNINSQTTLQVSNILTTNRYCGVSPEIEPLIGYTVTNQVAMNPIITVLDATPMIGIRISEASVQSDMTQSPFKVNPGP

SEQ ID NO: 155625 - protein, 63 aa, Glycine max
  Clone ID: PAT_MRT3847_11154C.1.pep
LWDTMLNRGLEPDLVAYNLLIYGCCVNGELDKAFELRDDMLRRGVKPRQNLHAFLKGKYKSTI

SEQ ID NO: 155626 - protein, 89 aa, Glycine max
  Clone ID: PAT_MRT3847_111550C.1.pep
MFGVIRRKLRHLYSRILWLLWKRPKSKVVIKRFRKLNFKGHHRAELRKNKSTSDSNGLLVESQSGRPIRIATFNVAMFSLAPACSKFDE

SEQ ID NO: 155627 - protein, 103 aa, Glycine max
  Clone ID: PAT_MRT3847_111551C.1.pep
IPEPKKNFPGHKQKKQKRPPNGGGNQNWLVKTNGNRKKKKKKALKKPPPRKRHGKNKQKKKKKPKKKKKKQRPQKKREKKPKNKRERAKERETRARNRRPTPP

SEQ ID NO: 155628 - protein, 87 aa, Glycine max
  unsure (1)..(87): unsure at all Xaa locations
  Clone ID: PAT_MRT3847_111552C.1.pep
AHSSAPSLLSLWAPAAQGGFPRGCQSGNLCTLVALHGGFXLIEIMFRLFQPPRKHDIXPYNAIALSGALAVYVSVFLMDPLEKEDES

SEQ ID NO: 155629 - protein, 540 aa, Glycine max
  unsure (1)..(540): unsure at all Xaa locations
  Clone ID: PAT_MRT3847_111553C.1.pep
MATASVAFKSREDHRKQIELEEARKAGLAPAELDEDGKEINPHIPQYMSSAPWYLNAERPSLKHQRKWKSDPNYTKSWYDRGAKIFQADKYRKGACENCGAMTHDSKSCMERPRRVGAKWTNKHIAPDEKIETFELDYDGKRDRWNGYDASTYARVIERYEARDEARKKYLKEQQLKKLEKSNQNGEDAASDEEEEEDEDEDEDDLRVDEAKVDESKQMDFAKVEKRVRTTGGGSTGTVRNLRIREDTAKYLLNLDVNSAHYDPKTRSMREDPLPDADPNEKFYLGDNQYRNSGQALEFKELNIHAWEAFDKGQDVHMQAAPSQAELLYKNFKVMKEKLKYQTKETIIEKYGNAADEDKLPRELLLGQSERQVEYDRAGRIIKGXEVXLPQEEQRRERLQKMRGTANIMLDGTMRLLHRTWRHTGXRKYCTGAAGIDAAEAASDLKKANIARKEAATEDPTPVEEKKLATWGTDVPDDLVLDEKLLAEALKKEDQRKREEKDERKRKYNVRWNDEVTAEDMEAYRMKKVHHDDPMKDFLH

SEQ ID NO: 155630 - protein, 540 aa, Glycine max
  Clone ID: PAT_MRT3847_111554C.1.pep
MATASVAFKSREDHRKQIELEEARKAGLAPAELDEDGKEINPHIPQYMSSAPWYLNAERPSLKHQRKWKSDPNYTKSWYDRGAKIFQADKYRKGACENCGAMTHDSKSCMERPRRVGAKWTNKHIAPDEKIETFELDYDGKRDRWNGYDASTYARVIERYEARDEARKKYLKEQQLKKLGESNQNGEDAASDGDEEEEEDEDEDDLRVDEAKVDESKQMDFAKVEKRVRTTGGGSTGTVRNLRIREDTAKYLLNLDVNSAHYDPKTRSMREDPLPDADPNEKFYLGDNQYRNSGQALEFKELNIHAWEAFDKGQDVHMQAAPSQAELLYKNFKVMKEKLKYQTKETIIEKYGNAADEDKLPRELLLGQSERQVEYDRAGRIIKGQEAALPRSKYEEDVYINNHTTVWGSWWKDHQWGYKCCKQTIRNSYCTGAAGIEAAEAASDLMKANIARKEAATDDPAPVEEKKLATWGTDVPDDLVLDEKLLAESLKKEDQRKREEKDERKRKYNVRWNDEVTAEDMEAYRMKKVHHDDPMKDFLH

SEQ ID NO: 155631 - protein, 490 aa, Glycine max
  unsure (1)..(490): unsure at all Xaa locations
  Clone ID: PAT_MRT3847_111555C.1.pep
MTPKLQTAASVVATAMLLRSLARDYVPAELHHYLRCKLSKLLSSFSSELTLVIDEFHGLTPNPLFSAAQLYLKPHAAPDTKRFRATLPPKSRHVSLLVERNGETTDTFNSVQFRWKLVSERVPARFIHQDSFHSFSKSEVRFFELRFHKKHRDMVLSEYLPRVMEEAEVARERRKTLKLFTPADMRMVGRRGCEMWQGVNLDHPAKFETLAMDLEMKEMIIKDLDTFLERKFLYKNVGKAWKRGYLLSGPPGTGKSSLIAAMANYLNFDVYDLELTDVRRNTDLRKLLIGTGNRSILVVEDIDCSLTLRVSLACPSSSQPVAISPWPSLPLDHPXPRGSFSACLYFVGGWWSSGGDATNTGFTTNHKNKLAPALLRPGRVDVHIDMTYCTPCGFKMLAFIYLGITEHPLFXEVETLLKTTHVTPAEVGEQFLKNEDPEXPLESLMELLIEKGRNHEKNKAALTIECFESAESFENEARLRHASRGSVIPR

SEQ ID NO: 155632 - protein, 178 aa, Glycine max
  Clone ID: PAT_MRT3847_111556C.1.pep
QDRLAKPKSSQPVAITPWPFHPHDNPKPQVTLSGFLNFIDGLWSSCGDERIIVFTTNHKNKLDPALLRPGRMDVHIDMTYCTPCGFKMLAFNYLGITEHPLFVEVETLLKTTNVTPAEVGEQFLKNEDPEIALESLMELLIEKGRNHEKNKAALTIECFESHWSSSAMSQLQQKVGAL

SEQ ID NO: 155633 - protein, 42 aa, Glycine max
  Clone ID: PAT_MRT3847_111557C.1.pep
IMVTIARYGYANVLRIDWALLLQVFLTYHITSDHCDARMWSK

SEQ ID NO: 155634 - protein, 71 aa, Glycine max
  Clone ID: PAT_MRT3847_111558C.1.pep
KIAHMWLNLLNSNRLRTIRGTWSKGSSKERHGGLDDTFHRRDRDQPPLRRDHLFGELHLFRQQLNTIIEEV

SEQ ID NO: 155635 - protein, 72 aa, Glycine max
  Clone ID: PAT_MRT3847_111559C.1.pep
NSAPPPHPPAPRPGLAPPPRKESCPPPTKDVRKVVGVHRSPNARLARRWSVAAAKPPRPRPIPGEGNYALSR

SEQ ID NO: 155636 - protein, 85 aa, Glycine max
  Clone ID: PAT_MRT3847_11155C.1.pep
MPINIHSSPKKEHGKNRTETQMGCNISKAEPPPLENTMHHHHHADVAEFQKPKTLEQDVVLQVPGCKVHMMDQREAIELAQGHFT

SEQ ID NO: 155637 - protein, 126 aa, Glycine max
  Clone ID: PAT_MRT3847_111560C.1.pep
LWDLVVHNPSFLSTRRRKKTKRIYGGVLNNSFDDPTCLKKKRGEPPFFFFKPPPPEARPFFSRHGGVKVSFFFPPTSGGRAPFFWALREEVGPPLPPKCFGENPLFCKRFFKTLGAPFIIGPPQKI

SEQ ID NO: 155638 - protein, 120 aa, Glycine max
  Clone ID: PAT_MRT3847_111561C.1.pep
GNKIGKPPPVPCKGTGKCGAVTVRKGPAPKGSGNVAAKGPQKGLQFAGNEEGFTSSRGSPQTLGKFVKGTFECLKKTYGFLAPEIWKETRFSKFPFPKDPDLLAKPTGKALILEEEKGEA

SEQ ID NO: 155639 - protein, 45 aa, Glycine max
  Clone ID: PAT_MRT3847_111562C.1.pep
FLKKKKKKKKKKKQKKKKKKKKKKKKKKKKKKKKGVHIKLIGSGP

SEQ ID NO: 155640 - protein, 72 aa, Glycine max
  Clone ID: PAT_MRT3847_111563C.1.pep
ICCNRYTLALCKLLLPCIVSSKWLMACNHLCLFEHAIVLVNCMRAYTLILNHTSVSSACVHQNALIGLSHIC

SEQ ID NO: 155641 - protein, 154 aa, Glycine max
  Clone ID: PAT_MRT3847_111564C.1.pep
QARSIIFFCFVLFSYSFFFISLFIISFLFFIFYCFYYTILFFISVFYITIGGKKKKNLRPIQKQIFLKNYPQRNPLEMNAAKNTTNYAKTHRESKASPPKLDTRKKKPFRTKKNTGPQKIQQHGFYKTTTNPPNLYGAAQKKPWPPKKCPAPTD

SEQ ID NO: 155642 - protein, 120 aa, Glycine max
  Clone ID: PAT_MRT3847_111565C.1.pep
GCEKTTEGGVCLLDSITSTSPIDDALALAAASLLCRLPCSALLVRLCLSSRPCRPCNFRYHSQRQITWLANFINFKNLHLRLNYLTQLQRDHIVSFLRLTLFVVLLLRSWMFHCHWINWL

SEQ ID NO: 155643 - protein, 50 aa, Glycine max
  Clone ID: PAT_MRT3847_111566C.1.pep
LYLNNKTTMGVGFPGLLLRAAFMVGPSYRILAQKGVALVITDLTLKTADA

SEQ ID NO: 155644 - protein, 40 aa, Glycine max
  unsure (1)..(40): unsure at all Xaa locations
  Clone ID: PAT_MRT3847_111567C.1.pep
VXRXNFXXCHXXSIAVACSXXSYCLGTXTGFLFIXLHXLH

SEQ ID NO: 155645 - protein, 77 aa, Glycine max
  Clone ID: PAT_MRT3847_111568C.1.pep
GHKFRPQNKTRVTGFRRKGLCGPNLGEQVHRTVTRELRTKSGGSFRTKVLKPFKQHHGPFLFLQQASLSRSLPRFGP

SEQ ID NO: 155646 - protein, 94 aa, Glycine max
  Clone ID: PAT_MRT3847_111569C.1.pep
GFFLEKYKIDLQHPAILYWDNKYVLHIETNPIFHEKTKHIEIDCHIIREKMINGLVKLLPMSSANRMDDIYTKALILGAFQFLYSKSRMSDIHS

SEQ ID NO: 155647 - protein, 125 aa, Glycine max
  unsure (1)..(125): unsure at all Xaa locations
  Clone ID: PAT_MRT3847_11156C.1.pep
MKHCGTLILADYTKKSENFTSMALQGNQKLPSXQNKATHNCHGHTLKYLVANGLTYCVIDXKTLGTLVETNCXLERIKADYTTKYAQGKSLPAVAHIHNREIPPTGKEEMQIFLDHPEEIRTLAT

SEQ ID NO: 155648 - protein, 114 aa, Glycine max
  Clone ID: PAT_MRT3847_111570C.1.pep
MEVVLASSSVDGGIGCWDLHTGAEQLRYKSCTSPSHGLVSVGARFIASSQLREDQSAPGSVLFWSWSKPQVEVKSFPAEQIKPLATNHPGTFIAAGAPSGDIYLWEVNFYSFIC

SEQ ID NO: 155649 - protein, 56 aa, Glycine max
  Clone ID: PAT_MRT3847_111571C.1.pep
LAQQHLSNLLGFYKKPKSPPSIQKAITPFKNPPKNPLLYPEPFPRISTFFFPKPCI

SEQ ID NO: 155650 - protein, 48 aa, Glycine max
  Clone ID: PAT_MRT3847_111572C.1.pep
SATSLSENRYMIKLKEMGKTTGKSSEEPDNCMNGQCLISKCCHTMRSD

SEQ ID NO: 155651 - protein, 111 aa, Glycine max
  unsure (1)..(111): unsure at all Xaa locations
  Clone ID: PAT_MRT3847_111573C.1.pep
NTGTPLMLSMNDNKKIIEEFQGVKVWWXSYKTTLKTQSFPWNSSSDEKRYYKLTFQKRYRSLITESYLKHVLEXKAIEMKNRQLKLYTNSKTRWSHVDKRYINAIKYVLHK

SEQ ID NO: 155652 - protein, 30 aa, Glycine max
  Clone ID: PAT_MRT3847_111574C.1.pep
CVSIKCDIILELRHQHAPELPSKAHPILLD

SEQ ID NO: 155653 - protein, 210 aa, Glycine max
  Clone ID: PAT_MRT3847_111575C.1.pep
SDEVTKLMDRVEKTFTKHFYNSNRNKAMNILRPKAKRERHRVTFSMGFLAGCTAALVLALILIVRTRKILDESGSTKYMDTLFPLNSLYGYIVLHMLMYAANIYFWRRYRVNHSFIFGFKQGTELGYNQVLLLGFGLAVLALGGVLVNLDMQIDPQTKDYKTLTELIPLILLLVGIAILLGPINIFYRSRQVFFLICFVHCICTPLYKVT

SEQ ID NO: 155654 - protein, 372 aa, Glycine max
  Clone ID: PAT_MRT3847_111576C.1.pep
GLALPLVFPPRGKTDAMSGPGLSSKSDWGVNYRALHDLFHISQSRRSSIVYEVGVQMVEIYNEQVRDLLSSNGPQKRLGIWNTAQPNGLAVPDASMHSVNSMADVLELMNIGLMNRATSATALNERSSRSHSVLSVHVRGTDLKTNTLLRGCLHLVYLAGSERVDRSEATGDRLKEAQHINKSLSALGDVIFALSQKSSHVPYRNSKLTQLLQSSLGGQAKTLMFVQLNPDVASYSETVSTLKFAERVSGVELGAARSNKEGRDVRELMEQLASLKDVIARKDEEIERLQSLKANHNGAKLGMISVRHGSSSPRRHSIGTPRISMRLAGARSFGVNGKAASDMDNCSEYSDKHSETGSHQSMDDFMNKSSSL

SEQ ID NO: 155655 - protein, 91 aa, Glycine max
  unsure (1)..(91): unsure at all Xaa locations
  Clone ID: PAT_MRT3847_111577C.1.pep
YIPSKEGPLPPSRRRSLFTLATSMIVFSSKXYNIDHLVQSAKAVLTEKVDPYLQLIEDHKLQAVGFAPDNLGVNYGSNEDDDKALDILSDM

SEQ ID NO: 155656 - protein, 70 aa, Glycine max
  Clone ID: PAT_MRT3847_111578C.1.pep
MSDDCKGKSSWPELVGVQGTVAEATIERENPLVDAIIVPEGNMVITDFRCDRVWVWIDKDGIVKEVPHIG

SEQ ID NO: 155657 - protein, 213 aa, Glycine max
  Clone ID: PAT_MRT3847_111579C.1.pep
MSSSYHFQSQSYAPSAPEQPPYSNYHHTSSSASSSFPPGTPHDVIRSFQMVDRDRSGFVDERELQQALSSGFHHFNLRTIRFLMFLFKSPNLPLTIGPKEFAALWSCLGHWRGIFERYDKDRSGKIDPLELRDALYGIGYAVPGSVLQLLLSKYGDGSGRRVELGFDSFVECGMIIKGLTDKFKEKDTRYTGSATLSYDAFMTMVLPFLVSYD

SEQ ID NO: 155658 - protein, 69 aa, Glycine max
  Clone ID: PAT_MRT3847_11157C.1.pep
GGIGMLKAFALPQDSTNVNSGRTVRGGITWCVWQEGKQGFGGSKWPDKGNHEWLKDPEGVDHVKKVVVL

SEQ ID NO: 155659 - protein, 259 aa, Glycine max
  Clone ID: PAT_MRT3847_111580C.1.pep
LEELLYSSVENEEHICVLKDRNKPIIFTMARLDRVKNITGLVEWYGKNARLRELVNLVVVAGDRRKESKDLEEKAEMKKMYGLIETYKLNGQFRWISSQMNRVRNGELYRVICDTRGAFVQPAVYEAFGLTVVEAMTCGLPTFATCNGGPAEIIVHGKSGYHIDPYHGDHAAEILVEFFEKSKADPSHWDKISQGGLKRIHEKYTWQIYSDRLLTLTGVYGFWKHVTNLERRESKRYLEMFYALKYRKLAESVPLAIEE

SEQ ID NO: 155660 - protein, 332 aa, Glycine max
  Clone ID: PAT_MRT3847_111581C.1.pep
PRVRGNWSELELEKEFGDAISRTRFAPHSNNLLISSWDSNLRLYDVDASLLRLQAPSQAPLLDCCFQDDAVAFAAASDGLIRRYDLHSGLVDTVGRHDDMAMFIGYSNETCQLVTSGFDKKLLLWDMHTKKTSLCLRSLDAEVDSMSVSGFNVTIAIGASMHVYDLRYFDQPVESKEAFNGTHLRCVSSIPDAEGFAVGSVDGRVSLQISYPSGSDEIRYIFRCHPKSKDGRHYLVSVNDIAFSPLVSGAFATGDNEGYVTIWDAGSRRRLVELPRYPNSVASLSYNHTGQLLAVASSHTYQEAKEIEKPPRIFIHRVDNIDIGSISASKRS

SEQ ID NO: 155661 - protein, 36 aa, Glycine max
  Clone ID: PAT_MRT3847_111582C.1.pep
KSCICALSYPAQCFCVDINDYCYEPRKPTPDDMVNY

SEQ ID NO: 155662 - protein, 51 aa, Glycine max
  Clone ID: PAT_MRT3847_111583C.1.pep
KKTTERRGSLYSFDIEAFLFTYSKPPNRRILDFAPNPLVRRKAKKEGTTRI

SEQ ID NO: 155663 - protein, 175 aa, Glycine max
  unsure (1)..(175): unsure at all Xaa locations
  Clone ID: PAT_MRT3847_111584C.1.pep
SDDGMEELKRLPVSTKLVTSCLDYPWAQQDSHHSSTPQTRGNSDSASAQTACNCSGEAESTTDRSDCKLSGEHPNDVAFVLRAHILDWLSHSPTDLESYIQPGCVDVTIYLPXADALGEELRYDLTCILNMLXYVSDDTFWRNGWVHMTVHDHMALIINGHAVIDTSLPFSSDHY

SEQ ID NO: 155664 - protein, 62 aa, Glycine max
  Clone ID: PAT_MRT3847_111585C.1.pep
ESSLRRQLLSTFSLTSSPPSLSPLFLFVVFYSLTAYTQFCKLVINCLTAFVRSYTLFLKLDP

SEQ ID NO: 155665 - protein, 76 aa, Glycine max
  unsure (1)..(76): unsure at all Xaa locations
  Clone ID: PAT_MRT3847_111586C.1.pep
NLPHFRGIKSKIAILTLMGNKSRREESXNSLVSNEAKAGGSQRTCLCFIKSKNSFTKKTIVALSLPKILKETNNYN

SEQ ID NO: 155666 - protein, 80 aa, Glycine max
  Clone ID: PAT_MRT3847_111587C.1.pep
AQQHQMNIIIYKNARTMVFIFITDTYASHIIHKSGGIWHRNIKRISLYTRDVNHNQQYSECLVCPLRLQTSIHVFQIGKR

SEQ ID NO: 155667 - protein, 57 aa, Glycine max
  unsure (1)..(57): unsure at all Xaa locations
  Clone ID: PAT_MRT3847_111588C.1.pep
TLWNXKPLLKHLNTLPKKEETKYKSLFNVFILILLFSLNPNFIFFFKKNYIIFSQNL

SEQ ID NO: 155668 - protein, 51 aa, Glycine max
  Clone ID: PAT_MRT3847_111589C.1.pep
LLMYVKSSIWYFLMLWFCHSLLMVSPHYYDLGGNKLYVHNLSPYFFENILF

SEQ ID NO: 155669 - protein, 54 aa, Glycine max
  Clone ID: PAT_MRT3847_11158C.1.pep
KRKSRELSGSMHYGTKLGNLHKEVAFTNSHTTFIHRTRNLKLQNSFFWKKHILI

SEQ ID NO: 155670 - protein, 63 aa, Glycine max
  Clone ID: PAT_MRT3847_111590C.1.pep
NHYCRYILINYKVIIEHKYSMNRGQLNLYIFMKNTNNYNFFMSLIYMLCQCKKKYIINQFEIE

SEQ ID NO: 155671 - protein, 33 aa, Glycine max
  Clone ID: PAT_MRT3847_111591C.1.pep
QGRKKSRKSQALIYYGSHYTLIRYIWCMQQSGA

SEQ ID NO: 155672 - protein, 114 aa, Glycine max
  unsure (1)..(114): unsure at all Xaa locations
  Clone ID: PAT_MRT3847_111592C.1.pep
VKYYGGIHDSPQLPAGVKIDPNDQEVSQHSEAEGASDACKRYAINDQFIPAXEAKTGSCNPHSEKLPGAPCTTYIIVFKLFHDQLTNLVSRTIILIVYTHQCIIIYWETQPCAD

SEQ ID NO: 155673 - protein, 90 aa, Glycine max
  Clone ID: PAT_MRT3847_111593C.1.pep
NDYTSTLWLHKLILMMIRLAVVAVEPLSVVVVQSDNTHAPTDATEATDLSPMSALNIKWHAALIKNRGPILDGDCQNIHPMVAMQIAKEV

SEQ ID NO: 155674 - protein, 56 aa, Glycine max
  Clone ID: PAT_MRT3847_111594C.1.pep
LKKVVPKPGSQEGVPKPGLQEGVPEGEEIRLTVAKHGVGVLCSLRSRVQSKRRARC

SEQ ID NO: 155675 - protein, 49 aa, Glycine max
  Clone ID: PAT_MRT3847_111595C.1.pep
LTRSLDSVTKFSIPCSCDVLECIKCYQLTGCLIRLHHLQHVNEYIHLKE

SEQ ID NO: 155676 - protein, 112 aa, Glycine max
  Clone ID: PAT_MRT3847_111596C.1.pep
MGLFVRLLALALALALGPAATLAGPAKSPYQLVLQHSRLRGRQHGPNVCAVQKVIGTNRKYFTNCKQWYQRKICGKSTVISYECCPGYEKVPGEKGCPAALPLSNLHETLGV

SEQ ID NO: 155677 - protein, 53 aa, Glycine max
  Clone ID: PAT_MRT3847_111597C.1.pep
GDEGPVLTEGLSDPEEGEEGGLRADRKRARKTGGCGAEQGVKPSDHIGCTQRD

SEQ ID NO: 155678 - protein, 75 aa, Glycine max
  Clone ID: PAT_MRT3847_111598C.1.pep
LQSLERPLCQSYNTEFCYYIYYILSQPKHFCQACFRYWTAGGTLSHVPGGGACKTNKRANRPPLHGDSSSSAAML

SEQ ID NO: 155679 - protein, 52 aa, Glycine max
  unsure (1)..(52): unsure at all Xaa locations
  Clone ID: PAT_MRT3847_111599C.1.pep
XLXIXXXXFARSRKRIXTXXPXXXCXXSXXNSEDLGXCPXQXCFXXIGQVXL

SEQ ID NO: 155680 - protein, 86 aa, Glycine max
  unsure (1)..(86): unsure at all Xaa locations
  Clone ID: PAT_MRT3847_11159C.1.pep
VWVNFLEXIGRGASTGDAXLHENSSDSLELRFWASYRGQTLARTVRGMMYYRRALMLQSFLESRSLGVDNYSQNNFITTQDFESSR

SEQ ID NO: 155681 - protein, 82 aa, Glycine max
  unsure (1)..(82): unsure at all Xaa locations
  Clone ID: PAT_MRT3847_1115C.1.pep
KKKNKLLLIRYSQQSIFWENIFKGSILVQSLKPVTWKXFKKRVHSPLFLDKYXNPLFFFFDSFKIINLFFXFKNWISKKVKF

SEQ ID NO: 155682 - protein, 109 aa, Glycine max
  Clone ID: PAT_MRT3847_111600C.1.pep
MALLQQQGSSHNNSHVNQISTITGSNNAHKGNALSITCIVSKTGPDEWIIDSGATDHVITFPHLFSSCKKINSIIVKLPIGCTVTITHDFILLFSQFLYLEDVLYIPSF

SEQ ID NO: 155683 - protein, 38 aa, Glycine max
  Clone ID: PAT_MRT3847_111601C.1.pep
CKGKQFVWLAARYYGSRHEGKLRKESGTAWLYTQPVGF

SEQ ID NO: 155684 - protein, 194 aa, Glycine max
  unsure (1)..(194): unsure at all Xaa locations
  Clone ID: PAT_MRT3847_111602C.1.pep
MMGDTEIKPSVEVVVCASMNNNNSANNHTLPTDITKPSQLPILTRLHAGYFFICLSFGAQALLWKSLSKHNKDSQSLWHGFNLMPSIAFLLLWCVSLLTATSLSLLYVLKCIFHLEMVKEEFSHHVGVNCMYAPWISWLLMLQSAPTILHSTSCYQVLCLAFSFVILLLDXKLYGQWFTTKKRLLSVGANPTSQ

SEQ ID NO: 155685 - protein, 68 aa, Glycine max
  unsure (1)..(68): unsure at all Xaa locations
  Clone ID: PAT_MRT3847_111603C.1.pep
RCVCCFSFPLXGGYXXCTXMELSFFFKXXISHFKLFDXXMXXFKXXMLVIFLACXPHASXCLPSIAAL

SEQ ID NO: 155686 - protein, 375 aa, Glycine max
  unsure (1)..(375): unsure at all Xaa locations
  Clone ID: PAT_MRT3847_111604C.1.pep
MMGDTEIKPSVEVVICASMNNNNSANNHTLPTDITKSSQSHLPILTKLHAGYFFICLSFGAQALLWKSLSKHNKDSQTLWHGFNLMPSIAFLLLWCVALLTATTLSLLYXTLKCIFHLDMVKEEFSHHVGVNCMYAPWISWLLMLQSAPIIGSFNFLLRSSLXWPFRLILLDIKLYGQWFTQGSQLKRVVANPTSQVSVIGNLVSAQVVAEIGWKESAVLMFSLGLVYYLIIFVTLYQRLTSGSQFPTVLRPTYLLFFAAPSIASLAWKSITGAFVTPSKMLLFLSLFLFMSQACRPAMFKKSMKRLNVTWWAYSFPLTFLGLACAEYAQEVESGMASWLMLVICMVSVLVFIALMIITVLKIERLFHKNAPIMT

SEQ ID NO: 155687 - protein, 334 aa, Glycine max
  unsure (1)..(334): unsure at all Xaa locations
  Clone ID: PAT_MRT3847_111605C.1.pep
FYTPQSQLRQQHFFFQLVRLVPFLSHEILSSLQTLPLDGHFSLRDNEDAAKDFGNIHHFPPLAVLYPKTVSDISLTIKHVFEMGFAAQLKIAARGHGHSLQGQAQVHGGLVINMESLQGPEMKVHNGELPYVDVSGGELWINILHETLKLGLAPKSWTDYLHLTVGGTLSNAGISGQAFKHGPQINNIFQLEVITGKGEXVVTCSGNRNADLFXGVLGGLGQFGIITRARISLEPAPMMVKWIRVLYSEFSTFTMDQEYLISLNNTFDYIEGFVIINRTGILNNWRSSFDPKNPLQASQFSSDGKTLYCLEMAQYCNPEMENCLMWMSQEVSCG

SEQ ID NO: 155688 - protein, 52 aa, Glycine max
  Clone ID: PAT_MRT3847_111606C.1.pep
KKKKKKIKKKKKKKKKKGKEKKKKKKNKKKKKKKKKKKKRAYLFKVPNFTSP

SEQ ID NO: 155689 - protein, 92 aa, Glycine max
  Clone ID: PAT_MRT3847_111607C.1.pep
IRISLYYFKFDLSIYVITLSNVNSKKYKKILSKNYYIKRQFYKGNYRVFVQKKTEKVFSYKQTAFRRKSRNVQVTTQTIDPFTSAHGRIFSL

SEQ ID NO: 155690 - protein, 42 aa, Glycine max
  Clone ID: PAT_MRT3847_111608C.1.pep
ILSWAQEKEGADESDKIFVKQTEDFITWLREASEEEDEEDED

SEQ ID NO: 155691 - protein, 39 aa, Glycine max
  Clone ID: PAT_MRT3847_111609C.1.pep
FFFFFFFFFFFFFFFFFFFFFLYNWFCGFIFKDILRKLI

SEQ ID NO: 155692 - protein, 107 aa, Glycine max
  unsure (1)..(107): unsure at all Xaa locations
  Clone ID: PAT_MRT3847_11160C.1.pep
XXXVRGXKLXKAAXGXIHXXTXXXQVTXGXVXXXXXXAXXXEHXXESXIXQXXXAXMXNRRXXQXXPXXXMNIRLKXETXXXPEXXXXVXSXXLQESXREXXRXXXX

SEQ ID NO: 155693 - protein, 250 aa, Glycine max
  unsure (1)..(250): unsure at all Xaa locations
  Clone ID: PAT_MRT3847_111610C.1.pep
GSSDTIVGKEDGLGVENLSGSGAIAGAYSRAYKETFTLTYVTGRTVGIGAYLARLGMRCIQRLDQPIILTGFSALNKLLGREVYSSHMQLGGPKIMATNGVVHLTVSDDLEGISSILKWLSYIPSHVGGALPIVKPLDPPERPVEYFPENSCDPRAAISGTLDGNGRWLGGIFDKDSFVETLEGWARTVVTGRAKLGGIPVGIVAVETQTVMQIIPADPGQLDSHEKGCSSSRQVWFPDSXTKTAQAYWI

SEQ ID NO: 155694 - protein, 84 aa, Glycine max
  Clone ID: PAT_MRT3847_111611C.1.pep
TDKSLLLFSLLFLLSFSLIFVSLLISSQSTMDSPMYHQEHHYYHHHHRVNLLPSPRHSLSSSYSSTSSTSINNNGLTTPNYCQL

SEQ ID NO: 155695 - protein, 68 aa, Glycine max
  Clone ID: PAT_MRT3847_111612C.1.pep
SLLPEGEGVWWGLGFHGDENAWGIHRSTRARYLSMAAPTIIIIGMVSKPNHASYIVISLVLLVHNHIK

SEQ ID NO: 155696 - protein, 89 aa, Glycine max
  Clone ID: PAT_MRT3847_111613C.1.pep
EVAVILIENGWCCLQKHEHEHNETSHNAATQFTKSPYISWVASISNYYRHIIDQAKVLLQKRYKHASLLHHRAISFNTLGICKRPSSLY

SEQ ID NO: 155697 - protein, 58 aa, Glycine max
  Clone ID: PAT_MRT3847_111614C.1.pep
TTSSYGPQSLLTQLPHLSLPQQLSFVNRVFYPIGAPSHCSYILSILWVILFFFNTLFG

SEQ ID NO: 155698 - protein, 123 aa, Glycine max
  Clone ID: PAT_MRT3847_111615C.1.pep
MASASVPMALSLSSVTNNNKPSSEAFFRPLPLRQPKRTLFTTKAVSNSKPQINASLKEKAVAGLTAASVTASMVVPEVAHAAGYEFSPSLKNFLLSIFAGGVVLAAIFGAVIGVSNFDPVKRT

SEQ ID NO: 155699 - protein, 66 aa, Glycine max
  Clone ID: PAT_MRT3847_111616C.1.pep
TRTATNASICPYRCYMTTKGFISIKLEIVLGYVNNSYDIIYYSFILLLLTNDFFVIIYLSFNSYYD

SEQ ID NO: 155700 - protein, 58 aa, Glycine max
  unsure (1)..(58): unsure at all Xaa locations
  Clone ID: PAT_MRT3847_111617C.1.pep
KLIDQQIQAKVIHFPQKPFLVLQVTAVMLRFGSLFVXRSXKGGLYHSNHNLQLQCFSV

SEQ ID NO: 155701 - protein, 88 aa, Glycine max
  Clone ID: PAT_MRT3847_111618C.1.pep
MVYTISGIRFPVFPSLHNLSFRGDRRTASLPVFLRNNSFSRKTLAVKSSHDSDSLSSAIAESDKVLIPQDQDNSAFLTDQLETPDITS

SEQ ID NO: 155702 - protein, 384 aa, Glycine max
  unsure (1)..(384): unsure at all Xaa locations
  Clone ID: PAT_MRT3847_111619C.1.pep
KASFFNWYYFSIYLGAIVSCSLIVWIQDNAGWGLGFGIPALFMGLSTISFFIGTHLYRFQKPGGSSYTRMAQVLFASVRKWNLVVPEDSSLLYEMPDKKSTIKGSCKLLEFCEXRCLDRVAIVSDYESKSGDYSNPWRLCTVTQVEELKILICVFPIWATGIIFAAVYAQMSTLFMEQGTMMNTCIGSFKLPLSTFDVISVVLWVPLYDRIIVPIIRKFTGKERGLSMLQRMGIGLFISVLCMLSAAVVEFMHLQLAKELDLVDKHVAVPLSVLWQIPQYFFLGAAVVFTFVGQLEFLYDQSPDTMKTLGTAMTLLNFSLGNYLSSFILTMVTXTTQGGKPGWIPDNLNKGHLDYFLLLLAGLGFLNMLVFIVAAKSYKPKKAF

SEQ ID NO: 155703 - protein, 372 aa, Glycine max
  Clone ID: PAT_MRT3847_11161C.1.pep
AILESIRDLRPESRVDPRVRENIFLGYGDPSAAQWTNMPDLLETVDFKDTFVDADHLKESFLDYEVSFVNPDGSGNLNPRPPFKIKLPRTLKPNNGALTGHAISTSGATNEINVVDANYQKEALIIETYTPPDPGPYPQDQPKQNSVRFTPTQVEAIISGIQPGLTMVVGPPGTGKTDTAVQILNVLYHNCPSQRTLIITHSNQALNDLFEKIMQRDVPARYLLRLGQGEQELATDLDFSRQGRVNAMLVRRLELLSEVERLARSLQLPEDVGYTCETAGYFWLLHVYSRWEQFLAACAENKEKSTFVRDRFPFKEFFCDTPHPVFTGESFEKDMRAAMGCFRHLKTMFQELEECRAFELLKSTADRANYLM

SEQ ID NO: 155704 - protein, 51 aa, Glycine max
  Clone ID: PAT_MRT3847_111620C.1.pep
LWPQLQSPTLLLKFVTTFVPKIYHTHQPPTRMKTRHSSQLPFGKERSKLET

SEQ ID NO: 155705 - protein, 64 aa, Glycine max
  Clone ID: PAT_MRT3847_111621C.1.pep
VLESSWGCKTNVTTCRRFDSLWCVQYHWSYSVMFRLKPASDHRQFATSARDRCDYILDSTRASH

SEQ ID NO: 155706 - protein, 49 aa, Glycine max
  Clone ID: PAT_MRT3847_111622C.1.pep
SQGHNAESEQKSGQHDEQRSLLLLLKPEIRKLCDVLLLPAYNEVGMKCY

SEQ ID NO: 155707 - protein, 51 aa, Glycine max
  Clone ID: PAT_MRT3847_111623C.1.pep
WGQLPSKTLEWIHPCFKGCSVFIERSMSSTYQEIDNNRHTAQSTTELHIFS

SEQ ID NO: 155708 - protein, 90 aa, Glycine max
  Clone ID: PAT_MRT3847_111624C.1.pep
RVISLVLLDPNPRVRFGEIVLAQKVMYEKFGDDFLVHFVSKGFSSAHCPPDLAEQYRQKLQGGDFKALKSFYQSLVENLRLQQNGSLIFR

SEQ ID NO: 155709 - protein, 52 aa, Glycine max
  Clone ID: PAT_MRT3847_111625C.1.pep
CKPCSIVGCKVLSRQLMSASQLRIRKWFLLILGHPVIEGRDLYNLLGIHSMS

SEQ ID NO: 155710 - protein, 85 aa, Glycine max
  Clone ID: PAT_MRT3847_111626C.1.pep
RVCSFRSIIRASHVLSLCMSLGSSIMLTASCCPSKQSQKLSCKPVKSLHAYAWELIYVWFRVHRILHLICTKISIMTSYRSFYIF

SEQ ID NO: 155711 - protein, 75 aa, Glycine max
  Clone ID: PAT_MRT3847_111627C.1.pep
KFLTSWGCFRPLKGEGPIGRFSIFLFAPRLGGKFFGVPFFLGRPGRIPFANASKISGVEHKSLKFFKPPPPSFGL

SEQ ID NO: 155712 - protein, 55 aa, Glycine max
  Clone ID: PAT_MRT3847_111628C.1.pep
PGPGCGILCHAARNDCLRSSFSLALAQHEYARTVFRQCCLCPPPDPVGVSYWSCV

SEQ ID NO: 155713 - protein, 203 aa, Glycine max
  unsure (1)..(203): unsure at all Xaa locations
  Clone ID: PAT_MRT3847_111629C.1.pep
MQATLIKPKSSSTQGQIKYFVYSIEHAILNLPPHQEQMGWLGDFQGXFRLSDISFKVGRESAHILQEYYPKQLGLIILYNAPMIFQPFFSMMVKPFLETETVNKIKFGYSNNHNTKKIMEDLFDKDNLESAFGGNGDTGVDINKYAERMKEDVNKKHSFESAFGGTQAKSISSVAQNAPSDSIRLDAVDASNTKKIDCSRVPN

SEQ ID NO: 155714 - protein, 123 aa, Glycine max
  Clone ID: PAT_MRT3847_11162C.1.pep
FPKIVNEKVREGKFMEIVDRRLVERGSVVEESEVTRLVYIALWCIQEKPRLRPSMAQVVDMLEGRVRVDEPPGSRMILVDLLAVDEDPADHRNLARLLTSVSSHVDCTSTYSLGTTNTILSGR

SEQ ID NO: 155715 - protein, 165 aa, Glycine max
  Clone ID: PAT_MRT3847_111630C.1.pep
MQATLIKPKSSSTQGQIKYFVYSIEHAILNLPPHQEQMVWLVDFQGFKLSDISFKVARESAHILQEYYPKQLGLIILYNAPMIFQPFFSMVKPFLETETVNKIKFGYSNNHNTKKIMEDLFDMDKLESAFGGNDDTGFDMNKYAERMKEDENKILSFWTQAKSVS

SEQ ID NO: 155716 - protein, 33 aa, Glycine max
  Clone ID: PAT_MRT3847_111631C.1.pep
FLNSIFLPSLTYKGGVASYNHCVSVGWIQYLKM

SEQ ID NO: 155717 - protein, 88 aa, Glycine max
  Clone ID: PAT_MRT3847_111632C.1.pep
SRKFNPYRKISSYVPDVQWEVFVFTPAQLFLGEGGVCLFSVFIFSKNRKCWKCVCFNFRKHFLSLKLKTFKHHFLCFDGKLKMRRQVL

SEQ ID NO: 155718 - protein, 54 aa, Glycine max
  Clone ID: PAT_MRT3847_111633C.1.pep
NYSVAMICFLNFDVNVLYQMLMSLLSLGRFYAFELAHRLDPQSSGRGVRQFKTA

SEQ ID NO: 155719 - protein, 85 aa, Glycine max
  unsure (1)..(85): unsure at all Xaa locations
  Clone ID: PAT_MRT3847_111634C.1.pep
SKEXRXRVRCRALEKPARSQLSHGTASPPTGVRGXEXLIXEAXHKLGCSPTNKSXDTXQXSVHXXECRNRSAVXLSSRXKXXIXX

SEQ ID NO: 155720 - protein, 87 aa, Glycine max
  Clone ID: PAT_MRT3847_111635C.1.pep
FGFNLNPIRLEKKKKKKKKKKKKKKKKKKKKKKKKKKKKKKKKKGRPPIRNLFTPKINSEPDPAGDQIFLKKSLIKPGRNKDHTCSL

SEQ ID NO: 155721 - protein, 154 aa, Glycine max
  unsure (1)..(154): unsure at all Xaa locations
  Clone ID: PAT_MRT3847_111636C.1.pep
MEGSTTSSELPPGFRFHPTDEELIVYYLCNQATSKPCPASIIPEVDLYKFDPWELPDXTEFGENEWYFFSPRDRKYPNGVRPNRATVSGYWKATGTDKAIYSGSKHVGVKKSLVFYKGRPPKGAKTDWIMHEYRLAESKIPSSRKIGSMRHQYW

SEQ ID NO: 155722 - protein, 149 aa, Glycine max
  unsure (1)..(149): unsure at all Xaa locations
  Clone ID: PAT_MRT3847_111637C.1.pep
FCAPIFCFILPPIFFPRFFPPFHEWKSSPFLPKESAHSFPLEFIIGSTLXFVVTAVATDTRAVGELAGIAVGATVMLNILIAGPVSGGSMNPVRTLGPAVAANNYKAIWVYLVAPILGALAGAGTYTAVKLPEEDDDAKAKTSISSFRR

SEQ ID NO: 155723 - protein, 384 aa, Glycine max
  Clone ID: PAT_MRT3847_111638C.1.pep
GDWHKHSHRALLHLKTSAPRSQHQHHPLIKFCSTISDSFTVSYLITRFGFSPETALSISRKFRLDSPHRPDSVLAFLATHGFSPFQIRQVIQGQHTILLCDPNNLILPKFQFLRSKGASTSHIIRIATASPTFLSRSLDSHIVPAYQFLRTFLVSDELIIRCLSRDSSVFFSDDPRFPLTAEFLLDNGFTRSAVARLLHMCPSVLCSRDLPDTVHALKQLGFDTSAPNFSAALVAKSTVNKTNWGESVRVFKKWGWSQEHVLMAFKKHPSCMLTEPDEIDAVFSYWVKELGGSSLELVKYPVIFRLSLKKWIAPRASVVRFLAAQGLLERSGNMVALFIMSEKRFLDTFVKRYEKHSSQLLKMYKESVNMNVANSKENKKKTCL

SEQ ID NO: 155724 - protein, 121 aa, Glycine max
  Clone ID: PAT_MRT3847_111639C.1.pep
TLSNFFIVVVRVSSIDANFKFKFVQKVSYKMKSRIELEVIRLPIGAITGIDRGDMEGEGGVRVEDVEEGEVETKEFEWKEFGKVEKRRVVPRGVKVAGVVGVDVGEGEEVKSVVTWFDIFP

SEQ ID NO: 155725 - protein, 33 aa, Glycine max
  Clone ID: PAT_MRT3847_11163C.1.pep
LAISCKIFTSLTGPYSLSSVTSPASVVHRTRGQ

SEQ ID NO: 155726 - protein, 118 aa, Glycine max
  Clone ID: PAT_MRT3847_111640C.1.pep
MENLISLVNKIQRACTALGDHGENSALPTLWDSLPAIAVVGGQSSGKSSVLESVVGKDFLPRGSGRIVTRRPLVLQLHKIDEGSREYAEFLHLPRKRFTDFAVRKEIQDELIEILVNQ

SEQ ID NO: 155727 - protein, 610 aa, Glycine max
  Clone ID: PAT_MRT3847_111641C.1.pep
MENLISLVNKIQRACTALGDHGENSALPTLWDSLPAIAVVGGQSSGKSSVLESVVGKDFLPRGSGIVTRRPLVLQLHKIEEGSREYAEFLHLPRKRFTDFVAVRKEIQDETDRETGRTKQISTVPIHLSIYSPNVVNLTLIDLPGLTKVAVEGQPDSIVKDIEDMVRSYIEKPNCIILAISPANQDLATSDAIKISREVDPTGDRTIGVLTKIDLMDKGTDAVDILEGRAYRLKFPWIGVVNRSQQDINKNVDMIAARRREREYFNSTPEYKHLANRMGSEHLAKMLSKHLETVIKSKIPGIQSLINKTIAELEAELTRLGKPVAADAGGKLYAIMEICRSFDQIFKDHLDGVRPGGDKIYNVFDNQLPAALKRLQFDKQLSMENIRKLITEADGYQPHLIAPEQGYRRLIESSLITIRGPAEAAVDAVHSLLKDLVHKAISETLDLKQYPGLRVEVGAAAVDSLERMRDESKRATLQLVDMECGYLTVDFFRKLPQDVDKGGNPTHSIFDRYNDSYLRRIGTTILSYVNMVCATLRNSIPKSIVYCQVREAKRSLLDHFFTELGKMETKRLSSLLNEDPAIMERRSALAKRLELYRSAQAEIDAVAWSK

SEQ ID NO: 155728 - protein, 94 aa, Glycine max
  unsure (1)..(94): unsure at all Xaa locations
  Clone ID: PAT_MRT3847_111642C.1.pep
PXGXPXISNDSTGLPXQGXXPGMDKASACXLHEMESLFIMPEQNHAFYLHLQFHVIHFXQYCXPYXYYSETQRCHLNPQGQNNTDHHHVLNHNP

SEQ ID NO: 155729 - protein, 68 aa, Glycine max
  Clone ID: PAT_MRT3847_111643C.1.pep
AVSIRNLLAVRANNVWEPRIAHSSLVVKQGIELSAADIWLFRASAPFFNHGSPRAIGVRIASSSSVTS

SEQ ID NO: 155730 - protein, 95 aa, Glycine max
  Clone ID: PAT_MRT3847_111644C.1.pep
MEKWVALVLLLVLWKIREGFGVEAEEVTYDGRSLIIDGQRKILFSGSIHYPRSTPQMWPDLIAKAKQGGLDVIQTYVFWNLHEPQPGMYDFSGRY

SEQ ID NO: 155731 - protein, 120 aa, Glycine max
  Clone ID: PAT_MRT3847_111645C.1.pep
LEKNGVIVNKAGKSKDELLNLFHTITKGAEHMDSSYSYPLSLSISISGGKVTTAFQGLPVVTWHKCRHVFQIIAYYWGNWYKILKRDHFPTVWKSIGVLAAAALLVLTIMQTYYSSRNND

SEQ ID NO: 155732 - protein, 41 aa, Glycine max
  Clone ID: PAT_MRT3847_111646C.1.pep
TPLQLLRNAFMLHAPCNYQVTPLNARSPYELHQAKLLHSVW

SEQ ID NO: 155733 - protein, 75 aa, Glycine max
  Clone ID: PAT_MRT3847_111647C.1.pep
LFSLSIGLFFSLPTPMAFHDLLLTPTISLCIILLPFFPTPSHSAPTCALQKLNRTYANCTNLPTLGATLHFTFNA

SEQ ID NO: 155734 - protein, 63 aa, Glycine max
  Clone ID: PAT_MRT3847_111648C.1.pep
MLKTKPFQGANVFMSRNLVPPEVFDKLHDAVKDNGAQIHLCCDPSRNGPNDYHIISSSKHEKF

SEQ ID NO: 155735 - protein, 73 aa, Glycine max
  Clone ID: PAT_MRT3847_111649C.1.pep
AATSIEGSMKYYPGVACPKASYFNRSGQSFWAISQISSTCFLSSRPSRCRSLAVMIYTQIKDQAFHDLHSDFS

SEQ ID NO: 155736 - protein, 53 aa, Glycine max
  Clone ID: PAT_MRT3847_11164C.1.pep
RGILKKRTVLLAYKLINSPPRSELLDLRNIKTQLLLPYWSLENTMSKFWGRIP

SEQ ID NO: 155737 - protein, 132 aa, Glycine max
  unsure (1)..(132): unsure at all Xaa locations
  Clone ID: PAT_MRT3847_111650C.1.pep
IEIARSSVTKMNVLELFDATVLGAWQCHAYDMIPVRMNTGYGARTPEVKCACWRLAVEAHNISGSETIPEECAEATEEYIHGEHYRADSIADHQHAYFYXAKDLEGHTMDTSEFMIDRTVLSNISYYKLHGY

SEQ ID NO: 155738 - protein, 61 aa, Glycine max
  Clone ID: PAT_MRT3847_111651C.1.pep
VMTCSKTESVHSLLHLHLKITKRLCTMCKPSRDSMMGHVSSMQATQYQTAYGVSSHPHSAY

SEQ ID NO: 155739 - protein, 191 aa, Glycine max
  Clone ID: PAT_MRT3847_111652C.1.pep
MAKMHNFFLLTCLIVIIPTLHANVKEDEIYWKRQSQILNDSYWKQKASVAEKENKQAYTSDPYSLTKNLTYSVSEIIVGEQNGRRNLKGKGGNCMATNPIDRCWRCDPNWANNRKKLANCVQGFGRNTVGGKNGPFYVVTSNLDNDMVNPVPGTLRHAVTRTGPLWIIFAHSMKIRLNQELIMASDKTIDG

SEQ ID NO: 155740 - protein, 136 aa, Glycine max
  unsure (1)..(136): unsure at all Xaa locations
  Clone ID: PAT_MRT3847_111653C.1.pep
VNDPFIELDYMVYMFNYDSTHGRFKGKISTNAGNLVVEKEGKSAHTIKVFNLKDPAEIKWGEAGAEYVIESTGVFTTIEKASAHLKGGAKKVVISAPSADAPMYVMGVNEDKYDPARTTXDQNASCTTNCLAPLAK

SEQ ID NO: 155741 - protein, 63 aa, Glycine max
  unsure (1)..(63): unsure at all Xaa locations
  Clone ID: PAT_MRT3847_111654C.1.pep
TESGRFFFFFFFFFXPIPKHPTINLTCHIFSTFHPPLHEKIPSKHTLFKPFFSQILLKKQKLL

SEQ ID NO: 155742 - protein, 124 aa, Glycine max
  Clone ID: PAT_MRT3847_111655C.1.pep
LLGACSIHGDSEMGKYAANQLFLATPDSPAPYVLMANIYSSEGKWKERARSIKKMKEMGVAKEVGISWVEIEKKVNSFVVGDKMHPQADAIFWLLSRLLKHLKDEGYVPDKRCILYYLDQDKKD

SEQ ID NO: 155743 - protein, 91 aa, Glycine max
  unsure (1)..(91): unsure at all Xaa locations
  Clone ID: PAT_MRT3847_111656C.1.pep
RMKQKMMEGKVKVCNMVRYMIIIGWEKYNKNFRESGLHRXKMVQKISLVIVEYRVHCVEKLKWVQRLKKVFWDHIXIGEEVVFLRNTIDSY

SEQ ID NO: 155744 - protein, 145 aa, Glycine max
  Clone ID: PAT_MRT3847_111657C.1.pep
LELEPNRLEQPPLTDMARWIQSTTNSLIALAVGRRQNLALRQRKKNESLLEKSGFRPFQNATQSTTIWGSKIRFQLMSSIHRDNPFGKGSNMDELDQMNDSASARESDERPSDIRKTGAFHVQRRLYLSPSLLKSSKTVMMAGPS

SEQ ID NO: 155745 - protein, 234 aa, Glycine max
  Clone ID: PAT_MRT3847_111658C.1.pep
RSQLKSYIAHIAEEMYVYRSLPLGQDRRRNRYWQFVASASSNDPGSGRIFVEYHDGKWRLIDSEEAFDALLTSLDSRGIRESHLRLMLLKIENSFKENVRKRNACCAKNGSRGEFSIKIEANEACSIPEHNAGSDSPSSTLHDLNADPSETSSSFKIELGKTESEKKAALRRYQDFQKWLWKECYNSSVLCAMKYGIKRCKPQMDICDICLNLYFGEDSHCNSCHQTFPSNNGF

SEQ ID NO: 155746 - protein, 79 aa, Glycine max
  Clone ID: PAT_MRT3847_111659C.1.pep
KKKPLCRKPWRMQKKLIKRVTQLQVGLAAAGRSLDTGIWELRGVASTFALSSPGPTAFILGGICTPVCLRKMGDSLGDT

SEQ ID NO: 155747 - protein, 51 aa, Glycine max
  Clone ID: PAT_MRT3847_11165C.1.pep
MFSYIRILLANRHQCLKLRSIRPANVIKTAFDRQFWVISVQHLGIPSLQKF

SEQ ID NO: 155748 - protein, 112 aa, Glycine max
  Clone ID: PAT_MRT3847_111660C.1.pep
DSSPFFAAKQPFAFGRPPLKMVLGPTARRWLPYMNFTVAVSALAFQTGVLYPWHEELDHEFKKLKEEHKQQLHIYHEMKLKRLEDLERKVAAERASQRFSLWLPWQSEASTN

SEQ ID NO: 155749 - protein, 66 aa, Glycine max
  unsure (1)..(66): unsure at all Xaa locations
  Clone ID: PAT_MRT3847_111661C.1.pep
MQGGXKAGESIKXTATNXGASAXACMEKTXATXQEKAERMTARDPVQKELATQKKEAKXNQAXWTS

SEQ ID NO: 155750 - protein, 168 aa, Glycine max
  Clone ID: PAT_MRT3847_111662C.1.pep
MAIGQSSQQQADGQNVVSQGASDKAANPMRELRIQKLVLNISVGESGDRLTRAAKVLEQLSGQTPVYSKARYTVRTFGIRRNEKISVHVTVRGAKAEEILERGLKVKEYELRKRNFSQTGNFGFGISEHIDLGIKYDPAIGIYGMDFYVVMSRPGERVTRRRRCKTRI

SEQ ID NO: 155751 - protein, 34 aa, Glycine max
  Clone ID: PAT_MRT3847_111663C.1.pep
FCPSLSIHRDSALSMNRTTMATNIFFPLALVGML

SEQ ID NO: 155752 - protein, 90 aa, Glycine max
  unsure (1)..(90): unsure at all Xaa locations
  Clone ID: PAT_MRT3847_111664C.1.pep
DGEGVALPRVFVKGRYVGGWRSLGDXXYTXRLGRILNATRVERGIGRQTCGGCGGARFVPCFDCAWSCKLLHRERCSNCNEFVLLHCPAC

SEQ ID NO: 155753 - protein, 1008 aa, Glycine max
  Clone ID: PAT_MRT3847_111665C.1.pep
HESHGVHLCHKCGWPFPNPHPSAKHRRAHKKICGTIEGYKLSASEGQPHLNGSDDEHVSDDDHKTPGPKSLETGNKEKGNEGNGEKIIRSEDEVFSDAVADFSDSGSIPEIKERLQDSLDSGADVERVDIKETKFSGSSEDKDFNGGKIVSTCVRQNILAWVIKNKDASQLIDKSTDDSQIQNPNIFQNESVELGNMVELQGQLSGPTVDPLSSSIADLRTEVSTNVDSDVFFGLLSDSLPGKAEAMLDILPEKKIHAVENVTDCILISVAKETNLKEKDEINSAGDAIEIVESSDNVVGETCEGVSKIAVSDAISLDHQVGDGAVHLKENNGAEIISYRDVVEIVESSDKVVGEMSEEVSKIAVCDIVSLDHEVGDGAVHLKENNGAEFLSLLPPDNLPLELNSVVITNDAQGDSAYVVQFATSSDDKILPEKGEGNVNVDLLPTCDDISDEAHPQMSLRLKKCMLNSVPKFLQPRLTVESHQRSDETDASMKAMKTEKNEIHMVHFSEEHGPDDVCKNSQQISLPEDSLMASSNESQRDESFRSATSETTRAINIDSTTLDGKDVESNLENDIEIILKDLQPGDILQSEVKQSDDLFKSDSAGKSDAAGEMGKNEQCDIPDAQCMERPTVSDALLPKSATGHFESPAISESLDIVDDGPVNKSNGTECRNINPLPGSQKDIKEDEININIKLNEEYNKSVDTYTESRQAQDAGLLVKATEDLAREYTSLTTVPSAQPDREVSNAVPVQDQTGNNLGKLGSSRVDASVDSGSRCDSLEGNWGSVSVLSMQSDAPAVTDAETLPSTGLLASTGKSSLNNSKATPDRQQSGNSEMFEPPSFMTLVDPSQVSPKASASEVLKGQNTQHTDSTSQAAWFPTLTQVVNESQGRKKNEEIIAKVTNWSTSKEHTPLKSLLGEAAHSSKPRSPKMENSVNQKSGKVLEKNGSGLTTVNSILGPESPVAQVVKGEAAKEWNSPARYPADIKREKRKVKSRPYWIQLVCCTSVGPR

SEQ ID NO: 155754 - protein, 1090 aa, Glycine max
  Clone ID: PAT_MRT3847_111666C.1.pep
MDNQDQRRTHTAGHESHGVHLCHKCGWPFPNPHPSAKHRRAHKKICGTIEGYKLSASEGQPHLNGSDDEHVSDDDHKTPGPKSLETGNKEKGNEGNGEKIIRSEDEVFSDAVADFSDSGSIPEIKERLQDSLDSGADVERVDIKETKFSGSSEDKDFNGGKIDASQLIDKSTDDSQIQNPNIFQNESVELGNMVELQGQLSGPTVDPLSSSIADLRTEVSTNVDSDVFFGLLSDSLPGKAEAMLDILPEKKIHAVENVTDCILISVAKETNLKEKDEINSAGDVIEIVESSDNVVGETCEGVSKIAVSDAISLDHQVGDGAVHLKENNGAEINSYRDVVEIVESSDKVVGEMSEEVSKIAVCDIVSLDHEVGDGAVHLKENNGAEFLSLLPPDNLPLELNSVVITNDAQGDSAYVVQFATSSDDKILPEKGEGNVNVDLLPTCDDISDEAHPQSEYGDFKDLEGVVYQNPFLQSSESLKYKGDDLKNNVTEENKFHFNANQLSEKSDILSPDMDVLDNSMKMELVNSEPTPKEVHAEQCTEVSPAQLTVESHQRSDETDASMKAMKTEKNEIHMVHFSEEHGPDDVCKNSQQISLPEDSLMASSNESQRDESFRSATSETTRAINIDSTSHHEEKITEINDVALDGKDVESNLENDIEIILKDLQPGDILQSEVKQSDDLFKSDSAGKSDAAGEMGKNEQCDIPDAQCMERPTVSDALLPKSATGHFESPAISESLDIVDDGPVNKSNGTECRNINPLPGSQKDIKEDEININIKLNEEYNKSVDTYTESRQAQDAGLLVKATEDLAREYTSLTTVPSAQPDREVSNAVPVQDQTGNNLGKLGSSRVDASVDSGSRCDSLEGNWGSVSVLSMQSDAPAVTDAETLPSTGLLASTGKSSLNNSKATPDRQQSGNSEMFEPPSFMTLVDPSQVSPKASASEVQKGQNTQHTDSTSQAAWFPTLTQVVNESQGRKKNEEIIAKVTNWSTSKEHTPLKSLLGEAAHSSKPRSPKMENSVNQKSGKVLEKNGSGLTTVNSILGPESPVAQVVKGEAAKEWNSPARYPADIKREKRKVKSRPYWIQLVCCTSVGPR

SEQ ID NO: 155755 - protein, 107 aa, Glycine max
  Clone ID: PAT_MRT3847_111667C.1.pep
THASTDAWVQAHKKKNKKNINKKKNKNVNLKKEQINQSKYRFGVRGGPSKGSWLSYSCMQRRTSSSLARVSKSTGSPFALPVPGMPRDNSSYPPCAIPPFHHSAFCP

SEQ ID NO: 155756 - protein, 1111 aa, Glycine max
  Clone ID: PAT_MRT3847_111668C.1.pep
MDNQDQRRTHTAGHESHGVHLCHKCGWPFPNPHPSAKHRRAHKKICGTIEGYKLSASEGQPHLNGSDDEHVSDDDHKTPGPKSLETGNKEKGNEGNGEKIIRSEDEVFSDAVADFSDSGSIPEIKERLQDSLDSGADVERVDIKETKFSGSSEDKDFNGGKIVSTCVRQNILAWVIKNKDASQLIDKSTDDSQIQNPNIFQNESVELGNMVELQGQLSGPTVDPLSSSIADLRTEVSTNVDSDVFFGLLSDSLPGKAEAMLDILPEKKIHAVENVTDCILISVAKETNLKEKDEINSAGDVIEIVESSDNVVGETCEGVSKIAVSDAISLDHQVGDGAVHLKENNGAEINSYRDVVEIVESSDKVVGEMSEEVSKIAVCDIVSLDHEVGDGAVHLKENNGAEFLSLLPPDNLPLELNSVVITNDAQGDSAYVVQFATSSDDKILPEKGEGNVNVDLLPTCDDISDEAHPQSEYGDFKDLEGVVYQNPFLQSSESLKYKGDDLKNNVTEENKFHFNANQLSEKSDILSPDMDVLDNSMNLELVNSEPTPKEVHAEQCTEVSPAQLTVESHQRSDETDASMKAMKTEKNEIHMVHFSEEHGPDDVCKNSQQISLPEDSLMASSNESQRDESFRSATSETTRAINIDSTSHHEEKITEINDVALDGKDVESNLENDIEIILKDLQPGDILQSEVKQSDDLFKSDSAGKSDAAGEMGKNEQCDIPDAQCMERPTVSDALLPKSATGHFESPAISESLDIVDDGPVNKSNGTECRNINPLPGSQKDIKEDEININIKLNEEYNKSVDTYTESRQAQDAGLLVKATEDLAREYTSLTTVPSAQPDREVSGLTAVPVQDQTGNNLGKLGSSRVDASVDSGSRCDSLEGNWGSVSVLSMQSDAPAVTDAETLPSTGLLASTEAGKSSLNNSKATPDRQQSGNSEMFEPPSFMTLVDPSQVSPKASASEVQKGQNTQHTDSTSQAAWFPTLTQVVNESQGRKKNEEIIAKVTNWSTSKEHTPLKSLLGEAAHSSKPRSPKMENSVNQKSGKVLEKNGSGLTTVNSILGPESPVAQVVKGEAAKEWNSPARYPADIKREKRKVKSRPYWIQLVCCTSVGPR

SEQ ID NO: 155757 - protein, 124 aa, Glycine max
  Clone ID: PAT_MRT3847_111669C.1.pep
MACETKTWLVMVLLFLAANYLQDCVHGVSQVPCLFIFGDSLSDSGNNNELPTSAKSNYRPYGIDFPLGPTGRFTNGRTEIDIISNISLPLLRPLIYVLQSKISNSCLVMNFRCQIYELVWTTFC

SEQ ID NO: 155758 - protein, 269 aa, Glycine max
  unsure (1)..(269): unsure at all Xaa locations
  Clone ID: PAT_MRT3847_11166C.1.pep
MSIMVFITGVLTVVVLLLLSPSTAEIKTITITSDTRPLILFEKFGFTYPGRVAIAASSVAVVAPSSQPNLSRLGFFLISEKSLPQFIIEMEQNPTFCILNSPYTSHLFTFLDLPPPPATFNRSYSVTISDEYSLFFANCVPESSVSMEIHTEFFNLNRDASRNYLSSGHTNLPSLLFLFSFAYFSFFLAFSLYPRHVSKRSLERIHLLMPQLLLATGLSHLFAALDMHHVKLTGTHGWDAFFFNFDLIRVVLLFSVVILVXTRWTFLHR

SEQ ID NO: 155759 - protein, 51 aa, Glycine max
  Clone ID: PAT_MRT3847_111670C.1.pep
FIMGFFTIRNVSKSRHKWGQMLFVTVYYVVFMTEGLKFGFGSFSPFSFSSI

SEQ ID NO: 155760 - protein, 194 aa, Glycine max
  Clone ID: PAT_MRT3847_111671C.1.pep
NDLYSTRSAYNCQGHLEGEDQDGALQDLWKLKIPAKASIFAWRLIRDRLPTKSNLHRRQVVLEDSLCPFCRIREEDASHIFLECNKIRPLWWESQTWVRSLGVSPINKRQHFLQHVHGTPGSKRYNRWKTWWIALTWSLWKHRNQVIFQNAQFNGIKLLEDAVFLHWTWIRAMEKDFSMHYNQWSSNLIDGFCN

SEQ ID NO: 155761 - protein, 97 aa, Glycine max
  unsure (1)..(97): unsure at all Xaa locations
  Clone ID: PAT_MRT3847_111672C.1.pep
XXXXXARVRKLGIXXXMVXAXVLXLXIVSXXXGWRXNDNSXXMCEIVIRSXFDRXVXXXRXXHXEVIXXQXRXXXXVXXXSXIXXQXXXFXXXEXXY

SEQ ID NO: 155762 - protein, 138 aa, Glycine max
  unsure (1)..(138): unsure at all Xaa locations
  Clone ID: PAT_MRT3847_111673C.1.pep
VNNKFSQQNINLKGIAIGNAWIDDVTGTKGIVDYLWTHALNSDQTHELIEKYCDYSSENISQICSNATRRALTEKGNIDFYNIYAPLCHDSSLKNESSSGSVYDXDPCSDYYXEAYLNRPEVPLALHAKPNNWSHCSD

SEQ ID NO: 155763 - protein, 440 aa, Glycine max
  unsure (1)..(440): unsure at all Xaa locations
  Clone ID: PAT_MRT3847_111674C.1.pep
KTPSGLVARPVLTSLYKSDQFKNRPYDPFNVYTSPDEAILCPDSFQSMYTQMLCGLIMRHQVLRVGAVFASGLLRAIRFLQLNWAELAHDISTGTLNPKISDLAIKERMTQILTPNPELADFIVKECSGENWDRIITRIWPNTKYLDVIVTGAMAQYIPTLDYYSGGLPKACTMYASSECYFGLNLNPICTPSDVSYTIMPNMGYFEFLPHEEDLSARSSGSDPSHATXLDLADVELGKSYELVVTTYSGLCRYRVGDILRVTGFHNTAPQFSFVRRKNVLLSIDSDKTDEAELQNAVENASVLLKEFKTSVVEYTSFADTKSIPGHYVIYWELLMKDSSNAPTTEALEQCCLTMEESLNAXYRQGRVADHSIGPLEIRVVKNGTFEELMDYAISRGASISQYKVPRCVTFTPITELLDSRVESVHFSPSEPHWTPERRR

SEQ ID NO: 155764 - protein, 60 aa, Glycine max
  Clone ID: PAT_MRT3847_111675C.1.pep
DPAVNNCMLMLYGLNLLEAAGSLWTMLNLKLLYLDFTVPMTLHLIVDGNGSASSDTPCYV

SEQ ID NO: 155765 - protein, 53 aa, Glycine max
  Clone ID: PAT_MRT3847_111676C.1.pep
DLDPRIHFLADPRRNTRRGPASIPNCPTKSQTRARRNKGPKSRLGERAIQSQP

SEQ ID NO: 155766 - protein, 53 aa, Glycine max
  Clone ID: PAT_MRT3847_111677C.1.pep
MSDDEHHFESKADAGASKTYTQHAGTIRSIGYIVIKGGPCRVMVVSTPKTGTH

SEQ ID NO: 155767 - protein, 100 aa, Glycine max
  Clone ID: PAT_MRT3847_111678C.1.pep
VALGLFAPLLYVCLLLLLIGAPVPNSGLTHVLCAHHTKGRFNWGRHTQIAGTCNGSTSLTIYCCCFTNVSYRRWLSFASFYLSTLCVSMCGFLLYHLYTR

SEQ ID NO: 155768 - protein, 155 aa, Glycine max
  Clone ID: PAT_MRT3847_111679C.1.pep
HEHDSLGIWYSDNQPLDPSMYEELEGCLLLDPDCSGNSGEGGECNHHLLLFDIINEGLLEIFGRSYNYYPRPLSYLSHVHPLPAGENVLYKVWTLISWYLMNSTTYELYPSLDYYVSKDLAKYDGWMNLQFDSECVGLELDDLIFDDLLEEIIST

SEQ ID NO: 155769 - protein, 64 aa, Glycine max
  Clone ID: PAT_MRT3847_11167C.1.pep
PQRGFSKTPPPLKDLKLSPPTRFFSPETPNPLFFSRAFFFPKENEGEVGPLPVRIPALIAGKRF

SEQ ID NO: 155770 - protein, 66 aa, Glycine max
  unsure (1)..(66): unsure at all Xaa locations
  Clone ID: PAT_MRT3847_111680C.1.pep
LRRPKLYYLNDLKSKEDGEVGFMDHMMSFDPVRDKIFRDIIYHEIPXYCLQCPSFLGRIYHRVSIP

SEQ ID NO: 155771 - protein, 219 aa, Glycine max
  Clone ID: PAT_MRT3847_111681C.1.pep
MASFWNQLSFFLLLVLVISPQIQAREGKLFSLFSHFRTIYNVKDPLDKTNAESPALPPGPTPKPASAPELEPESAPTPAPSAEQEIGSTIPSGPAPEPEFFDSGEGYGLYGRGSYSQYPPTKETPTTTTTFQNELLNEDFNDESYKTGYPKTNLYNNNNEEYKNNDNTKEEYRNSYIGGYSDDFNRYSNHNNNNNGKENYNNNHGKGKLLTQRQLYQQW

SEQ ID NO: 155772 - protein, 906 aa, Glycine max
  Clone ID: PAT_MRT3847_111682C.1.pep
TRPWRVTKATATIFSVFLIFCSSFSSLEATPVGYGYTISTVYNFPITNSLTANLDLIKPSSVFGPDIPHLSLTASFENKDRLRVRITDSNHQRWEIPQEVIPRGSSFQYYPLGFLNSKQGSPQQKHSLSLTHPDSDLVFTLHNTTPFGFTVSRKSSNDVLFNTAPNPSNPETFLIFKDQYLQLSSSLPSQRASLFGLGEHTKSSFKLRPNQTLTLWNADIGSDNLDVNLYGSHPFYLDVRSPSADGTVKAGTTHGVLLLNSNGMDIVYGGDRITYKVIGGVFDLYFFSGSSPELVLEQYTELIGRPAPMPYWSFGFHQCRWGYKNVSDLEGVVDNYAKAGIPLEVMWTDIDYMDAYKDFTLDPINFPLDKMISFVDALHKNGQKYVLILDPGISVNKTDATYVRGLKADVYIKRNEVNYLGEVWPGPVYYPDFLNPRSQAFWGGEIKLFRDLLSFDGLWLDMNELSNFITSPPNPSSNLDNPPYKINNGEDQHSINDRTVPATSLHFGNITEYNVHNLYGLLESKVTNKALKDITGKRPFILSRSTFVSSGKYAAHWTGDNAATWNDLAYSIPAILNSGIFGIPMVGADICGFGGNTTEELCRRWIQLGAFYPFARDHSDKNSNRQELYLWDSVADSAKKVLGLRYRLLPYLYTLMYEAHTKGTPIARPLFFSFPEDVTTYEISSQFLLGKGVLVSPVLQSGATSVVAYFPKGSWFDLFNVSNSVNAESGKYVTLDAPSDHINVHVGEGNILALQGEAITTVAARKTAFQLVVVISNSGSSFGQVYLDDGEALDIAGVNDQWTLASFYGALHNSSVIVTSKVTNGRFALDQRWIIDNIRFLGIPKNKRFNGMDLAGNELKIVNGMDSMRTAVVKSEFDSSSQFVNVQVSKLSLPIGEEFKLEIEIK

SEQ ID NO: 155773 - protein, 70 aa, Glycine max
  unsure (1)..(70): unsure at all Xaa locations
  Clone ID: PAT_MRT3847_111683C.1.pep
CGLAVDLYYQAIRVAAHDANVLADRGQAHIXLSAITDADYDASKRIPLLPSLPNGYLHTATACLTLQDYH

SEQ ID NO: 155774 - protein, 129 aa, Glycine max
  Clone ID: PAT_MRT3847_111684C.1.pep
MATEEKEKGYEGGAGGKFRKRPFRSRIQTTPYDRPPTSLRNPSRKNNNGWLSKLVDPAQRLITYSAHSLFSSLFRKRLPPPPSSETEQEARNNHLEDAVFVTNNNSSGTQQGPVGGSDAQIIVLQGWIN

SEQ ID NO: 155775 - protein, 74 aa, Glycine max
  Clone ID: PAT_MRT3847_111685C.1.pep
KKKNRRGIFKNGFSLPNIYISLYSLPSQFYLLFFNQNTHYFSQFITTFNFNNPHYSHIYYFLPFFLFSTYPEHK

SEQ ID NO: 155776 - protein, 200 aa, Glycine max
  Clone ID: PAT_MRT3847_111686C.1.pep
PQLRILLLDGKSLCQLQVHSKSLGVLNLYGCSSLREFLVTSEELTELNLAFTAICALPSSIWQKRKLRSLYLRGCHNLNKLSDEPRFCGSYKHSITTLASNVKRLPVNIENLSMMTMIWLDDCRKLVSLPELPLFLEKLSACNCTSLDTKITHQQVLQHMLQSRIPYLRKHYLKCYDEEYFFGDHVIDECFHTTQNSITI

SEQ ID NO: 155777 - protein, 76 aa, Glycine max
  Clone ID: PAT_MRT3847_111687C.1.pep
KLGPLKKRINFHKGTRGGFPSTNTMKLLFLTSLTPRWRVYMDLCPLKKFKTGGGKKVCTMNSLKKPAFFGPDKKCP

SEQ ID NO: 155778 - protein, 70 aa, Glycine max
  unsure (1)..(70): unsure at all Xaa locations
  Clone ID: PAT_MRT3847_111688C.1.pep
RDRFSSAHAFAHAGALLKPMAVLSNYXXFLFLTTLLFALQKTARDRQFFSQVTQIVKDTAKYLKISTTTL

SEQ ID NO: 155779 - protein, 38 aa, Glycine max
  Clone ID: PAT_MRT3847_111689C.1.pep
PCRPRRAPTRPTTRSIHSSSLFLLATLTRILDSFSIIW

SEQ ID NO: 155780 - protein, 118 aa, Glycine max
  unsure (1)..(118): unsure at all Xaa locations
  Clone ID: PAT_MRT3847_11168C.1.pep
EKAHISIEVIGHVYSGKYTTTDHLIYKLGCIDKRVTERFEKEAAEMNTRSYXYAWVLDKLKAERELRIPIDIASSKSETSTYYCTDLDTPGHMDMITNMITGTFQADCAALIIDSTTG

SEQ ID NO: 155781 - protein, 95 aa, Glycine max
  Clone ID: PAT_MRT3847_111690C.1.pep
VHTLVQTFLRNILALPWAGTFKSWSRECTINAQNTLTTHLTQTLREMYQILHHTMLAPLTSHYTSHHLMEHVTDYYPHGELHMQLHKHLTKPASR

SEQ ID NO: 155782 - protein, 48 aa, Glycine max
  Clone ID: PAT_MRT3847_111691C.1.pep
IVCEIKPVCSRFANNGCFVDLICSVHSSCPSKYIMGYHQPNYSEVFTK

SEQ ID NO: 155783 - protein, 210 aa, Glycine max
  unsure (1)..(210): unsure at all Xaa locations
  Clone ID: PAT_MRT3847_111692C.1.pep
MDGQLGINGEESHDNEYAIGENSLVPCLQNKFLELHPPDSSSTGVSVQLTQICAVKAGGMMSLAIDNHGTLWMWGNCPRQTKXGGLALVSSFTPTPVWDFQGHTVVKVACGNEHVVARVSAGEAYNGEDLVCYSWGYNNRGQLGLGDRESRLHPEVVRTFDEESPYAFHNALLTHKKKSCDXESTRWTFGLGHGTTQSALFPTPSQISQP

SEQ ID NO: 155784 - protein, 57 aa, Glycine max
  Clone ID: PAT_MRT3847_111693C.1.pep
VLKSIHVPLIVGRLRSIFTSSSSGTGGSSPGFSLFSSFRRFSKIGSCFLSGPFIFPF

SEQ ID NO: 155785 - protein, 53 aa, Glycine max
  Clone ID: PAT_MRT3847_111694C.1.pep
LIKCQTAPLPSLQNCQVTKSNRMRLHELSHLKKNSQSVFSTKKSKIKKSNHDL

SEQ ID NO: 155786 - protein, 87 aa, Glycine max
  Clone ID: PAT_MRT3847_111695C.1.pep
GSRWDFDLFRCTTGQCITAGTGLFGQKLLSTTRAPRGPTTPRDQRERPHAGAGKNGSRMAQPKDREPIDEEDGCPRKNKQPGLTERA

SEQ ID NO: 155787 - protein, 94 aa, Glycine max
  unsure (1)..(94): unsure at all Xaa locations
  Clone ID: PAT_MRT3847_111696C.1.pep
VAYAGLIGSGLCYVAMSWCVXQRGPVFTAAFTPLMQIFVATLDFSVLKEEIYLGSLAGSALVIAGVYILLWGKSKEEGQHVFKDTPTNQDVECQ

SEQ ID NO: 155788 - protein, 130 aa, Glycine max
  Clone ID: PAT_MRT3847_111697C.1.pep
AKSYPTVSADYHKACVKAMIKLIGSISDNSMRSLSMLPLAWHSAGTYDLSSKTGGPFGTINHPSELAHGANNGLDIAVRLLEPLKAEFPIMSYADFYHLDGVVAVEVTGRPECSLHSAREDIPEPSPEVR

SEQ ID NO: 155789 - protein, 119 aa, Glycine max
  Clone ID: PAT_MRT3847_111698C.1.pep
DPALNPGHVPPILKKCPDAIPDPKAVQYVRNARGPPMILATTFFRNILASKGFLIVDPHLANAKRAKPFVKKMAKSQDYFFKEFFRAIPLLSKNNPFPGPKGEVRNQCNVATKPHDQGP

SEQ ID NO: 155790 - protein, 115 aa, Glycine max
  Clone ID: PAT_MRT3847_111699C.1.pep
AQDSFVCHLISSLFGYIIISRYLFGLLQSCIEHLMSLFWSQYPLINLDSPLASYGIIITIMICFEHPIIWFRMFICISRFGSNGVCTDPLYCSFSGMECSSFYHDLAMRSDVILG

SEQ ID NO: 155791 - protein, 59 aa, Glycine max
  Clone ID: PAT_MRT3847_11169C.1.pep
KNLTFFPPPPPNFYLFFPKGGVFLPLTPTGQGQGKYFPAPQGGGPPAGNLNSFLGKIEG

SEQ ID NO: 155792 - protein, 109 aa, Glycine max
  Clone ID: PAT_MRT3847_1116C.1.pep
LPFSNTLLPLLMIILLFFWSLTMYSYPFVRGATIPYNPTPMIKWCLILTTLHLLPFLIAETPNDSKCRKYLLSGGRKHDNAHRGVKDNILHTEAEAGSVVEDDAHSLIK

SEQ ID NO: 155793 - protein, 106 aa, Glycine max
  Clone ID: PAT_MRT3847_111700C.1.pep
KVALRPMVCPPYICSSASRFLTILTKHWSPSLALSRVLRHICSLLSDPNPDCPLQPNIPPMFNCSRTKYEESALMCPQKYPIRGPKRAVFQASSNLIIYVEERTKI

SEQ ID NO: 155794 - protein, 66 aa, Glycine max
  Clone ID: PAT_MRT3847_111701C.1.pep
YHFWNFMPFTLNYLLLLNGNRFERFSLNTNMHLCSLVAANSNIQSSNPPMLSIKALFLFINTAIIN

SEQ ID NO: 155795 - protein, 110 aa, Glycine max
  Clone ID: PAT_MRT3847_111702C.1.pep
DVDNCFESDNIDARMIPLLFNALFRMVSKQRCCVLPQQAPTCAFHSGDGHHTSVHSRGTYRRMALPCYQNCSTKNKTSFSSPVSSIRSQTHLCPLFVLSTNGRWSKGNGR

SEQ ID NO: 155796 - protein, 619 aa, Glycine max
  Clone ID: PAT_MRT3847_111703C.1.pep
MAASTSPNFTTSLHKNSHKTKFPSLPGKKTLHTKLSFSFSFPFNKSIRVKSIGTAKYDEVVVDEELDKIRRLQNGSDVRGVALEGEKGRTVDLTPPAVEAISESFGEWIIKGLKKEKGYPVENVRVSLGRDPRVTGSKLSVAVFAGLARAGCMVYDMGLATTPACFMSTLLPPFAYDASMMMTASHLPYTRNGLKFFTKRGGLTSTEVEEICEKAARKYANRMAKVSTLLNVLPTKVDFMSTYSMHLREIIKERINHPLHYDTPLQGFQIIVNAGNGSGGFFTWDVLDKLGADTFGSLHLNPDGMFPNHIPNPEDKTAMALTRAAVLQNSADLGIVFDTDVDRSGVVDSKGNPINGDKLIALMSAIVLREHPGSTIVTDARTSMALTRFITDRGGHHCLYRVGYRNVIDKGVHLNNDGIETHLMMETSGHGALKENHFLDDGAYMVVKIIIEMVRMKLAGSNEGIGSLIEDLEEPYESVELRINIISEPRLAKAKGIEAIEIFRNYIEEGRLKGWELDSCGDCWVSEGCLVDTNDTPAPIDAQMYRAKVSNDEHAQHGWVHMRQSIHNPNIAVNLQSSVRGGCLSMARAFRDEFLKASGVHTFLDITQVDKFAENGSKA

SEQ ID NO: 155797 - protein, 151 aa, Glycine max
  unsure (1)..(151): unsure at all Xaa locations
  Clone ID: PAT_MRT3847_111704C.1.pep
KPKGIEAIEIFRNYIEKGXLKGWELDSCGDCWVSEGCLVDTNDTPAPIDAQMYRAKVSNDEHAQHGWVHMRQSIHNPNIAVNLQSSVRGGCLSMARAFRDEFLKASGVHTFLDITQVDKFAENGSKAYFAILNKNAESLQIEAFIKAQTSV

SEQ ID NO: 155798 - protein, 66 aa, Glycine max
  Clone ID: PAT_MRT3847_111705C.1.pep
MYLYFFCFFFLFLCYLFLKKTTNPTMYKMNNGDRGAIKTNKPNRIYYPCQRARMTSLSDTLLNCGG

SEQ ID NO: 155799 - protein, 109 aa, Glycine max
  unsure (1)..(109): unsure at all Xaa locations
  Clone ID: PAT_MRT3847_111706C.1.pep
DDDDDNGFMIACNVAKSEYVDEAEAAAHDALHNTAVDTLNTSERTHFWEEPLRDKYQEHKDEEFNALCKRKPNQKSMCYREEDDLAGXLADVSSDRNMTVIKHTLLMVI

SEQ ID NO: 155800 - protein, 77 aa, Glycine max
  Clone ID: PAT_MRT3847_111707C.1.pep
MMESVLSSCEYSALRAFKRRVAYANANYDHMVGWRTSSIHGQHELPKSNHLVTDERFPHIVYVEGETADEICNKTST

SEQ ID NO: 155801 - protein, 66 aa, Glycine max
  Clone ID: PAT_MRT3847_111708C.1.pep
LGNKGGLISKLFQHIRGLCRTLSFLAKVNIKKGFCSLFALPGKKGQVLRSFWLCVKLVKIIFLMNV

SEQ ID NO: 155802 - protein, 77 aa, Glycine max
  unsure (1)..(77): unsure at all Xaa locations
  Clone ID: PAT_MRT3847_111709C.1.pep
KLYGAYRHPPMYQRPPFGNYPKAALHFPVMPKFKATMDLSATAKSATPXFVAAPAEKGHFLLNFLMGSVSAAVSKTA

SEQ ID NO: 155803 - protein, 107 aa, Glycine max
  Clone ID: PAT_MRT3847_11170C.1.pep
LAGISPENKFVGTQLANLKLTLRATPTKNSVQNEGILKFPFALSLALADSRSFSLWRIVARFRSQAFSLVEAEEYPEISKDYFAEFENVNGKRIKLGREGASETHWG

SEQ ID NO: 155804 - protein, 135 aa, Glycine max
  Clone ID: PAT_MRT3847_111710C.1.pep
MDRLPESTRSMRKYASEAGGLRAARQGPHGRSLTARTAHSMSTTALRTKSKSAASLLRRVPFAPLRPVLANLQEVFLGTKLAVLFPAVPLAIAAQCAHFGQVWVFTLSLLGLIPLAERVSFLTEQIAIYTGPTVG

SEQ ID NO: 155805 - protein, 72 aa, Glycine max
  Clone ID: PAT_MRT3847_111711C.1.pep
KNKMGLAINIFIWGKQKTFLGLGGIKNWVHGIFWVPFFLEKMAPMKGMGDFLFFFLREGGLSNFLTPCWGFG

SEQ ID NO: 155806 - protein, 52 aa, Glycine max
  Clone ID: PAT_MRT3847_111712C.1.pep
FPGRVFPLRPGEENLRKLGFFDKTKSSLHYKIFKTFLFLPFKSSVFFFSRNG

SEQ ID NO: 155807 - protein, 58 aa, Glycine max
  Clone ID: PAT_MRT3847_111713C.1.pep
PWFQTLPKIYLPFPEGWTFSGQTCYHILPATSFYLTIGLGLVKDHSFIFHLNPLHSIL

SEQ ID NO: 155808 - protein, 162 aa, Glycine max
  Clone ID: PAT_MRT3847_111714C.1.pep
MNNLYVNREPFSISQAFQLSLCWTAASLLKHKLDPIASLIQDLNFECKKEEVDYICSMLCCLKKIFLYRTGNYHDTGFTKASGPSNRAYSCTGVAREVELFKKDMSKSIKEIQKKCEKKLKKLHILQEEEKQRLRAAIEEEKANFDERYNIESADIRSCSSN

SEQ ID NO: 155809 - protein, 31 aa, Glycine max
  Clone ID: PAT_MRT3847_111715C.1.pep
SKKRVSLYRVWDILYESQFKVMIYTMILICL

SEQ ID NO: 155810 - protein, 49 aa, Glycine max
  Clone ID: PAT_MRT3847_111716C.1.pep
NLFNDLQKAYKKKKKKKKKKKKKKKKKKKKKKKKKKKKKKKKKKKKKGG

SEQ ID NO: 155811 - protein, 75 aa, Glycine max
  unsure (1)..(75): unsure at all Xaa locations
  Clone ID: PAT_MRT3847_111717C.1.pep
PPLFLFSPSLAPPFFNLCFTGLDVTLPYENTLIHTXSTACLALLGILQLLPNNVNSVLNVIGNYHQHNLIVLFDS

SEQ ID NO: 155812 - protein, 104 aa, Glycine max
  Clone ID: PAT_MRT3847_111718C.1.pep
KNNGDSFPIFFFFGPKFNTFETTLKWVSGGGTLDPRLMDPPQDGLPGARPFPRFKYASLTNVFLRIGAPNVNSAGPGFKTGDPGKTGGAPLERPLGTTPFLEGA

SEQ ID NO: 155813 - protein, 103 aa, Glycine max
  Clone ID: PAT_MRT3847_111719C.1.pep
EYFFYRIQMAKELNPSSKQGGMLIRILNQIPRLNSNPLKRVLFFKTRPWSPLPGEGIKNPTSPLVQIKGLPPPEKVVIIFFWGGTLSRGWQNGAPKGPGKSRP

SEQ ID NO: 155814 - protein, 53 aa, Glycine max
  Clone ID: PAT_MRT3847_11171C.1.pep
MQKRNVGCPSRSLSWDLSGFFQSFLCNLPISVLCLIALIIGRIGSRASLRDGR

SEQ ID NO: 155815 - protein, 260 aa, Glycine max
  unsure (1)..(260): unsure at all Xaa locations
  Clone ID: PAT_MRT3847_111720C.1.pep
TLRVMMEQFRYGNKICDEIELNKAQWSALFQAYIFFEAYNPLHLQEETRLCFAFIKSAVQQGSXSRLRLHTTHIERDTNGMLQCHPYPHEYVDTSKPCAHSAFFMGLQRKEGVRGQEGQQFDIRXTVDEFRQEINMYMYWKPGMDIFVSHVRRKQLPAFVFPDGYKRTRMPRHISHQAEITGDDATNCYSGSGLSERCIKRKNYPEMVDKKPGKPDKRASISPQRLECVSPESCTCKSGGTAQMSIECIKGVRLAGSTTK

SEQ ID NO: 155816 - protein, 195 aa, Glycine max
  Clone ID: PAT_MRT3847_111721C.1.pep
THNHNHHHHHASSFFLFHFLPTFHNVIDKPLFTGYNTISHQAEITGDDATNCYSGPGLSERCIKRKNYSEMVDKKPDKPDKRASISPQRLECVSPESCTSKSGGTTQMSIECIEVVRLAGSTTKDANDNCEVKSSDALPGSGLSTEVADMQISEPGFVDTTHDMLKSRSVEIPNEVRCMNQWRNLWKLFGSYEVP

SEQ ID NO: 155817 - protein, 88 aa, Glycine max
  unsure (1)..(88): unsure at all Xaa locations
  Clone ID: PAT_MRT3847_111722C.1.pep
SILFRPWMVFPLLLQXTLQGMVSKPKMLCASTASLQLAHFHXXEYGHXSQCSFXXGXHXXAXHXXAXKTVXXKKXXXLIDLHLRXXXT

SEQ ID NO: 155818 - protein, 184 aa, Glycine max
  unsure (1)..(184): unsure at all Xaa locations
  Clone ID: PAT_MRT3847_111723C.1.pep
ARACMNSSYYVFASTLRVMXTEFCYGNKICDEIELNKAQWSALFQPYIFFEAYKNYLQVDIIASDTDDLLAWRGWVESRLRMLTLKIERDTNGMLQCHPYPHEYVDTFKPCAHSAFFMGLQRKEGVRGQEGQQFDIRGTVDEFRQEINMYMYWKPGNGYFVSHVRREQLPAXVFTDGYKRTLMP

SEQ ID NO: 155819 - protein, 36 aa, Glycine max
  Clone ID: PAT_MRT3847_111724C.1.pep
EYLHGPARQTLIHGDLKSSNILLGDDFHAKVSCFFL

SEQ ID NO: 155820 - protein, 56 aa, Glycine max
  Clone ID: PAT_MRT3847_111725C.1.pep
LRILPTLVPKSNHVVDYVFNYQSTPYIKDAHVKVTDNNFLASCMPTEFAYEQSRCI

SEQ ID NO: 155821 - protein, 51 aa, Glycine max
  Clone ID: PAT_MRT3847_111726C.1.pep
AKGSLSLHSHNNKYTISWLCALYVYRNSYSCSSDIRFITMRFCTYYWLKEA

SEQ ID NO: 155822 - protein, 59 aa, Glycine max
  Clone ID: PAT_MRT3847_111727C.1.pep
NGATGYFIQNMMHHLAVVCQLTCVTTICNSIKIRWMIFHRRLSYIFIFRVTLTNLENTF

SEQ ID NO: 155823 - protein, 104 aa, Glycine max
  Clone ID: PAT_MRT3847_111728C.1.pep
SHFELKKKKKKKKKKKKKKKKKKKKKKKKKKKKPRGGPRPPFPPFGGGYTPPSLPVVYHRGDGKTLGVPHLIRLAPNPLFPSWVKTKRARPVRLSKNLPTLMGN

SEQ ID NO: 155824 - protein, 67 aa, Glycine max
  Clone ID: PAT_MRT3847_111729C.1.pep
LVCDTAPQGVHFHFHFPIPKPITYKLSYTTISPHIMDHVPSNVMPKLLLLQLLLVLYHLHAMTKTQC

SEQ ID NO: 155825 - protein, 56 aa, Glycine max
  Clone ID: PAT_MRT3847_11172C.1.pep
NWSEFIIEKSFSQSDASSEVLLTQLKKETGNNDNVVQSYPILLTYSRLSTHSKMTH

SEQ ID NO: 155826 - protein, 120 aa, Glycine max
  Clone ID: PAT_MRT3847_111730C.1.pep
MVEKAKGRKEEVVTREYTINLHKRLHGCTFKKKAPKAIKEIRKFAQKAMGTNDVRVDVKLNKAVWSQGIRSVPRRIRVRIARKRNDDEDAKEELYSLVTVVEIPKEELKGLETKVIDDED

SEQ ID NO: 155827 - protein, 91 aa, Glycine max
  Clone ID: PAT_MRT3847_111731C.1.pep
KIPRKKGQKTKIKLIQGIKLNQKLFGPTKPPIGKFHSLLEKTPNYLPLKNGRGKKKIKIFLNPRNFFKKALPNPRILPPQKLGGGSHWKSH

SEQ ID NO: 155828 - protein, 278 aa, Glycine max
  Clone ID: PAT_MRT3847_111732C.1.pep
MAQNGDTEAQSPSTPEARPVGGTEFSWCKAVPIGTGVTVLSLLLLSKPPQIAVVQNALHKLQNSHPILRSKIHLDPSNNTFHFLTPPTPTVQIHPFDLASTAHIIQCQSDGHDPFHVLLEHEMNQEDTWRNYAADVDVLHAAVYSISHDRFAVFLRLHTASCDRASAVALLNELLRFVAGGDEASGEKVNSPIEDLIPEGKTNKPFWARGLDVLGYTLNAFRFANLSFVDAGSPRSSRIIRVQLNVAETENLLAGCKSRGIKLCGALAAAGMIAAWTS

SEQ ID NO: 155829 - protein, 90 aa, Glycine max
  Clone ID: PAT_MRT3847_111733C.1.pep
GIRLEPELEWHITSLLTESSLVAELSFCCCCSLNLISGVLCRSNEQLKGEVKPISEGSKDCLKVVAVHDTPSTESEFNKQSAADAEPVQS

SEQ ID NO: 155830 - protein, 507 aa, Glycine max
  Clone ID: PAT_MRT3847_111734C.1.pep
MVSSDKSADQNIPSDKLQQRVSLDSDTTLSQGHDTKNDLSKPEEASILSIVVKNEEGKDSDAIACALESDQEGSTCSLPLEKPLQNPDTLSHELPRLQSSQEFPSIIREKVSKDGYNWRKYGQKHVKGNEFIRSYYKCTHPNCLAKKQLQQSNNGHITDSICIGQHNHPRPQLNSTVSVECVLPVVEQAPHKSSLATVEDKASVEHGCMPQQIQPLQSFPPAKVSPVNKLNASHLSLTKAKNQVHDNEEPESKRLKKDNTNPDVTRVDMSTRESRVVVQTSSEVDLVNDGYRWRKYGQKLVKGNTNPRSYYRCSNPGCPVKKHVERASHDSKVVITTYEGQHDHEIPPGRTVTQNAATNARTTASNGKAGTKSEGNITDDTGERSGLGSASRLTEQLNGESITKSKAGDMVEFCVISLSNEGPEIKLSEQQQQKDNSATKDDSVSNDVISHSSSGVLCRSNEQLKGEVKPISEGSKDCLNVVAVHDTRSTESEFNKQSTADAEPVQS

SEQ ID NO: 155831 - protein, 173 aa, Glycine max
  Clone ID: PAT_MRT3847_111735C.1.pep
NSARDGCEKTTEGLVNDGYRWRKYGQKLVKGNTNPRSYYRCSNPGCPVKKHVERASYDSKTVITTYEGQHDHEIPPGRTVTQNAATNTRTTATNGKAGTKSEGNTDDTGERSGLGLTSRLTEQQTGKSTTKSKAGDMVEFRVIRLSNEGPEIKLSEQQQQKDNSATKDDSVSN

SEQ ID NO: 155832 - protein, 52 aa, Glycine max
  unsure (1)..(52): unsure at all Xaa locations
  Clone ID: PAT_MRT3847_111736C.1.pep
RVLWSVRCSMSLTLRKEPSYGGNLTVAIEELRIRAVDCDARSXARNSGRSAG

SEQ ID NO: 155833 - protein, 114 aa, Glycine max
  Clone ID: PAT_MRT3847_111737C.1.pep
KRSLPSLAKMVPAFLYHKGIQIVPVKMGKGEWAFNESSKRYPPETLNIKNANNPSSPHSSIEPPPCQYRMRADQIALYTEGFINKFGFWNCSLWKLCSFGTFHFFLLAKNKYIS

SEQ ID NO: 155834 - protein, 73 aa, Glycine max
  Clone ID: PAT_MRT3847_111738C.1.pep
IVSGHALKGVPLTLREFFHVFFSQVLRLKSLLHIPLFSSFVWTLLFALAYLNQYKLYCLFPFQKHRYYFVKDC

SEQ ID NO: 155835 - protein, 42 aa, Glycine max
  Clone ID: PAT_MRT3847_111739C.1.pep
KFKNLKKKKKKREKGKKKKKKKKKKKKKKKKKKKKKKGPPPN

SEQ ID NO: 155836 - protein, 129 aa, Glycine max
  Clone ID: PAT_MRT3847_11173C.1.pep
THWSTVMATSSTFSQQLLQKYGAEFERATQHPFLTAAGQGSLDKKVLVGWLRQDYLYAYVGYIKFASILISRLPYPTVPPTPSSSGTADGAGAGAPSSREHVLHKALSTLIFFLSNVKRETGFFVETAR

SEQ ID NO: 155837 - protein, 256 aa, Glycine max
  Clone ID: PAT_MRT3847_111740C.1.pep
MAKKRKPKKKPQNHNVNQSQNVAALIWRVTHSAESFLSQNDLVLLPSQSLRLESLISSIISHSPSPPLSPPHRDSWFSRFRSVSDSQWLHAFRMFKPTFSHLLHLLSPSLAPSFPHMAPDCVLAAALFRLAHAAPYPAVSRRFAISPADACRAFFAVCKALADNLGHLFELRTDSQRVVVGFGFSSLPNCFGVLGFARFKIDDSLLGENGALMVQALVDSEGRFLDVSAGWPSTMKPETILRETNLYCEVEDPRKW

SEQ ID NO: 155838 - protein, 47 aa, Glycine max
  Clone ID: PAT_MRT3847_111741C.1.pep
PRVPHIVVLCVNLGNFVSIIWVMVLTIPMEIPQVWCYTKLQRLYAFW

SEQ ID NO: 155839 - protein, 120 aa, Glycine max
  Clone ID: PAT_MRT3847_111742C.1.pep
NLKKGFFHITPGPSRVPPAPMGPARGPPESPFLGKIRACTDPPFVKTKKKGAGQLKPPWVLFLKNRPFPGFLKKDPGGRGKKTRKGGTSEGFFFLNRAPKTQGSAGPKRPPPRGWAQGPP

SEQ ID NO: 155840 - protein, 117 aa, Glycine max
  Clone ID: PAT_MRT3847_111743C.1.pep
MELSMKVLVKVASLLFLLEFTATVVDARFDPSSFITQFLPNAEANNYYVKSTTKACCNSCPCTKSIPPQCRCSDIGETCHSACKTCICTRSIPPQCHCSDITNFCYEPCNSSETEAH

SEQ ID NO: 155841 - protein, 67 aa, Glycine max
  unsure (1)..(67): unsure at all Xaa locations
  Clone ID: PAT_MRT3847_111744C.1.pep
GDCGCXGSFCKCGNGCGGWKMFPYLSVHXKPRYETLVMGVAPVEGQCEGAAMDVTIENDGCTCGQNW

SEQ ID NO: 155842 - protein, 535 aa, Glycine max
  unsure (1)..(535): unsure at all Xaa locations
  Clone ID: PAT_MRT3847_111745C.1.pep
MANHNSRFLLRSFIPFFHRRMNSPLLPSATSCPRLTSGTAFDEKFTQLPSNIVRGDHRQVLSFFNPSRNFAETKQWGVGIRHKCFGSMAGSVQRNPRFSKLNDDDVRYLEGILGSKNVVQDEDKLVTSNTDWMHKYKGSSKLLLQPRTADQVSQILKYCNSRNLAVVPQGGNTGLVGGSVPVFDXENIMSFLDNEGFIMPLDLGAKGSCQIGGNVSTNAGGLRLVRYGSLHGSVLGVEAVLANGTVLDMLKTLRKDNTGYDLKHLFIGSEGSLGIVTKVSILTPPKLSSVNVAFLACKDYSSCQKLLQEAKGKLGEILSAFEFLDVQSMNLVLNHMEGARNPLPSLHNFYVLIETTGSDESSDKQKLEAFLLGSMENELISDGVLAQDINQASSFWLLREGIPEALMRAGAVYKYDLSIPLEHMYNLVEEMRSRLGNTANVIGYGHLGDGNLHLNISTSHYDDKILSHIEPYVYEWTSKHRGSISAEHGLGLMKANEIFYSKSHETVQVMASIKNLLDPNHILNPYKVLPQSLIS

SEQ ID NO: 155843 - protein, 209 aa, Glycine max
  Clone ID: PAT_MRT3847_111746C.1.pep
MNESTPNTESYLYLHPSENPAVALVSPALDSSNYHSWSRSMITELSAKNKVEFVNGNAPEPLKTDRTYGAWSHCNNMVVSWIVHSVSISIRQSVLWMDKAKEIWNDLKSRYAQGDLLRISDLQQEASSMKQGNNSLPNFNLEAKESSSINVVKIVCEFCGRVGHTESVCYKKHGVPSNYDGKSKGYNARNGKTCTHCGTRRATLSTYVM

SEQ ID NO: 155844 - protein, 49 aa, Glycine max
  unsure (1)..(49): unsure at all Xaa locations
  Clone ID: PAT_MRT3847_111747C.1.pep
VYYFFLXXFYISLSRHLTKNMXMRRFFNRKXALPHHKIKRPRTGGFFCA

SEQ ID NO: 155845 - protein, 71 aa, Glycine max
  Clone ID: PAT_MRT3847_111748C.1.pep
LRFQWPLLALDLEQHTIRYAHSNNSIITSSLLLSSLGFSFFHTQEEKPMSGVSAKISNFSTTMVGQLLLQR

SEQ ID NO: 155846 - protein, 51 aa, Glycine max
  Clone ID: PAT_MRT3847_111749C.1.pep
VGPVGCSWGRGRTYTALKISNLSSARQCLPSLGDNLIGLLSKAAYRCGVYW

SEQ ID NO: 155847 - protein, 65 aa, Glycine max
  Clone ID: PAT_MRT3847_11174C.1.pep
SCSYLVSYGCGLMLRSSKRPLVDQQEAMLDVIDRQPWWKMITVLLQKKHPRYACWSQQEVDINKG

SEQ ID NO: 155848 - protein, 57 aa, Glycine max
  Clone ID: PAT_MRT3847_111750C.1.pep
ICMYHPSASFKCSCYPSSSDFLVLRLDQFQCNIPLTLTHLTPSNLETKRLQRLELEP

SEQ ID NO: 155849 - protein, 111 aa, Glycine max
  unsure (1)..(111): unsure at all Xaa locations
  Clone ID: PAT_MRT3847_111751C.1.pep
LAFTSPEEGSRPLIWYFNERKIAYGIARALKDLHEDWSPSVVITNIXKGTHIXIDTDFNPHLSDRGMASYFPXTANQALNNNAGSGIXAHNGGLNGHYTLKSDVHSLRVVM

SEQ ID NO: 155850 - protein, 151 aa, Glycine max
  Clone ID: PAT_MRT3847_111752C.1.pep
MAGQSSNEGSSTGNISAECSDSTVQLNIKTLDSRIYSFQVDKNMPVSLFKEKIANEIGVPVNQQRLIFRGKVLKDEHALSEYYVENGHTLHLVERQPNQSQASGTSSGESTGTSGNRGNDVGSGAPRNHVGQISHSVVLGTFNVGEPEKGI

SEQ ID NO: 155851 - protein, 144 aa, Glycine max
  unsure (1)..(144): unsure at all Xaa locations
  Clone ID: PAT_MRT3847_111753C.1.pep
DARMRLMKHELCLRCGVSWDMKNRLSRSVTTFEXPMYMMNEAIFTDISXMTFRCGFEVRILPKIRMTQEAFSNTRDGVWNLQNEQTKERTAVASVVFSQPYPSVVFSQPYPSVVFSQPYPSVVFSQPYPSVVFSQPSDAWADAW

SEQ ID NO: 155852 - protein, 418 aa, Glycine max
  Clone ID: PAT_MRT3847_111754C.1.pep
SFKCLEATRLHYHSNFADNRGHIDHSARVMRVITWNRSFKGIPNLDDGKDDFDSDEHETHATILDKLLAWEKKLYDEVKAGELMKFEYQRKVAALNKLKKRGTNSEALEKAKAVVSHLHTRYIVDMQSLDSTVSEINRLRDEQLYPRLIQLVDGMATMWKTMLEHHVKQSDTVTLLRNLDISQSPKTTSEHHYDRTYQLVLVVQQWHSHFEKLVNHQKGYIKALNTWLKLNIIPIESSLKEKVSSPPRVRSPPIQGLLYAWNDRLDKLPDELARTAIGNFVAVIETIYHQQQEEIALKRKCEDTRKELSRKTRQFEDWYNKYMQKKIPDEYNPDRAEDANAPDEVVTRQSAVEQVKKRLEDEEEAYARQCLQVRQKTLVSLKNRMPELFRAMSDFSLECSRMYSELRPISQNLGQSLS

SEQ ID NO: 155853 - protein, 119 aa, Glycine max
  unsure (1)..(119): unsure at all Xaa locations
  Clone ID: PAT_MRT3847_111755C.1.pep
SSNNEDGELTGAKPASPSYNAFEIIWSMXHGFDLRNLFDSSKRSPSMFISQSXAQALMGKLEGVATKLSFRGRRNNEFMAXMQGGTEGRKCKLAMPVQEIKVEPEVPVFEFSKSTGDAL

SEQ ID NO: 155854 - protein, 76 aa, Glycine max
  Clone ID: PAT_MRT3847_111756C.1.pep
SVGMNLSHPHCFRSQETAHTNVGDQMACSNTILYESEDHPEHEADISDEPYQPRMRRFMYQYSSQIFLVANKQVGL

SEQ ID NO: 155855 - protein, 92 aa, Glycine max
  unsure (1)..(92): unsure at all Xaa locations
  Clone ID: PAT_MRT3847_111757C.1.pep
MLQALMHPPVGSLDKRDNETSYWVGACADLCDLALMLDSKTAHIDLEDXPDVLCLLSSIKSEADNALGAGIGRMTGELYITDDQVLAAVFND

SEQ ID NO: 155856 - protein, 72 aa, Glycine max
  Clone ID: PAT_MRT3847_111758C.1.pep
NFKAKIQAKKGIPLGQHRLIFAAKQLQDVSTLVCNNTQKESTLHLVLSQCPGLYAKGVMLNVFSWRLKYYDV

SEQ ID NO: 155857 - protein, 99 aa, Glycine max
  Clone ID: PAT_MRT3847_111759C.1.pep
SLSCNVSSASLVGEATIVPMTLVVAANLLNGLIKSAVRIVLTIGTMAARFILPPTVGIVPASAACYWGFIGSHPLQLSVLKIQYQLPPATRVHAQQCSE

SEQ ID NO: 155858 - protein, 76 aa, Glycine max
  Clone ID: PAT_MRT3847_11175C.1.pep
KEWQELRRLGPPNIGARKVTNSAQDNRPVILHRHKQVNATQGELAVSCGRSGDVAKSVSRLTGTIIVDMVANRAGV

SEQ ID NO: 155859 - protein, 68 aa, Glycine max
  unsure (1)..(68): unsure at all Xaa locations
  Clone ID: PAT_MRT3847_111760C.1.pep
MSSLMPRHRAMSRSKLTARKSTCGXALGKQSSTKAARKLTTATGGVKKPHLFMPRTRALMEIRTCHKS

SEQ ID NO: 155860 - protein, 99 aa, Glycine max
  unsure (1)..(99): unsure at all Xaa locations
  Clone ID: PAT_MRT3847_111761C.1.pep
SPPQHRWLHSYCGSKGPQKGGKMAKREKGKGKRLRATXKXEREREAVDESETKSINIYFFYHSSLEFERTRGCCCCSLEDFNNILREEDAIIIIINYSR

SEQ ID NO: 155861 - protein, 67 aa, Glycine max
  Clone ID: PAT_MRT3847_111762C.1.pep
KSTQTLKKACNTLFIFLSFYLVYLFVVNLFRSNVLIQFIFLLQCQTNKSEIILKYTREQISSDKKKK

SEQ ID NO: 155862 - protein, 98 aa, Glycine max
  unsure (1)..(98): unsure at all Xaa locations
  Clone ID: PAT_MRT3847_111763C.1.pep
MDPTVAKPGFLRNVLVRLLLFGVFIVVVRFAYVITLAGESCTVGDFCFFSPSINLAIAGTRSGALAAXRRSRRAAERYASKDWINGVRFYSSAFQDMI

SEQ ID NO: 155863 - protein, 60 aa, Glycine max
  Clone ID: PAT_MRT3847_111764C.1.pep
WKSWKDAFSEYSRVMENEGGNTSQQPIGNTIFRRNWTELEKEILLTILEEMVVAGRKRRE

SEQ ID NO: 155864 - protein, 94 aa, Glycine max
  unsure (1)..(94): unsure at all Xaa locations
  Clone ID: PAT_MRT3847_111765C.1.pep
LTSLLLFTLLLTGTLALIQAKKSXDDLKDETHKVYFDVDINGQEAGRIVMGLYGKAXPDTADNFRALCTREKGTGXAGKPLHYKGRSTYATIPS

SEQ ID NO: 155865 - protein, 38 aa, Glycine max
  Clone ID: PAT_MRT3847_111766C.1.pep
VDDLNDMRSLVTYSVLMLVAVVVDNLIKHNRCDCISMT

SEQ ID NO: 155866 - protein, 57 aa, Glycine max
  Clone ID: PAT_MRT3847_111767C.1.pep
NQIESNRRARYLVFGCCFLLVASAVLWKDVLSVNWRDVSVPTMWFNANSMSASWGVW

SEQ ID NO: 155867 - protein, 55 aa, Glycine max
  Clone ID: PAT_MRT3847_111768C.1.pep
ITRVILYASSISFSSFEVCTKKQRKKVFFQIIAILVVIDSSFFCSKTLETRTIME

SEQ ID NO: 155868 - protein, 68 aa, Glycine max
  unsure (1)..(68): unsure at all Xaa locations
  Clone ID: PAT_MRT3847_111769C.1.pep
ARGSDATRPPSSSSLLLLLANLLLXPRSLGKXENPPFYKPPTEKPPFYKPLFDKSPVYKLTFLNPPIY

SEQ ID NO: 155869 - protein, 80 aa, Glycine max
  Clone ID: PAT_MRT3847_11176C.1.pep
GGTSRNIITIMPTCTGTDDIITSRADYSSDTVTFKSESPTEARRFLTFDMKLMDIHNEHIAIPEAQYQATVNMRSSEFAT

SEQ ID NO: 155870 - protein, 86 aa, Glycine max
  Clone ID: PAT_MRT3847_111770C.1.pep
VVPGQGPPRFERHDILVYCRGSLLLLRFRPVLFGSRAFLLASMIVLYYQAVMGVGLCITSPCLLFGWLFRPLLASSVWKLPSWESV

SEQ ID NO: 155871 - protein, 455 aa, Glycine max
  unsure (1)..(455): unsure at all Xaa locations
  Clone ID: PAT_MRT3847_111771C.1.pep
MAAIIPCHYCASLSPRWFNSNNTHSRRLSYPLRGLRGLNARCSYQPPHHSESPNNHNGRSFSLKQCAISIALAVGLITGVPTLEGPTIAQAANPALSDLSVLISGPIKDPGALLRYALPIDNKAIREVQKPLEDITESLKIAGVKALDSVERNVRQASRALKQGKTLIVSGLAESKKEHGVELLSKLEAGIDELELIVQDRNRDAVAPKQKELLQYVGGXDIREAMIFCSVEXHSVESSSFDMLEEDQSLPLLNGRASVDMKVKVKDNPNLDECVFHIVLDGYNAPVTAGNFVDLVERHFYDGMEIQRADGFVVQTGDPEGPAEGFIDPSTEKIRTIPLEITVNGEKAPVYGSTLEELGLYKAQTKLPFNAFGTMAMARDEFEDNSASSQIFWLLKESELTPSNANILDGRYAVFGYVTENEDNLADLKVGDVIESIKVVSGLDNLVNPTYKIAG

SEQ ID NO: 155872 - protein, 47 aa, Glycine max
  Clone ID: PAT_MRT3847_111772C.1.pep
NSQGPSKRYYHRSLKPKGWFSKRPNLRPTFLGKLLLSKTLMLNIAKF

SEQ ID NO: 155873 - protein, 83 aa, Glycine max
  Clone ID: PAT_MRT3847_111773C.1.pep
LLMIRTPPKELQIRLVVLFHASLYFLITVFFSSRRFWSSIYTQLCFFNLKTTIIVDGVGSWILDGVFSHQKLYFFVFELCVRE

SEQ ID NO: 155874 - protein, 112 aa, Glycine max
  unsure (1)..(112): unsure at all Xaa locations
  Clone ID: PAT_MRT3847_111774C.1.pep
PGIPRLRGQLGVNMPAQATSRVQEDKDKVGAKKVKLFEVXNVVPPMGVIDILPTYNFRKKIGQASKSLQFAPMPISVVEPQIFDERFLQFLKEKVFPQPPRFFFFPQRPFLG

SEQ ID NO: 155875 - protein, 75 aa, Glycine max
  Clone ID: PAT_MRT3847_111775C.1.pep
ITSFTGLKASSYKFSAAFKVSTPQATKSFIKASLKDIEVSIVATVAIALLTINAMTIEMLLCPYNTSLSFPSQQF

SEQ ID NO: 155876 - protein, 69 aa, Glycine max
  Clone ID: PAT_MRT3847_111776C.1.pep
VTFYFTYTKKTRIRTKKKVIPLFLFVLYPYLCEIRITSCIIVNNMTHVITLRFLRELENDEGVIDNLKR

SEQ ID NO: 155877 - protein, 61 aa, Glycine max
  Clone ID: PAT_MRT3847_111777C.1.pep
ESEKLRFLKHYRVCWRNNCQPPSHILYCTHVVIWAFSFNLGVLSIFHVVFLIILVQFSSRA

SEQ ID NO: 155878 - protein, 39 aa, Glycine max
  unsure (1)..(39): unsure at all Xaa locations
  Clone ID: PAT_MRT3847_111778C.1.pep
SSXXEXXEXHAXXXXPNRGYXXLTYGYSXQVCGXRRQXP

SEQ ID NO: 155879 - protein, 108 aa, Glycine max
  unsure (1)..(108): unsure at all Xaa locations
  Clone ID: PAT_MRT3847_111779C.1.pep
NVSKHSEVRHVKGHKSNCIKYKELMAVEXALETGIFSVSYTQKDVFSMLRSHKKISEEENREDNFLWQQCLAEVGAIKGADWLDQSGRDSHFKIPLAFRVQPTHLNLQ

SEQ ID NO: 155880 - protein, 222 aa, Glycine max
  Clone ID: PAT_MRT3847_11177C.1.pep
RVLIEAHELIKSMPMRPNMAVFGSFLAACKLHKNIKLGEWAAKQFLSLEPHKSGYNVLMSNIYASANRWGDVAYIRRAMKDEGIVKEPGVSSIEVNGLLHEFIMGDREHPDAKKVYEMIDEMREKLEDAGYTPDVSCVLHNIDKEKKVSALNYHSEKLAMAYGLISTAPGVPIRIVKNLRVCDDCHNATKLLSKIYGREIIVRDRNRFHHFKEGSCSCCDYW

SEQ ID NO: 155881 - protein, 116 aa, Glycine max
  unsure (1)..(116): unsure at all Xaa locations
  Clone ID: PAT_MRT3847_111780C.1.pep
LGPAPCEKDSXAFSFIEEGTRICDAALEXVREVILTLSAQTEYLNRFERRLLRIDRQAFHSKIPVLAYDDVQSEIQCIAYGDRFRITVRIPHLLVIHQVITCFNTFANFYIPDRDH

SEQ ID NO: 155882 - protein, 158 aa, Glycine max
  unsure (1)..(158): unsure at all Xaa locations
  Clone ID: PAT_MRT3847_111781C.1.pep
LNSGWVKSACFHIRRKKEEELTAEDRIIIGVKIGRLDPGVGEKGQQGEKWESRPGGIWILRSNRRHDSDSDKAVTSVDVLFGSDAVDPRPGWTLARTPLLIEADKNMLTARLSTRHGQPHPDHKEFVPRVRKDGKFKIXQVSDAHLATGTGVCRDAID

SEQ ID NO: 155883 - protein, 238 aa, Glycine max
  unsure (1)..(238): unsure at all Xaa locations
  Clone ID: PAT_MRT3847_111782C.1.pep
MEGGDVGHWVLEFLLRARYPVVSSNLLKKVLRIVPLSDFDSRLQKTLLLRTLQDHLFAVSVPESVLETLELLEELHRRDDGALITAAAMSAAYCAIAVDCTLEHLLVELHNNPAYLGAVNRIWRGRVRHMSGSREGSLLLSLELERWRTDIETSLLDSLVXERLASIDTRRDAVVKLRDYLMEAWTDLGPSFLELAALAQINKNALAVNYLEDSQQPEREIEKCTAAPAEEVHTSTDA

SEQ ID NO: 155884 - protein, 68 aa, Glycine max
  Clone ID: PAT_MRT3847_111783C.1.pep
LSHPITTSHLFFLFIITSPTSFPPFLMSPFTSFLVSFDSKGKIKILNRRKSSHDCFYGCPKLYIQRNG

SEQ ID NO: 155885 - protein, 73 aa, Glycine max
  Clone ID: PAT_MRT3847_111784C.1.pep
NPSPYPTLIGHQLQQQQHHGKWLQPTFTWRMYLFRNCIGLSLSRGQWIANPERLTRGVAQVTDLLRIEKGEVT

SEQ ID NO: 155886 - protein, 100 aa, Glycine max
  Clone ID: PAT_MRT3847_111785C.1.pep
ESFIKTQRPIFPFLFFVRKINQTIHCRSLFSSSYISSLLSSYSLLTNNLINIDLIVDLLHMHSYLNLIPLHIFCILNCAFIFHILILNFQLFNSYAFIFF

SEQ ID NO: 155887 - protein, 98 aa, Glycine max
  Clone ID: PAT_MRT3847_111786C.1.pep
MRNFKAVGQAITALFIISLSAWCYGQVELDMAPMEKAERDALYSTIQGFVGDWWNGSDLYPDPCGWTPIQGVSCDLFNGFWYVTVLNIGLIHDNSLSC

SEQ ID NO: 155888 - protein, 79 aa, Glycine max
  Clone ID: PAT_MRT3847_111787C.1.pep
KKKKKKKKKKKKKKKKKKNKKKKKKKKRKNKKKKINKKKKKKKKKNGGGLFKNSNFKNLAFNKFNFFLGHLNLNQLAVF

SEQ ID NO: 155889 - protein, 29 aa, Glycine max
  Clone ID: PAT_MRT3847_111788C.1.pep
PYQQKTKQRLRKFIRLSETIAYILILFIR

SEQ ID NO: 155890 - protein, 76 aa, Glycine max
  unsure (1)..(76): unsure at all Xaa locations
  Clone ID: PAT_MRT3847_111789C.1.pep
MKMKVLVLFVATVLVAYECHGXDYQKLRVQMKTGFGGQYINEVACASWRLGVETNNAFKWQTGPAAWGKDITYYRL

SEQ ID NO: 155891 - protein, 92 aa, Glycine max
  Clone ID: PAT_MRT3847_11178C.1.pep
MTKRTKKAGIVGKYGTRYGASLRKQIKKMEVSQHAKYFCEFCGKYSVKRKAVGIWGCKDCGKVKAGGAYTLNTASAVTVRSTIRRLREQTES

SEQ ID NO: 155892 - protein, 260 aa, Glycine max
  unsure (1)..(260): unsure at all Xaa locations
  Clone ID: PAT_MRT3847_111791C.1.pep
MDIDLRLPSGEHDKEDEETTTIDNMLDSEEKLHNGGIDGRNIVDAGIEVHALNGGDLNSPTVDIVMFKEDTNLEPLSGMEFESHGEAYSFYQEYARSMGFNTAIQNSRRSKTSREFIDAKFACSRYGTKREYDKSFNRPRARQNKQDSENSTGRRSCSKTDCKASMHVKRRSDGKWVIHSFVKEHNHELLPAQAVSEQTRRMYAAMARQFAEYKTVVGLKNEKNXFDKGRNLGLESGEAKLMLDFFIQMQNMNSNFFYAV

SEQ ID NO: 155893 - protein, 121 aa, Glycine max
  Clone ID: PAT_MRT3847_111792C.1.pep
HACATRPNLCMMEGLDVNFLSAPAPVSTNSVQKDEVHAQVEIDGKVFGKGIGLTWDEAKMQAAEKALGSLRSKLGQSIQKRQSSPRPHQGFSNKRLKQEYPRPMQRMPSSARYPRNAPPIP

SEQ ID NO: 155894 - protein, 78 aa, Glycine max
  unsure (1)..(78): unsure at all Xaa locations
  Clone ID: PAT_MRT3847_111793C.1.pep
TIYSGRNGYLDSLAIGQVRQFLGEXRAYLYANNRQFKXIISSSKAFTGEPEVLLKQATHDQMXLFLLQDPVDTNSLIV

SEQ ID NO: 155895 - protein, 102 aa, Glycine max
  Clone ID: PAT_MRT3847_111794C.1.pep
YMTVVGAYVYGTDSTIQRMAFGLDHFHLSGCLASVTLSPSQNRTPTFCTNMSSSLKWGFRTGQKCCNILASWSSLAMQYRLSVSWKCYETGFTSKMMRQVQC

SEQ ID NO: 155896 - protein, 63 aa, Glycine max
  Clone ID: PAT_MRT3847_111795C.1.pep
NSVNRLGISYPELTEMQARAIFQAAVSVSNHGITVLPEIMVPLIGTPQVWSFFLLISSLVCVF

SEQ ID NO: 155897 - protein, 114 aa, Glycine max
  Clone ID: PAT_MRT3847_111796C.1.pep
IRHEAEGIFSEHEWNEAEILFELKCPAPSSVEAMWAHNISMEIIDWTLIGVYNQGNIKDDIKFKMPMSTFLLPNREPPSLPGCLYYVVSHVTDKLVLVVDDGREKDEQEEKIIG

SEQ ID NO: 155898 - protein, 67 aa, Glycine max
  Clone ID: PAT_MRT3847_111797C.1.pep
VRFLLVGLNDFALPFKCQSPASILHVVALFLSDAAKLQHKTFLATYILFYPEPEKWTTTPSVVFSQP

SEQ ID NO: 155899 - protein, 57 aa, Glycine max
  Clone ID: PAT_MRT3847_111798C.1.pep
GPPYLGGVPTLLVRDFCKQLVLCALTAQIFCKAQSLRPNSGPLFRYSWKEIPPFYEY

SEQ ID NO: 155900 - protein, 60 aa, Glycine max
  Clone ID: PAT_MRT3847_111799C.1.pep
LLCFIFFFNEKTSPTMLLGNELTNTSPPSIPQYTSAKLSGSPRTGNHIPLGEPFSFMLNI

SEQ ID NO: 155901 - protein, 163 aa, Glycine max
  Clone ID: PAT_MRT3847_11179C.1.pep
HVNKGQTVAENAYELSNNHERQIPVENEGNVESHFQSNGNDDSQATELASSAQDDAPKKSYASIVKVQKGSSVPTKVYVPTNTLKSGPNKTESKVVESVESTEVSEAALDSVNNPESSDAHEEVEGHSIYIRNLPLNVTAAQLELEFKKFGPIKPGGIQVRNN

SEQ ID NO: 155902 - protein, 140 aa, Glycine max
  Clone ID: PAT_MRT3847_1117C.1.pep
MVSFEMNDRKKIGLGLTGFGIFFSFLGIIFFFDKGLLAMGNVLFVSGVSITIGLKSTMQFFMKRSNFKGTISFGVGFFILIMGWPIVGMIVEAYGFVVLFSGFWPTLAVFLQKIPVLGWLFQQPFVRSLFDRYRGKRMPV

SEQ ID NO: 155903 - protein, 96 aa, Glycine max
  unsure (1)..(96): unsure at all Xaa locations
  Clone ID: PAT_MRT3847_111800C.1.pep
MQTFTRLFMKSRPSFCRRLPPMQSGDRIYYKNMGLISPFIXSRGKILSKRVNTFALNHXPLIASAITPGGIIALWPLCNNEKQFDKKRVNRWPPSF

SEQ ID NO: 155904 - protein, 98 aa, Glycine max
  Clone ID: PAT_MRT3847_111801C.1.pep
PVCQMLDFVSGTGSHHLLGISSARYLHWRQAVQYWSTIRYAWVSFDQSELMDQKLFRISLRNIQLAGRKICKGQSINPGRLAKKDSHNKMKPPKLRHS

SEQ ID NO: 155905 - protein, 47 aa, Glycine max
  Clone ID: PAT_MRT3847_111802C.1.pep
IKKKKKKKKKKKKKKKKKKKKKKKTNKKKKKCELLSKKKSKPTHDGR

SEQ ID NO: 155906 - protein, 42 aa, Glycine max
  Clone ID: PAT_MRT3847_111803C.1.pep
AIILLKSIFQMEDHLNSNIAFFTYKNLIHKTTLSLTYQKKTY

SEQ ID NO: 155907 - protein, 124 aa, Glycine max
  Clone ID: PAT_MRT3847_111804C.1.pep
EKLVPLQVPVRISRVTPPFLECLVSKKAYKKFFGKRFFQNGFFPSNSPIFTRGHHPQGGKLFFFFLILVEIVKIFFFQFLNAFHKIFTSFNCWFNPRGRLNFWFPPMFYLFENKGSCFNPFFFP

SEQ ID NO: 155908 - protein, 98 aa, Glycine max
  Clone ID: PAT_MRT3847_111805C.1.pep
DKDKKLVDHNKFLQEFVQSMEIIGAFQVLTGSAGEIGNKWSVVNSSINDVLIKKYFVVLISYQMSQLIIKIRHPTPLSPQGKVTADIIQIPISVYLVS

SEQ ID NO: 155909 - protein, 181 aa, Glycine max
  Clone ID: PAT_MRT3847_111806C.1.pep
MGGCFSSKPSFTINNVRLVHLSGYVEDFENPISVSQVTGTPPKHFVCTSVQLLSSCSKPLNGDTQLQPGNVYFMLPYSILQADVSPVDLASLAKRLTAIAKTRSRRLEGKKSSSLKDGSFSSNVWSSPSRSPGRLGGVVEQIGMPYGGPSPCRVRPWKPILDTIREKSFNRRSESDLQEHN

SEQ ID NO: 155910 - protein, 49 aa, Glycine max
  unsure (1)..(49): unsure at all Xaa locations
  Clone ID: PAT_MRT3847_111807C.1.pep
AXXLNEAVLPFXSRAPITPNILFECSAXALGRGEAGRRSHGYPPTTEPP

SEQ ID NO: 155911 - protein, 33 aa, Glycine max
  Clone ID: PAT_MRT3847_111808C.1.pep
EDGLAGGNLCDLHTFMHWLLLMTIVYAADCLIA

SEQ ID NO: 155912 - protein, 146 aa, Glycine max
  unsure (1)..(146): unsure at all Xaa locations
  Clone ID: PAT_MRT3847_111809C.1.pep
LAALLAFKSALRESNDGIFNTWTGTDCCHNWYGISCDRNTHRVAEISLRAGPVYTTFEKPFRPGYMSGSISPEICKLTHLSSIIITDWQGISGEIPRCITSLFFLRIIDLTGNRIAGTLPSNXRRLRHLTLLSAADNVIAGIIPPS

SEQ ID NO: 155913 - protein, 114 aa, Glycine max
  Clone ID: PAT_MRT3847_11180C.1.pep
MMEPSKHHQRHQNKTKKKWFLPLILSLLISTFLILLSVIVSSNSPSQRWHHHHRAPVPKEVVPRFVESKLKISPTSTHLVPRIAYLISGSMGDGESLKRTLKALYHPWNHYAVH

SEQ ID NO: 155914 - protein, 119 aa, Glycine max
  Clone ID: PAT_MRT3847_111810C.1.pep
VQLFFVYVNARPQSPIHVIWVHPKNKCSSWINEDDDIEASWDQTSSDNYAFPTPRAPQEPHALHGRSVWFSTNEEINSGIDSNKWCAHSFGSIMNIFYLEMALFYQSQAEKTIKRRLNS

SEQ ID NO: 155915 - protein, 41 aa, Glycine max
  Clone ID: PAT_MRT3847_111811C.1.pep
SCDGFVLELALFILKIVELKGILLKLKIYFIICILTQVALI

SEQ ID NO: 155916 - protein, 100 aa, Glycine max
  Clone ID: PAT_MRT3847_111812C.1.pep
TRPNGDVGVDGMVISLATVLAGAVTNPFGNGYYQGSATAPLEPVSACPGLFGKGAYPGYTGNVLVDNVTGASYNALDVHGRKFLLPAMWNPVTSTCKTLV

SEQ ID NO: 155917 - protein, 84 aa, Glycine max
  unsure (1)..(84): unsure at all Xaa locations
  Clone ID: PAT_MRT3847_111813C.1.pep
EQMPANEYSSLXDQNLYSRGALRPISLLLSLGEFWLTLFTHSSRGPXVHLRRYTASKEPLRVILAVGTRTLLLETLIVLKIYLL

SEQ ID NO: 155918 - protein, 151 aa, Glycine max
  unsure (1)..(151): unsure at all Xaa locations
  Clone ID: PAT_MRT3847_111814C.1.pep
EESLTVWSTQVRAATTLLTDGCPYLYAMVHDRSVSTIPGDFAIGGKQTTINNMCAYRLNDGISGSRILDTIPKAMSQQTGWNQMATVRTPLNVDSSKQSFSQFCIDHLRGGILVDKTGXWITLIQKPALSNWLRGAAWKKGCIMVKNVMSG

SEQ ID NO: 155919 - protein, 64 aa, Glycine max
  Clone ID: PAT_MRT3847_111815C.1.pep
FPMERTMLVRSRSEEGTHRYMMLVPPKILDGVLINLLERNVHHGFFLLVSQPLRSIRNYNLLLL

SEQ ID NO: 155920 - protein, 55 aa, Glycine max
  Clone ID: PAT_MRT3847_111816C.1.pep
RPFLPHTNASRHMDAPLTTTFRYAPPNCDKRIHTVPLRAERTSTNYSKNGYFRSR

SEQ ID NO: 155921 - protein, 87 aa, Glycine max
  Clone ID: PAT_MRT3847_111817C.1.pep
EKLRTTKVKSLTAKGKENVSRNVAVNQKCISRGASAGGLVRSHRTTEHNHPQKGDKAGSTALTIVGRDNDQHEAKNQINLAKSIYLR

SEQ ID NO: 155922 - protein, 102 aa, Glycine max
  Clone ID: PAT_MRT3847_111818C.1.pep
VFFSIIVSFPENHSPSVLPSFFYPFLPTTLICIFLFYIISPFFYFFFSFCSLRTLFLPLLLTIGFDLTSFFSCVFSFLCRCQTYRRPQPRHPSRRAERCSRQ

SEQ ID NO: 155923 - protein, 276 aa, Glycine max
  unsure (1)..(276): unsure at all Xaa locations
  Clone ID: PAT_MRT3847_111819C.1.pep
ARDYGQLQISDGNKDLKIGKVRIRISTLEAGRVYTNAYPLLVLHPSGVKKMGELHLAIRFSCSSMVDXMPRHTKPHLMKMHYRIPLVVRWLGEVSTWKHPITTVLVHILFLMLVCLPELILPTVFLYMFVISMWNWRFRPRCPPHMNTRLSYAEGVTPDELDEEFDTFPSSKSPDILRWRYDRLRTVAGRIQSVVGDLATQGERIQALVNWRDPRASAMFMVFCFVAAIVLYVTPFQLPILLTGFYLMRHPMLRSKVPPAPVNFFRRLPSLTDSML

SEQ ID NO: 155924 - protein, 345 aa, Glycine max
  unsure (1)..(345): unsure at all Xaa locations
  Clone ID: PAT_MRT3847_11181C.1.pep
MPGVYPLLRDDVEDHCEKVDAHLEVQKETDAAPLLDCKETQQGSVDWKIDERPIEEVMVLSELRKVTVLYELLSACLSDLGENNKKFSRRRKGYDARQRVTLRLLATWLDIKWAKMEAIETIVASSAMAFIKEQEASKEETQSKEDKWAKWKRGGIIGAAALTGGTLMAITGGLAAPAIAAGLGALAPTLGTLIPVIGASGFAAAASAAGTVAGSVAVAASFGAAGAGLTGSKMARRVGGVDEFEFKAIGENHNQGRLGVEILVSGFVFEKEDFIRPWEGQNDNLEXVRYALQWESENLIAVSXCIQDWLTSKLAMELMKRGAMMTVLSSLLTALAWPAALLAAT

SEQ ID NO: 155925 - protein, 172 aa, Glycine max
  Clone ID: PAT_MRT3847_111820C.1.pep
MSEVQAQQVEPKARESPTRKIPTLKTFQIYRWNPKNPSKHKVKDYQINLKEGGPMVLDALNNIQNKIDPSLTFRRSCREGICGSCAMNIDDYNNIACLTKIPLEKNSAAMTITPLPHMFVIKDLVMDMTNFYTNLREVMICATILVYCSYRWFHIPGIVIRFFLTFNLSSLC

SEQ ID NO: 155926 - protein, 246 aa, Glycine max
  Clone ID: PAT_MRT3847_111821C.1.pep
ARDNGQLQNSDGNKDLKIGKVRIRISTLEAGRVYTNAYPLLVLHPSGVKKMGELHLAIRFSCSSMVDLMQQYFKPHLPKMHYKRPLNLMEQEKLRHQAVNVVAARLSRAEPPLRKEVVEYMCDTDSHLWSMRRSKANFYRLMTVFSGILSVVRWLGEVSTWKHPITTVLVHILFLMLVCFPELILPTVFLYMFVIGMWNWRFRPRCPPHMNIRLSYAERVTPDELDEEFDTFPTSKSPDILRWRYD

SEQ ID NO: 155927 - protein, 62 aa, Glycine max
  Clone ID: PAT_MRT3847_111822C.1.pep
RIYLATYSKKFQDRAITGKSKNKGGWKGQNLKDKTQGRIYPLQGTESLKGLQILGGGHFKNK

SEQ ID NO: 155928 - protein, 127 aa, Glycine max
  Clone ID: PAT_MRT3847_111823C.1.pep
GKKTPRETGKGGPVKKPWVFQRGAGPHPGGPKNGPKKNLYKKKNWGKKAQNPQGGKPQGFGAPGNPLKKKKGGGERGKKSPENPGGGTRPPGVGAPRKGPEIGPPKNKGPKANFWKQRTTKGSGFRG

SEQ ID NO: 155929 - protein, 68 aa, Glycine max
  unsure (1)..(68): unsure at all Xaa locations
  Clone ID: PAT_MRT3847_111824C.1.pep
ITTDTATHMVLNLFKSDQSSRPDYNNYSKXCFDLCMCSLLMPPKCNXQDIILKSCHSYCNILTKLNIP

SEQ ID NO: 155930 - protein, 57 aa, Glycine max
  Clone ID: PAT_MRT3847_111825C.1.pep
PNFIPCDATSTDNGCHSFNNQCAFGAFHFINNPVMVFKLRINTLRMDVSTNLNVSLS

SEQ ID NO: 155931 - protein, 60 aa, Glycine max
  Clone ID: PAT_MRT3847_111826C.1.pep
HHNPLKGGPGKKKKKKKGQTPPQRNNPNSEIKAPGQPRLKKFPPMGKNNRLGGPAPTGTP

SEQ ID NO: 155932 - protein, 56 aa, Glycine max
  Clone ID: PAT_MRT3847_111827C.1.pep
SDLSYGVCKKWRGMQIIPILPRIQNPDRHGCVIPLFVGLDPSILFWVRLWAEPFKF

SEQ ID NO: 155933 - protein, 110 aa, Glycine max
  unsure (1)..(110): unsure at all Xaa locations
  Clone ID: PAT_MRT3847_111828C.1.pep
MAMHKSSSCSSLSPGGLDLTQAFFKSFMNAAGCSSTKLHNKISVVGACNLGMAIAQTILTQDLTYKLVLMDAISDKLRGEMLXDLQHADAFLPRTKIQAFTDYSVTLDSD

SEQ ID NO: 155934 - protein, 104 aa, Glycine max
  Clone ID: PAT_MRT3847_111829C.1.pep
CFVRTRNEDGDRLVDENSIPRILQVFSSLEHLVLILQSLNENENESQSEGVQVESLCFSIPSLKWFELCSDEQEFNVVVKAENLVNFVCDLEGLHKVATCEITS

SEQ ID NO: 155935 - protein, 319 aa, Glycine max
  Clone ID: PAT_MRT3847_11182C.1.pep
MRLGVSVSVRCSIGTASGNTQTDYPAKFQRSSFSTANFLPDNASSDLAVSISSSSSRRGLIRIATLPCLLPLIGCLPANAMQPGSKEYLLIKEEVRKVLSKGKAAGVLRLVFHDAGTFDIDDSTGGMNGSIVYELERPENAGLKKSVKVLQKAKTQIDAIQPVSWADMIAVAGAEAVEVCGGPPIQVSLGRLDTLVPDPEGRLPEESLNASGLKKCFQSKGFSTQELVALSGAHTIGSKGFGSPISFDNSYYKVLLEKPWTSSGGMPSMIGLPSDHALVEDDECLRWIKKYADSENLFFEDFKNAYVKLVNSGVRRNSL

SEQ ID NO: 155936 - protein, 29 aa, Glycine max
  Clone ID: PAT_MRT3847_111830C.1.pep
WATLSYGDLLRIFIKKQEKRKRYNSKQHT

SEQ ID NO: 155937 - protein, 48 aa, Glycine max
  Clone ID: PAT_MRT3847_111831C.1.pep
KEKKNIQNSYQTSLQNGYALLPPMKSIQKHICLKEGLIPSFITRYLIL

SEQ ID NO: 155938 - protein, 173 aa, Glycine max
  Clone ID: PAT_MRT3847_111832C.1.pep
SFASPVSLGNLMGVSSSGRSHSVVRRVSLSRGNCRGRKRWHCVSLSVCRYSVTTTDFVADQGNSVSLDSNSSRSKGGDDGAGFVLKPPPKPVLKSPENKSDPILGPSRTTGDVEERNKVIESLGEVLEKAEKLGSSKVNGDRNNGSVNKPVRSNANASPKADKPVNSAAPQKS

SEQ ID NO: 155939 - protein, 109 aa, Glycine max
  Clone ID: PAT_MRT3847_111833C.1.pep
MRKKVDERIRTLIENGVRTRHRSMFIIIGDKSRDQIVNLHYMLSKAQIKSRPTVLWCYKDKLELSSHKKKRSKQIKKLVQRGLYDPEKGDSFELFVASGGLTYCLYKDS

SEQ ID NO: 155940 - protein, 69 aa, Glycine max
  Clone ID: PAT_MRT3847_111834C.1.pep
RLEQYDMISIVMHCLGLCNCILHASIGRRTIMCSCVFNGLSRSLSSMNFQRSVISYLLIGVSNSKHRFS

SEQ ID NO: 155941 - protein, 83 aa, Glycine max
  unsure (1)..(83): unsure at all Xaa locations
  Clone ID: PAT_MRT3847_111835C.1.pep
SHSPIWYXTSWVDFXICSPLXHSLLLTDPHXRSKWSYLXNTWAWCXMXXYXNFXLETXGSLRKXFLLVEIXXSXCLXXXSNTI

SEQ ID NO: 155942 - protein, 58 aa, Glycine max
  Clone ID: PAT_MRT3847_111836C.1.pep
KNNPLHMIFFLLLLLGKPHSYEFLPERINQSPKSSNALVELGFINPCKFYFTPHDALP

SEQ ID NO: 155943 - protein, 83 aa, Glycine max
  unsure (1)..(83): unsure at all Xaa locations
  Clone ID: PAT_MRT3847_111837C.1.pep
WNMASLLSSLVLLLAALTLSPQVRVDYDMPPIYMPPVNTPPVYKPTVEXPPVFKPTVYNASSLNPHLHTPPVYKSSLFYPAMS

SEQ ID NO: 155944 - protein, 88 aa, Glycine max
  unsure (1)..(88): unsure at all Xaa locations
  Clone ID: PAT_MRT3847_111838C.1.pep
NTQFYSLNLTCPGTVVMTKYYRGCEKMVRIFPGGWWRXHAYGXHFASCLTPIXLNCMVCDVXRSXIMEDCWSVREMLKNLYAEIGYTP

SEQ ID NO: 155945 - protein, 250 aa, Glycine max
  Clone ID: PAT_MRT3847_111839C.1.pep
HFMLNEKLQKMGMLGCLLCIVGSTVIVLHAPQEKPLSSVEEIWQLALQPAFLSYTASAIAVVFFLILYCAPRHGQTNILVYIGICSIIGSLTVMSIKAIGIAIRLTIEGADQFVQFQTWIFTMVAISCIVTQLNYLNMALDTFNTAVVSPIYYALFTSFTILASAIMFKDYYGQSISSIASELCGFVTVLSGTTVLHSTRELDPPVNTDLYSPLSPKVSWYIQGNGEPWKQKEDAPPFNLITVIRQDHFK

SEQ ID NO: 155946 - protein, 79 aa, Glycine max
  Clone ID: PAT_MRT3847_11183C.1.pep
LANLPGMIIALHFQLLHHLIYAKFTKGKINYNTDKENGGNNYLSRSGGSHYHMHNNSPIEPSFRCANTGPKLRESITRI

SEQ ID NO: 155947 - protein, 81 aa, Glycine max
  Clone ID: PAT_MRT3847_111840C.1.pep
PVTSNIRKNCLSGNTVEKTVRARSSIEQAYVCQRNKADSSKDGSQFAVMDLDTYDEIRLGEKEIGDSTKWLKRGMDCDLLN

SEQ ID NO: 155948 - protein, 74 aa, Glycine max
  unsure (1)..(74): unsure at all Xaa locations
  Clone ID: PAT_MRT3847_111841C.1.pep
ASSMISSPAVTTVNRAGGRMXAXFTGLQSMAWLPTRXTHHDITFIASNGGRGPCLPGWXPPFGRRKFRTFSTLP

SEQ ID NO: 155949 - protein, 222 aa, Glycine max
  Clone ID: PAT_MRT3847_111842C.1.pep
LPTAQPPAAHTALATLDKAARINFMITQNVDRLHHRAGSNPLEIHGTVYTVICIDCGYSFCRSLFQDQLKALNPKWAEAIDNLDHGNPGSDKSFGMKQRPDGDIEIDERFWEEDFTIPTCHKCNGALKPDVVFFGDNVPKDRADMAMEASRRCDAFLVLGSSLMTMSAFRLIRAAHEAGAATAIVNIGVTRADDFVPLKINARLGEILPRVLDIGSISIPAV

SEQ ID NO: 155950 - protein, 57 aa, Glycine max
  Clone ID: PAT_MRT3847_111843C.1.pep
LVLGPWISKATVKTLNTTKLLNVLSLYMGKRLLALFYEDEKQSDVKLFVKKGNDPAP

SEQ ID NO: 155951 - protein, 46 aa, Glycine max
  unsure (1)..(46): unsure at all Xaa locations
  Clone ID: PAT_MRT3847_111844C.1.pep
NXYCCGLPVFLLRKASSLHSALLLLRVPLVLVITFYYTTLTAATTT

SEQ ID NO: 155952 - protein, 203 aa, Glycine max
  Clone ID: PAT_MRT3847_111845C.1.pep
EYEFIERIVESTVQALPGYDVFLSFTGEDTRYTFTGFLYNAFRREGFKIFMDDEELESGNQISQKLMRAIESSKISIVVLSENYAYSTWCLDELAKIIECMKTNNQMVWPIFYNVQKSDVCNQTKSYGEAMTEHEKRIGKDSEKVQKWRSALSEIKNLEGDHVKQNEYQHELIERIVEKVIKIEGSKHTANPFLLSNDSYEEE

SEQ ID NO: 155953 - protein, 207 aa, Glycine max
  Clone ID: PAT_MRT3847_111846C.1.pep
MEAICSKHLMTSLVIILASSLTLSQGAKKGSDSERPYQEASTVFIRTSCSSTTYPRLCYSSLVKHADLIQTNRVVLTGTALNVTLASAKSTSAMMSTLAKRQGLKPREVAAMKDCVEELADSVDELRRSISEMAQLTPSNFEMTMSDVETWVSAALTDESTCTDGFQETAAAGGSNVKNTVRGQILQVAQLTSNALALINQLANSHA

SEQ ID NO: 155954 - protein, 496 aa, Glycine max
  unsure (1)..(496): unsure at all Xaa locations
  Clone ID: PAT_MRT3847_111847C.1.pep
VCPGCKDISVSILLNGDLPIGVDRNSVDTWVYPNLFRMNTSTGAPPDYFDKNGQNWGFPTYNWEEMSKDNYGWWRARLTQMAKYFTAYRIEHILGFFRIWELPDHAATGLVGKFRPSIPLSQEELEREGIWDFNRLSYPYIKRELLQEKFGDAWXFVATTFLNEIDKNFYEFKEDCNTEKKIASKLKTCAESSLLLESVDKLQRNLFDLSQNIVLIRDPEDPRKFYPRFNLEDTISFQDLDDHSKNVLKRLYHDYYFCRQENLWRQNALKTLPVLLNSSDMLACGEDLGLIPSCVHPVMQELGLVGLRIQRMPNEPDLEFGIPSKYSYMTVCAPSCHDCSTLRAWWEEDEERRLRFFKNVMESDGLPPDQCVPEVAHFVIRQHFEAPSMWAIFPLQDLLALKEEYTTRPATEETINDPTNPKHYWRFRVHVTLESLIKDNDLQTTIKDLVSWSGRSLPKEDDSEIEASPVSVLSAAEALSEKQKFASTTEKPVLVK

SEQ ID NO: 155955 - protein, 84 aa, Glycine max
  Clone ID: PAT_MRT3847_111848C.1.pep
RASMNNISYNFYLTRTGFSMVPANCCFSERASADDNADTGLTSTSESSSLGSDLPLQRTRSLMVVWRSLSLINDSKVTCTPDNS

SEQ ID NO: 155956 - protein, 134 aa, Glycine max
  Clone ID: PAT_MRT3847_111849C.1.pep
KTHFNHHYHTTTIPPPFFLSSFHHNHHHCCYCHYCHHSVIIIASTTSTLPQPPPPPLLPLSFYHHHHTLPLLPLTSLSLSSFCRLHRRCHRCCHHTTPPSPSHHYYRHYYCHHHFAAFIVVVVIVTTIASHHHS

SEQ ID NO: 155957 - protein, 209 aa, Glycine max
  Clone ID: PAT_MRT3847_11184C.1.pep
MASFASNNYPLVFFFVLFSLAMRLAHGTNYAPTLFIFGDSTFDVGTNNFLNSKAKANFPYNGIDFYPPFPTGRFSNGFNTADQIARQFGYKQSPPPFLTLEKDQYSLKKNILKGVNFASGGSGILRETGHSEWGEVVFFERQVEQFASVGGNISEMLGHAQAAKFVSKALFLISVGSNDIFDYARNDSGSIHLGAEEYLAGVNSHITLI

SEQ ID NO: 155958 - protein, 36 aa, Glycine max
  Clone ID: PAT_MRT3847_111850C.1.pep
PRVRKCMKLSFIQIPLWNGLLYNEVDLSQMPQQTNF

SEQ ID NO: 155959 - protein, 52 aa, Glycine max
  Clone ID: PAT_MRT3847_111851C.1.pep
RTNELLLHRVPLQAIAPWSDAPGFCQNDSLKSVIAIQYTVNSTQLMVYFNAC

SEQ ID NO: 155960 - protein, 32 aa, Glycine max
  Clone ID: PAT_MRT3847_111852C.1.pep
MLIRLALKRGGHRFFQTTAYGHFGRDVPAFTW

SEQ ID NO: 155961 - protein, 123 aa, Glycine max
  Clone ID: PAT_MRT3847_111853C.1.pep
VRLQGPQRDRTGTTHAPAHPFLPYNNPDNHTQHANGATLSTTPRPHKKPKHSSSAAEMASTHKRKAKHPPATAPKGRPNNPPPHTTPTLKNHSGHGTSNTRHHNELQKKHTEHAEAPADTKPT

SEQ ID NO: 155962 - protein, 74 aa, Glycine max
  unsure (1)..(74): unsure at all Xaa locations
  Clone ID: PAT_MRT3847_111854C.1.pep
SQGWFFASMXHPADRNIAQLAKVKFMKRHGEWQDLDIPPSIRSIVCLNLPSFSGGFNPWGTPNRRKQSDVIFIC

SEQ ID NO: 155963 - protein, 28 aa, Glycine max
  Clone ID: PAT_MRT3847_111855C.1.pep
CLGRLSNKGFVTKSRTLFSIEAIMSFAS

SEQ ID NO: 155964 - protein, 646 aa, Glycine max
  unsure (1)..(646): unsure at all Xaa locations
  Clone ID: PAT_MRT3847_111856C.1.pep
PGSQALSSCNKPLEGWGYRLGFKTMARFXKGQSLIYGSSHXYLVMDFPSFEPRLVYQESHSYXLFPSSIKSTYYVVGVCDPEVGRRNPSEHKQLKLARSLTRGVIDRDLKPSSNERKSIQRILKYPPTRTLSGDERQLLWKFRFSLMSEKRALTKFLRCVEWSDVQEAKQALELMGKWEMIDVCDALELLSPVFESEEVRAYAVSVLERADDEELQCYLLQLVQALRFERSDKSRLSHFLVQRALRNIELASFLRWYVAVELYDPAYAKRFYCTYEILEENMMKIAAGVNGEEDGFKQWQSLVRQTELTAQLCSITREVRNVRGNTQKKIEKLRQLLSGLLSELTYFDEPIRSPLAPGVLIAGIVPSESSIFKSALHPLRLSFRTANGGTCKIIFKKGDDLRQDQLVVQMVSLMDRLLKLENLDLHLTPYKVLATGQDEGMLEFIPSRSLAQILSENRSIISYLQKFHPDDHGPFGITATCLETFIKSCAGYSVITYILGIGDRHLDNLLLRNDGGLFHVDFGFILGRDPKPFPPPMKLCKEMVEAMGGAESQYYTRFKSYCCEAYNILRKSSNLILNLFYLMAGSNIPDIASDPEKGILKLQEKFRLDLDDEASIHFFQDLINESVSALFPQMVETIHRWAQYWR

SEQ ID NO: 155965 - protein, 68 aa, Glycine max
  Clone ID: PAT_MRT3847_111857C.1.pep
GEVSSEQLSFFLPLCLVVFLSILSYLLFFGVFWLFSFVLRVSLASFLGRLVWRSHSWNSVDLESWFLA

SEQ ID NO: 155966 - protein, 812 aa, Glycine max
  Clone ID: PAT_MRT3847_111858C.1.pep
MTGNEFRFFLSCDISVPVTFRVERLEGNLPLPKSPDLENNAPTDNRTTELFVECALYIDGAPFGLPMRTRLESLGPSYCWNELITLTTKYRDLTAQSQLTFTVWDLSHGEGLIGGATILLFNNKKQLKTGKQKLRLWAGKEADGTFPTSTPGKVPRHERGELERLEKLVNKYERGQIQRVDWLDRLTFKTMERIKERESLKNGSSHMYLVVDFCSFEHRVVFQESGANFLFPSPIASTNDIVVVWDPEVGKINPSEHKQLKLARSLTRGVIDRDLKPSSNERKSIQRILKYPPTRTLSGDERQLLWKFRFSLMSEKRALTKFLRCVEWSDVQEAKQALELMGKWEMIDVCDALELLSPVFESEEVRAYAVSVLERADDEELQCYLLQLVQALRFERSAKSRLSHFLIQCALRNIELASFLRWYVAVELYDPAYAKRFYCTYEILEENMMKIAAGVNGEEDGFKQWQSLVRQTELTAQLCSITREVSNVRGNTQKKIEKLRQLLSGLLSELTYFDEPIRSPLAPGVLITGIVPSESSIFKSALHPLRLTFRAANGGTCKIIFKKGDDIRQDQLVVQMVSLMDRLLKLENLDLHLTPYKVLATGQDEGMLEFIPSRSLAQILSENRSIISYLQKFHPDDHGPFGITATCLETFIKSCAGYSVITYILGIGDRHLDNLLLRNDGGLFHVDFGFILGRDPKPFPPPMKLCKEMVEAMGGAESQYYTRFKSYCCEAYHILRKSSNLILNLFYLMAGSNIPDIASDPEKGILKLQEKFRLDLDDEASIHFFQDLINESVSALFPQMVETIHRWAQYWR

SEQ ID NO: 155967 - protein, 49 aa, Glycine max
  Clone ID: PAT_MRT3847_111859C.1.pep
LNAMVRMDEVRCGMHTEVSLDLLVRPLLLPLIHNKIRVLIWINTASDSA

SEQ ID NO: 155968 - protein, 278 aa, Glycine max
  Clone ID: PAT_MRT3847_11185C.1.pep
LWHQCYVPGMEITLSSRLKSLYSLYSKMKRKDISIDKVYDARALRVVVGDKNGTLHGPAVQCCYSLLDIVHRLWTPIDGEFDDYIINPKPSGYQSLHTAVQGPDNSPLEVQIRTQRMHECAEQGLAAHWLYKETGNPFLSIDSMDEPETEASSYFSKDLEEGNSSDILLSKYKSLKAGHPVLRVEGSHLLAAIIISVENDERELLVAVSFGLAASEAVADRRSFQIKRWEAYARLYKKVSDEWWFEPGHGDWFTCLEKYTLCRDARPIWAPTPNIHPG

SEQ ID NO: 155969 - protein, 172 aa, Glycine max
  Clone ID: PAT_MRT3847_111860C.1.pep
MANPKVYFDMTIGGQPAGRIVMELYADTTPRTAENFRALCTGEKGVGRSGKPLHYKGSTFHRVIPNFMCQGGDFTAGNGTGGESIYGSKFADENFIKKHTGPGILSMANAGPGTNGSQFFICTVKTEWLDGKHVVFGQVVEGLDVVKDIEKVGSSSGKTSKPVVVADSGQLS

SEQ ID NO: 155970 - protein, 172 aa, Glycine max
  Clone ID: PAT_MRT3847_111861C.1.pep
MPNPKVYFDMTIGGQPAGRIVMELYADTTPRTAENFRALCTGEKGVGRSGKPLHYKGSAFHRVIPNFMCQGGDFTAGNGTGGESIYGSKFADENFIKKHTGPGILSMANAGPGTNGSQFFICTVKTEWLDGKHVVFGQVVEGLDVVKDIEKVGSSSGKTSKPVVVADSGQLS

SEQ ID NO: 155971 - protein, 118 aa, Glycine max
  Clone ID: PAT_MRT3847_111862C.1.pep
PAFSLTSPSLSAIPILSDEHNNNAPTAFDTDCDDDNNALHHRGSEPEPEPELEPVDIFDKTICIHCDNKREEAEGVLICGGRGCPVAVHATCLGFEPEFDDSGNFCCPYCWYKRAVDT

SEQ ID NO: 155972 - protein, 100 aa, Glycine max
  unsure (1)..(100): unsure at all Xaa locations
  Clone ID: PAT_MRT3847_111863C.1.pep
XSXCVSXXXXSXSXXXXXXXXLLXVXXLXXLXXXXSLCXXXLSASXXVXSFSGCLFXXSXXGAXFFXLXXXXXLCCVXXXRRLXXXCCSSXDXSXTSALX

SEQ ID NO: 155973 - protein, 64 aa, Glycine max
  unsure (1)..(64): unsure at all Xaa locations
  Clone ID: PAT_MRT3847_111864C.1.pep
HGVIGISVIEKLYSSQPQLREWFYRPKMQCTQFGAGSGKSVALSRVSLQCXVSKPDLQRVQQAF

SEQ ID NO: 155974 - protein, 30 aa, Glycine max
  Clone ID: PAT_MRT3847_111865C.1.pep
RIPYLDKRIILSLWQAPSVVQIFSLNSAIP

SEQ ID NO: 155975 - protein, 91 aa, Glycine max
  Clone ID: PAT_MRT3847_111866C.1.pep
HEQHRTLHHPGLPPFSNSFCSITTISRSSPLNHPSIVKLPLHQCHHFQISAAPNHHCQQSKSTKLLKNKINQCVYKVSKLNQRKRRKKKRE

SEQ ID NO: 155976 - protein, 83 aa, Glycine max
  Clone ID: PAT_MRT3847_111867C.1.pep
TRMVLINRITLQHIRPWTYSCLWMFVNPTKTMLFTFGKRQKHRYQKTKSLKPSPLMPLCTTILIKYHRNLHWMTMILTRWILL

SEQ ID NO: 155977 - protein, 65 aa, Glycine max
  Clone ID: PAT_MRT3847_111868C.1.pep
PAVHRRSFNQLPPLPHEIHLSLHPAQTVFPEPLHTSGTCVPVGRLFFTKLSSGETIYRTLLLQNC

SEQ ID NO: 155978 - protein, 42 aa, Glycine max
  unsure (1)..(42): unsure at all Xaa locations
  Clone ID: PAT_MRT3847_111869C.1.pep
LPPGPQRVFFCGQQLEDGRAPPXSTLQKETTLSLFLRFRGGV

SEQ ID NO: 155979 - protein, 76 aa, Glycine max
  unsure (1)..(76): unsure at all Xaa locations
  Clone ID: PAT_MRT3847_11186C.1.pep
KLNLEWLTLKPLNRKSDLPIIRMSQLRWNQRATTLVTIMKTCGIFLSGGLKRLATKPERAPQAMRVCGGDIXAPGW

SEQ ID NO: 155980 - protein, 49 aa, Glycine max
  Clone ID: PAT_MRT3847_111870C.1.pep
EKLNYHSAYFIHQAAFNANTHLNHKVFFFFLPFFCLIFSLSTDFRDEFY

SEQ ID NO: 155981 - protein, 63 aa, Glycine max
  Clone ID: PAT_MRT3847_111871C.1.pep
ITMPSIRCISHHDGAITSNLSTTNAFPSLAVSASNSATPLFCTLITVACNTLTSQIIVPSNGF

SEQ ID NO: 155982 - protein, 75 aa, Glycine max
  Clone ID: PAT_MRT3847_111872C.1.pep
ALPSLFPVDFVHCFGGSGFGGEQGSISIKQSISGYRWSVTPKILDGGPKSAAPQKEALFVVTVRFFKGPDKGESQ

SEQ ID NO: 155983 - protein, 66 aa, Glycine max
  Clone ID: PAT_MRT3847_111873C.1.pep
IGPVFKSPRKKREGLHFLTPGKEFSQRGAGDKGTLKKLPQFLNKMKLGFFLTHVHIKKGKFPIFCP

SEQ ID NO: 155984 - protein, 118 aa, Glycine max
  Clone ID: PAT_MRT3847_111874C.1.pep
IWKVVWNDLKAPFLSSNSGELSEVTRLKCDFFSKLPDKVRCGLDPDLSFHIDYSKATGLTEGEKEYYERQFSTLRSFEEVDSTESSNVIEDGSVHAEQVQSDRAMKISNLANVLLLAF

SEQ ID NO: 155985 - protein, 45 aa, Glycine max
  Clone ID: PAT_MRT3847_111875C.1.pep
KPDGGIITGALKTPKKEFWGCEVILSCPYLNRNFFVGSILRGLAL

SEQ ID NO: 155986 - protein, 51 aa, Glycine max
  unsure (1)..(51): unsure at all Xaa locations
  Clone ID: PAT_MRT3847_111876C.1.pep
GKGGRKRRPRRGKLRGRXKPPPQKRRRRKLASHPKRQKHQGQLRGGRRXRE

SEQ ID NO: 155987 - protein, 437 aa, Glycine max
  unsure (1)..(437): unsure at all Xaa locations
  Clone ID: PAT_MRT3847_111877C.1.pep
MNMNEESVEGSARRIQVRFVTKLGEPYKVPTTAIAIPADLARFGLSSLVNALLQSNDADHQLEPFDFLIDGEFVRMSLEQFLLAKGISAERILEIEYTRAVAPRKEEDPSLHDDWVSAVDGSSSRFFLTGCYDGLGRVWKGAGLCTHILEGHSDAVTSVSIINPKGDXETITVATASKDRTLRLWKLNAEGPVNNPMRVRAYKILRGHKSSVNCVAAQTSGEMVCSASWDCTINLWQTNDFNAEDDLVSKKRKIGAQVEESQXGSXEALPTLVGHTQCVSAVVWPQQESIYSASWDHSIRKWDVETGKNLTDLFCGKVLNCLDIGGEGSALIAAGGSDPVIRIWDPRKPGTSAPVFQFSSHTSWISACKWHDQSWFHLLSASYDGKVMLWDLRTAWPLSVIESHSDKVLSADWWKSDSVISGGADSKLCISSEIPVQ

SEQ ID NO: 155988 - protein, 59 aa, Glycine max
  unsure (1)..(59): unsure at all Xaa locations
  Clone ID: PAT_MRT3847_111878C.1.pep
GTSAPXFQFASHTSWVSACKWHDQSWFHLLSASYDGKVMLWDLRTAWPLSVIESHSDKV

SEQ ID NO: 155989 - protein, 277 aa, Glycine max
  Clone ID: PAT_MRT3847_111879C.1.pep
HECVDSIPELNKMVFAVQDLVKQCEDLKVKYNEEMAKRKKLFNEVQEAKGNIRVFCRCRPLNKAEISAGCNTIVDFDAAKEGCLGILTSGSTKKSFRFDRVYTPKDDQVDVFADASSMVISVLDGYNVCIFAYGQTGTGKTFTMEGTQQNRGVNYRTLEHLFKVSKERSETFSYDISVSVIEVYNEQIRDLLATGQTSKRLEIKQASEGFHHVPGVVEARIDNINEVWNVLQVGNNARAVGSNNVNEHSSRSHCLLCVAVKAKNLLSGESTKSKLWL

SEQ ID NO: 155990 - protein, 20 aa, Glycine max
  Clone ID: PAT_MRT3847_11187C.1.pep
GSNDMLMFNYFLISPLASSK

SEQ ID NO: 155991 - protein, 290 aa, Glycine max
  Clone ID: PAT_MRT3847_111880C.1.pep
DIVKTASRARKSAAGYDLTRLMIGSEGTLGVITEVTLRLQKIPQYSVVAMCNFPSVKDAADVAIATMMSGIQVSRVELLDEVQVKAINIANGKNLPECPTLMFEFIGTEAYAREQTQIVRKLVSEHNGSDFVFAEEPEAKKELWKVRKEALWACFAMEPNLVAMTTDVCVPLSHLGDLISRSKKELDASPLVCTVIAHAGDGNFHTVILFDPNQEEQRREAERLNQFMVHAALSLEGTCTGEHGVGTGKMKYLEEELGVEALRTMKKIKAVLDPNDIMNPGKLIPPHVCF

SEQ ID NO: 155992 - protein, 124 aa, Glycine max
  Clone ID: PAT_MRT3847_111881C.1.pep
NELVELYEKRKQSARAAIIKDLFETFIWLAEQHKTVDQVRNSINEMFTVKDYDPKESIRCSSVHRAKGLEADRVWIVVTKPLHNIKTDWQLKEEQNIVYVSWTRSKKDLYFVGGSADEMILTVE

SEQ ID NO: 155993 - protein, 51 aa, Glycine max
  Clone ID: PAT_MRT3847_111882C.1.pep
LISKGKTGRTKNATDTLATKDWHEINAPSVFQVTNVGATLVSRIHGTKIAS

SEQ ID NO: 155994 - protein, 167 aa, Glycine max
  unsure (1)..(167): unsure at all Xaa locations
  Clone ID: PAT_MRT3847_111883C.1.pep
MASIRTTASSYGRLVCRACRRPAVVQSYAKPAAWRALSTEGQQKLLSANLEQADPSVFDIIRKEXRRQKHFINLIPSENFTSQAVLDALGSVMXNKYSEGYPGARYYGGNEFIDEAEILCQNRALEXIPGAEGHMXSXNVQPLSGSPANLYAYSAVLNTHDRIMGLD

SEQ ID NO: 155995 - protein, 151 aa, Glycine max
  unsure (1)..(151): unsure at all Xaa locations
  Clone ID: PAT_MRT3847_111884C.1.pep
LQSIRSRFHVSHYLQPSSALVNSNQPVGQNYSNPSTSFFHVLFNAAAFALYILSTLSIDNFVIIFLMTVLLTDLYFCIPNNVNVLIPDLLMIFNEINDLLENVCKFECLDHXSLTLMNNIDSWLLXCTLYLTAILLIELAIFSLIMLQTDY

SEQ ID NO: 155996 - protein, 212 aa, Glycine max
  Clone ID: PAT_MRT3847_111885C.1.pep
EKSEIRPHRVRHTRSLPRLVHRTKNTDSSKVKKIVSNGKRRGTTTTTSPMHPPYAYTIILNIFSKRRTWACLFLLVYGTLLTSSWNFLKSTLSWYNLQVESSTTSAWPALYASVLLGTVFGVLSMVAALVVMVPALVVTWITIVVLLAFFGKPKRTLVVEGRKITREIFGFVMRTLLKEGNFVAAVCAVLGYFALVRRNGTQLKVVVVVGES

SEQ ID NO: 155997 - protein, 40 aa, Glycine max
  Clone ID: PAT_MRT3847_111886C.1.pep
FGSRANCSEVSGDREVQRTMLELLNQLDGFSSDDRIKVWL

SEQ ID NO: 155998 - protein, 174 aa, Glycine max
  Clone ID: PAT_MRT3847_111887C.1.pep
MAKEEEQQQQQQHPPYAYTLILNIFSKRRTWACLFLVVYGTLLASSWNLLKSTLSWYNLQVESSTTSAWPALYASVLLGTVFGVLSMVAAMVVMVPAVVVTWITIVVLLAFFGKPKRTLVVEGRKITKEIFGFVMRTLLKEGNFVAAVCAVLGYFALVRRNGTQGGGVAVVGES

SEQ ID NO: 155999 - protein, 110 aa, Glycine max
  Clone ID: PAT_MRT3847_111888C.1.pep
LLIGAKSEEPKNAGDPLAQFQKGAVLMVCRTCGKKGDHWTSRCPYKDLAPPSEGFVDKPAAADTVAATAGATKGAYVPTGMRAGAERTTGSDMRRRNDENSVRVTNLSED

SEQ ID NO: 156000 - protein, 101 aa, Glycine max
  Clone ID: PAT_MRT3847_111889C.1.pep
AGIRSDAENLIAETCDANINRFISNRARSINRKSVAELFVDFVGKFAKMDSMAVEMGICPYTGKWEQIEDNMIWLPKTYAIFVTPCLCSLFFSDIIVLFWG

SEQ ID NO: 156001 - protein, 306 aa, Glycine max
  unsure (1)..(306): unsure at all Xaa locations
  Clone ID: PAT_MRT3847_11188C.1.pep
ACQSLRVFGAGWGVAVVLLVARAARFSSCYLRGRSRRRVCVCQAALGLGEASNLRVMLLGMVDDPRVVLIKLADRXLHNMRTIYALPLQKAQAVAEETLIIWCSLASRLGLWALKAELEDLCFAVLQPQIFQKMRADLASMWSPTSRTGNPRRLSIKGNLIHLDENSSTAFCNGSLTFNEDVNRKDLLEAVVPFDILLDRRKRANYLSSIGRLEETCKKPKVVQDAGLALATMVICEEALEREMIISSSYVPGMEITLSSPLKSLYSLYSKMKRKDVSIDKVYDARALRVVVGDKNGTLHGPAVRC

SEQ ID NO: 156002 - protein, 38 aa, Glycine max
  Clone ID: PAT_MRT3847_111890C.1.pep
VTPYSYKIFKISAHTSTDQPLYLLFSLNLLELKNFNFP

SEQ ID NO: 156003 - protein, 224 aa, Glycine max
  Clone ID: PAT_MRT3847_111891C.1.pep
MATYFHHGNSEIQSGGADGLQTLVLMNPGYIHYSDAPQQQQQQSSLAAGNLVFLNPAAVAGGNNNSFNPHAPPSHTQQFVGVPLPNSQDLNHHSMHAHHDVSALHGFLPRMQYNPWNAFDPTSAARETPRAQQGLSLGLGSFREGQAPAMSGDDLRVSGGSPSSASGVTNNGASGIHSVPLSSKYLKAAHELLEEGANVNNGIGTELRKKSGGQTRVIGESSAA

SEQ ID NO: 156004 - protein, 310 aa, Glycine max
  Clone ID: PAT_MRT3847_111892C.1.pep
RRGEKPRKKKKKARVFAIATMAHQGEPAKLRWGELEEDDGEDLDFLLPPRQVIGPDENGIKKVIEYKFDEDGNKVKITTTTRTRKLANARLSKRAIERRSWPKFGDAVHEDVGARLTMVSTEEILLERPKPLGAKTEEPKNAGDPLAQFQKGAVLMVCRTCGKKGDHWTSRCPYKDLAPPSEGFIDKPAAADTVAATAGATKGAYVPPGMRAGAERTTGSDMRRRNDENSVRVTNLSEDTREPDLLELFRPFGPVSRVYVAIDQKTGMSRGFGFVNFVNREDAQRAINKLNGYGYDNLILRVEWATPRAN

SEQ ID NO: 156005 - protein, 80 aa, Glycine max
  Clone ID: PAT_MRT3847_111893C.1.pep
EGGKNLCLFLLEGQFVATVNYATLFTGDLNDCLTLLKQTLLFYSLFFGQRTHMLLTLTPTLGMSALTAVSLNPLRTWVSS

SEQ ID NO: 156006 - protein, 55 aa, Glycine max
  Clone ID: PAT_MRT3847_111894C.1.pep
GLPRLRKGIKKTNPSSSLRGVKQPTTRPHYATKLGGGQSQIGSPTGDLVAKVKNQ

SEQ ID NO: 156007 - protein, 47 aa, Glycine max
  Clone ID: PAT_MRT3847_111895C.1.pep
IISISHQSIIQLHSARKQLNFPNSSFPKKVSLDATTEFPPIQYFHRY

SEQ ID NO: 156008 - protein, 49 aa, Glycine max
  Clone ID: PAT_MRT3847_111896C.1.pep
ERPTRPNRPKNNTKADLTCLNIYSTFGAWCSHFQQSHFNNILIEKYPLK

SEQ ID NO: 156009 - protein, 84 aa, Glycine max
  Clone ID: PAT_MRT3847_111897C.1.pep
HHCLRFAACQLVVCLSLSSTRLPSKASVAFLLFAVYMPPCYPHVASIILCLISFLPSRGLLAPPPPPPPPPPSRRHSYTCYHGQ

SEQ ID NO: 156010 - protein, 58 aa, Glycine max
  Clone ID: PAT_MRT3847_111898C.1.pep
GDPFRGAYNVPAPLTKVGIWVEAGGVEMHHSASEVRIVDTFYGSNHLPVLLVLVLNFL

SEQ ID NO: 156011 - protein, 57 aa, Glycine max
  Clone ID: PAT_MRT3847_111899C.1.pep
LLLKCPGGILPGTFELQGLKSWLRKSFCGPLRIKSICKNLVKRLNLWPSLLRSFLLN

SEQ ID NO: 156012 - protein, 59 aa, Glycine max
  unsure (1)..(59): unsure at all Xaa locations
  Clone ID: PAT_MRT3847_11189C.1.pep
THGATADKGGRQGGQDTPHGGGEATGTIFFFXGYGNTNRQGYGTNTAPLSTDLVNNGSN

SEQ ID NO: 156013 - protein, 321 aa, Glycine max
  Clone ID: PAT_MRT3847_1118C.1.pep
PTRPKLCIIGSGPAAHTAAIYAARAELKPVLFEGWMANGVAPGGQLTTTTDVENFPGFPAGILGTDLMDRCRQQSQRFGAEVVTETVTAVDLSQRPFRVYSDSTTVEAESVVVATGAVAKRLNFDGAGDTPDGFWNRGISACAVCDGAAPIFRGKPLVVIGGGDSAMEEATFLSKFGSKVYIIHRRDKFRASKVMQGKVMSNPKIEVLWNSVVVGAHGDDKGRILGGVKVKNVVTGAVSDLKVSGLFFAIGHEPATKFLDGQLELDSDGYIVPKPGTTKTSVDGVFAAGDVQDKKYRQAITAAGTGCMAALDAEHYLQGIG

SEQ ID NO: 156014 - protein, 49 aa, Glycine max
  Clone ID: PAT_MRT3847_111900C.1.pep
RKVLHFFSSSPKHQPQNSTKFPTFLGDRTKVVDNECLFLSEDKAEVAES

SEQ ID NO: 156015 - protein, 67 aa, Glycine max
  unsure (1)..(67): unsure at all Xaa locations
  Clone ID: PAT_MRT3847_111901C.1.pep
IAVRISKEISALAPTSMKXKGVAPPEKKFSVWIGGSILASVSAFQQMWIAKSEYVESGPSSVHRKRF

SEQ ID NO: 156016 - protein, 88 aa, Glycine max
  unsure (1)..(88): unsure at all Xaa locations
  Clone ID: PAT_MRT3847_111902C.1.pep
YWHLSRNTVHRFQLWVXRNGCFSYKXSLEFKSSVRKQLMQTMQVSEKAQNLAGQDLIXKVYAPKPSNLQELERLIRITTEEHPKDLPY

SEQ ID NO: 156017 - protein, 109 aa, Glycine max
  Clone ID: PAT_MRT3847_111903C.1.pep
LELELEGSLDCCTAQFNYFYQQEASKFKRQITDIQNLNRHILGEALSSLSLKELKNLESRLEKGLSRVRSRKHGTLFADIEFMQKRPFSWWVVQDRAVMLVAERGRRRS

SEQ ID NO: 156018 - protein, 47 aa, Glycine max
  Clone ID: PAT_MRT3847_111904C.1.pep
ICSLFMARKKQYFFINQRRARMSRHLPRPLIYLHCHKKSVRVDERVG

SEQ ID NO: 156019 - protein, 79 aa, Glycine max
  Clone ID: PAT_MRT3847_111905C.1.pep
ASPHRNQTPENYEKGKEKIEGKKGIKEKDEGASTYPRGPYMLPCSAKDRAKGASVDGGTRYGSSAVITRKVNLKSASKP

SEQ ID NO: 156020 - protein, 246 aa, Glycine max
  Clone ID: PAT_MRT3847_111907C.1.pep
MAHSSIVVTLSQNLFKRNLTCVKIHAHSPSSSFGSRSLSLPSFSFSQRTTPLSLTASFSSHTAMGETSAPAADAGMDAVQRRLMFEDECILVDENDRVVGHDSKYNCHLMEKIEAENLLHRAFSVFLFNSKYELLLQQRSATKVTFPLVWTNTCCSHPLYRESELIDENALGVRNAAQRKLLDELGIVAEDVPVDQFTPLGRILYKAPSDGKWGEHELDYLLFFVRDVNVNPNPDEVADIKYVNRD

SEQ ID NO: 156021 - protein, 43 aa, Glycine max
  unsure (1)..(43): unsure at all Xaa locations
  Clone ID: PAT_MRT3847_111908C.1.pep
MMSLTNNMVLLKVFXFLLFLVGVTAARLELSFFKSDHSRSYDA

SEQ ID NO: 156022 - protein, 54 aa, Glycine max
  unsure (1)..(54): unsure at all Xaa locations
  Clone ID: PAT_MRT3847_111909C.1.pep
RQSVKXRXXSGVXRKHCCAIXKAPXXSRSQRGDGCVFRKVFNITERKQVSLHNP

SEQ ID NO: 156023 - protein, 87 aa, Glycine max
  Clone ID: PAT_MRT3847_11190C.1.pep
DSIYAKLKRTSFSFFGCSRRIRWKSISSNEQGSQSDYADYTSQRPMMKTQTLTCSSNREPRVPSFESYNGMQVVTTLRSSEGHLLSS

SEQ ID NO: 156024 - protein, 130 aa, Glycine max
  Clone ID: PAT_MRT3847_111910C.1.pep
FFFFFFFFFFFFFFFFFFFFFFFFFFSFFFFHFNTTITTVCHCLTLFFWFFLGGGGGPRKHPTDTRGDTKFLQEGDKKNRGKKRKKMGPKEKFFHRKMQQHKEPETKKEKTGGGTRGAYTQKMGQAHMPL

SEQ ID NO: 156025 - protein, 101 aa, Glycine max
  Clone ID: PAT_MRT3847_111911C.1.pep
NAWSGKKMEGHNGFNTLECLRGRLLAERRASRVAKEEAESLGNKFVELEKKLKEEIKLRDKAERKLKLLKKKLECFNNVTTPSWQKYHSSEKCEDSWIILV

SEQ ID NO: 156026 - protein, 47 aa, Glycine max
  unsure (1)..(47): unsure at all Xaa locations
  Clone ID: PAT_MRT3847_111912C.1.pep
WKLPDLKKKKKKKKKKKKKKKKKKKKKKKKEKKKKGXQNKKNVHTKK

SEQ ID NO: 156027 - protein, 141 aa, Glycine max
  Clone ID: PAT_MRT3847_111913C.1.pep
GKSDGGILYVTVPKQVTQQNKESETAKVGNGKVERAEEKDSHQHGNGEVERAAENDSHAPNADEGRIGPNQHDNHIEHEVKRHENEHIGEFPEQVIRNWHQESMLRSAVGVLRKNKGIVVTAVIAFSLGLFVSHKFNSTGP

SEQ ID NO: 156028 - protein, 51 aa, Glycine max
  Clone ID: PAT_MRT3847_111914C.1.pep
MPSHKTFRIKKKLAKKMRQNRPIPYWIRMRTDNTIRYNAKRRHWRRTKLGF

SEQ ID NO: 156029 - protein, 51 aa, Glycine max; identical to SEQ ID NO: 156028
  Clone ID: PAT_MRT3847_111915C.1.pep

SEQ ID NO: 156030 - protein, 105 aa, Glycine max
  Clone ID: PAT_MRT3847_111916C.1.pep
PPYDLKRGGETYTPDILTPHHGPSQFPLSNLSYEPPKYYTNAPSCNGFRIYKPSGTCLGNRNCCHHTISSVTRTEETARCLTKPGNCVGLSMRIQKGLEAQGALP

SEQ ID NO: 156031 - protein, 160 aa, Glycine max
  unsure (1)..(160): unsure at all Xaa locations
  Clone ID: PAT_MRT3847_111917C.1.pep
GNCFFGLVVLNLLRPSDDEYADVDWDSLGFGLMPTDYMYITKCCEGQNFGQGQLSRYGNIELSPSAGVLNYGQGLFEGTKAYRKENGGLLLFRPEENAIRMKTGAQRMCMASPSIDXVDALKQTVLANKRWVPPPGKGSLYLRPLLLGTGPVLGLAPAPE

SEQ ID NO: 156032 - protein, 103 aa, Glycine max
  unsure (1)..(103): unsure at all Xaa locations
  Clone ID: PAT_MRT3847_111918C.1.pep
PPTXNTSLAXXVTXGIXLXLXXSXPSCDLHXXPXXPXXQXXXXSHNXHYQXXHYTXFXTMXXAXXXPWXXXXXXXXLSPXRFXXXXXXXXLEPNSELTXACXR

SEQ ID NO: 156033 - protein, 378 aa, Glycine max
  unsure (1)..(378): unsure at all Xaa locations
  Clone ID: PAT_MRT3847_111919C.1.pep
MIQRIVYFPSLRKLLLRAGSNSASSKIGTNNCFASQPSPLRSHSDDEYADVDWDSLGFGLMTTDYMYITKCSEPQNFGQGQLRIYGNIFLLLILLMLINXIINANSNPGLFEGTKAYRKENGGLLLFRPEENAIRMKTGAQRMCMASPSIDHFVDALKQTVLANKRWVPPPGKGSLYLRPLLLGTGPVLGLAPAPEYTFLIFASPVRNYFKEGSAPLNLYVEENFDHAQXCGTLIVKTQAKKRAFSHVLYLDSATKKNLEQVSSCNIFIAKGKCISTPATNGTILSGITRKSVIEIARDHGYQVQERVVNVDELIEADEVFCTGTAVGVAPVGSITYQDKRMEYITGSGTICQELNNTISGIQTGTIEDKKGWIVEVD

SEQ ID NO: 156034 - protein, 178 aa, Glycine max
  unsure (1)..(178): unsure at all Xaa locations
  Clone ID: PAT_MRT3847_11191C.1.pep
PYCXYSTVIAAEQSAWPPSSGRKSNTQWRPLYFRFHTAFVLLAGIGYKTSPLAGRTGGVTFTGPIGWLRTVDSVAPASTAPGDTPAPTDKLATAEVDVDTVVTCMTETTDVKTSAEIIMTRNMNTTYYLGVITASDIGAIVTAIRKNSESTNNITITNLEQSDEASQYHFSDRTLVHC

SEQ ID NO: 156035 - protein, 388 aa, Glycine max
  Clone ID: PAT_MRT3847_111920C.1.pep
MIQRTVSFPSLRKLLLRAGCSKSASSKIGTYNCFASQSSPLPSHNPSYRDDEYADVDWDSLGFGLMPTDYMYITKCCEGQNFGQGQLSRYGNIELSPSAGVLNYGQGLFEGTKAYRKENGGLLLFRPEENAIRMKTGAQRMCMASPSIDHFVDALKQTVLANKRWVPPPGKGSLYLRPLLLGTGPVLGLAPAPEYTFLIFASPVRNYFKEGSAPLNLYVEENFDRASSRGTGNVKTISNYAPVLMAQIQAKKRGFSDVLYLDSDTKKNLEEVSSCNIFIAKGKCISTPATNGTILSGITRKSVIEIARDHGYQVEERAVAVDELIEADEVFCTGTAVGVAPVGSITYQDKRMEYITGSGTICQELNNTISGIQTGTIEDKKGWIVEVD

SEQ ID NO: 156036 - protein, 148 aa, Glycine max
  Clone ID: PAT_MRT3847_111921C.1.pep
LRKCVRVRVVSCPRDTGRKKVCVSCCKLNFHFSLAMSTLVRNTTLTFSRRNRYELLGLQGKDKMVKSISYRRRRAKQRQIFLTTYKLSSLNSNTFGEPTQKPKLKLKKVAVKVKKIVASVLMFMRVGSFRSCSSRSQISATSPNRKNS

SEQ ID NO: 156037 - protein, 449 aa, Glycine max
  Clone ID: PAT_MRT3847_111922C.1.pep
MAGNCLPPVKLTGSGRPVLEPNEIECFFLSGVDLLSEDDPSFPHLKSGLLILTTHRLLWLPDSAASAGGTAGAIPLAAVSHIFSPKMSLRKVFASPRVRFQVSLSPEGRVSAAGSRSVVATAVVRGKGDCDAFLAKFTENCRARAWQEAESGSSSGSNSAVMAATATSSSSGGIYSSDGTVRMVGVSGILRKEQEMWESTDRSLQEAFQDLNALMSKAKEMVMLAEKMRLKLLSGSNSQTNATNDEEMGSKEEMQDWLLSVGIISPVTKESAGALYHQQLSRQLADFVKVPLEKAGGIINLIDIYCLFNRARGTELISPDDLLQACSLWEKFDVQVVLRKFDSGVMVIQTKSHSDEEVFNKVKMLVLKPDALRAGISASDAARTLGVAPAMAKEHLLSAESKGLLCRDISPDGFRFYINLFVEIDRDYMYLVKDQGIYASWVQANDTHA

SEQ ID NO: 156038 - protein, 127 aa, Glycine max
  Clone ID: PAT_MRT3847_111923C.1.pep
VQFCVRVRESPFFTAMSTLVRNATLTFSRRNRYELLGLQGKDKMVKSISYRRRRAKQRQIFLTTYKLSSLNSNTFVEPQKPKLKLKKVAVKVKKIVTSVLMFMRVGSFRSCGSRSQISSTSPNRKNF

SEQ ID NO: 156039 - protein, 143 aa, Glycine max
  Clone ID: PAT_MRT3847_111924C.1.pep
MAESFELPNRLAILPFRNKVLLPGAIIRIRCTSPISVKLVEQELWQREEKGLIGILPVRDAAAEIQPAGPVISHGKGTDSLDQNSKVQGGSSDSQKLDVKNQHDVVHWHNRGVAARALHLSKGVETPSGRVTYIVVLEGLCKF

SEQ ID NO: 156040 - protein, 46 aa, Glycine max
  Clone ID: PAT_MRT3847_111925C.1.pep
EQNSSITLHSTSAYNVQIKTHNQMNYSVEYYHYICTENRFYQLNRR

SEQ ID NO: 156041 - protein, 62 aa, Glycine max
  Clone ID: PAT_MRT3847_111926C.1.pep
SPIAPRRVSISSSHSVVVVDSVSLCPAPIASFCPFPLCSLDCCKVLTHSCKQGTVVLMLSRF

SEQ ID NO: 156042 - protein, 75 aa, Glycine max
  unsure (1)..(75): unsure at all Xaa locations
  Clone ID: PAT_MRT3847_111928C.1.pep
ISQYLVLPWQFVTDPSHFTTSYIFLPPTTSTLLFSAXXEQSMLPGAIQMPYCTXVRLLSLFISHHSSIVLDMLRT

SEQ ID NO: 156043 - protein, 80 aa, Glycine max
  Clone ID: PAT_MRT3847_111929C.1.pep
ELDLENRLYPDGCFFHPLGLASHPQMNASLQLARNQLTARFAMVGLWALYYNPAPPARSPLNNWASHLSEPIHTIFMDTF

SEQ ID NO: 156044 - protein, 76 aa, Glycine max
  Clone ID: PAT_MRT3847_11192C.1.pep
ATLANRLARLFQELSARYFRVAAQLETQYKQPAHYGAYRVEICPSKDYSRDYDVRNHPPFLDALVPTCAQDPGTKA

SEQ ID NO: 156045 - protein, 65 aa, Glycine max
  Clone ID: PAT_MRT3847_111930C.1.pep
RLDPHVPKTFTTDEFPGSSPILILCNTRQVNQYSLYQTWLCSLPIHNPMPPSIYSHFTDFLTHSF

SEQ ID NO: 156046 - protein, 42 aa, Glycine max
  Clone ID: PAT_MRT3847_111931C.1.pep
SGERQIIFPELNLHGSYSHIAPPEGIVAVLNYKHRLICRKDI

SEQ ID NO: 156047 - protein, 250 aa, Glycine max
  Clone ID: PAT_MRT3847_111932C.1.pep
MAVPERNHNHYHHFSVLIVLILVDNALCIRFPDRIAQPALDPGDQHRLHVAVFALGSFWRSEAVFGCLPGVVRTTVGYAGGSKPNPEYRSLGDHAESVKVEYDPQLISFRELLDVFWSSHDPRQVYGQGPDVGNQYRSIIFVNGTEESRMAAVSKEQEQTRSRSSIVTTQILQLGTFYPAEPEHQKFELKQNTILLQLIGNLPAEELERSSLATKLNGYVAELCPPNIQKQIDAKINDIIKKGWPILRDL

SEQ ID NO: 156048 - protein, 261 aa, Glycine max
  Clone ID: PAT_MRT3847_111933C.1.pep
MQGQRRTIGSFPAIVSMMQGPSSSGTDMSHQSSLNHVQNAVDFRLSDYRGSSGETACLRGTGHNVQSFNGWSTGESSSRLNLINQVNDEGLKSEHGLSSSYNAATEDGLRSEERQFEPNNVIFPVSSNTNLHGNQSRVHPSFLQAYSSTRIEMHDRHREMRLDVDNMSYEELLALEERIGDVSTGLSEDIIIKLMKQRIYVSVMTDSSIDLEPCCICQDEFADGENVGSLDCGHEFHSGCIKQWLMQKNLCPICKTTALAT

SEQ ID NO: 156049 - protein, 64 aa, Glycine max
  Clone ID: PAT_MRT3847_111934C.1.pep
SEKNDTAVKRVQTDIAVHSTSKGIDDVTLLQVNGPSIINSGTGKTMPLPALSPLQQIPVPQPTL

SEQ ID NO: 156050 - protein, 86 aa, Glycine max
  unsure (1)..(86): unsure at all Xaa locations
  Clone ID: PAT_MRT3847_111935C.1.pep
KKKKICFFXCCHKKKPPPLFFKKFLKKSSRGLPPLFFLLKPPLPWGHPRVKVVPPPFFLQRLPIFLGNGPWXXPPPLFLXQXXLXR

SEQ ID NO: 156051 - protein, 169 aa, Glycine max
  Clone ID: PAT_MRT3847_111936C.1.pep
HASGRDIQSAGGGGGGRQPSMGEMTLEDFLSRAGVAVDAAPHWMHQYPQQQQQYALPRPLPLPGPALDAAYHGDRPGVFLSHSQVAGRKRAATAAVAGDGVVERTVERRQKRMIKNRESAARSRARKQAYTNELENKVARLEEENKRLIELKVLKPLEPLEPPPAEQNK

SEQ ID NO: 156052 - protein, 99 aa, Glycine max
  unsure (1)..(99): unsure at all Xaa locations
  Clone ID: PAT_MRT3847_111937C.1.pep
APASSMALSSPSLTGIVVKLGPFSPVFVRVCLSTTVSKHASSLCLXYCPYLVVYLCPFSGXPTSYLSGDVSGDYSWHTAALFRYPLTFSRNCELEVIHS

SEQ ID NO: 156053 - protein, 44 aa, Glycine max
  Clone ID: PAT_MRT3847_111938C.1.pep
NKQGSCFLIWISPHRVPVFYKFENLFKDKRNPSVGQKKKKKKKK

SEQ ID NO: 156054 - protein, 79 aa, Glycine max
  Clone ID: PAT_MRT3847_111939C.1.pep
YYLVRSLATLQKKKASCILQLSTTLIMKQTKDIRIGEHCFPLPESKTFIYLRLLLSFTRFQFHNAIIRNENLKKSDNVK

SEQ ID NO: 156055 - protein, 95 aa, Glycine max
  Clone ID: PAT_MRT3847_11193C.1.pep
GRVGANLGASELASREVGFCNLKNNLRALNDRVSFGRNNIRWEKAGISFTLRALQTEPVREEKKPSGIGTRSKMVSFVFCFSCTMGGNWELLFCV

SEQ ID NO: 156056 - protein, 35 aa, Glycine max
  Clone ID: PAT_MRT3847_111940C.1.pep
DICDCATCGCHFLISALLDCREDAMHDATIFGLLS

SEQ ID NO: 156057 - protein, 37 aa, Glycine max
  Clone ID: PAT_MRT3847_111941C.1.pep
SRTSSNGLVKIRTIMYTSLTHSLYQLVKGLHGLNNVL

SEQ ID NO: 156058 - protein, 53 aa, Glycine max
  Clone ID: PAT_MRT3847_111942C.1.pep
YFKMGLYDHPHVVQRGFNLFSDPVYSPGYYSDIMQHDSGDVYNGHYYPNHYDT

SEQ ID NO: 156059 - protein, 87 aa, Glycine max
  Clone ID: PAT_MRT3847_111943C.1.pep
FVSKKVLTSNSKVTKVKKEDNDDDDFPIGRRTSNSKEVKKKKNVIIKEEENKNNKKKKDKKVYDLPGQKRDPPEEKDPLRIFYETLF

SEQ ID NO: 156060 - protein, 64 aa, Glycine max
  Clone ID: PAT_MRT3847_111944C.1.pep
LEKRSPFLSLFNFTLLAFVHSFPFLESFLIARGDIGEVDWPPINCKYQFFFFLKILVYVLEEYI

SEQ ID NO: 156061 - protein, 140 aa, Glycine max
  Clone ID: PAT_MRT3847_111945C.1.pep
IGHYCCLVLKEGHIIQAGKYDDLLQAGTDFKTLVSAHHEAIEAMDIPNHSEDSDENVPLDDTIMTSKTSISSANDIESLAKEVQEGSSDQKVIKEKKKAKRSRKKQLVQEEERVRGRVSMKVYLSYMAAAYKGVLDSLII

SEQ ID NO: 156062 - protein, 203 aa, Glycine max
  Clone ID: PAT_MRT3847_111946C.1.pep
MGNTEKLMNQIMELKFTSKSLQRQSRKCEKEEKSEKLKVKKAIEKGNMDGARIYAENAIRKRTEQMNYLRLASRLDAVVARLDTQAKMTTISKSMGNIVKSLESSLATGNLQKMSETMDSFEKQFVNMEVQAEFMESAMAGSTSLSTPEGEVNSLMQQVADDYGLEVSVGLPQPAAHAVPAKEADKVDEDDLSRRLAELKARG

SEQ ID NO: 156063 - protein, 75 aa, Glycine max
  Clone ID: PAT_MRT3847_111947C.1.pep
GPRVSSFIKEHHDAPRVPESGSPYYTNNSRYHSLIGASNTSDRVHLHTCHLFVCDGRTESYKAYALTSCHDCHAA

SEQ ID NO: 156064 - protein, 405 aa, Glycine max
  unsure (1)..(405): unsure at all Xaa locations
  Clone ID: PAT_MRT3847_111948C.1.pep
MGDFTVALNPPKTFRADILLSTTNNRTSPAARGFQTVLAFKPPRAFRGIRASVMPREGQQASLGDALVNTPRRSDFVEAIRRTAALSSCLSETSLHATVPGLESKTRGKVRDIYDAGDYLVLVTTDRQSAFDRILAFIPFKGQILYLTSLWXFERTTHIVSNAVVLAPDNNVTIARKCSVFPVEFVARGFVTGSTDTSLWTVYNKGVRNYCGNVIPDGMVKNQKLPKNILTPTTKAADHDVPITPDEIIDRGLMTRADYVEVSEKALSLFEXGQQVKVEHGLILVDTKYEFGKANDGSIMLIDEVHTPDSSRYWIANSYLERFQNGLEPENIDKEFLRLWFISHCNPYEDEVLPDAPEDLVCELAWRYIFLYETITKSKFEVPSTEEPIHDRITRNVASALSSLK

SEQ ID NO: 156065 - protein, 115 aa, Glycine max
  Clone ID: PAT_MRT3847_111949C.1.pep
FGKANDGSIMLIDEVHTPDSSRYWIANSYLERFQNGLEPENIDKEFLRLWFKSHCNPYEDEVLPDAPEDLVCELAWRYIFLYETITKSKFEVPLTEEPIHDRISRNVASALSSLK

SEQ ID NO: 156066 - protein, 61 aa, Glycine max
  Clone ID: PAT_MRT3847_11194C.1.pep
INRTALTRMMSLTFGFNINETLRAPVRDLRGEMDGNQLHKPAMSLKVTHARAHHESRWTYY

SEQ ID NO: 156067 - protein, 41 aa, Glycine max
  Clone ID: PAT_MRT3847_111950C.1.pep
SSFTPKECTKQGPCEICMVHHRCRCKNCKGGGLGLKLYHRS

SEQ ID NO: 156068 - protein, 63 aa, Glycine max
  Clone ID: PAT_MRT3847_111951C.1.pep
AAQPFLCFSHLVGLSLKAQDSDCALFDKPLLFDSRECLDAVANGYSIYLFVGMIYCLVMQCGV

SEQ ID NO: 156069 - protein, 152 aa, Glycine max
  Clone ID: PAT_MRT3847_111952C.1.pep
MELLGLLVLLLGSSIMANGAVSEVSWREISNINSEGPYLGIVVPNSFELGPLLRSSSFVPHNKFPYFDFAGKHFRIGVLEKKRVIVVMCGLGMLNAGLSTQLLLTLFNVNGVLHYGIAGNANPKLQIGDVTIPQYWAHTGLWHWQVLCWIIY

SEQ ID NO: 156070 - protein, 58 aa, Glycine max
  Clone ID: PAT_MRT3847_111953C.1.pep
TATSLFLLLCNIYFFPKFSLCEWCHWQRGKKKKIRISLQLNNLINDDRISLQSYEPEL

SEQ ID NO: 156071 - protein, 92 aa, Glycine max
  Clone ID: PAT_MRT3847_111954C.1.pep
GALIWPMDSNAFPSFRRSHGATMLLLKFLKALITLSARVAHLNRVVIKTQQHHDDVLMFPLRGEHLRKIYRLWSLNSLNTCKHCSWLAQRHT

SEQ ID NO: 156072 - protein, 45 aa, Glycine max
  Clone ID: PAT_MRT3847_111955C.1.pep
LCELLLFIWLDMPQIQINNLRSTFPISITKFCLMHSICKTNTNLP

SEQ ID NO: 156073 - protein, 112 aa, Glycine max
  unsure (1)..(112): unsure at all Xaa locations
  Clone ID: PAT_MRT3847_111956C.1.pep
KLAPTIGIAVVHRRKNRFLESFPANVQRLKTSKAQLVVFPKRAPKVKAGVFPPEGLANAPQVQGAFLPFVREKPPVXLVKVPDAMKAFKAFSQLFFERPNKPPHGARLKKAS

SEQ ID NO: 156074 - protein, 85 aa, Glycine max
  unsure (1)..(85): unsure at all Xaa locations
  Clone ID: PAT_MRT3847_111957C.1.pep
YHLLLRLRGVMHIFSKTLTGETISLEVDSVHTIDNFKAKIHDNDGIPQDQQMLIFTCXHLEDRHTAADFNMQNDSALHLLNIPRG

SEQ ID NO: 156075 - protein, 75 aa, Glycine max
  unsure (1)..(75): unsure at all Xaa locations
  Clone ID: PAT_MRT3847_111958C.1.pep
RQDPDXXMTNHIFNMIFVWPTLVIVQYNFRRRNYLXAGHTIXIYSESDYFSLYLKFMIFEILCMXSNYSKKXINQ

SEQ ID NO: 156076 - protein, 253 aa, Glycine max
  Clone ID: PAT_MRT3847_111959C.1.pep
MGDVMGPDLISDLPQSIIESILVQLPIRDAVRTSILSSKWRYKWASITQLVFDDKCVPFSNDREAVEKSVVKFITRVLFLHQGPIHKFQITNSKLQSCPEIDQWILFLSRNDIKELVMELGEGEFFRIPSSLFNCGKLTRLDLSRCEFDPPHSFKGFVCLRSLNLHQVLISPDAIESLISRCPLLESLSLSYFDNLALTICAPNLKYLYLEGEFKDICLEDTPLLVEITIAMYMTDDIAEHFEQISNCNFVKF

SEQ ID NO: 156077 - protein, 772 aa, Glycine max
  Clone ID: PAT_MRT3847_11195C.1.pep
MPPHATGPPSRATPEAASPPSTSAISNSPAPSPPPPSAASPPSPPSTSPTIPSSLSKISTLKTLRLAYNTFDPGPIPNDLGNLKNLEELWLAGCNLVGPIPPSLGKLSNLLNLDLSQNNLVGYIPEQLVSGLRNIVQIELYENSLSGALPRAAFTNLANLERFDASTNELTGTIPEELCGLKKLGSLNLYENKLEGSLPETIVKSLNLYELKLFNNSLTGSLPSGLGKNSKLQSLDVSYNRFSGEIPARLCDGGALEELILIYNSFSGRIPETLEECKSLRRVRLGNNNFSGVVPEGLWGLPHLYLLELVYNSLSGSISNSISGAWNLSMLLISGNKFSGSIPEGVGELGNLEKFVANNNSLTGRIPKSVFRLSQLDRLVLGDNQLFGEIPVGVGGCKKLNELDLANNRLGGSIPKELGDLPVLNYLDLSGNQFSGEIPIELQKLKPDLLNLSNNQLSGVIPPLYANENYRKSFLGKVYKVALSNGELVAVKKLWRATKMGNESVDSEKDGFEVEVETLGKIRHKNIVRLWCCCNSKDSKLLVYEYMPNGSLADLLHNSKKSLLDWPTRYKIAIDAAEGLSYLHHDCVPSIVHRDVKSSNILLDDEFGAKVADFGVAKIFKGANQGAESMSVIAGSYGYIAPEYAYTLRVNEKSDIYSFGVVILELVTGKLPLDPEYGENDLVKWVQSTLDQKGLDEVIDPTLDIQFREEISKVLSVGLHCTNSLPITRPSMRGVVKKLKEVTELPKSLSGKLSSPYFQEEASDIDHEGSLV

SEQ ID NO: 156078 - protein, 319 aa, Glycine max
  unsure (1)..(319): unsure at all Xaa locations
  Clone ID: PAT_MRT3847_111960C.1.pep
MLSTILLPLVLCLTLLVLFLFFIRNLRTFKNPPLPPGPKGLPIIGNLHQFDNSILYLQLWQLSKKYGPIFSLQLGLRPAIVISSPKLAKEVLKNHDLEFSGRPKLLGQQKLSYNGSEIAFSPYNEYWRQMRKICVVHIFSSKRVSSFSSIRNCEVKQMIKKISGHASSSGVTNLNELLMSLSSTIITIIXLELLLGEEGSEKSRFHVLLNELQAMMSTFFVSDYIPFTGWIDKLKGLHARLERNFKEFDKFYQEVIDEHMDPNRQQMEEHDMVDVLLQLKNDRSLSIDLTYDHIKGVLMDILVAGTDTTAATSVWAMTA

SEQ ID NO: 156079 - protein, 91 aa, Glycine max
  Clone ID: PAT_MRT3847_111961C.1.pep
LSVIQYYLLNRFPVPYALFLTLVAAIAAFLGQYLIDKLVNIFQRASLIIFVLAFTSRLSSIPTRPVGISNMILKIQRNEYMGFDNFCRNDT

SEQ ID NO: 156080 - protein, 172 aa, Glycine max
  Clone ID: PAT_MRT3847_111962C.1.pep
MPRTNDLTSVILGSSRSSFVNTICKFVRDVDEMNETVMIPSLLTDLNNNSSTQPSTDLPECFDLQTLHQLLNRLKDELTIARFEDDQSKSCNFTSANNILSINNCNNNINNNSNNTNNNNRNNNQINVNSNVSTTGGTPLRIAEGDLSGLSKKLSSSCKCSDSDDGFSSLNS

SEQ ID NO: 156081 - protein, 35 aa, Glycine max
  Clone ID: PAT_MRT3847_111963C.1.pep
KSENLIGPCILEEHFFGVSTKIHESFYNCSACKIS

SEQ ID NO: 156082 - protein, 112 aa, Glycine max
  unsure (1)..(112): unsure at all Xaa locations
  Clone ID: PAT_MRT3847_111964C.1.pep
FSCRQSMHRARADLEQMQTVXHTEKLSDIQCQPESQLXFITDAWRQIIECTTVLKWSYAYGFYLPDHEHAIKQFFEYLPSDSESGLARLHQCAEEELQPFLTADDSSREFND

SEQ ID NO: 156083 - protein, 118 aa, Glycine max
  Clone ID: PAT_MRT3847_111965C.1.pep
LCPQGARTTEGEAVKKKKTRRNTKEPATKKKHRVNSDSTPSYAPEPSKSHYTEQVGSLALHVLLEIHFRTRCWIKTPSIATPVLRWKNPTIAFYERHHHISRKFHWLPSPRHVPVLLL

SEQ ID NO: 156084 - protein, 48 aa, Glycine max
  Clone ID: PAT_MRT3847_111966C.1.pep
TLHGSLGHQIMIHVTNTRIRTTCKNKVTRLGTSRIYQHNEIANILHES

SEQ ID NO: 156085 - protein, 40 aa, Glycine max
  Clone ID: PAT_MRT3847_111967C.1.pep
LVYLPVKFHHFLVLFIIGMSCCIEPRSESLALSNEKSYVM

SEQ ID NO: 156086 - protein, 143 aa, Glycine max
  unsure (1)..(143): unsure at all Xaa locations
  Clone ID: PAT_MRT3847_111968C.1.pep
EMARTTLNDNLTPKHFXAEVMNIVCYLQNKIYIRPILKRTPYELWKGRKPNISYFYPFRCKCFIINTKDNLGKIDSKSDCGIFIAYSKXSKAFRVYNSGTLVIEEAIHIRFGKNKPNKELLELDESFADLRLDDNITISSSSR

SEQ ID NO: 156087 - protein, 55 aa, Glycine max
  Clone ID: PAT_MRT3847_111969C.1.pep
KSYDITSSLTSDFGSGKKAKNRPKPGGFSVEIITVTSGTGMEPVIWCLGWPGLGG

SEQ ID NO: 156088 - protein, 989 aa, Glycine max
  unsure (1)..(989): unsure at all Xaa locations
  Clone ID: PAT_MRT3847_11196C.1.pep
GSRLFLLLSLPPTLSLNQDGLFLLQAKLQLSDPQNALSDWNHRDATPCNWTAVTCDAATGGVATLDFSNLQLSGPVPATTLCRLPXLASLNFSYNNLNATLPAAAFSACAALLHLDLSQNLLSGAIPATLPDSLVTLDLSCNNFSGDIPASFGQLRQLQSLSLVSNLLAGTLPSSLGNISTLKILRLAYNTFDAGPIPKEFGNLKNLEELWLAGCSLVGPIPPSLGRLSNLLNLDLSQNNLVGDIPEQLVSGLRNIVQIELYENSLSGALPRAAFTNLANLERFDASTNELTGTIPEELCGLKKLGSLNLYENKLEGSLPETIVKSLNLYELKLFNNSLTGSLPSGLGKNSKLQSLDVSYNRFSGEIPARLCDGGALEELILIYNSFSGRIPETLEECKSLRRVRLGNNNFSGVVPEGLWGLPHLYLLELVYNSLSGSISNSISGAWNLSMLLISGNKFSGSIPEGVGELGNLEKFVANNNSLTGRIPKSVFRLSQLDRLVLGDNQLFGEIPVGVGGCKKLNELDLANNRLGGSIPKELGDLPVLNYLDLSGNQFSGEIPIELQKLKPDLLNLSNNQLSGVIPPLYANENYRKSFLGNPGLCKALSGLCPSLGGESEGKSRKYAWIFRFIFVLAGIVLIVGVAWFYFKFRDFKKMKKGFHFSKWRSFHKLGFSEFEIIKLLSEDNVIGSGASGKVYKVALSNGELVAVKKLWRATKMGNESVDSEKDGFEVEVETLGKIRHKNIVRLWCCCNSKDSKLLVYEYMPNGSLADLLHNSKKSLLDWPTRYKIAIDAAEGLSYLHHDCVPSIVHRDVKSSNILLDDEFGAKVADFGVAKIFKGANQGAESMSVIAGSYGYIAPEYAYTLRVNEKSDIYSLSAGVLELVTGKLPLDPEYGENDLVKWVQSTLDQKGLDEVIDPTLDIQFREEISKVLSVGLHCTNSLPITRPSMRGVVKKLKEVTELPKSLSGKLSSPYFQEEASDIDHEGSLV

SEQ ID NO: 156089 - protein, 84 aa, Glycine max
  Clone ID: PAT_MRT3847_111970C.1.pep
LSLQPFGVYGWKEMLEFSLVDGLLLSSFGIEYIFSLSCGVLLMVFSEECLCLIVREIDMFCYMSLLFLFFFSFSFYLLFYLLSP

SEQ ID NO: 156090 - protein, 61 aa, Glycine max
  Clone ID: PAT_MRT3847_111971C.1.pep
HISSWLTETMHSYYGAQCGAMRQIQSSLSLHGIEDTYNGTHPITMVARAPGIECVQAPWVL

SEQ ID NO: 156091 - protein, 72 aa, Glycine max
  Clone ID: PAT_MRT3847_111972C.1.pep
RRRGRKCRKERKTRESKNSLSAKCFIQNKCKRSRCDPQEVKNPSRQKLDKGSRMLILVMLCLEFCHLSHECL

SEQ ID NO: 156092 - protein, 88 aa, Glycine max
  Clone ID: PAT_MRT3847_111973C.1.pep
KSKPHFWELIFPIKGRGPKNGFESWSFEWANQTLRHLSFLNGNPQQFTVFDILLGIFQDFENAGKTLKPAFFVPQATARFFENSESFA

SEQ ID NO: 156093 - protein, 213 aa, Glycine max
  Clone ID: PAT_MRT3847_111974C.1.pep
GSDVSFEVNGLNVVAHKLVLEARSPVFRAPLFSPKKDHTIHCIKADDMKAPKVLTTALSIFLALLHVIYWDSLPDMQELTGLSSKWATTLMAQHLLAAADRYGLERLRLMCEASLCDDVAINTVATTLALAEQHHCFQLKAVCLKFVARPENLRAVMQTDGFEYLKESCPSVLTELLEYVARFTEHSDFLCKHRNEVILDGSDVNGRRVKQRL

SEQ ID NO: 156094 - protein, 102 aa, Glycine max
  unsure (1)..(102): unsure at all Xaa locations
  Clone ID: PAT_MRT3847_111975C.1.pep
IAYHEAFATCTLNFLTQASFKARTNEAVRKSTGGNDPRKHITTMAGVNSVSTTDXVKTTHHYLLATVALREIMGYQNSTELRMRKLDFQRPVREIAQEVRTD

SEQ ID NO: 156095 - protein, 120 aa, Glycine max
  Clone ID: PAT_MRT3847_111976C.1.pep
LITSLLHYLPPSSAFSPYWFVLPTSQLAVALRGATVSLVGRHTLAKTNHRLGTVIAGRPRHLAGFTLHRACGRCSAPNGGLWPGNWAVDGTTGVICGWLCCFLRFRLLTLDYTPFTSLYF

SEQ ID NO: 156096 - protein, 151 aa, Glycine max
  Clone ID: PAT_MRT3847_111977C.1.pep
ELPSLHPLALSFTKIPNFEAPFKGVESQSGLKTVDFNNHRVRGFFPSFKAGKPKPFLLSLGKNQFPGKKPPPFGVKTVFSQKGGFFFGRVFLGGKYLLGGKPPPLLTLKPHFSNVSLVGNCLNRGPQKFFFSQGGQQKTLAQGKKINPPPT

SEQ ID NO: 156097 - protein, 123 aa, Glycine max
  Clone ID: PAT_MRT3847_111978C.1.pep
MTKKIIFGSFRLHYNWCSSKSSHVIPVPARVFEGLPKAGDMIHHHDEQYLYEDCHDDDSQLAGYLQWLEEKVQDDDDDKKACGNEMNEIDMLAEMFIANCHEKFKLEKQESDRRFHEMLARGM

SEQ ID NO: 156098 - protein, 72 aa, Glycine max
  Clone ID: PAT_MRT3847_111979C.1.pep
DSSNENESFFCCTGASSSGVPASSSSWCSYFFVRGLLLLVLHLRSFYSHCFFFFNDYYLNDCCLNNGTLNDW

SEQ ID NO: 156099 - protein, 384 aa, Glycine max
  Clone ID: PAT_MRT3847_11197C.1.pep
HASALVEILSWVPVKDLLRFRCVAKWLRALISDPTFVKLHLLHMSSRNAHILLTFYDKHYPGDKYSAPRRYCAPCSVHALLHNPSSTIEGFRPFDINVYRVLGVCNGLVCLLVSYRYSHSDFDEFWVRFWNPATRVISDDSPRVYLHNDRPRRYKRYMFGFGYDEWSDTYQAVVLDNNKPQNLEVRVHCMGHTGWKSTLTTTCPAFPILSQDGASVRGTVNWLALPNSSSDYQWETVTIDDLVIFSYDLKNESYRYLLMPDGLLEVPHYSPELVVLKGCLCLSHRHGGNHFGFWLMKEFGVEKSWTRFLNISYDQLHIHGGFLDHPVILCMSEDDGVVLLENGGHGKFILYNKRDNTIECYGELDKGRFQFLSYDYAQSFVMPY

SEQ ID NO: 156100 - protein, 48 aa, Glycine max
  Clone ID: PAT_MRT3847_111980C.1.pep
TIVSTFFMRKQPMTTNSLKTFPNALFGLKCGPSGRVTCIVSYKVKLIT

SEQ ID NO: 156101 - protein, 464 aa, Glycine max
  Clone ID: PAT_MRT3847_111981C.1.pep
MEKPHVAVVPSPGFTHLVPILEFSKRLLHLHPEFHITCFIPSVGSSPTSSKAYVQTLPPTITSIFLPPITLDHVSDPSVLALQIELSVNLSLPYIREELKSLCSRAKVVALVVDVFANGALNFAKELNLLSYIYLPQSAMLLSLYFYSTKLDEILSSESRELQKPIDIPGCVPIHNKDLPLPFHDLSGLGYKGFLERSKRFHVPDGVFMNTFLELESGAIRALEEHVKGKPKLYPVGPIIQMESIGHENGVECLTWLDKQEPNSVLYVSFGSGGTLSQEQFNELAFGLELSGKKFLWVVRAPSGVVSAGYLCAETKDPLEFLPHGFLERTKKQGLVVPSWAPQIQVLGHSATGGFLSHCGWNSVLESVVQGVPVITWPLFAEQSLNAAMIADDLKVALRPKVNESGLVEREEIAKVVRGLMGDKESLEIRKRMGLLKIAAANAIKEDGSSTKTLSEMATSLRGF

SEQ ID NO: 156102 - protein, 80 aa, Glycine max
  Clone ID: PAT_MRT3847_111982C.1.pep
EKPGRTTPFQLEPPLIGVGPPKSAPYKEMRRRTVMAGGTNENLLPKFGTKTNLTPKRDYYSSGVLLLEIVSGRKPSQSLY

SEQ ID NO: 156103 - protein, 65 aa, Glycine max
  Clone ID: PAT_MRT3847_111983C.1.pep
MHNIKSRRFLSVNLCTIYCSQCDVPICILLVKLADVIAFSLNKLEVLGSYKQGITYCCYLWASVF

SEQ ID NO: 156104 - protein, 64 aa, Glycine max
  Clone ID: PAT_MRT3847_111984C.1.pep
FTLVLHHLIVHIHIPSPCLNCLLYASCLSLVFILNKEQQKCTSISYELYNLFFCYELYSYLAYA

SEQ ID NO: 156105 - protein, 45 aa, Glycine max
  Clone ID: PAT_MRT3847_111985C.1.pep
ESLKLVDDRKFGKRKVSGKPGRSSAPKKEKMAKKDSNKPKLPPSV

SEQ ID NO: 156106 - protein, 67 aa, Glycine max
  Clone ID: PAT_MRT3847_111986C.1.pep
YRCGNFLNRQSIRVQEGHALLPLLHSTNARASGTANSRPCRGLRIFRRSGSSLWNSTSWRKSISNHI

SEQ ID NO: 156107 - protein, 83 aa, Glycine max
  Clone ID: PAT_MRT3847_111987C.1.pep
SHEMNHLSLDTEDYSLSSLLELAANNDVSGFKRLIECDPSFIDEVGLWYIRHKESKKMVNEQRTPLMVAATYGSIDVMKLILS

SEQ ID NO: 156108 - protein, 45 aa, Glycine max
  Clone ID: PAT_MRT3847_111988C.1.pep
GLLRPPPSHIPSIVVIEGFEFEEYEVPVFLLHIRKGYGLLMLLYF

SEQ ID NO: 156109 - protein, 52 aa, Glycine max
  Clone ID: PAT_MRT3847_111989C.1.pep
SSLINTIRPFRASVVLDLETFSSSRGFTGSGKFLTSTTLGGSPLSCSVPDYH

SEQ ID NO: 156110 - protein, 109 aa, Glycine max
  Clone ID: PAT_MRT3847_11198C.1.pep
ENEIPKTSYTFPHLDHHIRKHYEHPYDVVHIFLVAEILLVRIVCAYNQEDHVIFVEFRAEEDEWINTKTSVLQPENWRPSPVLPGLLRLNFLAEVLSQYITVSTISIGF

SEQ ID NO: 156111 - protein, 109 aa, Glycine max
  Clone ID: PAT_MRT3847_111990C.1.pep
KKFEEKKKLEEFVNFERYRNLIKHPGKEFTDREALEHVIQEMEAKAAAPFTSDRSNLLQPAASKGSYSQVRFSYDGNAKEEAHISDDEDIDNEEDEDDEDDEDFNSDDT

SEQ ID NO: 156112 - protein, 80 aa, Glycine max
  Clone ID: PAT_MRT3847_111991C.1.pep
FFFIKPCSSQNFGNNRFKVPLRLKASSVLGSPFLAQNLKSPPSSSGRCYQKWVLFNCCRPAFTHVCLNVGVCRFPLLHFF

SEQ ID NO: 156113 - protein, 55 aa, Glycine max
  Clone ID: PAT_MRT3847_111992C.1.pep
VQSRLALVHVKHTGNPCHKSLMFLLYNEKKSRQAKGSKNGSPSRIYSIALKGVPA

SEQ ID NO: 156114 - protein, 77 aa, Glycine max
  Clone ID: PAT_MRT3847_111993C.1.pep
INAMKTMPGKVVCSTNHQTVAVEVVRLAPHPKYKKRVRKKKKFQAHDPDYQFNGGDICQLQKNKPINKNKGFLGLPV

SEQ ID NO: 156115 - protein, 137 aa, Glycine max
  Clone ID: PAT_MRT3847_111994C.1.pep
NVASVLYHHMREGGISPSEIIHNSLLSSCCKLGMFGEAVTLVDSMMECSHLAHLESYKLLICGLFEQMNKEKAEAVFCSLLRCGYNYDEVAWKVLIDGLAKAGYVDQCSELLNLMEKNGCRLHPETYSMLMQELNRA

SEQ ID NO: 156116 - protein, 202 aa, Glycine max
  Clone ID: PAT_MRT3847_111995C.1.pep
KGRTVDFTNTVIIMTSNIGAEHLLKGIDQKTGAMAPGVKDKVMVEVKKHFRPEFLNRLDDIVVFAPLSSSELGNIVRLQLVKLSDRLKDRDVSVKLTDAAAQFILSQAYDPYYGARPLRRYLEKHIVTQLSRMLISGELQNNALVTIDVAAAGAGAAADSVLTFKVQQLEPKSRRGSGASSASADDGDTVMTQAKTTSGAKP

SEQ ID NO: 156117 - protein, 78 aa, Glycine max
  unsure (1)..(78): unsure at all Xaa locations
  Clone ID: PAT_MRT3847_111996C.1.pep
LASLLYYYIIICFKYLLIFWFFFFNLSTSHFSLFARYKGWRKTGAPIYTLRHCTEVNIYICKSIKLRFHFHXKKKKKK

SEQ ID NO: 156118 - protein, 54 aa, Glycine max
  Clone ID: PAT_MRT3847_111997C.1.pep
LESIILFHIIFVNQVHLKTYLKRILITYIMLSFTLHSHAMNLGPSLEINYLDIK

SEQ ID NO: 156119 - protein, 547 aa, Glycine max
  unsure (1)..(547): unsure at all Xaa locations
  Clone ID: PAT_MRT3847_111998C.1.pep
MCKHPIAPFHFFLFFFLYSLLQINHAAEASRYQFYTKDSSKFMLIXIKRRSPPPPEINLEDLPLDPGKRIKISACHPNDQDKIWRAYLQRGPCQPTXHNFSQRKIGNSLRRFCPSWFNEFGNWLEYSIEKDVAFFLCCYLFRHDFGKQSGGDTFVIERLTNXNKKERLSSHVGGPNSAHNIAWRKCQDLMNQNQHIEVAISKQSEQVHDLYRRRLTASIDCIRFLLKLRLTFRGHDESTNSANQGNFLELLKFLAEHNESINHIVSENAPKNHQLIAPKVQKDIVNVATLETTNAIITDLGDELFVIIVDEARDISNKEQMAIALRYVNKNGSIVECFFGMIHVKDTTTLSLKMAIDELFCKHGLSISRIREQGYDGASNMQGEFRGLKSLILKENSFAFYVHCFAHKLQLTLVAIAKNHIQVTSLFNLVSTLLNVVGRSCKRRDMLREKQINYVREALGKGEIPNGXGLNQETSLKRALDTRWGSHYATLINLTLMYSSIIDVFEIIKEDGSNANQRAEANGLLHLLEDYDFGTYVFIFICIMIII

SEQ ID NO: 156120 - protein, 103 aa, Glycine max
  unsure (1)..(103): unsure at all Xaa locations
  Clone ID: PAT_MRT3847_111999C.1.pep
YTAAVDKDIAPLLFLDITELTIIGYNRQSDTYIPGHTECDGVGILGIARAFGGMIFILVHCTAGISGGHINPAVTFGLFLGRKVSLVRALMYLISHXAAAICG

SEQ ID NO: 156121 - protein, 48 aa, Glycine max
  Clone ID: PAT_MRT3847_11199C.1.pep
PNCDWPSCCFSAHFLSYVHSIFVRPALFYLPLIGLIILGSITSVRSNS

SEQ ID NO: 156122 - protein, 51 aa, Glycine max
  unsure (1)..(51): unsure at all Xaa locations
  Clone ID: PAT_MRT3847_1119C.1.pep
QLPKRPTPREDRSYQHGHALKSILKAEYXILDRLRRAFSFLPNPPTLILNE

SEQ ID NO: 156123 - protein, 110 aa, Glycine max
  Clone ID: PAT_MRT3847_111C.1.pep
MSDEVYEGAIGIDLGTTYSCVANYEGTNVEIIANEQGSFTTPSFVSFMSEERLIGEAAKNQAAMNPENTVFDVKRLIGRRFEDETVKKDIQSWPFKVVDQGGNPFVEVEY

SEQ ID NO: 156124 - protein, 142 aa, Glycine max
  Clone ID: PAT_MRT3847_112000C.1.pep
EKTAPEVVAVAVHQYCASSSCATLLFGVVVLLFACRCRVCRLRRRCRSSSCCWSRWRLLCSCSVLFVLAVVCCTFARETRVGLGRVSQTPVAQNFKKKKVLFRHYRNSAMTVMVLPYATRNATAIWWHFSENPRCHTAITAS

SEQ ID NO: 156125 - protein, 126 aa, Glycine max
  unsure (1)..(126): unsure at all Xaa locations
  Clone ID: PAT_MRT3847_112001C.1.pep
HQTRNSARPSFKRIDWXSKEQAFLTNINSSKHFGACXWTKSQPHSWELPFPLEVCGPNNGLKKRSSXWAHQTLWFLKFLIDNPKKNKACDILLANLSKFLKLAGNNLITPFSVSHATARSSKDAKF

SEQ ID NO: 156126 - protein, 81 aa, Glycine max
  Clone ID: PAT_MRT3847_112002C.1.pep
DGQVNFFSSLSLVRLRFSHFITLCVAPFQWLRMTLKHCRSDNAAAAAIVSFVSLKPQLLVQSPKAYDTIRFFKAAFGSDEV

SEQ ID NO: 156127 - protein, 102 aa, Glycine max
  Clone ID: PAT_MRT3847_112003C.1.pep
LSSSSILSLLDREIAYPMTKVPRKTGCQPPLLTMTWRSAKLGGSPAVEVAVVRGIPPSGDRTKRLGPLVLPLLEEVLSIPRQWFRRHQNQPNSMGSHLKNNT

SEQ ID NO: 156128 - protein, 75 aa, Glycine max
  unsure (1)..(75): unsure at all Xaa locations
  Clone ID: PAT_MRT3847_112004C.1.pep
SVAEFSADPGFAERAAKFSCFGSRSFNDRSVQLGVNNAELAQRSAPAMEHGGKLPXXLSXPLLKTLGSQMGAQEN

SEQ ID NO: 156129 - protein, 426 aa, Glycine max
  Clone ID: PAT_MRT3847_112005C.1.pep
MMSVTGKSIDFAGKNLVSCGCSSNASSFDRYTVRNYAKLNSNNSKGCGRDHGARKLVCCKKRSTHCRVSSMKTAQPTVNGGTHAFEGLTTGLDLKGYSEDPISPARLFEVVADDLLTLNKNLQSIVGAENPVLMSAAEQIFSAGGKRMRPALVFLVSRATAELLGLKELTAKHRRLAEIIEMIHTASLIHDDVLDESDLRRGKKTVHQMFGTRVAVLAGDFMFAQSSWYLANLENIQVIKLISQVIKDFASGEIKQASSLFDCDVQLDEYLIKSYYKTASLIAASTKGAAIFSGADSSVTEKMYEYGRNLGLSFQVVDDILDFTQSAEQLGKPAGSDLAKGNLTAPVIFALEKEPKLRDIIESEFSEVGSLEEAINLVKSCGGIERAQELAKEKADLAIQSLQCLPQSVFRLALEDMVAYNLQRIA

SEQ ID NO: 156130 - protein, 73 aa, Glycine max
  Clone ID: PAT_MRT3847_112006C.1.pep
LRKFQQTGARKGGDLYPGPVIMDAYNKDDIFASIVMHMSVTKIHTWLDDHCNMSNMGVALYKKEPNGGYDGAS

SEQ ID NO: 156131 - protein, 189 aa, Glycine max
  Clone ID: PAT_MRT3847_112007C.1.pep
RLVRLTRPSIWSRVVGGTHAIEGLTTGLDLKGYSEAPISPARFFEAVADDLLTLNKNLQSIVGAENPVLMSAAEQIFSAGGKRMRPALVFLVSRATAELLGLKELTVKHRRLAKIIEMIHTASLIHDDVLDESDLRRGKKTVHQMFGTRVAVLAGDFMFAQSSWCLANLENIEVIKLISQRVKRCIIPF

SEQ ID NO: 156132 - protein, 77 aa, Glycine max
  Clone ID: PAT_MRT3847_112008C.1.pep
KSIAVTIQRRLSFFFSSSFLFSFLFSQCWTSRLLNLPLSPTSCLFIEKQSIWGHDYSLRRAGYFTMKLSWWPRRAKG

SEQ ID NO: 156133 - protein, 78 aa, Glycine max
  Clone ID: PAT_MRT3847_112009C.1.pep
YRDERALNFLSFQEFQANLHLCYFWGTFIVIEGQSKRAFSSFNIFAASCKVQEHNIFHYCINTSLQYILSPHSSFLGS

SEQ ID NO: 156134 - protein, 70 aa, Glycine max
  Clone ID: PAT_MRT3847_11200C.1.pep
YHHLIANSFFYCFWGAGGLQKHTNTNSCTQTDITQSTCKGLTFTSTQDNNKKKVPRFFCIRNLPPIRKAS

SEQ ID NO: 156135 - protein, 80 aa, Glycine max
  unsure (1)..(80): unsure at all Xaa locations
  Clone ID: PAT_MRT3847_112010C.1.pep
SPFKYLEVILVGVAXPAVTNESRNRWLRKPVHKRGALGGPTFVGKSNRGLPGRVHFYPKNRPSRRATWKRNNLLPLCRSA

SEQ ID NO: 156136 - protein, 70 aa, Glycine max
  unsure (1)..(70): unsure at all Xaa locations
  Clone ID: PAT_MRT3847_112011C.1.pep
NXRVDELTSRLXXXXLXQLLXCRGASXSLXRWQGXNGAHPXAXGCSWSRGKXCMXHLSGXSLSNTFXTRX

SEQ ID NO: 156137 - protein, 74 aa, Glycine max
  Clone ID: PAT_MRT3847_112012C.1.pep
FMNDNPGEDRPQEYRPTYRPDNTTLAHIRGRPHASQVTIPPIKKNPLTPLKGHKKIICLIIYNCRAQSTVEHIL

SEQ ID NO: 156138 - protein, 86 aa, Glycine max
  Clone ID: PAT_MRT3847_112013C.1.pep
HKPKTKIVCTLGSCWCSVPMIETLLRAGMSVACFDYFHGSHEYQPFSHRRLRSGMESTVILCAGVRGTRGRPSRSVFTILGRSCKD

SEQ ID NO: 156139 - protein, 196 aa, Glycine max
  Clone ID: PAT_MRT3847_112014C.1.pep
MGSGKSKTVSSDVGYVPLDSGHARLRQLGYKQELNRHLSVISNFAFSFSIISVLTGVTTLYNTGLNYGGPVSFVYGWFIASGFTMIVALSMAEICSSYPTSGGLYYWSAKLAGPRWAPFASWITGWFNIVGQWAATTSVDYSLAQLIHVIILLTTGGKNGGGYEASIYVPIAVHGGMLLLHGMINRLPISLISFLG

SEQ ID NO: 156140 - protein, 107 aa, Glycine max
  Clone ID: PAT_MRT3847_112015C.1.pep
SSLATELDFFWPSPLSRIIAQKKTKKKGLKKPKLAPGLTTIFLKNPKLKFRFKNRVKPPHWLKKKAYFKKLTKKKLFFSENIKTKPPFLLQNGTKITYKTMVWPAFI

SEQ ID NO: 156141 - protein, 37 aa, Glycine max
  Clone ID: PAT_MRT3847_112016C.1.pep
NRSRTSFINQRVTTIIAVLILRLEDNINKFKQCLRSS

SEQ ID NO: 156142 - protein, 247 aa, Glycine max
  Clone ID: PAT_MRT3847_112017C.1.pep
MGAIAGEELLKWEKMQGVSSREEKILVSIRLRPLNEKEIAANESADWECINDTTILYRNTLREGSTFPSAYTFDRVFRGDCVTRQVYEEGAKEVALSVVSGINSSIFAYGQTSSGKTYTMVGITEYAVADIFDYIERHEERAFILKFSAIEIYNEVVRDLLSTDNNTPLRLRDDPEKGPILEKLTEETLRDWEHLKELLAFSEAQRQVGETYLNEKSSRSHQIIRLTMESSAREFLGKGNSATLIAS

SEQ ID NO: 156143 - protein, 403 aa, Glycine max
  unsure (1)..(403): unsure at all Xaa locations
  Clone ID: PAT_MRT3847_112018C.1.pep
GEEGGGEVRRVRVVFDDDDEKVQRMRKGVLQKLHMTFGGSDEDNYAFGLDRVTDTEMFFLASMYFSFPRGLGGPGKCFASGKHLWVSDVLKSSFDYCVRSFLAKSAGIQTVVLVPTDFGVVEMGSVRMVGESFELLQAVKSVFSAQASSLLVPHMVKPIAPLDLVREKRDGSESANALLSGLAIGDKNKNINNHSNNRVEGVGVPKIFGQDLNCSTQFREKLAVRKMEERPRPWGGHPPKVNSIGFPNGVQGSSWGAGQVVRHLGPPEMLAPRLASSGTLPKLANGARHDFVHNNFEQQRPVQMQIDFSGATSRAASGRSIIAESEISDIEATCKEERVSVADDRRPRKRKRXPANGREEPLNHVEADRQRREKLNQRFYALRAVVPXFSKMDTSLLRDAIAP

SEQ ID NO: 156144 - protein, 49 aa, Glycine max
  Clone ID: PAT_MRT3847_112019C.1.pep
PSFSLYQLNQEGPIQPRNYVKGDIWIMISFKQKKKKKGGAWGQGVAEGW

SEQ ID NO: 156145 - protein, 55 aa, Glycine max
  Clone ID: PAT_MRT3847_11201C.1.pep
KLIETFTFFEFYTLQIFFMNPTITFFFGFSIGSGKGIGFSCQSIHCTLLDRQVFF

SEQ ID NO: 156146 - protein, 28 aa, Glycine max
  Clone ID: PAT_MRT3847_112020C.1.pep
VIKRYSERLATMFVPYRRVELLGIIFLW

SEQ ID NO: 156147 - protein, 151 aa, Glycine max
  Clone ID: PAT_MRT3847_112021C.1.pep
MACFSLNLSALHMFRPCVYIPQIVANPLQHQNRKIKILACQANQNLDQSSTTEKSVAELGNSKGTSSPNGVPPKFPSKDFKKKIAIVSFLGALGLLLSSRLHFFGVPMKDHCAHALPSKEARPNGKFTVVEFNADWCEVCGELAPDVYEVE

SEQ ID NO: 156148 - protein, 70 aa, Glycine max
  Clone ID: PAT_MRT3847_112022C.1.pep
DIWFNIYSHHCVGLVGFSLTRVMIAWFTPPYDVLLKPLCCIMTRVRGSLSIFREMNALMEASIVIYYYGQ

SEQ ID NO: 156149 - protein, 149 aa, Glycine max
  Clone ID: PAT_MRT3847_112023C.1.pep
QDRWKFFNEVKWHNIKEATYSVKRPITLENNENKPVTNSRDTQEVKFEKGIQILKIFKQHSSKTCILDDFGFYETREKMIQERKSMEQQLPKQASKSNDLTTNGTVMLPKSHDGALKNESATTDEAGQKEKLVEVNGSTQASEDCSKNC

SEQ ID NO: 156150 - protein, 102 aa, Glycine max
  unsure (1)..(102): unsure at all Xaa locations
  Clone ID: PAT_MRT3847_112024C.1.pep
RLXXWPLLWCLFVFXXPXSGSFPAVVXLFSXLFCFXGRXLXXLSVGSLLVCCXXCFFXXGCXXSLXLXSCSCPGRXAXSVVWSXAIVRASLRXLCLXXASPE

SEQ ID NO: 156151 - protein, 131 aa, Glycine max
  Clone ID: PAT_MRT3847_112025C.1.pep
SFNSYSFVWIFTPRPCTEEEDWLLQFPVEGYLEEEEGSSEAWLVGKLLTQGSFNSKAFMSTMTQIWKVRKGMEIREVGKNMFTFCFLERRDKDQILRGYQWSFEWKLIVLNELEKEVNPKEVSLTHSLFWI

SEQ ID NO: 156152 - protein, 61 aa, Glycine max
  Clone ID: PAT_MRT3847_112026C.1.pep
ILILFHYGILKVIPFKHCCFSSNRKMPWMRTPHCCAHLHPNNNAKQPMRSRTSQTLTVARG

SEQ ID NO: 156153 - protein, 154 aa, Glycine max
  unsure (1)..(154): unsure at all Xaa locations
  Clone ID: PAT_MRT3847_112027C.1.pep
SSMISFPAGTTCNRAGGGMGASFTGLKFMGGVPTGRTRVTLPSLLXNRWRVPCMPGLPTSGKKKIETLSYLXELDEATFAKGSRYLPXXGWIPCFEFRFEHRSCARNXNXSPRYYDGRYLTMWKLAMFGCTDSSQVLKELKKVKLIPQSFIPIM

SEQ ID NO: 156154 - protein, 141 aa, Glycine max
  Clone ID: PAT_MRT3847_112028C.1.pep
VSLKLQKRLSASVLKCGRGKVWLDPNEVNEISMANSRQNIRKLVKDGFIIRKPTKIHSRSRARRMKEAKRKGRHSGYGKRKGTREARLPTKILWMRRMRVLRRLLRKYRERKGPVDKSFTAPSAPAATVPQSAQAPKKSKK

SEQ ID NO: 156155 - protein, 63 aa, Glycine max
  Clone ID: PAT_MRT3847_112029C.1.pep
SQKILSSRHLVNCSVRSVKERRSERFCQFQQHQFRFRQFARQWLHLPSHTPRLTIFCSLRVVP

SEQ ID NO: 156156 - protein, 188 aa, Glycine max
  Clone ID: PAT_MRT3847_11202C.1.pep
PKSQKITKSLRDYIFRIKIHQRSQIKLPSKKWILAACKHPRTPSLDIDNMKNNNVKDDEAMLADIDRFLFENFKSLFLDDREEPDNNINRRAEMSPKLDPIRFDSSRRFFTDATTEEGSSSAMSESETAEESTVVPGNCVVVLANSGNPSEDFQRSMEGVVEARLRNCEKVDWDFMQELLFCHMNLNQ

SEQ ID NO: 156157 - protein, 160 aa, Glycine max
  Clone ID: PAT_MRT3847_112030C.1.pep
MVSLKLQKRLSASVLKCGRGKVWLDPNEVNEISMANSRQNIRKLVKDGFIIRKPTKIHSRSRARRMKEAKRKGRHSGYGKLKGTREARLPTQILWMRRMRVLRRLLRKYRESKNKASRERKIARREERLAQGPVDKSFTAPSAPAATVPQSAQAPKKSKK

SEQ ID NO: 156158 - protein, 95 aa, Glycine max
  Clone ID: PAT_MRT3847_112031C.1.pep
RLLMLVSGTTPNHLLCYLLTLWRWYGLPPAKLVNLVALPKGSPGIPWRRPLLTLAAWHPAPQLLLATQQQFHEHLCTRLISGIHLALIPVFGPPT

SEQ ID NO: 156159 - protein, 212 aa, Glycine max
  Clone ID: PAT_MRT3847_112032C.1.pep
MVSLKLQKRLAASVLKCGRGKVWLDPNEVNEISMANSRQNIRKLVKDGFIIRKPTKIHSRSRARRMKEAKKKGRHSGYGKRKGTREARLPTKILWMRRMRVLRRLLRKYRESKKIDKHMYHDMYMKVKGNVFKNKRVLMESIHKSKAEKAREKTLSDQFEAKRAKNKASRERKLARREERLAQGPIDKTSTAPSAPAATAPQSTQAPKKFKK

SEQ ID NO: 156160 - protein, 58 aa, Glycine max
  Clone ID: PAT_MRT3847_112033C.1.pep
GVIILSYSVVNWCKCITTSRLVRCNMGSLISLAIRIGVDVHFGSGVTRKLYTLVRQVE

SEQ ID NO: 156161 - protein, 75 aa, Glycine max
  unsure (1)..(75): unsure at all Xaa locations
  Clone ID: PAT_MRT3847_112034C.1.pep
RMCPHKFSEGDLVLKKVSHVQKDHRGKXAPNYIGPFVVKKAFSGGALLLMNTDDEELPSPMNFDVVKPYYACYWG

SEQ ID NO: 156162 - protein, 108 aa, Glycine max
  unsure (1)..(108): unsure at all Xaa locations
  Clone ID: PAT_MRT3847_112035C.1.pep
MWGARSFVWGFNGLGDFGPATEPIKPXLTFSQLKATKWSFLLALSALVICNYGSEMPXWLAILEIPGAAVFPMDRGGXLKAVRKVLALIARELVAGYKPYHHFFLGFK

SEQ ID NO: 156163 - protein, 165 aa, Glycine max
  Clone ID: PAT_MRT3847_112036C.1.pep
PGGPRLPAWRERQKGGAINTLKRVYDVSAVGVREHFYGGIGGVQVHAQVLITSWGVITLLLGSAILIMRDVRTIAALGENFFEYVVEFIGDVSETEMGGRMCGRAVLLWGTWGGVGWGVVMGGGGWLGPWGDGGGEAGGGRVRGGSRGRCGGGWGGGWGGGGGGG

SEQ ID NO: 156164 - protein, 63 aa, Glycine max
  unsure (1)..(63): unsure at all Xaa locations
  Clone ID: PAT_MRT3847_112037C.1.pep
FWRCLLLSDLINLNLSDTTDKVIAAYIWIGGSRMDPRSXARTLPGPVSDPSELPKWNYDGSST

SEQ ID NO: 156165 - protein, 81 aa, Glycine max
  unsure (1)..(81): unsure at all Xaa locations
  Clone ID: PAT_MRT3847_112038C.1.pep
LMXFLXDPKGXKLETFSLKNDGVXRIRGXTAFSVAXRIWKTATMFCIERWNXPVETDVPFPWXIIRXXWNKXLPXCXGXGG

SEQ ID NO: 156166 - protein, 58 aa, Glycine max
  Clone ID: PAT_MRT3847_112039C.1.pep
KIKKGGPRSHPKTRFNSKGVDYCFMIGPLCHLQKKGRKKKFGISKTFASILSSKSCEK

SEQ ID NO: 156167 - protein, 68 aa, Glycine max
  Clone ID: PAT_MRT3847_11203C.1.pep
YPSYTPMAVLLHLQDNKHLLYICHETSELPFKNKACPPGTQQFHLRIVCIHGICAVSCNVHASIHSPQ

SEQ ID NO: 156168 - protein, 60 aa, Glycine max
  Clone ID: PAT_MRT3847_112040C.1.pep
SIGTNIPYIQTRQKPQATLFTLPFPLNSTPKETFPYSIHHSCPIAASSNFTNQSRYYLST

SEQ ID NO: 156169 - protein, 32 aa, Glycine max
  Clone ID: PAT_MRT3847_112041C.1.pep
PCILLLHRAKLVSISATLLSQCYKGSLSSLRI

SEQ ID NO: 156170 - protein, 135 aa, Glycine max
  Clone ID: PAT_MRT3847_112042C.1.pep
HLLMVYATQFHLLLLAAARSFLICFALPASNIRTCFLRVLIFSIQGLHFGNDSSRNIFLLDNCKNRKRKLLLEIDVSNIQCGTNLFNYGSWRWSRGEILHFKWRRRVARRLVGVEIACHIVMKYNDYLKVVLKVV

SEQ ID NO: 156171 - protein, 44 aa, Glycine max
  Clone ID: PAT_MRT3847_112043C.1.pep
KRLNFKPRRLSVGYKHTQISARPLSVSIAIPSPKYYPPRANSTS

SEQ ID NO: 156172 - protein, 98 aa, Glycine max
  Clone ID: PAT_MRT3847_112044C.1.pep
MSNLHYMFILFAVLLGQSPSRIHCHTKGIRPRLCAGKGLLTNITRVLYSEQQFMKWANIVGSLKHSVFNVSQNKVVDFYTLHVDKEPGAGDFTLIQEA

SEQ ID NO: 156173 - protein, 73 aa, Glycine max
  Clone ID: PAT_MRT3847_112045C.1.pep
VSRELNPEEYYNFDCPTDTSGFAAENQKKSWTKKLKQSSLGSKLKASRAYLKSWFGKSGCSYEINATFNKSCG

SEQ ID NO: 156174 - protein, 47 aa, Glycine max
  Clone ID: PAT_MRT3847_112046C.1.pep
KQTVLIYYYFKRMFNKVCKNINRISCIFYTHSSSIGFFCRRDVSKRS

SEQ ID NO: 156175 - protein, 39 aa, Glycine max
  Clone ID: PAT_MRT3847_112047C.1.pep
PLYHYVHVRTYNIHACLHINIQKLRFFAGVPASSRRDYK

SEQ ID NO: 156176 - protein, 231 aa, Glycine max
  Clone ID: PAT_MRT3847_112048C.1.pep
HGNFEIFNSDSGSNSFDGTVVRTGCMLTTFLNETKTGQLLLFPYAADGKARISKFINGELKLDPRHRSSDIYDHKLCFVRVHLRPFKEGCFEEGAVICAPYPSDISLWTSSCEKKKEGLQMSQSAMRLYFKEHSSGKWGMQIPNDSIASKSHRWPIGFVPTASVQGSKSLVAEGFCEAVLLSHLRKEQWKEMPMKKRREIYVLVRNLGSTAYRLALASIVLENQENDIDFL

SEQ ID NO: 156177 - protein, 105 aa, Glycine max
  unsure (1)..(105): unsure at all Xaa locations
  Clone ID: PAT_MRT3847_112049C.1.pep
LTVIIGGAPVSSQARGLPRVLRQGPLGRALAXXPXFPVSLLRVSVXRXFPSPPPFFSFXAFVGPPLAXLLRLCSVWFFASPPFLLLSLGRCCPSVRXXFPSPCVP

SEQ ID NO: 156178 - protein, 84 aa, Glycine max
  Clone ID: PAT_MRT3847_11204C.1.pep
GFFQGGFRPVALLGDVLVVAIEHAMVRGRGESKPQYLASFHCFWGWPQLVCVFPAGEIQSLSGVMVNAFGSQASRMQLTIAFFS

SEQ ID NO: 156179 - protein, 124 aa, Glycine max
  Clone ID: PAT_MRT3847_112050C.1.pep
ILFWYELHRQLCLMGKSHQIFVTVADPGVVQTKLMQEVPAILSWLALYVLKRLQLLQSPECGVDSIIDAALAPPGTSGAYFFGGKGRTLNPSPLSRNAKLARELWESTSKLLSVTPFGAEGNSW

SEQ ID NO: 156180 - protein, 143 aa, Glycine max
  unsure (1)..(143): unsure at all Xaa locations
  Clone ID: PAT_MRT3847_112051C.1.pep
FRSIQYPWVHIYEYLKLCLXLFSYEPHRQLCLMGKSHQIFVTVADPGVVQTNLMREIPAILSWLAIYVLKRLRLLQSPECGVDSIVDAALAPPGTSGAYFFGGNGRTINPSTLSRNAKLARELWESTSKLLSVTPFGAEGNSW

SEQ ID NO: 156181 - protein, 94 aa, Glycine max
  Clone ID: PAT_MRT3847_112052C.1.pep
TRSGKSSVAKSEGTHPVWAGDAITLKVKNQEFAKLKVKDKDTLRPDSRLGTAEIPLAEVVSQGRVSKWIPITKRGTVTGEVLVEMEFIPATVGI

SEQ ID NO: 156182 - protein, 58 aa, Glycine max
  Clone ID: PAT_MRT3847_112053C.1.pep
EHLGTDVRVTRTSCRHESSPVARLLHGERNGMLLNVDGAYEHHASDGHYKCANHTCSS

SEQ ID NO: 156183 - protein, 69 aa, Glycine max
  Clone ID: PAT_MRT3847_112054C.1.pep
LCAQIVISFFPFFFQNSYCGGKKVVRLQIEFLWGKREEGGKIAWVKWNRICWPKEEEGLGVKDIHLFNL

SEQ ID NO: 156184 - protein, 53 aa, Glycine max
  Clone ID: PAT_MRT3847_112055C.1.pep
NSAPDAPVFEVHEVDDEVLPLLTLEDLKDMGISAVGSRRKMYTAIQKLGKGFS

SEQ ID NO: 156185 - protein, 261 aa, Glycine max
  Clone ID: PAT_MRT3847_112056C.1.pep
AIAERTAKAEAQMKEKYQLRFKVLEERVKTSNGNSKFTVSDGRNIATGPSRRQSFGGAESLSASSSNGYQCRETALTRPGTEGANGAKAKQEDAKRTARPLAGGRRALARGRPTPDANGLDNMPRNSNIQTITSETITTHEESANGTPVKKSKSENEDYVSGMLYDMLQKEVISLRKACHEKDQTLKDKDDAIEMLAKKVDTLSKAMEVEARKMRREVASMEKEVAAMRISKEHDHRARRASAPRGAVNSQSIPSRSARNF

SEQ ID NO: 156186 - protein, 100 aa, Glycine max
  unsure (1)..(100): unsure at all Xaa locations
  Clone ID: PAT_MRT3847_112057C.1.pep
ARNSARGXLXXWGITIGAGLXSYPIDTVRXRXXMXSGXAVXYXSSLHXFQXIVXXXGAKSLXKGAGAXILRXVXGAGVLXGCDKXQXXXFXXKYGSXGGK

SEQ ID NO: 156187 - protein, 47 aa, Glycine max
  unsure (1)..(47): unsure at all Xaa locations
  Clone ID: PAT_MRT3847_112058C.1.pep
GXXRXHLXSCXQFRTGILXPDXSRXXSNEMDSKSCLLIFPHVNTHKL

SEQ ID NO: 156188 - protein, 63 aa, Glycine max
  Clone ID: PAT_MRT3847_112059C.1.pep
FFFFFFFFFFFFFFFFFFFFFKPIKFLTGSLEKKEPKLNPKFGPLGVKIPNYFSQPLKPVLKW

SEQ ID NO: 156189 - protein, 54 aa, Glycine max
  Clone ID: PAT_MRT3847_11205C.1.pep
TNIKTCCTRIYITTNRSPSLNRHKHNANLIEEPYLSNFKLRQLELVYPNLIIPT

SEQ ID NO: 156190 - protein, 168 aa, Glycine max
  Clone ID: PAT_MRT3847_112060C.1.pep
GIPVDPASVFSELKRKKRYKMKRVKIFILITLALTFVAFVPKIESQIMPPLIPFPPPSLHPLCLSQLALVSYACAMLPPTTTLPPSPLTPPPSPSSPGDDEGHGNDQSQGHHQTSQEENCCRWAREMDNQCVCEFLLLLPPFLTRPLHQYSISIGESCNVTYSCGGPI

SEQ ID NO: 156191 - protein, 185 aa, Glycine max
  Clone ID: PAT_MRT3847_112061C.1.pep
FITFHIVINSSYVSMKRQRDFKGFESIDLANCLMMLSHPQQNEKLLQKKIEAVEFECKTCNRKFSSFQALGGHRASHKRSKLEGDHELKAHAISLSLANKPKMHECSICGQEFSLGQALGGHMRRHRTTIHEDFSSIKQVITQMPVLKRSNSTRVVTCLDLNLTPLENDLKLLFGKMAPNAGAFA

SEQ ID NO: 156192 - protein, 160 aa, Glycine max
  Clone ID: PAT_MRT3847_112062C.1.pep
SLLNPAQFRRDCFSQYHDMKSTDPSELLGVLPTCHFGKFCSNKYLSVVHPKMEESLFGDLVQHSLVSEGNHPRTRFYKEFLGVAKGVWLLHLLAFSFDPLPSKFEASSGAEFHPRYMETVVKFAGGRVPPGTVVGFSVSPGFKFRNGSVVKARVYLMARN

SEQ ID NO: 156193 - protein, 82 aa, Glycine max
  Clone ID: PAT_MRT3847_112063C.1.pep
HSTCKAAAATISRKRGAGPSTNGVQAAAAETLDQTTEDSMEEKYVNTIWLVDIDACDKANSGHPVVPMGCATMGHIVYEEIM

SEQ ID NO: 156194 - protein, 129 aa, Glycine max
  unsure (1)..(129): unsure at all Xaa locations
  Clone ID: PAT_MRT3847_112064C.1.pep
RIPVPTFNTSSNRALKLQDCGDLILSDPNGLVIWQNFDYPTDTLLPGMNITRFNSLTYRRTQTDPTPGLYSVRLXSHRSWANSNSSLTTPICYWSTGXNWTDGTCLNIHEMSIPYLYSCHCLYPFSPAA

SEQ ID NO: 156195 - protein, 51 aa, Glycine max
  Clone ID: PAT_MRT3847_112065C.1.pep
LPEAIASGGCEKLKTKEMYNACVITCSMYRDANWLKLVALRKFGFTCSEVV

SEQ ID NO: 156196 - protein, 166 aa, Glycine max
  unsure (1)..(166): unsure at all Xaa locations
  Clone ID: PAT_MRT3847_112066C.1.pep
VKYEKAVDPQYLPTQSDVQKVLNGSMNSFRIYNVYPRYFRVTGSGDVRPLEEDNALSADLILNREQFEWWAFRDFNPSNLSGLCGGXDGQFLTSEVSRINYLGYRLYPRGRICKVEPCQMCRLIAICEDIYAARAEGELGIEEVLYWTLVKIYRSPHMLLEYTKPD

SEQ ID NO: 156197 - protein, 119 aa, Glycine max
  unsure (1)..(119): unsure at all Xaa locations
  Clone ID: PAT_MRT3847_112067C.1.pep
GRXXLTXRILAMPHXPXNRXGXXXERSYNSLXGXVXNPXKGLPARPFKVAFPXRKXRXLLGPGGXXXSFVPGILALDRLSDGVQSFPTSRVXGHCPXSVLTKXSAILKGEVGIIHRENG

SEQ ID NO: 156198 - protein, 99 aa, Glycine max
  Clone ID: PAT_MRT3847_112068C.1.pep
RAEDPKRLFEGNALIRRLVRVGVLDESRMKLDYVLALKVEDFLERRLQTCVYKLGLAKSIHHARVLIRQRHIRVGKQIVNVPSFIVRLDSQKHIDFSLT

SEQ ID NO: 156199 - protein, 43 aa, Glycine max
  Clone ID: PAT_MRT3847_112069C.1.pep
WKLIQVATTQWPINHNVQRQKRPYHTKLKFPQPPQKPGYGSEP

SEQ ID NO: 156200 - protein, 105 aa, Glycine max
  Clone ID: PAT_MRT3847_11206C.1.pep
NCGGFVFFRDWGKIFQWEPGFPMGDKWPVGITMLKLLTNKISNRTREFRPKGHPRESPQTPKGPKQHGKLKVQTSGGGTLPKLKTHQGKQKPAEAGAGGGAFVPI

SEQ ID NO: 156201 - protein, 103 aa, Glycine max
  unsure (1)..(103): unsure at all Xaa locations
  Clone ID: PAT_MRT3847_112070C.1.pep
LRTAQIPPYPXNPLIKQYSAEYWITGDLITPPQHRANSFTKRVLDPLLADVVFVPFFATLSANKGAFRKKHGNDDYKRQRQVMDAVKSTQVWNRSGGRDHVFV

SEQ ID NO: 156202 - protein, 36 aa, Glycine max
  Clone ID: PAT_MRT3847_112071C.1.pep
LPFESRYFHMSPFSGAMVALDTRVSPLVIFPGSRLG

SEQ ID NO: 156203 - protein, 132 aa, Glycine max
  unsure (1)..(132): unsure at all Xaa locations
  Clone ID: PAT_MRT3847_112072C.1.pep
NAPPPPGIKXFGGNMFXKVPQGAAIKLKGVCPNWSGEKCIEFLRNCPKPLSPNGKGIVVEFILPKKPEPPEKSQLVSPFDTPMFIPVGGREKTQNQNEPLGKLSGFSNFQVACGAFSSLGGMEFSKKLRILK

SEQ ID NO: 156204 - protein, 73 aa, Glycine max
  Clone ID: PAT_MRT3847_112073C.1.pep
FLSVLVYWQIRARVIYASRRNTARICGIQFSGYGSTIFKLVFPWLCWCDIFRPTILDCICNRIFTFQFFFRSC

SEQ ID NO: 156205 - protein, 86 aa, Glycine max
  Clone ID: PAT_MRT3847_112074C.1.pep
NSLCSSFKQGPVPLPTFSFLPLYPHPGCFWGKKLKGVVELKRKRFKGGFRTPRLSPSFLLLCHSQLPLWAFLGRDPNFTPGPFWVW

SEQ ID NO: 156206 - protein, 95 aa, Glycine max
  unsure (1)..(95): unsure at all Xaa locations
  Clone ID: PAT_MRT3847_112075C.1.pep
DVLTLVMHMHGKKYCDKGRECMGWSFYXCHLTITEYYQTYQIENLLFKRNSLRAHAGGLWDYHSVIAGVLLLEPQGLRSTGYHTMQMMEIAVFLG

SEQ ID NO: 156207 - protein, 228 aa, Glycine max
  Clone ID: PAT_MRT3847_112076C.1.pep
MGREKETTKVAYTVEQLVAFNPYNPDILPDLENYVNDQVSSQTYSLDANLCLLRLYQFEPEKMSSQIVARILVKALMAMPAPDFSLCLFLIPERQMEEQFKTLIVLSHYLETGRFRQFWDETAKSRHIVEAVPGFEQAIQGYAIHVLSLTYQRIPRTVLAEAINIEGLSLDKFLENQMANNGWVIEKSQGRAQLIVLPRNEFNDPALKKNAADSVPLEHITRIIKNFS

SEQ ID NO: 156208 - protein, 184 aa, Glycine max
  Clone ID: PAT_MRT3847_112077C.1.pep
MGREKETTKVAYAVEQLVAFNRYNPDILPDLENYVNDQVSSQTYSLDANLCLLRLYQFEPEKMSSQIVARILVKALMAMPAPDFSLCLFLIPERVQMEEQFKTLIVLSHYLETGRFRQFWDEAAKSRHIVEAVPGFEQAIQGYAIHVLSLTYQRIPRTVLAEVCLFCPFEALIHYLVEYCFISS

SEQ ID NO: 156209 - protein, 229 aa, Glycine max
  Clone ID: PAT_MRT3847_112078C.1.pep
MGREKETTKVAYTVEQLVAFNPYNPDILPDLENYVNDQVSSQTYSLDANLCLLRLYQFEPEKMSSQIVARILVKALMAMPAPDFSLCLFLIPERVQMEEQFKTLIVLSHYLETGRFRQFWDEAAKSRHIVEAVPGFEQAIQGYAIHVLSLTYQRIPRTVLAEAINIEGLSLDKFIEHQVANSGWVVEKSQGRGQLVVLPRTEFNDPALKKNAADSVPLEHITRIFPILS

SEQ ID NO: 156210 - protein, 301 aa, Glycine max
  Clone ID: PAT_MRT3847_112079C.1.pep
MSILFPRSSSAAKRKRVIRELVQGRDYATQLKFLLQKPIGPDGSVSAKELVANVLRSFAETLSVLTSSSEDSTSEDASQVESIDPRSEGSTESKKGSKDRRGSYKRRKTEQTWTIVAQTTDDNHAWRKYGQKEILNSQFPRSYFRCTRKFEQGCRATKQVQRIQENPDMYTITYIGFHTCKDTLKAPQMVTHSETWDSFLGPDANVPNEHYSIIGSQSQIVIQEYPNDETDPSDLTDANLWSDLKDFELSNDKPAGLKIAPENADSVYSCTGSRSLDMDFGIFSPHFCSTEDFHFDESQLL

SEQ ID NO: 156211 - protein, 86 aa, Glycine max
  Clone ID: PAT_MRT3847_11207C.1.pep
GCFYSIAIAIAHVWSCPPPWLGCIFPVRIFWRPPPFNEGIFGSPPNDIIRVKGLLILCPFTFLCPLVTNNDVYVAVGVNIKKCEKE

SEQ ID NO: 156212 - protein, 110 aa, Glycine max
  Clone ID: PAT_MRT3847_112080C.1.pep
MEGSDEGVERVVDSKDLQQQSKAFDKLTDRVEDRQLDSSRVQEAMASIAASSEADWQAMRKREKELAAVKINAADVDIIANELELDKKVAERTLREHKGDAVAAIRHLLR

SEQ ID NO: 156213 - protein, 147 aa, Glycine max
  unsure (1)..(147): unsure at all Xaa locations
  Clone ID: PAT_MRT3847_112081C.1.pep
GQISELVFYPAVDPLDSTSRMPSTILKXTDHYETARXVNKIRVLRTYLNYPSXIIAILGMDELSEDDKLTVARARKIMQFLGRPFHVAEVFTGATGKYVEVKESRNRLHGELDGTYDDTXEQTFNMVGGIEEAIAKAEKIAKESAAS

SEQ ID NO: 156214 - protein, 106 aa, Glycine max
  unsure (1)..(106): unsure at all Xaa locations
  Clone ID: PAT_MRT3847_112082C.1.pep
SRTPNSMKLLDRDLTPPYVGDFLMEVGAFRDAXHGLVLLAPNGNGTRLAQAHRIRFXFHKGPSKFTFIRMDGKPFNQPFPFDNIPLLVEIFFHGQFNMLATHDSKS

SEQ ID NO: 156215 - protein, 33 aa, Glycine max
  Clone ID: PAT_MRT3847_112083C.1.pep
LLFVKRGQASLALISFIYILVTGEDITPSELIS

SEQ ID NO: 156216 - protein, 130 aa, Glycine max
  unsure (1)..(130): unsure at all Xaa locations
  Clone ID: PAT_MRT3847_112084C.1.pep
XRSVAHENGFAAVIMRSDTHTGSRGRSSFVLIGCERNGQYKCRNKXXVIRAIGSRKYGCPFKLRGKPVIGGQGWMMKLICGIHNHELAKSLVEHPYAGRLTKDEKTIIVDITKSMVKPRNILLILKEHNV

SEQ ID NO: 156217 - protein, 86 aa, Glycine max
  Clone ID: PAT_MRT3847_112085C.1.pep
NAVGIRVRKPCGTENGAQFQHRGPATTRLTPRENRTPQRERPGRHQAAGPGSIFRRPPAFLFFCSALFFFFFFFFFFFFFFFFYVI

SEQ ID NO: 156218 - protein, 215 aa, Glycine max
  Clone ID: PAT_MRT3847_112086C.1.pep
MEIEEQTMKMMMKSSSRFRRICVFCGTSPGKNPSYQLAAIQLAKQLVERNIDLVYGGGSIGLIGLISQVVFDGGRHVLGVIPTTLMPREITGESVGEVRAVSGMHQRKAEMARQADAFIALPGGYGTLEELLEVITWAQLGIHDKPVGLLNVDGYYNSLLSSHASAVDEGFITPAARHIIVSAQTAQDLMCKLEEYVPKHCGVAPKQSWEMNQQL

SEQ ID NO: 156219 - protein, 79 aa, Glycine max
  unsure (1)..(79): unsure at all Xaa locations
  Clone ID: PAT_MRT3847_112087C.1.pep
LELVHGATTLFKVSREHRGRGRAGRSXAAILYRSTSYWDEYVWGGAXXFFCYGRTLYLKFATASELVKHAGAFWGGPDY

SEQ ID NO: 156220 - protein, 84 aa, Glycine max
  unsure (1)..(84): unsure at all Xaa locations
  Clone ID: PAT_MRT3847_112088C.1.pep
KKKKKKKKKRGGHELKKGFIKKKKKXGAKKKNWAPKGKNPSKKREKSPPPQKKKKKKKLKTLKQGNRKANRRWEKAPCFQKKKN

SEQ ID NO: 156221 - protein, 76 aa, Glycine max
  Clone ID: PAT_MRT3847_112089C.1.pep
IYFGAEQLFFVSFPRGKTKVGNTEKKSVDFKFEFFVLNKSSVYFQPVDSLGQSGKKIIFVANLLCKRGVFLAMKLP

SEQ ID NO: 156222 - protein, 29 aa, Glycine max
  Clone ID: PAT_MRT3847_11208C.1.pep
ILTTFNSYLNAEFVYEMKQSSLSFLTIKY

SEQ ID NO: 156223 - protein, 83 aa, Glycine max
  Clone ID: PAT_MRT3847_112090C.1.pep
TSLVFRSGWVRMSAVNSSQRLTHGKCNYFALCDNYPFIYGRALFILRFKIFHTEISKFMSNVLDNAHGTCSRPFVALIFEQVM

SEQ ID NO: 156224 - protein, 76 aa, Glycine max
  unsure (1)..(76): unsure at all Xaa locations
  Clone ID: PAT_MRT3847_112091C.1.pep
MSLRNNRVMLKVCLMLLLLVGDTAALMKLSLFKSDHSSSYDDDEYSKPCCDLCMCPHXMPTQCSCDNIRLNSCHSD

SEQ ID NO: 156225 - protein, 63 aa, Glycine max
  unsure (1)..(63): unsure at all Xaa locations
  Clone ID: PAT_MRT3847_112092C.1.pep
CKPWLIQNVPDXYPDLLKXEKEADKVXDKLQSTXISGAGDGAASSAPKQXEVKXLPGGXIPDG

SEQ ID NO: 156226 - protein, 49 aa, Glycine max
  Clone ID: PAT_MRT3847_112093C.1.pep
CSSMYSLSYPMRSLLAHPIIQSYSTSRKIHNEDAAYDIKQSELLEVKAM

SEQ ID NO: 156227 - protein, 64 aa, Glycine max
  Clone ID: PAT_MRT3847_112094C.1.pep
LIIFFWEQLNGSDLMANQNKTLALASVQQHKHIIQTLHSIFFYKSWPRIICISCFLFAFILTFW

SEQ ID NO: 156228 - protein, 178 aa, Glycine max
  Clone ID: PAT_MRT3847_112095C.1.pep
MLSQNPNPTTMDMIPGKIRKRGCSSSASSSSSVLHNYRFKRTILVGKRGGSSTPVPTWKLMSSRSPLRALASPKYPPSQTGNKPRQAPVSARKLAATLWEMNEIPSPSPSVRSKKELRTRERVPRSMRSGSLPPHLSDPSHSPVSERLDRSGTWESPEKRTPPFSHRARDHWNTMVGP

SEQ ID NO: 156229 - protein, 117 aa, Glycine max
  Clone ID: PAT_MRT3847_112096C.1.pep
GAMWVFLYKGLLPFTLGRWADIFTMPLVFARLFEQNLSTGPTLCVRPPHNKGFFFLAESPARAPPPFIHHMEKFFLFSHRFPLPFCNKSLCFYHHLCDIKKNINNILDQSKNKKNDS

SEQ ID NO: 156230 - protein, 47 aa, Glycine max
  Clone ID: PAT_MRT3847_112097C.1.pep
QCDILNSCLPFRCTSEIFYCGGDSVIPCRCIRSISHIGHIQYSGCNY

SEQ ID NO: 156231 - protein, 52 aa, Glycine max
  Clone ID: PAT_MRT3847_112098C.1.pep
HSLLFLLLVSFCSKVSGQFDLQVHKAVDACKNVLRGLHSNKITERELDRVSY

SEQ ID NO: 156232 - protein, 58 aa, Glycine max
  unsure (1)..(58): unsure at all Xaa locations
  Clone ID: PAT_MRT3847_112099C.1.pep
IIHVLLNPNYDLSNSKFDLILPIEPLSGGGGDFHSKFXLHRTLYNMIFLPLDVRWSRV

SEQ ID NO: 156233 - protein, 73 aa, Glycine max
  Clone ID: PAT_MRT3847_11209C.1.pep
KVQRASNKQVTLGLQRSLKRDTAYLNPVRPGLQLIKGIVYIGKLTNGRNAVFPKVSNNASSIRNMKKDHTKIL

SEQ ID NO: 156234 - protein, 85 aa, Glycine max
  Clone ID: PAT_MRT3847_1120C.1.pep
YPHKVNNWKNILNRGMAKFLFPRVNFYRGRQKRGKGEILLWGHLESPQKNLRGVAPTQLGVPIKHVIGTPRKVPQKNYEPPPNQR

SEQ ID NO: 156235 - protein, 100 aa, Glycine max
  unsure (1)..(100): unsure at all Xaa locations
  Clone ID: PAT_MRT3847_112100C.1.pep
KSEGRLLDTKQXTSKRGELKNSPRXGHEKXMRERTHQAAGWRPRTAXCKKEVRRDESGNPSGKPHRAVSNSKQNEMLIRNSDEKALRQAKAPSENRQSCK

SEQ ID NO: 156236 - protein, 231 aa, Glycine max
  Clone ID: PAT_MRT3847_112101C.1.pep
MKLSSPGFSPPPQEGEKRVLDSELWHACAGPLVSLPAVGSRVVYFPQGHSEQVAVSTNREVDGHIPNYPSLPPQLICQLHNLTMHADTETDEVYAQMTLQPLNPQEQKGAYLPAELGTPSKQPTNYFCKILTASDTSTHGGFSVPRRAAEKVFPPLDFSQQPPCQELIARDLHGNEWKFRHIFRGQPKRHLLTTGWSVFVSAKRLVAGDSVLVIWNEKNQLLLGIRRANRP

SEQ ID NO: 156237 - protein, 437 aa, Glycine max
  Clone ID: PAT_MRT3847_112102C.1.pep
MVSDSCPPLKEPESDKKWEEKGPPRNAKWWYSTFHAVTAMIGAGVLSLPYAMAYLGWVPGTLILLMSWCLTLNSMWQMIQLHECVPGTRFDRYIDLGRHAFGPKLGPWIVLPQQLIVQVGCDIVYMVTGGKCLKKFMEIACTNCTQIKQSYWILIFGGIHFFLSQLPNFNSVAGVSLAAAVMSLSYSTISWVACLARGRVENVSYAYKKTTSTDLMFRIFNALGQISFAFAGHAVALEIQATIPSTPEKPSKIPMWKGAIGAYVINAICYFPVALVGYWAFGRDVEDNVLMEFERPAWLIASANLMVFIHVVGSYQVYAMPVFDLIESMMVKRFKFPPGVALRLVARSAYVAFTLFVGVTFPFFGDLLGFFGGFGFAPTSYFLPSIMWLIIKKPKRFSTNWFINWISIYIGVCIMLASTIGGLRNIATDASTYKFYT

SEQ ID NO: 156238 - protein, 61 aa, Glycine max
  Clone ID: PAT_MRT3847_112103C.1.pep
NIVGNMHFQGTDIFMSCLNFNKMMRCCFLMHDIGNGDGSNVIIRLLTSTHTCFYHILTPII

SEQ ID NO: 156239 - protein, 101 aa, Glycine max
  unsure (1)..(101): unsure at all Xaa locations
  Clone ID: PAT_MRT3847_112104C.1.pep
TRPYGCEKTTEGDEDDDDYYEYYRXDYAEGGAVGSKHIIYEKKSLKALLKLGLYPVTGVCRITIMITXNILLFISKPNVFKRPNSXPYVIFGEGTFHVLNF

SEQ ID NO: 156240 - protein, 50 aa, Glycine max
  Clone ID: PAT_MRT3847_112105C.1.pep
IRVVKNTRICQDCHTAAKYISLARNREIFLRDGGRFHHFMNGECSCNDRW

SEQ ID NO: 156241 - protein, 81 aa, Glycine max
  Clone ID: PAT_MRT3847_112106C.1.pep
FSNGVRAPYSIGGVLDNISDSIVAVQTVKGFPCLGFLGANQSDPGWLVDPRKKGVKFLQRGVPPVFAALEALKAKPKFPGK

SEQ ID NO: 156242 - protein, 67 aa, Glycine max
  Clone ID: PAT_MRT3847_112107C.1.pep
TSALSYIFNLLTIHTNQMDTPTAPLTVQTPTYYLLNRPCFMSPIVHLSAYSLINTFDHTKSAHNSGL

SEQ ID NO: 156243 - protein, 333 aa, Glycine max
  Clone ID: PAT_MRT3847_112108C.1.pep
MIQNADMRLESGTCNVCSAACSSCMHPNRALMGSKAEEFSDENCRLGEVNQYCDESDRSSLGSRACERLKHGVSETSHKPSVSSTHDSLSENAENSQALSEKYQDSKCLESLDDSTSCISRTSNANLASSCHQINTDRINISCSSTSVSHLVAEGSGNGPTVDISSLSECCMENVDSSLTKERVPIIVPGEKSLADKENLNNGTAKVSIEICPKSEEDTENNVDVAEDDDHKYSAHDGLHEKVEELIKSSGRAEPQSEDESDESDVVEHDVKVCDICGDAGREDLLAICSRCSDGAEHIYCMREMLEKVPEGDWLCEECKCAEETANRKLDIE

SEQ ID NO: 156244 - protein, 71 aa, Glycine max
  Clone ID: PAT_MRT3847_112109C.1.pep
CFFVKKNLIFLAGHSGVGFLLKKGVKRYRGGITFPALVGALLLFLQMLSWNFVGFSAKNLYEIHPSIFFLG

SEQ ID NO: 156245 - protein, 95 aa, Glycine max
  Clone ID: PAT_MRT3847_11210C.1.pep
TWTALIRAYGYNELYQDAVNLFDQMRYSPNHFTFEAILSICDKAGFVDDACRIFNSMPRYKIEAFKEHFAIMVRLLTHNGQLEKAQRFEQMSSFL

SEQ ID NO: 156246 - protein, 218 aa, Glycine max
  unsure (1)..(218): unsure at all Xaa locations
  Clone ID: PAT_MRT3847_112110C.1.pep
MVKKPKKWPITSDDLSQVECHGSLIEKNRIESDVGGSPRRRHSISGSNYSEEEVSLSKRRQSDCFVCSKEMEKESVPLSVQQSGLEIVQRPQYFSNCQEANKLLVSSDVEKRALRIPNPPPRPSCSISIKTKQETSAQVPLPPPXPSPPPPMNFASRSNMASVKRAPQVVELYHSLMKRDSRKDSSNGGLSDAPDVSDVRSSMIGEIENRSSHLLAIK

SEQ ID NO: 156247 - protein, 117 aa, Glycine max
  Clone ID: PAT_MRT3847_112111C.1.pep
VVKACKIGFIKSLCSLSLLLEDSQSRGRLTRSFTFPFPPKSLIQTCPWCSDIFNMKFTSLIHNLYNIRCSWKGVLCHYGCWAILNGVCLINLYIFETNIYKKDGCNFKFYAFIGLKL

SEQ ID NO: 156248 - protein, 114 aa, Glycine max
  unsure (1)..(114): unsure at all Xaa locations
  Clone ID: PAT_MRT3847_112112C.1.pep
LTAQNPSSDQENKDRYKLNATLGRHEFGTTYLHSGLGTEEELSGKQGSRNTLFTEIDILDLLEGGGDYSHLALXANITNWTDTCFDCDDSDLAIDLWEGRQVLDRIVARGHYRG

SEQ ID NO: 156249 - protein, 79 aa, Glycine max
  Clone ID: PAT_MRT3847_112113C.1.pep
YSANKENMVPLQVYRGFIWAIVKSQFSLTEKKIFFVDKNEKKRALMGQGVGGIVCGLPVSRFNQHGWATMWVLMAFMQK

SEQ ID NO: 156250 - protein, 482 aa, Glycine max
  unsure (1)..(482): unsure at all Xaa locations
  Clone ID: PAT_MRT3847_112114C.1.pep
MGQKQRSSSDADNEVKKRRRVGFSGVDSGVEAKDCITIYLVSSKEEFDAPESFVIHPVDLNSFFDDDGKIYGYEGLKITIWVSSISFYAYADITFQSSSDRGKGVTDLKSALQTIFAETLVDSKDEFLQKYLADNDFVRTNISNGCGRRQKGMXEALKHKAFQGNISDYNPHTDSSTSTVEVVRLVAGNMTTGQLYSHLIPLTLLLVDGSRPIDVSDSQWELYVLCQKKTDPHXGIQCRLIGFTAVYRFYHYPDDSRLRHVXILVLPPYKHKCYGRFLLQVLIEGAISENVFDFTQEDXLNHATHVRTCVDSVRMLQFYPIQNIVTXAVSLVKQVQLAADAMGTGQLYTHIIPLDVRKSWKINKQQFFQCWEVLIYIGLNPVDKNTENFVSIILNRVKYDILGKDSGTSGKQLIEVPSDVDQEMSFVMFRSEANEASSVQMDDNQANQEEQLQRLVQERVKEIQLIAEKVTLHLGSSGVVVN

SEQ ID NO: 156251 - protein, 150 aa, Glycine max
  Clone ID: PAT_MRT3847_112115C.1.pep
NRHCAHCILSDTIYQQSPLSVRILHKPPHYDGSLSLQSKLLRADTISVPSTPSCAFHRTPRTASICLQPDLRVRPKTHSFSPRTCWLPSRRRRRRVELMTVASWPLMHITRSLVRPDDGVVRRADRAITVLWRRRCRVSLVPSPSFALVG

SEQ ID NO: 156252 - protein, 80 aa, Glycine max
  Clone ID: PAT_MRT3847_112116C.1.pep
SINLILPQCGLYVVTGVLLDATCGSLVREALVLHKLHNEYFLELMCWFIYFSIHILCNIIFSNNMMDALSLAVERIVDWR

SEQ ID NO: 156253 - protein, 107 aa, Glycine max
  Clone ID: PAT_MRT3847_112117C.1.pep
MTIHTDPSATYRCKNCQNPVAFRAELLSKNYLAKTGRAFMFSHARNIVLGPKQERSLMTGVYTIAGIFCSNCGEELGWKYLQAYEARQKFKEGKFIIETAKIAKDYY

SEQ ID NO: 156254 - protein, 61 aa, Glycine max
  unsure (1)..(61): unsure at all Xaa locations
  Clone ID: PAT_MRT3847_112118C.1.pep
QDAPCAANGSGEGGTSAREAGGRTEHAEAGEPSHYPKRDGSDQAGSTQRXTNLRFPGTTRG

SEQ ID NO: 156255 - protein, 76 aa, Glycine max
  Clone ID: PAT_MRT3847_112119C.1.pep
NFHTISRTSQSSRAFHPKTEALRKRGVKRPKHIYPWFHHILSFIVFCFCFNSQVSVMVEYGGYSGVGAEADGHLRY

SEQ ID NO: 156256 - protein, 63 aa, Glycine max
  Clone ID: PAT_MRT3847_11211C.1.pep
QFVFLARQTLHCPKRCVSSTSIISSTKAISFTFFPNIISNPFLYPISNYTEQPGSGTHSLPIS

SEQ ID NO: 156257 - protein, 194 aa, Glycine max
  unsure (1)..(194): unsure at all Xaa locations
  Clone ID: PAT_MRT3847_112120C.1.pep
TKKLPMAPHASSFALVLVIFLFVEMHFHGATADYGGWQGGHATFYGGGDASGTMGGACGYGNLYSQGYGTNTAALSTALFNNGLSCGACYEMXRCDDDPRWCKPGTIVVTATNFCPPNFALANNNGGWCNPPLQHFDMAEPAFLQIAQYRAGIVPVAFRRVPCVKKGGIRFTINGHSYXQPVXITNVAGAGDVH

SEQ ID NO: 156258 - protein, 51 aa, Glycine max
  Clone ID: PAT_MRT3847_112121C.1.pep
DHIKPDTSTPQGAPRPKDCHLDTTAMKLMGFLVLTPFEEGIKRSLEKWVVK

SEQ ID NO: 156259 - protein, 64 aa, Glycine max
  Clone ID: PAT_MRT3847_112122C.1.pep
DRANSSKRPLGDTNEEADSYNWTSDCTGNDTDLLRGASLGITDKPKTAPEIKLVEERPYPQYFP

SEQ ID NO: 156260 - protein, 60 aa, Glycine max
  Clone ID: PAT_MRT3847_112123C.1.pep
ENKATPIKPKHVLFLGKGLSFTISFHNLKWFPGVSPLLFGGLLRMVYVKEPLFFLSLKKF

SEQ ID NO: 156261 - protein, 126 aa, Glycine max
  unsure (1)..(126): unsure at all Xaa locations
  Clone ID: PAT_MRT3847_112124C.1.pep
MSAHLQWMVVRNCSSFLIKRNKQTYSTEPNNLKARNSFRYNGLIHRKTVGVEPAADGKGVVVVMKRRSGQRKPATSYVRTTINKNARATLSSIRHMIRKNKYXPDLRMAAIXRASAILRSQKPVXV

SEQ ID NO: 156262 - protein, 52 aa, Glycine max
  Clone ID: PAT_MRT3847_112125C.1.pep
QFPIRPTRHATRHALRTRQQTTGRGSYTHKSGTWAMILRPGSSQTTHTATHN

SEQ ID NO: 156263 - protein, 65 aa, Glycine max
  unsure (1)..(65): unsure at all Xaa locations
  Clone ID: PAT_MRT3847_112126C.1.pep
FSINFDQLKISVFEYVCSTSIYFMQLSYXSHVHTSLDLTYKLIGRYKVDWMVKRERKRXKDLMLN

SEQ ID NO: 156264 - protein, 59 aa, Glycine max
  Clone ID: PAT_MRT3847_112127C.1.pep
LKKSPSTRKVEYPYCEPPGPKVPMVIPLGVVRIFFSVQSCFKSLFFCRLFSVFLVYLHL

SEQ ID NO: 156265 - protein, 129 aa, Glycine max
  Clone ID: PAT_MRT3847_112128C.1.pep
MASAASGFVLSLNVAAATTNSRVVMFNTKNNASRLVVRASDEPAAAAPATATPPAEAEAKPKPPPIGPKRGAKVKILRKESYWYKGTGSVVAVDQDPNTRYPVVVRFNKVNYANVSTNNYALDEIVEVE

SEQ ID NO: 156266 - protein, 129 aa, Glycine max
  Clone ID: PAT_MRT3847_112129C.1.pep
MASAASGFVLSLNVAASTTNSRVVLFNTKNNASRLLVRASDEPAAAAPATATPPAEAEAKPKPPPIGPKRGAKVKILRKESYWYKGTGSVVAVDQDPNTRYPVVVRFNKVNYANVSTNNYALDEIVEVE

SEQ ID NO: 156267 - protein, 71 aa, Glycine max
  Clone ID: PAT_MRT3847_11212C.1.pep
EDHDQAKDILEVGLTTPSSHVVVEASNVGLSQVLLYRSSHPTRKLLSQSDRTSLFQVRNESPTQLYDVNIL

SEQ ID NO: 156268 - protein, 70 aa, Glycine max
  unsure (1)..(70): unsure at all Xaa locations
  Clone ID: PAT_MRT3847_112130C.1.pep
RGEYEXCPXXTTNIVRIMMWGKSVTVVERKKVSTFDKGVISREWSSEREEEAYCISWCVNHLGTNILMVK

SEQ ID NO: 156269 - protein, 245 aa, Glycine max
  unsure (1)..(245): unsure at all Xaa locations
  Clone ID: PAT_MRT3847_112131C.1.pep
SQLEPAWEDMNLWYQVQRQTKVLTIMKQKGLSSKYLPQLSASGRIIHPGHCRRPSSGGNCDHPWCGTPILVTSPVGETVAEMVRTGQFGSDEAIRCCHDCLSALSTVASAGIRHGDIRPENVICVKSGVRHPYFVLIGWGHAILEDRDRPAMNLHFSSTYALQEGKLCSASDAESLVYMLYYSCGGXXPDLNSVEGALQWRETSWSTRLIQQKXLGDIFTVLKAFADYVDSLCGTPYPMDYDIWL

SEQ ID NO: 156270 - protein, 75 aa, Glycine max
  Clone ID: PAT_MRT3847_112132C.1.pep
LLVSERFKCRNQVSGADLPHHCSPKVSNNSEACSLTARGNDIDQQFGEVEIPLRLSEYEQKPHKNQRQDQSWPRA

SEQ ID NO: 156271 - protein, 63 aa, Glycine max
  Clone ID: PAT_MRT3847_112133C.1.pep
SASANFICLATSLRIGYYWYSILCHSCRGDLTQSGYSLFHSRCESFRIWCFSRSYCLSNSPLT

SEQ ID NO: 156272 - protein, 201 aa, Glycine max
  Clone ID: PAT_MRT3847_112134C.1.pep
GRKLASTHRIVVLTTPTRRGEDWSAALISCPEFEYNGQKFLGPCSPKDLAAYERRLMQDPIFMLGRPKEMPAHWKEYNVYIDDVSESRSDYEKVVKWEGAVPTLRKVLEWFLGRYGSHKRPVPEEKKNEPEVPQKVQQLPLGVVPAVVPQWPAEEKKSAPIVVSPPPSKPKGVMKVKRQPAPPVEKEISVQGEVTLDEYGW

SEQ ID NO: 156273 - protein, 279 aa, Glycine max
  Clone ID: PAT_MRT3847_112135C.1.pep
MNGGAEASVNHRRRHQAASANGVKIANGAMAKPSSTLCYDASFMKWTVADAVHVATHHWMPCLFALGLLFFMAVEYTLLMVPPSSPPFDLGFIATRSLHALLESSPNLNTLFAGLNTVFVGMQTSYILWTWLIEGRPRATISALFMFTCRGILGYSTQLPLPQGFLGSGVDFPVGNVSFFLFFSGHVAGSVIASLDMRRMQRWELAWTFDVLNVLQAVRLLGTRGHYTIDLAVGVGAGILFDSLAGKYEDSKRNAALSTTHRAQFDCVNNVDIAKKINK

SEQ ID NO: 156274 - protein, 529 aa, Glycine max
  Clone ID: PAT_MRT3847_112136C.1.pep
MTQSRKPRKPNPQAREAQESPSSSFSSSGMKLIVPLQGVVQGGGGLLLGTLVPCTLFYFLQLYLKRRRSNFSPPSPSSSESTLPRTSSRSNLSTRGSISRVRVSKLATSISKPDESLYYVGLERVSRDPYDALENPNGIIQLGLSDNKLCLDLIGEWVARNLEGSISGGVGLGINGIVPYQSFDGVMELKMALSDFMHQVMGGSVKFDPSNMVLTAGATPAIEILSFCLADHGNAFLVPTPYYPGFDRDVRWRPGVDLIPVHCRSTDNFDLNITALEQAFSQARKRGVKVRGILISNPSNPVGNMMTQDMLYSLLDFAEEKNIHIIADEVFAGSTYGSEKFVSVAEILDSDYIDKSRVHIIYGLSKDLSLAGFRVGVICSFNESVLAAAKKLSRFSSISAPTQRLVTSMLSDKRFIREYFETNQKRIRQVHDEFVGCLSKLGIKCAKSSAGMYCWVDMSGLIRPYSEKGEIELWEKFLSVAKINITPGSACHCIEPGWFRICFTTITLEEIPLVIDRIRRVVESCNFSS

SEQ ID NO: 156275 - protein, 282 aa, Glycine max
  unsure (1)..(282): unsure at all Xaa locations
  Clone ID: PAT_MRT3847_112137C.1.pep
MGRGKIVIRRIDNSTSRQVTFSKRRNGLLKKAKELAILCDAEVGVMIFSSTGKLYDFASSSMKSVMDRYSKSKEEPCQLGSSASEIKFWQREAAMLRQQLHNLQESHRRKMMGEELSGLTVKELQNLENQLEISLHGVRMKKDQLLMGEIQELNRKGNLIHQENVELYKKVYGTQDDNETNRDSVLTNGLGIGEDLQXACESPAKPATATTLQGTFRNYKIGIAIALIHLQDVCFTIAIKKNGLRFKPQCLRINVAYRPQTNWLKDFNLKLLEKVKATLACM

SEQ ID NO: 156276 - protein, 111 aa, Glycine max
  unsure (1)..(111): unsure at all Xaa locations
  Clone ID: PAT_MRT3847_112138C.1.pep
QKREAQPPGPAGGGPRPPKAGAVPPQAGSGGTPKPGKRXGSPRAREAXQRSQATRGQXKRQKPRPGPKGQEPQKRQKQRKVXXGGQKSGFXSPRHXAGQGAKQGPQRGKAA

SEQ ID NO: 156277 - protein, 50 aa, Glycine max
  Clone ID: PAT_MRT3847_112139C.1.pep
TYREIDEEISMCSIASGFVLTLNVASSTTNSLVVLFNTNNNSYILLVRAS

SEQ ID NO: 156278 - protein, 282 aa, Glycine max
  Clone ID: PAT_MRT3847_11213C.1.pep
MDGDNGLNIRNWGYYEPATSFKSHLGLQLMSSMPEKPLIGGRNAAVLAGTNGAFHHRDIGGMPQATYPMEYMRDAWISQRDKYMNMIPTNHNYGGIPETSSAHQIQMIQAPELPKEEKPVEEAPVVEKANGTRKKRQGPKVPKSPKAKKPKRGPRAPKDENAPSVQRARVPKKTTEIVINGIDMDISSIPVPVCSCTGVPQQCYKWGSGGWQSACCTTGMSVYPLPMSTKRRGARIAGRKMSIGAFKKVLEKLAAEGYNFSNPIDLRTYWAKHGTNKFVTIR

SEQ ID NO: 156279 - protein, 50 aa, Glycine max
  Clone ID: PAT_MRT3847_112140C.1.pep
LFTSNRCLCLGLSMFVYSVRLTALSIASPHNNYGTVDSSEAPSGACTNTK

SEQ ID NO: 156280 - protein, 50 aa, Glycine max
  Clone ID: PAT_MRT3847_112141C.1.pep
GLHKQTIVNWERTFQITHYLRTAKAKCVYIKGVFLNILLTIFLCFKETCE

SEQ ID NO: 156281 - protein, 84 aa, Glycine max
  Clone ID: PAT_MRT3847_112142C.1.pep
RAGNHGGSSYEETDSIALFIGPKTHASGHSSSNHDTILQVDIAPTIALLLGVPIPKNNMGVWIPQMVDSLTDDQNLRALQLNSW

SEQ ID NO: 156282 - protein, 88 aa, Glycine max
  Clone ID: PAT_MRT3847_112143C.1.pep
SCKRLLVSWIKRRDIILKDKFIYFCEIYILIQKLLKRQTYSSKCLLQYSRQPIYFFRLEEGCRQKPSSSSATPKYQKNSIINKKYIVK

SEQ ID NO: 156283 - protein, 78 aa, Glycine max
  Clone ID: PAT_MRT3847_112144C.1.pep
AIQPVHQKHVLRVLVQRLYLTILSRYRDSYTTEDKLTGSVSKLPLNIGNALIQIRSLLLVEPEPQATVTPFTLYDLSP

SEQ ID NO: 156284 - protein, 62 aa, Glycine max
  Clone ID: PAT_MRT3847_112145C.1.pep
MDAIDSVFDPLREFAKDSVRLVKRCHKPDRKEFSKVHMRTPIDFQSSMRFIGFFVNFIFDLL

SEQ ID NO: 156285 - protein, 44 aa, Glycine max
  Clone ID: PAT_MRT3847_112146C.1.pep
NTMVNGCFLMESLSTKNIKHLKEEGLPLKAAPDLVSKDMGELLK

SEQ ID NO: 156286 - protein, 182 aa, Glycine max
  unsure (1)..(182): unsure at all Xaa locations
  Clone ID: PAT_MRT3847_112147C.1.pep
MGGWLYWYLGILIHTLQFSCSVRTVHGLIPQSPIQCSSSGCTLRNSYGAWGDRKDCSALNVTYPTTEEQLRSAVSYAVRNNLKVKVVTRFSHTIPKLSCPHENNNNNINSSTATLLISTEKYDSRIEIDAARMTATVDAGVGLRQLINAVEEAGFSLVAAPYWKGVTVAXLISTGAHGSSWW

SEQ ID NO: 156287 - protein, 57 aa, Glycine max
  Clone ID: PAT_MRT3847_112148C.1.pep
ALAFYRTQLALMEENIYQGIFSLNYVTQVTSANILRCFPKEANSRKMKPLQLVHTWH

SEQ ID NO: 156288 - protein, 172 aa, Glycine max
  Clone ID: PAT_MRT3847_112149C.1.pep
MAALALALLLLAFTGTSSATWCVCKDGSDAILQKTLDYACGAGADCNPLHLNGPCFQPNTVRAHCNYAVNSYFQKKGQAQGSCEFAGTATVTASDPSSSGTCVYPSSVSAAGTGTTPVTTTPTMGTTPTTGTPSTSTGHGHRHRHRHHSIQHNTWSIRRHWQWHGTFRIRHE

SEQ ID NO: 156289 - protein, 175 aa, Glycine max
  Clone ID: PAT_MRT3847_11214C.1.pep
MDGDNGLNIRNWGYYEPATSFKSHLGLQLMSSLPEKPLIGGRNAVVLAGTDGAFHHRDIGGMPQATYPIEYMRDTWISQRDKYMNMIPTNHNYGGIPETSSAHQIQMIQAPELPKEEKPVEEAPVVKKANGTRKKRQGPKVPKSPKAKKPKRVPRAPKDENAPAVQRARVPKKTT

SEQ ID NO: 156290 - protein, 98 aa, Glycine max
  Clone ID: PAT_MRT3847_112150C.1.pep
KLILDSLRTPTVVEVQGDKLRRCNEWMKWLPSAQLRANSGSISPSGSSSNNLAADFEKITVDEAISHKVNTEPTTNEDAAGESSTQSQVPNDATVSSN

SEQ ID NO: 156291 - protein, 69 aa, Glycine max
  unsure (1)..(69): unsure at all Xaa locations
  Clone ID: PAT_MRT3847_112151C.1.pep
NFFKLHLAPLVYGFLPIFGLPXPVIMAFGLILFPWGGLGFLNLCWGSPPSGLRFSAGGSIAPPPFCGSD

SEQ ID NO: 156292 - protein, 34 aa, Glycine max
  Clone ID: PAT_MRT3847_112152C.1.pep
NMTWNHMLGIVSASTICSETNTLTLTSIYLNSPD

SEQ ID NO: 156293 - protein, 127 aa, Glycine max
  Clone ID: PAT_MRT3847_112153C.1.pep
TRVRHTVRCDLLNLKNQKGASLPPKWAPAGNQPQNIFCKTLTAGAPTPHGGFFWPCRPVEKGFPPWDFFKKPPVQKLIAGNLLWIEGKFKLIFRGQPKGHLLTTGWRVFVRAKKLVAGDSGLLIWNE

SEQ ID NO: 156294 - protein, 82 aa, Glycine max
  Clone ID: PAT_MRT3847_112154C.1.pep
NTVGGLLNATCGNATELIIAIFALSNNKIAVVKYSLLGSIISNLLLVLGTSLFCCGIANIRKEQKYDRRQADINLLMLFVAL

SEQ ID NO: 156295 - protein, 56 aa, Glycine max
  Clone ID: PAT_MRT3847_112155C.1.pep
TMNTTNNKICYNKIVHVYHLVGYLVLQLCSSSICSSFHYKYCTKVCGAKPYSQIVY

SEQ ID NO: 156296 - protein, 120 aa, Glycine max
  Clone ID: PAT_MRT3847_112156C.1.pep
MVDKAKGLKEEVVTLEYTINLHIRLHGCTFNKNATKAIKEIRMSAHTAMVTNDVRVDVKLNKAVLILRIRFVPRRITVRIVRKRNDHYDATEELYSLDTVVEIPEEELKCCGTNVIDDAH

SEQ ID NO: 156297 - protein, 103 aa, Glycine max
  unsure (1)..(103): unsure at all Xaa locations
  Clone ID: PAT_MRT3847_112157C.1.pep
MQIFMKTLAEKTMTLKVTSKDAIAIVKAIIHDKEGITADQKXMTMAEQQLERWNGPACRSQLILLNETLNLILLLFGVIDQPSLMAMARRSXRDKMICRTCML

SEQ ID NO: 156298 - protein, 64 aa, Glycine max
  Clone ID: PAT_MRT3847_112158C.1.pep
FHDLLLCCFIFAFIVTGLMTHHHGASSTALSWISTLLQGSMRDRPAAHLTFIYKSPSMAFTPSC

SEQ ID NO: 156299 - protein, 311 aa, Glycine max
  unsure (1)..(311): unsure at all Xaa locations
  Clone ID: PAT_MRT3847_112159C.1.pep
MDRIEISICQQKNLMSHRDSDSKRRNXKFDREPSPKRYKRDDKQERERDRNTATSNGGDQGNPPHHFTREPFDAAPKKSNSNDHHEQQPKHSSQPPRSRSYHQHDERGSTGQVGRSNGQREAGGKVFTQSKENNESQSREQRDEKSPVKLDDSLQKRDGFTARKDDPPTMRKRRAFREKKIPADSADANPASIVEVKPSHTDHPPERNERKDERSSNPHHLDRPEKQNAEGRAPNKIEARRDGFSSRARYGGSGGNNNYRGRDKINGRQGYRPIKMRMEKWKHDLYQEVNKDPIPKNEDDQIAKLEALLAS

SEQ ID NO: 156300 - protein, 307 aa, Glycine max
  unsure (1)..(307): unsure at all Xaa locations
  Clone ID: PAT_MRT3847_11215C.1.pep
MVIMVLTYVMEVALMPLRRSVAVVVDGVNGLNIRNWGYYEPATSFKSHLGLQLMSSMPEKPLIGGRNAAVLAGTNGAFHHRDIGGMPQATYPMEYMRDAWISQRDKYMNMIPTNHNXYGGIPETSSAHQIQMIQAPELPKEEKPVEEAPVIEKENGTRKKRQSSKVPKSPKAKKPKRGPRAPKDESAPAVQRARIPKKTTEIVINGIDMDISSIPIPVCSCTGAPQQCYKWGSGGWQSACCTTGMSVYPLPMSTKRRGARIAGRKMSIGAFKKVLEKLAAEGYNFSNPIDLRTYWAKHGTNKFVTIR

SEQ ID NO: 156301 - protein, 186 aa, Glycine max
  Clone ID: PAT_MRT3847_112160C.1.pep
MEGGNNSSINSNPEELAVGCLLSIRTTLGDEFEGQVVTFDRPSNILVLQEPSKPSPRRNLRLLKANYIKDFTFLGHAQDPLDPNTCFLDLTALQQREDVAVRQAEADAERIGVGVTSEAQSIFDALSKTLPVRWDKTVIVVMNEVRVSSPYHSESVVGGTPAANDRVKKVLEFERKRLQLRSSGGQ

SEQ ID NO: 156302 - protein, 186 aa, Glycine max
  Clone ID: PAT_MRT3847_112161C.1.pep
MEGGNNSSSNNNPDELAVGCLLSIRTTLGDEFEGQVVTFDRPSNILVLQEPSKPSPRRNLRLLKANYIKDFTFLGHAQDPLDPNTCFLDLTALQQREDVAVRQAEADAERIGVGVTSEAQSIFDALSKTLPVRWDKTVIVVMNEVRVSSPYHSESVVGGTPAANDRVKKVLDFERKRLQLRSSGGQ

SEQ ID NO: 156303 - protein, 44 aa, Glycine max
  Clone ID: PAT_MRT3847_112162C.1.pep
IGKSIYLCSFIFFYFLIDEVDGSNSASSLLREITVLANYHVMHY

SEQ ID NO: 156304 - protein, 119 aa, Glycine max
  Clone ID: PAT_MRT3847_112163C.1.pep
TVVIRHIVRVAASPCHTPPSNLPIAATVPMDAAAGEGAGAAPAALESLTGDLEIRESMIDMRCHMGSPGSDISWYLGKFDVPLRLRVTLDMETMIIVLIINTCVRLDHESHMNVGMCYV

SEQ ID NO: 156305 - protein, 98 aa, Glycine max
  unsure (1)..(98): unsure at all Xaa locations
  Clone ID: PAT_MRT3847_112164C.1.pep
RVYCDPCRAGFETSAASYIAGAEIRVRCKSRVGNEVVYTKKGYTDSSGXYTMYVXEEDHADQVCAGRRGGSPHPECREVSPRRGGAVGILTRYNGIAS

SEQ ID NO: 156306 - protein, 57 aa, Glycine max
  Clone ID: PAT_MRT3847_112165C.1.pep
HHLSISHHHLIKVERIELDTMFKSLQAEIRGTEMGDYPGSCPIWSAILISVPIMEDC

SEQ ID NO: 156307 - protein, 88 aa, Glycine max
  Clone ID: PAT_MRT3847_112166C.1.pep
MEFSFDEKDFASCCGSTKFAKEMASASPFRSFQDAVSVAKGVWFNSVDVNGWLQAFSAHPQIGQTHAPSVASEASAQGIRKWILCNKM

SEQ ID NO: 156308 - protein, 136 aa, Glycine max
  unsure (1)..(136): unsure at all Xaa locations
  Clone ID: PAT_MRT3847_112167C.1.pep
ITHIASCLKAERRKTPTAYFPVVDMGNLNTAXRPAAMGIIKDACENWSFFESVNHGISIELMDTLDKLTKEHYTKTMEQRLKETVTSISLESVHSEVYDLDXDSSLLLRHLPLYNVSDNAYLYQDYSRTMLALALR

SEQ ID NO: 156309 - protein, 79 aa, Glycine max
  Clone ID: PAT_MRT3847_112168C.1.pep
SYGTNCKRIRTKDLKFRQYQKIRNFSLSDFRLQRQNHLKVRRTTGSLVRKRRMIRWNSCAVKTCYAGNRRREERVKAVR

SEQ ID NO: 156310 - protein, 51 aa, Glycine max
  Clone ID: PAT_MRT3847_112169C.1.pep
NYIHRYITINSRTSSQGHLNNFWPHLHKTLPLRAREIIITHPLYDSQFINL

SEQ ID NO: 156311 - protein, 57 aa, Glycine max
  Clone ID: PAT_MRT3847_11216C.1.pep
VIKGSFSKEFMCDIFPFIFYIVIFIKKALEPLSVITTLILIGRHHFTSGAMDHCKGS

SEQ ID NO: 156312 - protein, 149 aa, Glycine max
  unsure (1)..(149): unsure at all Xaa locations
  Clone ID: PAT_MRT3847_112170C.1.pep
HLLPSKRQLIFTVRAMQSEKTTYQVIQPINGDPFIGSLETSVTYSPLIAWNLSSLPGYRTAASRLLRGIEVGLAHGYLLVGPFMKAGPLRNTEIAWQAGFVAVGGLVVISTLCLTIYGISSFNEXDRCTAIALTLTVRTKDPDQLQTAD

SEQ ID NO: 156313 - protein, 39 aa, Glycine max
  Clone ID: PAT_MRT3847_112171C.1.pep
KSLDWLWDHVFFSPLFWGAKLQLSMVPKHVFLCNAAWVF

SEQ ID NO: 156314 - protein, 80 aa, Glycine max
  Clone ID: PAT_MRT3847_112172C.1.pep
RSETLSLCLTWGWKNCGLRISPSNRPINGLSIGGLAAQGFRGVFKVTSSLPKKRLSRAKKGWMLIKLTQITYPVARIGWL

SEQ ID NO: 156315 - protein, 401 aa, Glycine max
  unsure (1)..(401): unsure at all Xaa locations
  Clone ID: PAT_MRT3847_112173C.1.pep
TPDKNSASIPIIMKFFLTLARVRGGAEMLYCSGFLSSLRVLFAESGEDFLRIGSENLGSSCEKFVIPFFIWGLGLAVVTAMVKSLGDNSSGTAIVDSMIPYFFSEKARLIFNSLNAPDFPSDDHDKKRPRAQRAWISLATLKETEHTLMLMCELAKHWNSWIKAIRNVDRKLREKCIHLLAFISRGSQRLGELSSRNAPLLCPPTVKEDFEICLKPSYVNSKNGWFALSPLGCVPKPKISSFSTALSTYGQATESSDPAPKTGFSDTVALQVYRIAFLLLKFLCLQTECAAKRAEEVGFVDLAHFPELPMPEILHGLQGQAIFITTELCEANKLKVSQETQDVCNLLLQICGIRPVXDFSKEAKSLFNALEGHAFLKASRNSLKQMISCVYPGLLQGENFI

SEQ ID NO: 156316 - protein, 61 aa, Glycine max
  Clone ID: PAT_MRT3847_112174C.1.pep
PNQVTSGRSLHSSFIEGVSCKCLEFIDEGGMNEDFFYKPLASEVVACNLLHLSRKCNFNSL

SEQ ID NO: 156317 - protein, 120 aa, Glycine max
  Clone ID: PAT_MRT3847_112175C.1.pep
MVASSSLAPKEKGKEPNGLMQIIHEIENDPDINDHLHTEIETRDTGVRANAPKGKQPHTHSQIFKYAYSQLEKEKAEQQENKKLTFSGVIKMATNTEKRKRPLMEISFKDLTLTLKAQNK

SEQ ID NO: 156318 - protein, 62 aa, Glycine max
  unsure (1)..(62): unsure at all Xaa locations
  Clone ID: PAT_MRT3847_112176C.1.pep
XLVKPLXXRRVRAIQYXDCXFLQXTTACLGLDXLNSPEKVLVCSXIDXXXIKXXXXTXXXXL

SEQ ID NO: 156319 - protein, 203 aa, Glycine max
  Clone ID: PAT_MRT3847_112177C.1.pep
PHLTVDSELHLSDALLLWLESNTENLERPSKSEENCYEVLKQIRVGLLPLWFALGKRNSFYFRQLAEESLDSIFRLLNIAPMGSIDTFEYSDLHHLRIRLTEYSKKVDLSGCPQIASTVLLLSLIPQSYLTDPMEKNIIKQFFINCGHPIRDKSVFPLELSETFTFEAVQEVDISKCRNLIIEHAVDCFCKFFPSLRILKAAH

SEQ ID NO: 156320 - protein, 63 aa, Glycine max
  unsure (1)..(63): unsure at all Xaa locations
  Clone ID: PAT_MRT3847_112178C.1.pep
MKMKVLVFFVATILVAWQYHAYDMSPLRMNTGFEGRNPGVKCANWMASVGAXHILGFDTIPEE

SEQ ID NO: 156321 - protein, 66 aa, Glycine max
  Clone ID: PAT_MRT3847_112179C.1.pep
KYIFRTNSPVSVSRKICSGQRENCSLSKKSLWEKCISFSYANMGCMASMDVCSLGIEHPPFMVRTC

SEQ ID NO: 156322 - protein, 52 aa, Glycine max
  unsure (1)..(52): unsure at all Xaa locations
  Clone ID: PAT_MRT3847_11217C.1.pep
MWQKHREKKTTKSGRSKRSKLTXACMRSHNSSTLXPKVNSLGVLLQRHEWEN

SEQ ID NO: 156323 - protein, 59 aa, Glycine max
  Clone ID: PAT_MRT3847_112180C.1.pep
FKSLLKKQNLKMIYPSIQLKSYPSSKKKKKNKIKKKKKITIIINNPNLQTLTFNIIPII

SEQ ID NO: 156324 - protein, 559 aa, Glycine max
  Clone ID: PAT_MRT3847_112181C.1.pep
MMEDHPLSAPKDEMENLVLHDGADDNGNGNDGAGAKSPFSSNYRSAMSTLSESHHHPLSPPILATPADSDPLLSPNPGSPDSSSYIDPPSYADAVFTPFDDDTNDVESSPSSPISLSRSPSSSSEYLKITVSNPVKEQETSNSIVPGSNSYVTYLVTTKTNIPEFGASGADFAVRRRFRDVVTLSDRLAEAYRGFFIPPRPDKSVVESQVMQKQEFVEQRRMALEKYLRRLATHPVIRKSDEFRVFLQVQGRLPLPATTDVASRVLDGASKLPKQLMGESVIAPHEVVQPARGGMDLMRLFKELRQSVANDWGGSRPSVVEEDKEFLEKKEKIQELEQQITGASQQAESLVKAQQDMGETMGELGLAFIKLTKYENEEAIVNSQRVRAADMKGVATAAVKASRLFRELNAQTVKHLQDTLHEYLGLMLAVHSAFSDRSSALLTVQTLLSELSSLESRAEKLEVASSKIFGADKSRVRKLEELQETIRATEDAKNVAIREYERIKENNRSELERLDKERQADFLNMLKGFVVNQVGYAEKIANVWTKVVEDTRGYVDEST

SEQ ID NO: 156325 - protein, 144 aa, Glycine max
  Clone ID: PAT_MRT3847_112182C.1.pep
KLKVPIKFAVFAWRLLRDRLPTKANLHRRQIEVTNRSCPFCSNMEEEAGHLFFHCSKIIPIWWETSSWVNISGPFPKDPRQHFLQHGLLLVEGVRTTRWKCWWLAVTWTIWQQRNKMIFSNDSFDSNKLIDEAAFLLWTWLSNL

SEQ ID NO: 156326 - protein, 90 aa, Glycine max
  Clone ID: PAT_MRT3847_112183C.1.pep
MEIKGCERVLTTHTPPLKTVCFGLALASLINKGCVLTFSLEWQKQICILQRRRGFGYSLANRQVTKRQWTPLGSLWLSIAHLCSSSCCRM

SEQ ID NO: 156327 - protein, 74 aa, Glycine max
  Clone ID: PAT_MRT3847_112184C.1.pep
ISEPRPACKQLIGMKILYIYIYIYIYIYIYIYIYMIGLISHFRILIKIFFKKNIYGKNSKDLIFFGQFDFIYFN

SEQ ID NO: 156328 - protein, 370 aa, Glycine max
  unsure (1)..(370): unsure at all Xaa locations
  Clone ID: PAT_MRT3847_112185C.1.pep
GVSPQNAMLWSIITSLPQPIVAVPSFICADAFSKFLPFCTGFAAGCMIWMVIAEVLPDAFKEASASQVASAATLSVAFMEALSTFFQNFSHDYNSEDASGFFVSLLFGLGPLLGGIILVVFALALRLQHALLMGTACGIAFVLGAWRPVQLILSSKLGLFPVLLLLAMGAAFIHVSSSGVLKVAASKKASVNDLPTLTGFPLSVHTLQSFISCGAVAFHALAEGLALGVAAPKAYGLGRHMVLPVSLHGLPRGAVWLTCIFGALIAXCIFGATDSWHGSLATAAIIGFMGPISAIGAILTGIDYSGLDHIMVLACGGLIPSFGNVVKRALSLDKRKXLIMGIGFATLCLTFTRLVCLHTPYCNSAPEAVR

SEQ ID NO: 156329 - protein, 60 aa, Glycine max
  Clone ID: PAT_MRT3847_112186C.1.pep
VFQKKKTLVEGVHATMEDSDFRTYPFATASIPSTGAICTRLDVAPRILGDLLGVVTAYTT

SEQ ID NO: 156330 - protein, 79 aa, Glycine max
  Clone ID: PAT_MRT3847_112187C.1.pep
TLFLFHQSSPVASFSSEKTELRFAKIGRTRQRSSLPMEVSLLGYRYYPTHIGDFLNNSLSRKVRWNTIYLLPIIRRKKT

SEQ ID NO: 156331 - protein, 49 aa, Glycine max
  Clone ID: PAT_MRT3847_112188C.1.pep
ARASLFLILLSPYLSPFRQRDRKPSVRETERNSQIHVPQLSKCCLCDYR

SEQ ID NO: 156332 - protein, 99 aa, Glycine max
  unsure (1)..(99): unsure at all Xaa locations
  Clone ID: PAT_MRT3847_112189C.1.pep
XXXKXXXXXXXXXLXXXXXXXPXXLXXXSXXXXXXXXXXXFXXXXIXXXXXVNXXCXVVXXXDXXXDXXXRLKXWLXLSXXXXXLXXSRIPSLRTRXCD

SEQ ID NO: 156333 - protein, 86 aa, Glycine max
  Clone ID: PAT_MRT3847_11218C.1.pep
QSLIKCGDNKRSKNNIQECANQALNAGISLESYSPTRKVPSVRNENHTHSLFGFKKRSWWENTKRKAFLTGRKTLGLRYRNRTITV

SEQ ID NO: 156334 - protein, 42 aa, Glycine max
  Clone ID: PAT_MRT3847_112190C.1.pep
GVWYSGYVKCLFLLSTLDLFSGPYSLFSYAMIFTYEICFLPL

SEQ ID NO: 156335 - protein, 78 aa, Glycine max
  Clone ID: PAT_MRT3847_112191C.1.pep
MEQLPANRSEAKRPPPQVLHQSDVDEDDENVKQLDECSSLYRLMQDCVVRTNRNWKECQTEVYALKECFEKRKNVQGK

SEQ ID NO: 156336 - protein, 58 aa, Glycine max
  unsure (1)..(58): unsure at all Xaa locations
  Clone ID: PAT_MRT3847_112192C.1.pep
TTXXXPXQDAXALQXXXKSLXAAIIGYIXLXSXWLXLSXLTXXXXISXXHSELTYACX

SEQ ID NO: 156337 - protein, 34 aa, Glycine max
  Clone ID: PAT_MRT3847_112193C.1.pep
TIKQSQLESSKSSDDTWDHTLKEHWLASHSTSTN

SEQ ID NO: 156338 - protein, 74 aa, Glycine max
  Clone ID: PAT_MRT3847_112194C.1.pep
LPRGWRGFPSGYFFSTSSSRIFPLAIGAHPQKPSPFVVGLPKGGGIVFDPPKPGKDWGQFSLHKGAFHPGCGSE

SEQ ID NO: 156339 - protein, 53 aa, Glycine max
  Clone ID: PAT_MRT3847_112195C.1.pep
SCIIRGEKKNWWLFLSKKLRYSIFLKSSCYLIAPLKPRCFLRKWFLIGPFQLT

SEQ ID NO: 156340 - protein, 253 aa, Glycine max
  Clone ID: PAT_MRT3847_112196C.1.pep
TAARRRQKGEERILQQQEEVDTLIRRLEKIEKKLCSKQGCKEENESKDVESSGFMRRLLRVYKSEDDPGMVKSMDLDMDDQKPLGREVNTSGNAMFFGDYYYALTGVKENAHVFSPYFRQRACLSTVYEEEGQGEGEDEEVEKGIIEEKRVCSVEKPSGAGSLGTLNLSNTSPNKEEFCLKVSSGDNDSRLLRIQNIFTLCGNHRQLSQHIGTPVSTKKRSDETFEFSPANDKDSIFKTSNKENFEPHHVLGN

SEQ ID NO: 156341 - protein, 67 aa, Glycine max
  Clone ID: PAT_MRT3847_112197C.1.pep
LTAILYFLQERERERWIRYQGGEASTVQTTTYNVLFTLIHCHSFYLTTNLKEALLQHRHQSLQLLLP

SEQ ID NO: 156342 - protein, 79 aa, Glycine max
  Clone ID: PAT_MRT3847_112198C.1.pep
YRTVRSNLKILKRMVRVSGDIMLRRRVNSRFISLISMMSKGHIVYLIGYKMVFELKYFLCGSDVLSCTVTVCSTIVILE

SEQ ID NO: 156343 - protein, 128 aa, Glycine max
  unsure (1)..(128): unsure at all Xaa locations
  Clone ID: PAT_MRT3847_112199C.1.pep
PRREXXQNPXHRRTRERRGXEXQKGGXXAEQXHXEEQQDPXTERQQAAHRGAQHDNKQTRXQEXGEXGQGXKXXARKXPESKXXXXRGXERPAKQXENEKAEQKKXGKRPRXXKNXXKXANGXGRKGN

SEQ ID NO: 156344 - protein, 210 aa, Glycine max
  Clone ID: PAT_MRT3847_11219C.1.pep
METRASGDMKMAIDDALNGFSPVSTPRIFWKSRRRSASGRNLEVSEDTANKPPSKQEDTPPPSSEEVQNTTPISERRKALFEPLEPIMNINGRRPSAESLLPPPDFESANYPKGWLIGKKRKLVNVDVVESMRRIAIQEMNRKDREIDGLNEQLEEDSRCLEHLQLQLVDEKSKRARVERENAMLQEQVNMLMNMLQEAEQMGDEGPDEP

SEQ ID NO: 156345 - protein, 80 aa, Glycine max
  Clone ID: PAT_MRT3847_1121C.1.pep
LTRVPVYIEFSTGFLRVVVWGDIFSSQHRVMIPTHGLWPCKLLIIISFVNQGTRCNLTSSICCVISPKPHHRKADDLARC

SEQ ID NO: 156346 - protein, 165 aa, Glycine max
  Clone ID: PAT_MRT3847_112200C.1.pep
MATPTDNNNNPAQENPNKTLDPTEPDPIPATEDATATKGSDAKDPADADADAITSPPPDSGNDAPLSDIQKKMRRAERFGISVQLSEKEKRNSRAERFGTVSASQGSEPSKSEDLKRKARAERFGMPSPTTTADEEAKKKARLARFAPASKVDPQEEDKRKARAP

SEQ ID NO: 156347 - protein, 84 aa, Glycine max
  Clone ID: PAT_MRT3847_112201C.1.pep
LYGLRFASFKHSSFTWFVICEKYMMLRMLLKGNIEKLWGQYWLLSFEQTFFIGKAPLCFICGLEDNYWLLVYILVKSTTCHSMG

SEQ ID NO: 156348 - protein, 189 aa, Glycine max
  Clone ID: PAT_MRT3847_112202C.1.pep
MTTPTDNNNNPAQENPNKTLDPTEPDPIPATEDDAAADTKDSDAKNSPPPDSGNDAPLSDIQKKMRRAERFGISVQLSEKEKRNSRAERFGTGSASQGSEPSKSEELKRKARAERFGMPSPTTTSDEEAKKKARLARFAPASKVDPQEEDKRKARALRFANPSSTSIANVNGEGKIEPAAIAGNAGGGT

SEQ ID NO: 156349 - protein, 132 aa, Glycine max
  unsure (1)..(132): unsure at all Xaa locations
  Clone ID: PAT_MRT3847_112203C.1.pep
LHKDRGLIVEYLGRMSYAAHNINQPQEKDLLAGNASFGIKCRYRLEKALSTKAQFDSGMTFIYDIIGAGLHSLEDFPEMDDQDKPKKIDARLXQRIDPXINVVQAQIGTHLPXLFIDDVETTKGSMLDLTIS

SEQ ID NO: 156350 - protein, 80 aa, Glycine max
  unsure (1)..(80): unsure at all Xaa locations
  Clone ID: PAT_MRT3847_112204C.1.pep
DKVKHQYAESSLAVSCVVAXVGSTRMISTIDKLTLIAEVLEVVGIDYSGWFAYKNLFFKPDTEAFLRQVKETYIEILGSS

SEQ ID NO: 156351 - protein, 65 aa, Glycine max
  Clone ID: PAT_MRT3847_112205C.1.pep
LAKNLTHSTILNLAVISLSSFTFTQPPLSLSSLCLWNSLLLPLMVPRIGILQSSVIPFCRLLAAV

SEQ ID NO: 156352 - protein, 135 aa, Glycine max
  Clone ID: PAT_MRT3847_112206C.1.pep
SLSSWLKPAAVILEERNKRMQTSYNQVRKTPADRPIIGMVAAHWNKDGDSQAPPPKWWDGNGIPNSTNKYKEDQKVNWHATSFEERLEKALSEETVISQRKDTCGKSIPFDENEESDTALSQLQSSTHPQSVVSF

SEQ ID NO: 156353 - protein, 108 aa, Glycine max
  Clone ID: PAT_MRT3847_112207C.1.pep
MQVDAVVYLVDAYDKERFAESKKELDALLSDESLTTVPFLILGNKIDIPYAASEEELRYHLGLTNFTTGKGNVNLSDSKVRPMEVFMCSIVKKMGYGDGFKWLSQYIK

SEQ ID NO: 156354 - protein, 62 aa, Glycine max
  unsure (1)..(62): unsure at all Xaa locations
  Clone ID: PAT_MRT3847_112208C.1.pep
TKSSMDNLPILRKKGEQXLLRGWNLGSLLXXVKLPEEXNLLYKEKTXXRNSLFKGKETAGXP

SEQ ID NO: 156355 - protein, 193 aa, Glycine max
  Clone ID: PAT_MRT3847_112209C.1.pep
MFLFDWFYGILASLGLWQKEAKILFLGLDNAGKTTLLHMLKDERLVQHQPTQYPTSEELSIGRIKFKAFDLGGHQIARRVWKDYYAKVDAVVYLVDAYDKERFAESKKELDALLSDESLTTVPFLILGNKIDIPYAASEEELRYHLGLTNFTTGKGNVNLSDSKVRPMEVFMCSIVKKMGYGDGFKWLSQYIK

SEQ ID NO: 156356 - protein, 42 aa, Glycine max
  Clone ID: PAT_MRT3847_11220C.1.pep
HCNSLRIHILKNHRNSAIPCTRSTECTPMPIGISELHDLPLH

SEQ ID NO: 156357 - protein, 193 aa, Glycine max
  Clone ID: PAT_MRT3847_112210C.1.pep
MFLFDWFYGILASLGLWQKEAKILFLGLDNAGKTTLLHMLKDERLVQHQPTQYPTSEELSIGRIKFKAFDLGGHQIARRVWKDYYAKVDAVVYLVDSYDKERFAESKKELDALLSDESLTTVPFLILGNKIDIPYAASEEELRYHLGLTNFTTGKGNVNLSDSNVRPMEVFMCSIVKKMGYGDGFKWLSQYIK

SEQ ID NO: 156358 - protein, 119 aa, Glycine max
  Clone ID: PAT_MRT3847_112211C.1.pep
MASKSSTIRLLCFCYFMLFSFMHFSSCTVFSLKSHASTCNGSIAECNQEDELLMESEISRRFLEQKRSYISNGALQRDKPVCNGGGSGEAYSKTGGCLPPPSNPQNRGCSKYYRCRSDS

SEQ ID NO: 156359 - protein, 181 aa, Glycine max
  Clone ID: PAT_MRT3847_112212C.1.pep
MENNIISLLSKRFGEVRSISLSLMQLAPFQKGGVIYYNILYIVLLSGEWKEGYIQSKTQNRRMASKSSTIRLVCFCYFMLFSSMHFTSCTVLSLKSHASTCNGSIAECNQEDELLMESEISRRFLEQKRSYISNGALQRDKPVCNGGGSGEAYSKTGGCLPPPSNPQSRGCSKYYRCRSDS

SEQ ID NO: 156360 - protein, 178 aa, Glycine max
  unsure (1)..(178): unsure at all Xaa locations
  Clone ID: PAT_MRT3847_112213C.1.pep
LWPLPGFTCWLLIFLLQGHSFYLNLGFSFXXXLFXXMIVIMXXMNSGXYFPRXXXEEIXNXEKLXPXXXXQXXXXXXXXPXXXXXXXGXXXXXXXXXXXXXXXXXXXXXXXXXXXXXPXXXXXXXXXXXXXXXXXXXXXXXXXXXXXXXXXXXXXXXXXXXXXXXXXXXXXXXXXXXX

SEQ ID NO: 156361 - protein, 156 aa, Glycine max
  unsure (1)..(156): unsure at all Xaa locations
  Clone ID: PAT_MRT3847_112214C.1.pep
MSTSKPISPFRLTSLLRSTKDPSLALQLFLNPNPNPNPNPRPLRHSLRSYDLLITKLARAKMFPQMEQILHQLQTLTQFPVPEPLLCRVIISYARARLPSRALRTFLSIPSFRCTPTLKSFNSLLXALLLCXDFPXLPRLSPRLRHFSRSGPDACT

SEQ ID NO: 156362 - protein, 60 aa, Glycine max
  unsure (1)..(60): unsure at all Xaa locations
  Clone ID: PAT_MRT3847_112215C.1.pep
TIEPRTSXLGPVNPSNAPYSQDTTTDTMSLNXEMFXNXPNSLQDTPAANIRATCIXFGHL

SEQ ID NO: 156363 - protein, 118 aa, Glycine max
  Clone ID: PAT_MRT3847_112216C.1.pep
LRGMRFISFRLLLECFKRFGPLLGRLVNRFIWFTHPVRFRIRRLVRRCTVVTEGYKGRFICSFLWHSARVLILVFQFFFLTCLEYWFGHCFLCIGGEVEEFSSGIVFGSVITVKSVHC

SEQ ID NO: 156364 - protein, 62 aa, Glycine max
  Clone ID: PAT_MRT3847_112217C.1.pep
MDNAYRGTDDYENGNGCPSAANLSDSSKELVRYTLISNYDHLSLSSQMVSCLLIDDAAHPCS

SEQ ID NO: 156365 - protein, 43 aa, Glycine max
  Clone ID: PAT_MRT3847_112218C.1.pep
VSYMGSTSLIVFQQSVLSKHIMLLSVSHYYQTKTPIVCLYVQS

SEQ ID NO: 156366 - protein, 104 aa, Glycine max
  unsure (1)..(104): unsure at all Xaa locations
  Clone ID: PAT_MRT3847_112219C.1.pep
XLIIFXPFXTLVESXXXXXXICILXDXMTXXFFXXMXSLCXXIXXXCLXFLTTFHIXLSXXYSTXXXXVXVXXLYLPSXNXPXNXHITQIXPXAEFRAYVXVXN

SEQ ID NO: 156367 - protein, 109 aa, Glycine max
  Clone ID: PAT_MRT3847_11221C.1.pep
DFLEITKEIRYILSLNFTYVPLFSLSTLSITFCSKQFSQLHFTFSSVPFGFQIQCFCSFLHGIFNIITCPLPILNSFKNKNKNYLCIYKIWNSESETKANSFFNLTSFL

SEQ ID NO: 156368 - protein, 39 aa, Glycine max
  Clone ID: PAT_MRT3847_112220C.1.pep
PTRTSGRRLFRIYFHSLTPHIIVGLFHIHARHKFKLTIY

SEQ ID NO: 156369 - protein, 33 aa, Glycine max
  Clone ID: PAT_MRT3847_112221C.1.pep
KSHLCLSPLKAIEDTWQSIRQVRGRRDFSQCLN

SEQ ID NO: 156370 - protein, 122 aa, Glycine max
  Clone ID: PAT_MRT3847_112222C.1.pep
MEGLVSSGISTVRVFGITKHQSRFLPSSTLHLRNNSVCGFGIGVEKKKKKQCFVVAASVGGSKVVHFENTLPSKEVLELWRNGDAVCFDVDSTVCLDEGIDELAEFCGAGKAVAEWTARAMG

SEQ ID NO: 156371 - protein, 93 aa, Glycine max
  unsure (1)..(93): unsure at all Xaa locations
  Clone ID: PAT_MRT3847_112223C.1.pep
ITYYXYAXXXLXFGXXSXSGYNXXCXXKGNYLYLGXXVIDDXRXNXLGXQXXEMMLXWLXDLELCXSXQNEWHHSXDDWTXMEIKLCRQIXXE

SEQ ID NO: 156372 - protein, 295 aa, Glycine max
  Clone ID: PAT_MRT3847_112224C.1.pep
MEGLVSSGINTVRVFGITKHQSRFLPSSTLHLRNNSVCGFGIGVEKKKKKQCFVVAASVGGSKVVHFENTLPSKEVLELWRNGDAVCFDVDSTVCLDEGIDELAEFCGAGKAVAEWTARAMGGSVPFEEALAARLSLFNPSLSQLQDFLEQKPPRLSPGIEELVQKLKANGIVVYLISGGFRQMINPVASILGIPQENIFANQLLFRSSGEFLGFDKNEPTSRSGGKAVAVQQIKKAHGFKTLTMVGDGATDFEARRPGGADMFVCYAGVQLRKSVAAKADWLVFSFKDLINSLG

SEQ ID NO: 156373 - protein, 108 aa, Glycine max
  Clone ID: PAT_MRT3847_112225C.1.pep
MKFRYAMVCSSNQNRSMEAHFLLKRQGFDVSSYGTGAHVKLPGPSLREPNVYDFGTPYKHMIEDLRRKDPDLYKRNGIFPMLKRNSTVKLAPQRWQENAADGSFDVVS

SEQ ID NO: 156374 - protein, 92 aa, Glycine max
  unsure (1)..(92): unsure at all Xaa locations
  Clone ID: PAT_MRT3847_112226C.1.pep
QDVDIKVLKPXGMSTDMIREFTEEVXVMKKIRHNNVVHFIRGYTRRPNLWIDTEFMARGSLYDFLHRQRRVFKLRSLVRVATDVSRGVNYLH

SEQ ID NO: 156375 - protein, 45 aa, Glycine max
  Clone ID: PAT_MRT3847_112227C.1.pep
PTLKLLMTREMIYSLLDILHYSYHHIPFTTYTLNKPRHLINDASI

SEQ ID NO: 156376 - protein, 92 aa, Glycine max
  Clone ID: PAT_MRT3847_112228C.1.pep
QKVQPKKGLLRFFREWKHVLKFPSVIDCSVCIYATHKSKLGFSQKPLRVYLVQRRKIEEFFLIKIEWKRCESQNKIQNFSCILFLSSKTNTP

SEQ ID NO: 156377 - protein, 214 aa, Glycine max
  unsure (1)..(214): unsure at all Xaa locations
  Clone ID: PAT_MRT3847_112229C.1.pep
MAQAKYTRIDNNNKRPSSYCSTVTIVVFVALCLFGIWMMTSSSVTPVQNVDVSQENNNEVKEQSEAKEQPTDPSNNNSQQFEDNRGDLSEDATKGDGSVTPATNYDVTEKQDEKSDEKSQEKPSEDTKTENQDSSVSEKRSDSDESEKRSDSDESEKKSDSDESEKKSDSDESEKKSDSDESEKKSDSDESEKKSDYNETEKNSESXDSSEREK

SEQ ID NO: 156378 - protein, 195 aa, Glycine max
  unsure (1)..(195): unsure at all Xaa locations
  Clone ID: PAT_MRT3847_11222C.1.pep
AAKNKNGNLFPTASGRNLEVSEDTANKPPSKQEDTPPPPPPPSSEEVQNTTPISERRKALFEPLEPIMNINGRRPLAESLLPPPDFESANYPKGWLIGKKRKLVNVDVVESMRRIAIQEMNRKDREIDGLNEQLEEDSRCLEHLQLQLVDEKSKRARVEKRNAMLQEQVNMLMNMXTEAEXMGDEGPDEPKLLLY

SEQ ID NO: 156379 - protein, 71 aa, Glycine max
  Clone ID: PAT_MRT3847_112230C.1.pep
PKKKLVLFHFIRNNFFPSWGKKEPPKGVNFCQFFFQFSQTNLKLFPIFDPKTGPIFSPNLSLGTKDPKKVF

SEQ ID NO: 156380 - protein, 113 aa, Glycine max
  unsure (1)..(113): unsure at all Xaa locations
  Clone ID: PAT_MRT3847_112231C.1.pep
MQIFVKTLTGKTITLRXESGGTINSVKATIQYMAGLPLEQHRLILYGEQLEVGRTLAIYNIQKESTLHHVLRLHGGLQXILVKTLTGPTMTVDVHRFDTIDCPMAKIQDKEAI

SEQ ID NO: 156381 - protein, 72 aa, Glycine max
  Clone ID: PAT_MRT3847_112232C.1.pep
EDKAFLWPQLHYVSCNTLEMQVPYLVYLLNSLQVLNLLILLLSHLFLMHTLLPNLLKMQDTLPHLQFSVSFT

SEQ ID NO: 156382 - protein, 78 aa, Glycine max
  Clone ID: PAT_MRT3847_112233C.1.pep
RSEPSQSNHTYTGPKTRWGPKLMSIYDWKHNHRPKPYKASLREVHPTHCELYGSCLTLKKSHFWRNRHSYCGCRTCRR

SEQ ID NO: 156383 - protein, 73 aa, Glycine max
  Clone ID: PAT_MRT3847_112234C.1.pep
LEKAILPTSITRTTLKGTETHWGYATMHRRPSINARTARIYEVIDLESLTYFARQIKSRTKGTRNNTYINREA

SEQ ID NO: 156384 - protein, 98 aa, Glycine max
  Clone ID: PAT_MRT3847_112235C.1.pep
WINTRGVFPQDPKDHFLQHVSGSAVGTKATRWKCWWVVLTWTIWKHRNEVIFANQTFEGSKVMEDAIFLLWTCLKLMEKGFTLLFNHWSSHLTAAFCN

SEQ ID NO: 156385 - protein, 36 aa, Glycine max
  Clone ID: PAT_MRT3847_112236C.1.pep
PAQHKETRTKMTNISAGSNLLLHDLQLFCILIIFLL

SEQ ID NO: 156386 - protein, 53 aa, Glycine max
  Clone ID: PAT_MRT3847_112237C.1.pep
HQKHSFTNRKRQRGTNQHLTLIPHEGTKIEVRMLHIKITGLQHKKSQETKTLY

SEQ ID NO: 156387 - protein, 386 aa, Glycine max
  unsure (1)..(386): unsure at all Xaa locations
  Clone ID: PAT_MRT3847_112238C.1.pep
MAKPVSIEVWNPSGKYRVVSTKPMPGTRWINLLVQNDVRLEICTEKKTILSVEDIIALIGDKCDGVIGQLTEDWGEQLFSTLSKAGGKAFSNMAVGYNNVDVDAANKYGVAVGNTPGVLTETTAELAASLSLAAARRIVEADEFMRAGLYDGWLPHLFVGNLLKGQTVGVIGAGRIGSAYARMMVEGFKMNLIYYDLYQSTRLEKFITAYATFLKASGETPVTWKRAATMDEVLQEADIISLHPVXDKTTYHLVNKERLAKMKKEAILINCSRGPVIDEAALVEHLKQNPMFRVGLDVFEEEPYMKPGLAELKNAIVVPHIASASKWTREGMATLAALNVLGKIKGYPVWFDANRVEPFLNENAQPPAASPSIVNAKALGLPTSKL

SEQ ID NO: 156388 - protein, 73 aa, Glycine max
  Clone ID: PAT_MRT3847_112239C.1.pep
GPIFGPCNGLSAFGNPGLGEGGIGAKASFCCKGLIFCQNSCLGIPFLIPFLGVSLGLYQSVWICSPKKGGKVL

SEQ ID NO: 156389 - protein, 145 aa, Glycine max
  unsure (1)..(145): unsure at all Xaa locations
  Clone ID: PAT_MRT3847_11223C.1.pep
GSTHASDHLGRGISLWPPGMGSMRRCLWKGARLPRRPISLPGSAGPAGWHPPCTQGRFQPDTRPPALAKKLLPVASMTYPRLFDAIRCHLLLLLDPLASLPFHSLTTAPALPTQLRFLLLGGGKKLLIIGQMDLPLERPSAFXEV

SEQ ID NO: 156390 - protein, 126 aa, Glycine max
  Clone ID: PAT_MRT3847_112240C.1.pep
EDSLSQSAPSSELFRIASSSSSAESHFRELDDAFLQTQTRNWLGEVLQIRLDGQLIISELLADGELLFQVSKVVWKLLLAKHMELRHIKAYKIQSFASKKNIARYRPYSNVDSFLKVNCLIIMSSF

SEQ ID NO: 156391 - protein, 87 aa, Glycine max
  unsure (1)..(87): unsure at all Xaa locations
  Clone ID: PAT_MRT3847_112241C.1.pep
FSFHRSILLXLKIXIFVKTXTGKTITLEVESSDTIDNVKAXIQDKEGXPPDQQXLIFAGKQLEDGRTLXDYNIQKESXLHLVXRLRG

SEQ ID NO: 156392 - protein, 94 aa, Glycine max
  unsure (1)..(94): unsure at all Xaa locations
  Clone ID: PAT_MRT3847_112242C.1.pep
SXKXXKXLXXSILKXXXXKVWLDPNXVNEISMXXXRQNXRKXVXXXFRXRKPQRXXPXXXTXRMKEAKRKXRHSGYGKXKGTREARLPTKIXXM

SEQ ID NO: 156393 - protein, 30 aa, Glycine max
  Clone ID: PAT_MRT3847_112243C.1.pep
MGSGSGLLRVFMGNCFNTDVNLIVTHVHYM

SEQ ID NO: 156394 - protein, 89 aa, Glycine max
  unsure (1)..(89): unsure at all Xaa locations
  Clone ID: PAT_MRT3847_112244C.1.pep
XVXEFGXXNAFFSDASXXLXFXFXSQKXXXTGIXXLGDXRVXDGXRXDGFXGWXXXCXTLSQXKKKKSTPEXDERTAAAVRARERRRRL

SEQ ID NO: 156395 - protein, 83 aa, Glycine max
  Clone ID: PAT_MRT3847_112245C.1.pep
KRGFPRGHVTFLVLKAPLPKSVFGGDPFFSLIPDPPPLFYFGANVFFEARWVSLSLFLPTYLRAGYLCMYVIKYNKVNHIICA

SEQ ID NO: 156396 - protein, 58 aa, Glycine max
  Clone ID: PAT_MRT3847_112246C.1.pep
YIKITTLLGIKKTKRRVSHSIMSFPFIKFPQWRLTSTNVRTPVSNMKLVALYDIVLTT

SEQ ID NO: 156397 - protein, 48 aa, Glycine max
  Clone ID: PAT_MRT3847_112247C.1.pep
IEYYYGIAFCSIGLNNLCRRIQLINQLQFIDFALDNVTAVLLIPIYGM

SEQ ID NO: 156398 - protein, 48 aa, Glycine max
  Clone ID: PAT_MRT3847_112248C.1.pep
LCLFQNYGNNIYSKLLFSLSSLPPPLILFSLHFLILFNLDRSNSFDIT

SEQ ID NO: 156399 - protein, 89 aa, Glycine max
  Clone ID: PAT_MRT3847_112249C.1.pep
VIQATFMNLSSNSYTDFVFQAAVPKFLQLHLDPASSNTLPANGSITQSLKITNSQHGKKSLVMRIRIAYKINGKDTLEEGQVNNFPHGL

SEQ ID NO: 156400 - protein, 68 aa, Glycine max
  unsure (1)..(68): unsure at all Xaa locations
  Clone ID: PAT_MRT3847_11224C.1.pep
AAGLQAAATFMQPTKVSRINTFHEKSTQXIAKAMGVEPVGAKNVTCSLQANLNDLAHKCCDSVQNDKI

SEQ ID NO: 156401 - protein, 86 aa, Glycine max
  unsure (1)..(86): unsure at all Xaa locations
  Clone ID: PAT_MRT3847_112251C.1.pep
LFGGPVCKQPEQKLLKNTATVLYVGRIPHGFYEKEMEGXIGQFRTIKKLRIARNKRAGKSRHFGYIEFEXSEVAKIVADTMHNYLL

SEQ ID NO: 156402 - protein, 64 aa, Glycine max
  Clone ID: PAT_MRT3847_112252C.1.pep
MSIVVESPVHRLPFLVVCLQCMELLICFYCITDKALELFLQDLCDRTYEITLQRGAKTMNSLHL

SEQ ID NO: 156403 - protein, 114 aa, Glycine max
  Clone ID: PAT_MRT3847_112253C.1.pep
DGYLHISDRLKDIIKYKGFQIAPADLEAVLILHPEVVDVAVTRAMDEETGEIPVAFVVRKVGSVLSPKHIMDFVAEQVAPYKKVRKVFFTDKIPRSATGKILRKQLRNYLTSNL

SEQ ID NO: 156404 - protein, 118 aa, Glycine max
  Clone ID: PAT_MRT3847_112254C.1.pep
EEKKRGPREQFEGKDRGDSHNEAKQESPRGNTQTAKPETGESTTPRKRKRRRARQEEHPIKRGTDPNRRPTRTQTEREHRGKAKGAKTTGPGKAGTPKRPSQDTKTTAIDNPRTATAT

SEQ ID NO: 156405 - protein, 102 aa, Glycine max
  Clone ID: PAT_MRT3847_112255C.1.pep
KKPPPPRGVFFGDQTKGYPQKRGLSPPCENKNVVHKKGKGNGVINTQKIWGQRGTQRVFLPGRHRGGPHPQSDPPGGLKKIGGPGEKLGQTGNLVNNRGGGF

SEQ ID NO: 156406 - protein, 99 aa, Glycine max
  Clone ID: PAT_MRT3847_112256C.1.pep
HYLFGLLSSTKYFFNILLAFLPNLTVFACNCQNPCWHSIYFVDALSTILQFATTPELVIYIVSDFLISPLSWVNDGNAIFVQKCGTGRINTQHAMTIVS

SEQ ID NO: 156407 - protein, 39 aa, Glycine max
  Clone ID: PAT_MRT3847_112257C.1.pep
ISQNLFLRGLRKKNSKNVSLKHQAILILPTFNTFVFLLT

SEQ ID NO: 156408 - protein, 82 aa, Glycine max
  Clone ID: PAT_MRT3847_112258C.1.pep
ASGFWGPIWQPKRGSLPGAPCAPNTPHFFQAISFLKQGGGFLKDPGKKESPGGGFHPLVSFKGPKAVHAFPEKKLENWRLGF

SEQ ID NO: 156409 - protein, 121 aa, Glycine max
  unsure (1)..(121): unsure at all Xaa locations
  Clone ID: PAT_MRT3847_112259C.1.pep
MAFVLYSTYANKNAKKTLTAIEHFGVQAELAPNTEMGVSNRTPEWLKTNATRXETALETPDGSGGESNAIARYEARLMGDNASPSWSAIANAHIDHPIDLSSLEIDARTTKXYPPRTGFAP

SEQ ID NO: 156410 - protein, 167 aa, Glycine max
  Clone ID: PAT_MRT3847_11225C.1.pep
TSGQYFDLLEIFRLNGFPSETHGYLFNGDFVDRGSWSTEIALLLYAYKMMYPKSFFLNRGNHETDDMNRMYGFEGECKAKYNERVFKLFSESFSALPLATLIGDNYLVLHGGLFSDDSTSLDDIRKLNRHAQRQPGQEGLMMEMLWTDPQTMPGRGPSKRGVGLQFG

SEQ ID NO: 156411 - protein, 42 aa, Glycine max
  unsure (1)..(42): unsure at all Xaa locations
  Clone ID: PAT_MRT3847_112260C.1.pep
LXHKXQXXFMXXXKVGIDSAQXQIYXNAFLRLLAWNLLQLNS

SEQ ID NO: 156412 - protein, 91 aa, Glycine max
  Clone ID: PAT_MRT3847_112261C.1.pep
SFPHYVSSSLRVPIILHTFLVTVKFVSHIEGNFPEKGCIHHTRIHTLLTAATRVVIIRIDKCYSINAYIVTKYGIGILITTRHLHGTYYTA

SEQ ID NO: 156413 - protein, 118 aa, Glycine max
  Clone ID: PAT_MRT3847_112262C.1.pep
TCAYFCEVFLLYTCISKVSCHLNIQIYICKYFCCIHAYPRYLSTIHTYICEVCFCLHTCISKVSFYLKHTIYIFCEVVVCYLNYIHAYLRYFSLPKHAYIYFVRYDYLPSLCSFYLNS

SEQ ID NO: 156414 - protein, 49 aa, Glycine max
  Clone ID: PAT_MRT3847_112263C.1.pep
LQSILHLYLALNSTTPLIKQTILLSFPYIKKYLIYKTINFYMYHLKFTK

SEQ ID NO: 156415 - protein, 111 aa, Glycine max
  unsure (1)..(111): unsure at all Xaa locations
  Clone ID: PAT_MRT3847_112264C.1.pep
MAAASSMDLASPSLAGKDVXLGPAAPEVGKVSMRKTVTKQVSSXSSWYGPDRVKYLGSFSGEPASYLTGEFARDYSWDTAGLSADPETIAKNRELYVXHSXWAMLGTLGCV

SEQ ID NO: 156416 - protein, 35 aa, Glycine max
  Clone ID: PAT_MRT3847_112265C.1.pep
HRFYSVISTDLIFFYLYRFCSILFLFLIRSLAACK

SEQ ID NO: 156417 - protein, 107 aa, Glycine max
  unsure (1)..(107): unsure at all Xaa locations
  Clone ID: PAT_MRT3847_112266C.1.pep
XSPXLAAIXXXXPXLRCCXXPXFGGGXXXXXXXGXIXXXXEVCLCXTQXXXXRXRXXEXAXNTXENXXXXXDPXXXHQXYXISXXXXLXXXXXXXLXRTXXHAXTXX

SEQ ID NO: 156418 - protein, 35 aa, Glycine max
  Clone ID: PAT_MRT3847_112267C.1.pep
ETIMTAATGDHLPLNPQDDVLYDTLIQRTLPVRQT

SEQ ID NO: 156419 - protein, 172 aa, Glycine max
  Clone ID: PAT_MRT3847_112268C.1.pep
PRVRVDIIWFTWRMKLLSGRRGVAILYAYMFLGLGFLRAVSPDFGDLANQEQELEGTFRFMHSRLRTHAESIAFFGGGSREKAMIDAKFMTLLNHSKVLLRKKWLYGIFDDFVTKQLPHNVTWGLSMLYALEHKGDRALTSTQGELAHALRFLASVVSQSFIAFGDILELHK

SEQ ID NO: 156420 - protein, 53 aa, Glycine max
  Clone ID: PAT_MRT3847_112269C.1.pep
ANNSIGLVDWYQKNRSTNSHLLFIIELTDQLALGIKISSRFAIYYGKNGNLSL

SEQ ID NO: 156421 - protein, 79 aa, Glycine max
  Clone ID: PAT_MRT3847_11226C.1.pep
ETARARSEKGGGECLTDEQQARRAPQEQNTVLVRGDKKAREAAKYFGPAPGERESNTKPEGRAKGRKGEGRRGRRNSRG

SEQ ID NO: 156422 - protein, 52 aa, Glycine max
  Clone ID: PAT_MRT3847_112270C.1.pep
IIHQFSGWIGIATVKFRSISTNQLNNICVIKRHLDVPILHIFCYFASVLILI

SEQ ID NO: 156423 - protein, 83 aa, Glycine max
  Clone ID: PAT_MRT3847_112271C.1.pep
MDKASIIKDAIEYIQHLHEQEKIIQAEIMELESGMPRKSPSYGFEQEQLPVVLRSKKKRTEQLYDSVTSRNTPIEVLEVNPLS

SEQ ID NO: 156424 - protein, 231 aa, Glycine max
  Clone ID: PAT_MRT3847_112272C.1.pep
GHKTYSLLSRDHDAKALASSTMHPMESVFSLSVAARTDFIQFLVQSLGCSYIRLWAFASPSPSRLSFLDGIYNVRNNQASSSLGSVQAQQLFSQFRTLTFDVNDDRVPGLAFRNQRPYLELQQLELLRLASTEIQIQFFQEARIKTAVFMGCNKGEIELGFLNMSQVDIQTALRRVLPGLLSSWGLSRQIVRFPPSSSPSSPCSLPSGGPVLSSLPLSIPGTSQPHFPPET

SEQ ID NO: 156425 - protein, 66 aa, Glycine max
  unsure (1)..(66): unsure at all Xaa locations
  Clone ID: PAT_MRT3847_112273C.1.pep
EAALLEISRLSTHERYLCRVTISYLNLLRVISYHEXCAIEELNANNICDWLLTDKLTREQNLGSTV

SEQ ID NO: 156426 - protein, 70 aa, Glycine max
  Clone ID: PAT_MRT3847_112274C.1.pep
VGDPRLGQKWLSWYRSSKGSWLTCGECFNSYVIFREVGLCRLTLLSLYLFCAKKNPVFPRLVILFVLIVG

SEQ ID NO: 156427 - protein, 119 aa, Glycine max
  Clone ID: PAT_MRT3847_112275C.1.pep
MGGKCPHRNVKKRRYSHKTARRTKFELKGDDMVYAQLNKPDQERPPLPVDEDLPGMGQYYCLHCDRYFANITVRDEHFKTKRHKKRIKQMMGPAPHTQLDADLASGMGMPDNGPKLMSM

SEQ ID NO: 156428 - protein, 58 aa, Glycine max
  Clone ID: PAT_MRT3847_112276C.1.pep
HRAWILYSELASKLGGYLKKLCCTMVRCAINPNRKSHRHKRKNKILRKHASLADMPKK

SEQ ID NO: 156429 - protein, 259 aa, Glycine max
  Clone ID: PAT_MRT3847_112277C.1.pep
LPNLEFKYSDPDIHEDLYQLIKYSSGEICTTEHVDKVMKVWTTFLEPMLCVPCRPQGAEDTEDVVKAKNNHVKNGTATVAESDCSPVVGATIMNPKHINVSRNGDECMPLDQSTSSKAWQSNGDSGVREDRYLDDHALRKTETLGSNTQHGKMNSIAFTPDEPSGFNNKQDQSSERLVNANVSPASGMEQSNGRTNIDNLSGLTATPTRPGNASVEGGLDIPSSEGGDSTRLGTSTNGAITGGTKVHRYQEEISSTLQK

SEQ ID NO: 156430 - protein, 85 aa, Glycine max
  Clone ID: PAT_MRT3847_112278C.1.pep
FFVFFDSFLFFYLWNTDKGNRMERKTNKSIVSESIAEAFGLAGAGGGIIASDDILFSFCGKYTPVNWPIGFEEQVNFYLQGRRCS

SEQ ID NO: 156431 - protein, 78 aa, Glycine max
  Clone ID: PAT_MRT3847_112279C.1.pep
ESGGHDPWEQSQPTIMIRSRGARSGDANQGNDPWKQSQPFRIIVSIRCSINISKPEWERHLGIRKNLNCGETDSRKLV

SEQ ID NO: 156432 - protein, 419 aa, Glycine max
  Clone ID: PAT_MRT3847_11227C.1.pep
MLPRVLVLLLLNVLATNVLADYGPGDAVVILTEKSFAKEVLQSPDYWLVEFYAPWCKHCKNFEPEYKAAAKKLKKHARLGVVDATVHQELARKYFVQDFPTIKEFGAEKKRPQDYRGGRTTREIVKYVKNSPDAKKLGVSGANVVTLTYDKVYTFLNKDLPFAIFFGSPTKGKKSPKMPTWLDDVAESFMEGKKKKKSPTVQLAFVPGSDNKIANHFRLAKDQLPTVVYIYSASRKYTVLDVNNVNEATARKFISDALAKTEAAEKDESLPSVPLFPSPEVAKKKPVVGLKELDVDTVRDCVAKRDKMCVVVVKTDTELVRSLAKKYRRDPFTFLFSKPDAQVLQALTTYVGEKNAEVVVLRAGRNMKYSALSGTNDESAISEFLDKLIDGSIPFSVPSGDMKTFVATVAGMSARHEEL

SEQ ID NO: 156433 - protein, 31 aa, Glycine max
  Clone ID: PAT_MRT3847_112280C.1.pep
FLIALLDAPFIGFLDIMDYYPGETPWHEIIT

SEQ ID NO: 156434 - protein, 123 aa, Glycine max
  Clone ID: PAT_MRT3847_112281C.1.pep
TAAPTNNWAPHKLSMPPLARRMKLSHCSLVWSSRPKKDLLKKERTKRNASGSTVYVFVLKSPHVFHFFVYLDFPKDELPDYIYIGGYTCIISPMFVLALQRVHYVVSHAFERIVLTNHVLEHE

SEQ ID NO: 156435 - protein, 74 aa, Glycine max
  Clone ID: PAT_MRT3847_112282C.1.pep
KKPGNLFLSRKTGAPPYRGQKKIIFSTGGEKTLRAFRKKPNFFKKKIGGVLSGFKKEKTGPFLGPPGEKPLLIF

SEQ ID NO: 156436 - protein, 54 aa, Glycine max
  Clone ID: PAT_MRT3847_112283C.1.pep
ELKNRVYPTGPEQWNPGEDSRPKNDTITMLGYHLDHNLEVPKNDLFCLSGKANL

SEQ ID NO: 156437 - protein, 145 aa, Glycine max
  unsure (1)..(145): unsure at all Xaa locations
  Clone ID: PAT_MRT3847_112284C.1.pep
QLTLKALAFSTTTNTKTSSSRAASVSTVGAVNRALLNLNGSXAGASAPRSVFFGTSLKKVIASWVRNSMDFRGSFKIVAVQXKKEIEETHYTYKDRWKGLAYDLSHYQHDITRGKGXDDSLLQAPHDAGTDYAAMSSYEYLSTGL

SEQ ID NO: 156438 - protein, 82 aa, Glycine max
  Clone ID: PAT_MRT3847_112285C.1.pep
KKKLKKYYQGGFVFQGAPVFMAPLVLLLIAPIVSFFVGKWGLFIFNVKDFEKMFGHLFLVPYVRLFSYPLFGALGPMKSQRG

SEQ ID NO: 156439 - protein, 125 aa, Glycine max
  unsure (1)..(125): unsure at all Xaa locations
  Clone ID: PAT_MRT3847_112286C.1.pep
MALRRLVMTLYAIFTLALARESHATYKDFWPAVWATTPITSSLRDLLMPVPASVEIADHPMQIEETQDLETFLYKEDLDXAKQMKVQFSKSSFEQPWGDGPWVKGIKDTTEEGYSFEELCIKKET

SEQ ID NO: 156440 - protein, 33 aa, Glycine max
  Clone ID: PAT_MRT3847_112287C.1.pep
VQPNGDLLKTGEAKVDPLFKAIEANIGANPDYN

SEQ ID NO: 156441 - protein, 76 aa, Glycine max
  Clone ID: PAT_MRT3847_112288C.1.pep
LFKSKLKTLMVFGATAARVALIRMRPRLKGSRARVVIIIHCTCRPWSDVVQLGGVMELGQQVDQLLFGLFARVRHL

SEQ ID NO: 156442 - protein, 135 aa, Glycine max
  unsure (1)..(135): unsure at all Xaa locations
  Clone ID: PAT_MRT3847_112289C.1.pep
XXNDXXXXXIRXXXXXFXRLXDLATQXCXFPLRIXHKXXXRNSXXSMTSXXTXLXLXXCFLXXXXSNXXXXFTAXTPRDKLSXHQQRXXFXKXPXXXNPXXXKXGFXXXPLFWXFXXXXPXXGXKXXFXCXXFFL

SEQ ID NO: 156443 - protein, 32 aa, Glycine max
  Clone ID: PAT_MRT3847_11228C.1.pep
PTSLNLKLKEKYFQNVKFTVYCLSFNDPTILI

SEQ ID NO: 156444 - protein, 132 aa, Glycine max
  Clone ID: PAT_MRT3847_112290C.1.pep
LEVFFCHNVILLFLLFGTQQLREFLRLENLSLSLSLYPLSADDFVCPLWIRFVRLFDLSDQIWIPFHCCVFDLLSFFLFMHYCYYYSQSLRWPMIFILSLDFGFDLALLYLFGLDLLAVFCDSNDRVSFNVF

SEQ ID NO: 156445 - protein, 180 aa, Glycine max
  Clone ID: PAT_MRT3847_112291C.1.pep
LCHSCSEINKAFCGFLYQCKYQPYQKILQENGCTSALFYAATSTSMETDEGEISNHKITNSQNDYHGMDQGNNIGVATGNWGCGAFGGDPEVKTIIQWLAASQALRPFIAYYTFGLEALQSLDEVAHWILSQRWTVGDLWNMLIEYSINRSKGETNVGFLQWLLPSIYGHGARMDLPNLA

SEQ ID NO: 156446 - protein, 70 aa, Glycine max
  Clone ID: PAT_MRT3847_112292C.1.pep
NDGFYEKKYGSFLCALLTNVVYCVLFGYPEKDDVIITYITSSYAFMLEVPPQNISGNIANPLNSEDTFYE

SEQ ID NO: 156447 - protein, 85 aa, Glycine max
  Clone ID: PAT_MRT3847_112293C.1.pep
GWLAPNYGLPPPGNKTGTFLLGAPNFLIGALFYHGELGKPRFPPKKLFWITIPFNKRGENKKGPPRGPLPKSYLTLLGMGPPPFF

SEQ ID NO: 156448 - protein, 101 aa, Glycine max
  unsure (1)..(101): unsure at all Xaa locations
  Clone ID: PAT_MRT3847_112294C.1.pep
FQKGFSKKPMAXFKRSPKVXREAPPGEKPEPVGTLFRKIIIVPQKIGSLLGVYHGKTFNQVGIQPQMIGPYLPQFFFSXKPVKHGRPGIGAPPFFRFIPFK

SEQ ID NO: 156449 - protein, 103 aa, Glycine max
  unsure (1)..(103): unsure at all Xaa locations
  Clone ID: PAT_MRT3847_112295C.1.pep
TYSNMTEHDEACKWTKSEPHSWELILPIEVCGANNGXEMLCSEWANXRLCDWTSLIDNPTQDTVCDILLEKRQDFEIAGNTLIPACCVPHATGRSSENAKFSA

SEQ ID NO: 156450 - protein, 55 aa, Glycine max
  Clone ID: PAT_MRT3847_112296C.1.pep
FIIFPKEGISVHEACYLNTSLARAGVAGAVWSTFESLVLTKRVDIASDCCTVSAR

SEQ ID NO: 156451 - protein, 61 aa, Glycine max
  Clone ID: PAT_MRT3847_112297C.1.pep
SILVFNSYYDSIHTFLFILLPMQIYNFLQLCIYDLSIFFFLYFYFLLFFFFLLSFLFLQLD

SEQ ID NO: 156452 - protein, 187 aa, Glycine max
  unsure (1)..(187): unsure at all Xaa locations
  Clone ID: PAT_MRT3847_112298C.1.pep
MFSFFIRKGVRKILKRKDSDAGQRXGRALEDLRASLFNQFRSSEGAKRQQQRICGPAIALSFNFLVAVGIIFMNKMVLQTVQFKFPILLTLIHYVVSWFLMAILKAFSFLPAAPSSKSTRLSTLFTLGFVMSLSTGFANVSLKYNSIGFYQMAKIAVTPSIVLAEFVLYRKKVSFAXVYALTWCMHF

SEQ ID NO: 156453 - protein, 63 aa, Glycine max
  Clone ID: PAT_MRT3847_112299C.1.pep
EISPQVVANLTSCTYIDTRICNLGAINGWIGSIIGLNFNSILNLPVMKLLLHCYYMERGYHLC

SEQ ID NO: 156454 - protein, 102 aa, Glycine max
  unsure (1)..(102): unsure at all Xaa locations
  Clone ID: PAT_MRT3847_11229C.1.pep
MSTFMLNIVLLMNIFQISFTAMRSTEFFHDHTSVLRYHTGPLVSGKIFIILIWYGHFKPSHRALVSDCITSLSPXSTNSTQPCVDTWWTSTEKYCHHLSTTM

SEQ ID NO: 156455 - protein, 99 aa, Glycine max
  Clone ID: PAT_MRT3847_1122C.1.pep
MVWSSFRVKTRRYTLGCSWILPSSLRYFPVRPTIYRIMSGQCMGPCRSSSLSKSSTSASLYETLNRSMSIRSTSTNIRPLLMLCYDEIYGSVSQIEDAN

SEQ ID NO: 156456 - protein, 693 aa, Glycine max
  unsure (1)..(693): unsure at all Xaa locations
  Clone ID: PAT_MRT3847_112300C.1.pep
MHFCSHEFFFAVALLFFAVFGAFFCVEQSRFHLPGFFEPCPCLKFSALPEMMISTMGAPIYPNPKEXHVSSCLLAVKLMFTFLFRRGLASVFHLISAENGLSRSRSQRXSIESLPDECLFEILRRLPAGQDRSVCASVSKRWLMLLSSICKTEIHSYGSTGNENQEISDEGYLSRSLEGKKATDVRLAAIAVGTASRGGLGKLTIRGCNSDRGVTNVGLKAIAHGCPSLKVCSLWDVATVGDVGLIEIASGCHQLEKLDLCKCPNISDKTLIAVAKNCPNLAELSIESCPNIGNEGLQAIGKCPNLRSISIKNCSGVGDQGVAGLLSSASFALTKVKLESLTVSDLSLAVIGHYGVAVTDLVLSCLPNVSEKGFWVMGNGHGLQKLTSITINCCQGVTDVGLEAIGRGCPNVQNLKLRKSAFLSDKGLVSFARAAPSVESLQLIKSXHRITQIGLFGVFFNCGAKLKVLTLISCYGIKDLNMDLPAISPSESIWSLTIHDCPGFGYANLALLGKLCPRLQHVENEXGFEGVTDAGFLPLLESSEAGLVKVNLNGXVNLTDRVVLYIVNSHGWTLEVSRLYGCKRVQXDLAWMAITGXCPLLADLDVSRCAITDTGIAALARGKQLNLEVLSLAGCXIGFRQERACLEKNGLFPCWIKYQALQRNQQPLCQQASGTSLXCVTSSTEQEMPQQLL

SEQ ID NO: 156457 - protein, 171 aa, Glycine max
  unsure (1)..(171): unsure at all Xaa locations
  Clone ID: PAT_MRT3847_112301C.1.pep
MHFCSHEFFFFVALFFAVFEAFFCVEQSRFHLPGFFELCPCLKSSALPEMMIFIMGXPIYPNPKEXVSSCLLAVKLMFTFLFRRGLASVFHLISVENGLSRSXKTSIESLPDECLFEILRRLPAGQDRSVCASVSKRWLMLLSSICKNETYSNESTGNENQEISDEGYLSR

SEQ ID NO: 156458 - protein, 71 aa, Glycine max
  Clone ID: PAT_MRT3847_112302C.1.pep
TFFLRKLAGDKNGGVTPSNFVSFAHKGINKVFQWDLNGCKGLKKGPQIFGQGPRSRVEFLSHKLKQAPWVI

SEQ ID NO: 156459 - protein, 108 aa, Glycine max
  unsure (1)..(108): unsure at all Xaa locations
  Clone ID: PAT_MRT3847_112303C.1.pep
RXNRNFVRMWKPRVVPSVLSLLVLLHSLLGMVSAQGIIRTTWNTLTGSCLVSFFFLSLLFHTYSYVADKMHQKINYKRNCSKLDLACLVFLRSSLSSSCFENYVFIYI

SEQ ID NO: 156460 - protein, 56 aa, Glycine max
  unsure (1)..(56): unsure at all Xaa locations
  Clone ID: PAT_MRT3847_112304C.1.pep
XRNXAXGRXEEXTHPDTXKAXAAEPTXTXNXAXAGFFFGIAYNKLTDNVVATPAGL

SEQ ID NO: 156461 - protein, 61 aa, Glycine max
  Clone ID: PAT_MRT3847_112305C.1.pep
SQDLDSWEIVILNQNRSLRRLIEKLETSGVNYISLQNEEEMKIPIAAHLIRGFWRGYCALR

SEQ ID NO: 156462 - protein, 38 aa, Glycine max
  Clone ID: PAT_MRT3847_112306C.1.pep
EYQILGRQCIKINLFNTIYFMTWDPKLHILFKKQINLL

SEQ ID NO: 156463 - protein, 86 aa, Glycine max
  unsure (1)..(86): unsure at all Xaa locations
  Clone ID: PAT_MRT3847_112307C.1.pep
GQFITEVVCATRRLVLEANSVFKWXTASAACGEYIADYVLGDQYRSNTKTVHQQAYFYAKSLRLTNIDVFVLDVDDTTLYNLQYFG

SEQ ID NO: 156464 - protein, 87 aa, Glycine max
  unsure (1)..(87): unsure at all Xaa locations
  Clone ID: PAT_MRT3847_112308C.1.pep
IISQNELIARWHHPSGNDFPTPFVTEEQLVILXRALLPPDRSPVGIRHSAWVRGDLVRFEIAEDDVXDSQIHPGYSHPSIEGLLKIF

SEQ ID NO: 156465 - protein, 112 aa, Glycine max
  unsure (1)..(112): unsure at all Xaa locations
  Clone ID: PAT_MRT3847_112309C.1.pep
GRTAEEKLKRSLFGDDEGAPLEDIAEEEEQGEEEEDADIGEDDEMADFIVDEEEVDENGAPMXQKKLKRKKTRQAPGVSSSALQEAQELFGDSDELILNRQKNLEMSEFRET

SEQ ID NO: 156466 - protein, 53 aa, Glycine max
  unsure (1)..(53): unsure at all Xaa locations
  Clone ID: PAT_MRT3847_11230C.1.pep
NGYFKNKSPFFFILSFLFIFFIFFFFSYFLLFLFFSLLFFXFFFNIIFIFFFF

SEQ ID NO: 156467 - protein, 54 aa, Glycine max
  Clone ID: PAT_MRT3847_112310C.1.pep
THDIISFCNNPCISAVMGIKHPRSIKVSMHKATYAISAKNLSMNSTYVNNNLHN

SEQ ID NO: 156468 - protein, 49 aa, Glycine max
  Clone ID: PAT_MRT3847_112311C.1.pep
SLGWVVRRIRGAAEVTKGGLFWGSSMCLFYKAIPQIVYRSAFLRCQLMG

SEQ ID NO: 156469 - protein, 89 aa, Glycine max
  Clone ID: PAT_MRT3847_112312C.1.pep
PIRTLILQLTSLITLVKSCNYKLTRLSIVDMECVVQGIIETQHVEALEILLQGLCGVQRERLRIHEICLKSGPHLGTVASEVQLLSDLK

SEQ ID NO: 156470 - protein, 224 aa, Glycine max
  Clone ID: PAT_MRT3847_112313C.1.pep
GQLCKVDMECVVQGIIETQHVEALEILLQGLCGVQRERLRIHEICLKSGQHLGTVASEVRLLCDLEQAEPSWTVKHVGGAMRGAGAEQISVLVRSMVESKTSKNALRMFYTLGYKLDHELLRVGFSFNFHRGAQITVTVSSINKMLKLHATDEAVPVTPGIQMVEVTAPATAETYAEVASAVSSFCEYLAPLLHLSKPGISTGVVPTAAAAAASLMSDGGGTNL

SEQ ID NO: 156471 - protein, 85 aa, Glycine max
  Clone ID: PAT_MRT3847_112314C.1.pep
KRKKIGLIKEKYIFKKRVFTWNFITIKSFTNYWGVPKKRPFISKKGVRNPFGKKKGYFTTLKAFSLAQFIFTGNSKSFFWNKNKR

SEQ ID NO: 156472 - protein, 242 aa, Glycine max
  unsure (1)..(242): unsure at all Xaa locations
  Clone ID: PAT_MRT3847_112315C.1.pep
MDLSKVLDCINNTCISCVMQLSIVDMECVVQGIIETQHVEALEILLQGLCGVQRERLRIHEICLKSGPHLGTVASEVRLLCDLEQAEPCWDCXHVGGAMEGAGAEQNFCLVRSMVESKQSKNXLRMFYTLGYKLDHELLRVGFSFNFHRGAQITVTVSSINKMLKLHATDEAVPVTPGIQMVEVTAPATAETYTEVAAAVSSFCENLAPLLHLSKPGISTGVVPTAAAAAASLMSDGGSTTL

SEQ ID NO: 156473 - protein, 91 aa, Glycine max
  Clone ID: PAT_MRT3847_112316C.1.pep
LGFPCSPKQEAIKIRFFSNEQHQPNQECCNAVVFHQPWNTLHPHEPPSLPNAASTTRCHVTLPRPLSAFTTPNPRARTTTTATPSSSSSSA

SEQ ID NO: 156474 - protein, 74 aa, Glycine max
  Clone ID: PAT_MRT3847_112317C.1.pep
YPPNVEFHNLPNASNFTQRTDAENVSKPARINKNPSVLNILQTLILITYGSHLIDTLLQLQPKYIQPVAWPHSL

SEQ ID NO: 156475 - protein, 41 aa, Glycine max
  Clone ID: PAT_MRT3847_112318C.1.pep
IPLVDVNELLEATNSHATRIVWGPSSRLSRHFDFQKSTSLG

SEQ ID NO: 156476 - protein, 69 aa, Glycine max
  Clone ID: PAT_MRT3847_112319C.1.pep
KRFVTIGGVPGKENTWFKIQKTGKYAYKLVYCPSDENACSDLGIYYDKEAGKRWLALSDSPLEVMFVKH

SEQ ID NO: 156477 - protein, 160 aa, Glycine max
  unsure (1)..(160): unsure at all Xaa locations
  Clone ID: PAT_MRT3847_11231C.1.pep
MMGAIPEANGNVADEENGSSVGGSIDFGTAEAVQYVRSLTDVGAMTRLLHECIAHQRAVDVELDELLSQRTDLDRHLLQLQRSSDVLDIVNSDADYMLSNVASTSDLADQVSRKVRELDLAQSRXRNTLLXIDAIVERANSLEGXHRALEAEDYESAACY

SEQ ID NO: 156478 - protein, 83 aa, Glycine max
  Clone ID: PAT_MRT3847_112320C.1.pep
TSAHCCTHLGYTNSTPYMPHLSFLSEDLTNKKKRKAQKRVNPINAPLGGLPFQITPLPLYKTAIKDKPLKFWKKIVKSPLPPN

SEQ ID NO: 156479 - protein, 110 aa, Glycine max
  unsure (1)..(110): unsure at all Xaa locations
  Clone ID: PAT_MRT3847_112321C.1.pep
PKYAVPNTQQETFVFVPSTPRRTGTTGGLFHLTFNTRFVVVRPPLIVGSLAQLDLASLCVDCIRVEGRAMGLWYCGVLFFPHFPDPNDVNPEYEGNEXKGIHSMNEFSSP

SEQ ID NO: 156480 - protein, 101 aa, Glycine max
  Clone ID: PAT_MRT3847_112322C.1.pep
NFPHIERAKTLCTFIQATNDIIVRFAFNNFETLMHLHNILFDCIFDRIFTIKIHANILFLANIKTRWHLITTNVLLIRMTLVDINIMQSIIPKWILNSLYT

SEQ ID NO: 156481 - protein, 107 aa, Glycine max
  unsure (1)..(107): unsure at all Xaa locations
  Clone ID: PAT_MRT3847_112323C.1.pep
YLHEHNNPPVVHRDLKCSNVLLDSNFNAKLSDFGFAVVSGMQHKNIKMSGTLGYVAPEYISHGKLTDKSDVYAFGVVLLXLLTGKKPMENMTSNQYQSLVSWAMPQL

SEQ ID NO: 156482 - protein, 54 aa, Glycine max
  Clone ID: PAT_MRT3847_112324C.1.pep
LGVMFAIVEFQTFGTPIVLFSNGLCLVKLFLFACIRALHWLVGGNDHLIDKPHL

SEQ ID NO: 156483 - protein, 49 aa, Glycine max
  Clone ID: PAT_MRT3847_112325C.1.pep
KLLRRNSSLPIFTHLYVKATTHVALIHISMRLLLMHYNLQPLTILTIHS

SEQ ID NO: 156484 - protein, 85 aa, Glycine max
  unsure (1)..(85): unsure at all Xaa locations
  Clone ID: PAT_MRT3847_112326C.1.pep
KTSQYLKNDSLVMHSTXGGFRVXCEGSKQDVILPQSYMAHYFKDLLXSKVCCDILYKVQRERFKAYNLILASRSPVSRAQDFWLP

SEQ ID NO: 156485 - protein, 63 aa, Glycine max
  Clone ID: PAT_MRT3847_112327C.1.pep
LVFFFCFFFLIFIFSNKNFQYYKQRIIIKINRTLNTNDQFPNIKKIKKEPTMRLIHHIKVQNN

SEQ ID NO: 156486 - protein, 90 aa, Glycine max
  unsure (1)..(90): unsure at all Xaa locations
  Clone ID: PAT_MRT3847_112328C.1.pep
FQXCSXMYFPNFFVPRFTVRXXKXQXLLVXGYXSASXXCMXHVXSIASGXISXXAXNYYPHXXIXRGTIRWCRXXXXLCYTCXCXQPPGG

SEQ ID NO: 156487 - protein, 52 aa, Glycine max
  Clone ID: PAT_MRT3847_112329C.1.pep
EFDKYVQNPTHRSFWSERKNIIKPIIVICVETFIHAEKLLESTRNANGKCLT

SEQ ID NO: 156488 - protein, 40 aa, Glycine max
  Clone ID: PAT_MRT3847_11232C.1.pep
MTQWRSDTDVITPMVDRSPAVSRTHCRQIWRIYCSQLRST

SEQ ID NO: 156489 - protein, 73 aa, Glycine max
  Clone ID: PAT_MRT3847_112330C.1.pep
ADTIGIRLLLLSGLTLTGTVIGTIIATPHLVIFNPILEPAAFELILVAPGFMLSGGCGVAAIAALSRIYNYVA

SEQ ID NO: 156490 - protein, 301 aa, Glycine max
  Clone ID: PAT_MRT3847_112331C.1.pep
MVSKNPNPPEGFYLDPSGGMPLPGMPPFASVSAATAANSPEDAAKKIRKPYTITKSRENWTEPEHDKFLEAIQLFDRDWKKIEAFVGSKSVIQIRREAQIYFLKVQKRGTSEHLPPPRPKRKAAHPYPQKASKNAPVLSQVSGRFQSSSALLEPGYILKNDAPPMLKTPIMNTVASSWSNNTLQTANLSPVTKVNNPCSSGESTPKVWPVGESNGQGNKIHPLRVLPDFTQVYGFIGSVFDPNATEHLQKLKKMDRIDVETVLLLMRNLSINLTSPDFEDHRKLLSSYEVEPERDDNYQRG

SEQ ID NO: 156491 - protein, 57 aa, Glycine max
  Clone ID: PAT_MRT3847_112332C.1.pep
VAGARCCPTIVKCSWKSGHTAPYAGLYFSVWAFFTLGLSFFFLSSLGSPCWPPNFFP

SEQ ID NO: 156492 - protein, 70 aa, Glycine max
  unsure (1)..(70): unsure at all Xaa locations
  Clone ID: PAT_MRT3847_112333C.1.pep
MSFEDIKLCRPLXSKRAFINRKQDPTQAVAVRIFHIYTGVSTFHRLFNTLLTPKDTPHLLEKLLKTRLHI

SEQ ID NO: 156493 - protein, 43 aa, Glycine max
  Clone ID: PAT_MRT3847_112334C.1.pep
AFLVGLPWNLTSIVQGSLRVSLQCFTVVPVKDAYAALDTCACG

SEQ ID NO: 156494 - protein, 175 aa, Glycine max
  Clone ID: PAT_MRT3847_112335C.1.pep
AKLLACIYVFTGMALVGLILSKAADYIVEKQEIFLVRTLFKGENFGPEELSKEVETNKAKYKFILAASVFLVLMISGTIFLHYIENLDFVDALYCVCSTVTTLGYGDKSFSTTIGRAFAVFWILSSTICLAQSFAYLAEFYTEERQKAMAKIVLTPKLSLLDLEAADLDGDHVVR

SEQ ID NO: 156495 - protein, 213 aa, Glycine max
  unsure (1)..(213): unsure at all Xaa locations
  Clone ID: PAT_MRT3847_112336C.1.pep
SKRNSFDYYRRHQKPHQVTDFSSPNRFQRNQCGLESLHQRSLAAVCLLNTDYHIFLDXQQHRHLHHXPPPPPSSSTTTSKGLLATSSGERFISSSCSESRSIGSAVTSSERGLELVPLAKAWRKSYLVTVEERDLLLLVLGFANLRRIFREVFSTFSSSSLNSKTSNFLVEEEEDDDDRLRRVMKRVSKSDSDRWRKLSSGRQRTRGSTREFR

SEQ ID NO: 156496 - protein, 61 aa, Glycine max
  Clone ID: PAT_MRT3847_112337C.1.pep
DRLTSRDHIGTRQREITLNSHAYLLTHQMLYLSKLSWRRRRLSELTIDQRGLASKGTTLQL

SEQ ID NO: 156497 - protein, 106 aa, Glycine max
  Clone ID: PAT_MRT3847_112338C.1.pep
HPFPHTTMSCLNLRQRNASQASAHSLVIIVIFIIISYYYKIREQKKAKIRIKKWKRKKRIIGRMKSESLPNFVNGVGSDSFPLPLSFFLLFLSLSYFFLLTLTPET

SEQ ID NO: 156498 - protein, 83 aa, Glycine max
  unsure (1)..(83): unsure at all Xaa locations
  Clone ID: PAT_MRT3847_112339C.1.pep
PTTASYKIHPVAIILISLMQTDTHIELIIFNMLDXLLNKTSIVTNTLHSFMKGPQGITACPKGIITCALTFIIIVTDVTPYCK

SEQ ID NO: 156499 - protein, 53 aa, Glycine max
  unsure (1)..(53): unsure at all Xaa locations
  Clone ID: PAT_MRT3847_11233C.1.pep
FGSSTXXAFNCCXASXXXMXWDXXXXWXXLCXXXXCFPAXXPYLEXXESXHXX

SEQ ID NO: 156500 - protein, 44 aa, Glycine max
  unsure (1)..(44): unsure at all Xaa locations
  Clone ID: PAT_MRT3847_112340C.1.pep
XXHXIXAFLGFSXXXXXFXXXVGXXEXGFVSKXNSXLTYXLXXX

SEQ ID NO: 156501 - protein, 149 aa, Glycine max
  Clone ID: PAT_MRT3847_112341C.1.pep
MAVTVAMLPRWSVFLLFLFVLCSSGAKVVAIDVHAAKRLIQTGSIYLDVRTVEEFKKGHVDAVNVLNIPYMLNTPKGKVKNPDFLKEVSSACNKEDHLILGCQSGVRSLYATADLLSEGFKNVKDMGGGYVDWVKNKFPVIIPVAKEEL

SEQ ID NO: 156502 - protein, 71 aa, Glycine max
  Clone ID: PAT_MRT3847_112342C.1.pep
FPFFLYFLLFGVRRLGGFFQFPPHEYVHIIGGSCLIENQGKYNQIHMLGCFTEASWIILLEDGYRHDQILV

SEQ ID NO: 156503 - protein, 83 aa, Glycine max
  Clone ID: PAT_MRT3847_112343C.1.pep
PWESRVPSVTNTSPEKDQNKKPRKVQKDRNSPTSKKPVSVKTPSANAKGTKPLSNAKGTTKARRRLSYPAATEKKAVPAEGKQ

SEQ ID NO: 156504 - protein, 113 aa, Glycine max
  Clone ID: PAT_MRT3847_112344C.1.pep
GHVKDVRSICWDKNGNYVASVSEDSARIWSSDGQCISELHSTGNKFQSCIFHPEYHNLLVIGGYQSLELWSPAENSKTWAVHAHKGLIAGLADSPENEMVASASHDHWVKLWK

SEQ ID NO: 156505 - protein, 62 aa, Glycine max
  Clone ID: PAT_MRT3847_112345C.1.pep
RTLHDLKYIHESVSLTQYTSGTGAGTWIRIRLTGVYRSLIKPFVKCELFILMQLHGASDTPL

SEQ ID NO: 156506 - protein, 137 aa, Glycine max
  Clone ID: PAT_MRT3847_112346C.1.pep
PRVRPKARISVPQALEHRYFSSAPLPTDPVKLSRPAPKKESKVSDVISNEGPTVLSPPRKSRRVMPGRDGSEGNSLQGDKFDDSVVSVRQAAGDNMGKNEPAPMSLDFSLFGLKPPNRPTITSADRSHLKRKLDLEF

SEQ ID NO: 156507 - protein, 187 aa, Glycine max
  Clone ID: PAT_MRT3847_112347C.1.pep
MYRPQVKLCAIPIIIIQFLTMAEESKPKWEGKSVTELPGTDAEQVWTALEDFCNLHKWWPIETCYQLEGVPGQPGLIRYCASTVEEAVVGAQKTTTTIKWTKEKLLAIDPVQRCLSYEIVENNMGFKSYVATLKVLPMNGDGCKIDWGFVCDPVEGWSFQDLKLYLESSLQSMAKKIQLACSSTSTH

SEQ ID NO: 156508 - protein, 130 aa, Glycine max
  Clone ID: PAT_MRT3847_112348C.1.pep
LLTPYNRVNEEDSFGSAERAFNCVHGNAMELVGDAFGRLRARWRLLAASRKWKQECVEHLPFVVVACCLLHNFVVKFNEAMPDEGVSKWCVEKEKEKEEELPAFDGVGDESAVRVRDALALHLSRLSLRK

SEQ ID NO: 156509 - protein, 93 aa, Glycine max
  Clone ID: PAT_MRT3847_112349C.1.pep
LYKPVAPYPFSPPKSHASDGPWASMSTDTNQTHQHQKERQKSFDTTLFLPQWTQISASSCLNLSDSLTFFPSSSNGFPCWVRIEWRMCSSTYS

SEQ ID NO: 156510 - protein, 41 aa, Glycine max
  unsure (1)..(41): unsure at all Xaa locations
  Clone ID: PAT_MRT3847_11234C.1.pep
INILVSXXKIDGILWKATSTSYARNINIESLGRQRVIGWEK

SEQ ID NO: 156511 - protein, 64 aa, Glycine max
  Clone ID: PAT_MRT3847_112350C.1.pep
RLSYSFCCNCCCCTPSTPCLRPKVSDTDPRPSSPLLRYGINPISVPSISGVVIDIPHSSFDLFS

SEQ ID NO: 156512 - protein, 68 aa, Glycine max
  Clone ID: PAT_MRT3847_112351C.1.pep
HFRSLVKLNLQVNNSKSVKTLKFDGKEIHWEIGENLLLKLESVEIVKQVFPLHGVLTHMCHQFFSRLV

SEQ ID NO: 156513 - protein, 59 aa, Glycine max
  Clone ID: PAT_MRT3847_112352C.1.pep
CQSCQICKIALLFFETQLLSLTYTIINHITRFIKFVKSFDPKSSYWIVQLWPNILNRYL

SEQ ID NO: 156514 - protein, 188 aa, Glycine max
  unsure (1)..(188): unsure at all Xaa locations
  Clone ID: PAT_MRT3847_112353C.1.pep
MSSGTLENEKPQVEEEQAQAEDNHTKQEDNSEMKDDDDRGEEERDQVEQEKDVEKEEEKEEEEEEKEEDRDEVKSKKSTKESGYATPGSERPTRERKTVERYTVSSPDKFPRSSSIKALSIEKGNGTQLKDIPNVAFTLSKRKADDNLHALHSILFGKKAXVHHLKRNIGLFSGYVGTENEEKQRVKI

SEQ ID NO: 156515 - protein, 77 aa, Glycine max
  Clone ID: PAT_MRT3847_112354C.1.pep
DFAQGSLPRARGKKKDHIRKVSFRDLDQSFERFPRPQSQRSYAKVNGNFGKVTAKDFDDDLERYPLEAKRIKKQNGK

SEQ ID NO: 156516 - protein, 207 aa, Glycine max
  Clone ID: PAT_MRT3847_112355C.1.pep
GSEESLPRVLRYHGRTLDLPFKIFSGFEALELKNYFLKTSPSSNDSCQVLTTLAFRNMSVKKDAWEGILSCCLCLENLTLENVTHDNCKLMREVTINSPRLKFLRICRMQMNGFKVSAVNLEVFEIDTVVCMPKRLLTFEIPKVHLLRSRSDLKIRGQYICWVGSKLLQSRNILHTSSQSHQGTTSSFAGIFENLATLCIDFDLKTV

SEQ ID NO: 156517 - protein, 117 aa, Glycine max
  Clone ID: PAT_MRT3847_112356C.1.pep
RGGPPVQVLNPIYTANSSVPCGKLTTSKAHGLLIDGWHNNPPLGSSTAGVLQDSAFGSLSNIQRWGQSLGGHLQIRCHRVQCLVKYFIRLSALALIRWFSHDASLTLIELWSFALNV

SEQ ID NO: 156518 - protein, 99 aa, Glycine max
  unsure (1)..(99): unsure at all Xaa locations
  Clone ID: PAT_MRT3847_112357C.1.pep
SILEQEEKHEKTVEKNHVEKVXRKSQAGKKLPXRKTRRKKGEEEKRNKKSVETYKIYIFKVLKQVNPDIGISSKGMGIMNSFINDIFEKLAQESFRLAR

SEQ ID NO: 156519 - protein, 47 aa, Glycine max
  Clone ID: PAT_MRT3847_112358C.1.pep
SNEVESGLQIRMLFKFIKLVHDSLILLTLYYRLTMQLIIILRNHGLA

SEQ ID NO: 156520 - protein, 132 aa, Glycine max
  Clone ID: PAT_MRT3847_112359C.1.pep
WEMLWAFPFLPGISMLILPPCFKGPPYRIQLLAPPYLVRISWLHPGARLECWSAPMCLSHNSPPCVIFWTGVGPPPPLPKIGGAFEKTTHGGHFLRWFRPACIFFSSIKKVFGVLASQKQKPKKKVSKKKKK

SEQ ID NO: 156521 - protein, 59 aa, Glycine max
  Clone ID: PAT_MRT3847_11235C.1.pep
TWKWFLLLLKGDCACSPFTMRRVGVWIYISFLVPGPLSELVITNPAVFVTKRKVAIVFF

SEQ ID NO: 156522 - protein, 554 aa, Glycine max
  Clone ID: PAT_MRT3847_112360C.1.pep
ICTTDASSISPWVISFRGTTTTFPPSAVSTTSKWLGFVAAVWIQCISGNNYTFSNYSDALKSLMHLTQLQLNNLSVAKDVGKAFGLLAGLASDRFPTWAILLIGSVEGLIGYGTQWLVVSQRIQPLPYWQMCVFLCMGGNSTTWMNTAVLVTSIRNFRSNRGPVSGILKGFVGLSTAIFTTLCSALFADDPGSFLIMLSVIPFAVCLTGVFFLREIPPVASADADAEEVKYFGVFNVVAVAMALFLLAYGFIPSPSMLVSRVFVAVLVVMLVSPLGIPVYSYLKGSFGEGNDVEGQRVKEPLLQIPEKENEAVAAEIVKRVPVVGEEHTIMEALRSVDFWILFVSFLCGVGTGLAVMNNMGQIGLALGYPDVSLFVSLTSIFGFFGRIISGTVSEFTIKKAGTPRPLWNAASQLLMAVGYILLAMAMPGSLYIGSILVGMCYGVRLAITVPTASELFGLKYYGLIYNILILNLPLGSFLFSGLLAGILYDMEATTTEGGGNTCVGGHCYRLVFVVMTGACIVGFFLDILLSIRTKNIYTKISMSKKSLATSNRQ

SEQ ID NO: 156523 - protein, 246 aa, Glycine max
  unsure (1)..(246): unsure at all Xaa locations
  Clone ID: PAT_MRT3847_112361C.1.pep
MWRPAMGSTSSYVSSSSSSSKWLGFVAAVWIQCISGNNYTFSNYSDALKSLMHLTQLQLNNLSVAKDVGKAFGLLAGLASDRFPTWAILLIGSVEGLIGYGAQWLVVSQRIQPLPYWQLCVFLCMGGNSTTWMNTAVLVTCIRNFRSNRGPVSGILKGFVGLSTAIFTTLCSALFADDPGSFLIMLSVIPFAVCLXTGVFFLRETPPDVSAGDDDGEKVKYFGFFNVXXVAVALFLLAYGVIRTLH

SEQ ID NO: 156524 - protein, 272 aa, Glycine max
  Clone ID: PAT_MRT3847_112362C.1.pep
GNDVERQRLKEPLLQIPEKENEGVVAEEEAEIVKRAPEVGEEHTIVEALRSVDFWILFVSFLCGVGTGLAVMNNMGQIGLALGYPDISLFLSLTSIFGFFGRIISGTVSEFTIKKAATPRPLWNAASQLLMAVGYILLAMAMPGSLYIGSILVGMCYGVRLAITVPTASELFGLKYYGLIYNILILNLPLGSFLFSGLLAGILYDMEATTTEGGGNTCVGGHCYRLVFIVMTGACIVGFFLDILLSIRTKNIYTKISTSKKPKKSLGTSNRQ

SEQ ID NO: 156525 - protein, 88 aa, Glycine max
  Clone ID: PAT_MRT3847_112363C.1.pep
KPSRVKTDNTFIHYIPKLQTKYTIFQISQLTTRKAQNPNSAFSLTLKPIYHTTVTIDHTFLFNHLFIPTTFTFHKKHNTLTQISPYTH

SEQ ID NO: 156526 - protein, 39 aa, Glycine max
  Clone ID: PAT_MRT3847_112364C.1.pep
NIIYHFVTMSLFLFNSVVVSAIYSHWSSPLYLRPAVSPR

SEQ ID NO: 156527 - protein, 149 aa, Glycine max
  Clone ID: PAT_MRT3847_112365C.1.pep
SCFSKQRNRELKGIICSGVLSFNNIPENQREGLQLEDVQGKIFNLTDKVFSTTFRLLGVPRTNKDHIFLRRFGVNSSLVFQLQDKYTLHLKKRDPPLIERLELKNCRILLVFEGDDDYVGDEGSLDESQYSVSQKLAKFFNFAANDPCV

SEQ ID NO: 156528 - protein, 45 aa, Glycine max
  Clone ID: PAT_MRT3847_112366C.1.pep
WPNAGVQLYRLVEGIFESRPQPRSRSKRCVPPMSKKNSNSYANLL

SEQ ID NO: 156529 - protein, 81 aa, Glycine max
  Clone ID: PAT_MRT3847_112367C.1.pep
EERSLKELSPSEGEAPRPRSGEGLVAVTQHVLRRTVGTCVRELDTLIRAVMCDTVQPGDSTHPNIQPYSSFAASVGKDQSR

SEQ ID NO: 156530 - protein, 49 aa, Glycine max
  Clone ID: PAT_MRT3847_112368C.1.pep
HQSSFTKKKGEKIQGVQYFKLFPHRKLFLPQKNKGVYLSTLFKALFLIK

SEQ ID NO: 156531 - protein, 71 aa, Glycine max
  unsure (1)..(71): unsure at all Xaa locations
  Clone ID: PAT_MRT3847_112369C.1.pep
LFCYLYPSLFVINLLASSLSTLFGSSFCLLVVMLVLAISFVFCACSHSVFAGVICMDWFPFPQLTPSALDX

SEQ ID NO: 156532 - protein, 79 aa, Glycine max
  Clone ID: PAT_MRT3847_11236C.1.pep
AVDLGSLRASPSDVFRAGCSPLTRLWISSGCSLAVPRRAGSPSFSTVLVRCSSCFPMPEGAVAPPQTVKTLVCTIPLEP

SEQ ID NO: 156533 - protein, 78 aa, Glycine max
  Clone ID: PAT_MRT3847_112370C.1.pep
KNYLTMHKQHKKEATPIPLHYYKQIEATPSLLAALRAKDTFYQRQWSYTSILITDERRSGISLPYAGNKENAIAEPCW

SEQ ID NO: 156534 - protein, 95 aa, Glycine max
  Clone ID: PAT_MRT3847_112371C.1.pep
PFVPVVLYFVLAGPPPRTVILLCYPTLMCPRAGFLLPCYFLLRFTPWGHPPARAPRYWLSLPVVWAVPRCPDWLCGGALVRSLKHLSLLPLRLSL

SEQ ID NO: 156535 - protein, 385 aa, Glycine max
  unsure (1)..(385): unsure at all Xaa locations
  Clone ID: PAT_MRT3847_112372C.1.pep
MAASRIVAHPPPYPHRQSPPSDAPPSLNLTLNPKRYRNLGIRASLRGHEEKNKNDLADKPHSVELRATSTPDDVVSRDLLSLPRPLSSTQLSASVSDSSRLRVAYQGVRGAYSESAAQKAYPNCEAVPCEQFDTAFDAVERWLVDRAVLPIENSLGGSIHRNYDLLLRHSLHIVGEVNFAVRHCLMANHGVKREDLKRVLSHPQALAQCENTLTKFGLVREAVDDTCXAAKHVAYHKLQDAGAVASSAAAKIYGLNILDQDIQDDSDNVTRFLMLAREPMIPGTDRRFKTSIVFSLEEGPGILFKALAVFALRQINLTKIESRPLRNQPLRADDSNNSKYFDYLFYVDFEASMAEQSAQNALRHLKEFATFLRVLGSYPVDTSLT

SEQ ID NO: 156536 - protein, 148 aa, Glycine max
  Clone ID: PAT_MRT3847_112373C.1.pep
MAASRIVAHPPPYPHRQSPPSDAPPSLNLTLNPKRYRNLGIRASLRGHEEKNKNDLADKPHSVELRATSTPDDVVSRDLLSLPRPLSSTQLSASVSDSSRLRGAYQGVRGAYSESAAQKAYPNCEAVPCEQFDTAFDAVERWLVDRAV

SEQ ID NO: 156537 - protein, 93 aa, Glycine max
  unsure (1)..(93): unsure at all Xaa locations
  Clone ID: PAT_MRT3847_112374C.1.pep
FSGPLSSTQLSASVSDGSCLRVAYXGVHGAYSESAAQKAYPNCEAVPCEQFETAFDAVERWLVDRAVLPIENSLGGSIHRNYDLLLRHSLHIG

SEQ ID NO: 156538 - protein, 61 aa, Glycine max
  Clone ID: PAT_MRT3847_112375C.1.pep
DLKGTVPSWRHCVVDVLQVAATNERSPPRQIHVIIYTRRPKVENDYAASKTPQQALKTGAA

SEQ ID NO: 156539 - protein, 166 aa, Glycine max
  unsure (1)..(166): unsure at all Xaa locations
  Clone ID: PAT_MRT3847_112376C.1.pep
HVAYHKLQDAGAVASSAAAKIYGLNILDQDIQDDSDNVTRFLMLAREPMIPGTDRRFKTSIVFSLEEGPGILFKALAVFALRQINLTKIESRPLRNQPLRADDSNNSKYFDYLFYVDFEASMAEQSAQNALRHXKEFATFLRVLVCFPIDTTMNQQLFLFKYYHVS

SEQ ID NO: 156540 - protein, 105 aa, Glycine max
  unsure (1)..(105): unsure at all Xaa locations
  Clone ID: PAT_MRT3847_112377C.1.pep
LDERDFECLGNTTGQPYMLLTIVHTGGKGDRQQRYXLWIDPTREDATCSVLWKMYHIVLYVDDYPMRVFKTHSEFRVKLPFYLPMQIYNSLXNADVCVTLGGYDK

SEQ ID NO: 156541 - protein, 56 aa, Glycine max
  Clone ID: PAT_MRT3847_112378C.1.pep
NHIIKNTIFYTSYKPFCIIILPNTIVLSQHLLVNNQPNLGINIYSQRSHIHILREI

SEQ ID NO: 156542 - protein, 45 aa, Glycine max
  Clone ID: PAT_MRT3847_112379C.1.pep
DIANLDNFRSNIIVGNPRHIFEPKTFDPCQNFEWNVTRSKLQKKY

SEQ ID NO: 156543 - protein, 103 aa, Glycine max
  unsure (1)..(103): unsure at all Xaa locations
  Clone ID: PAT_MRT3847_11237C.1.pep
KWVINAIVLVLLGAPPLFLKKLLGGWPKTALSLFRPKFSLGGPFXCYFTLFSLVLKFCFFFFSSKFFLNFFPKQYILWGIPWYQKRDFFFFPIKNITLRTVNE

SEQ ID NO: 156544 - protein, 78 aa, Glycine max
  Clone ID: PAT_MRT3847_112380C.1.pep
NPEFGGVLDLWPGHLLQKLHQPYFKGFGQFLNAHVEFILHFGYEGWVENRGTQRQGAVIDHRKMKFFYLSEYVHQPWL

SEQ ID NO: 156545 - protein, 97 aa, Glycine max
  unsure (1)..(97): unsure at all Xaa locations
  Clone ID: PAT_MRT3847_112381C.1.pep
KIFFFFFWCFYWLSFSLLHYCEILGGNGKNKKGKPTAKKGRRRNRRKENSGTGGRKKKAWVFXXTXXPPQKRGGGXRPPPPNXPNRTPNGPGGPRKG

SEQ ID NO: 156546 - protein, 70 aa, Glycine max
  Clone ID: PAT_MRT3847_112382C.1.pep
VILITRFLTLHIKSLHMFMFHCLNPLFPTFPCWNLCFADGRCGEGPCSWDCWRGSTVDMWTPILTHQGQA

SEQ ID NO: 156547 - protein, 53 aa, Glycine max
  Clone ID: PAT_MRT3847_112383C.1.pep
FFNFYKKYVLERFISGVYGGILGVGFDKEGLEGFLGEIGYFNYVRVRKVIRVR

SEQ ID NO: 156548 - protein, 67 aa, Glycine max
  Clone ID: PAT_MRT3847_112384C.1.pep
GPEAQKRERERKCALRSSRRSLSKRKQKSILPTSLPPSLSFLLSYPSLSLIQSLISYNILYFTPLSQ

SEQ ID NO: 156549 - protein, 69 aa, Glycine max
  Clone ID: PAT_MRT3847_112385C.1.pep
LETTGAPTHFMIPQHRMPLLVISTLSTTDVRSLSLAKWPNEEDTLIVLTLNSVSRMLNTDNPVGLKKST

SEQ ID NO: 156550 - protein, 51 aa, Glycine max
  Clone ID: PAT_MRT3847_112386C.1.pep
SSPKQDALSISCSSRSTLNFFSRAQHASLFLIINIPLKIKPPYYSAVSAFD

SEQ ID NO: 156551 - protein, 44 aa, Glycine max
  Clone ID: PAT_MRT3847_112387C.1.pep
RGGPRGRPRVPWGATKGVGLFKGPNPWVMIKVSKQALKGAPYFF

SEQ ID NO: 156552 - protein, 68 aa, Glycine max
  Clone ID: PAT_MRT3847_112388C.1.pep
DKPTCIMGSHFFKDLSISYIVERLVFVKKAVLLCYVMLECTVKRSDWGIYLVTKLFFNKTVNQFQEAI

SEQ ID NO: 156553 - protein, 55 aa, Glycine max
  Clone ID: PAT_MRT3847_112389C.1.pep
LFGASNSLAQASVYHKYFLAQPCGINKLNVSWGPKKGWGMPWKWALFSTLKWILK

SEQ ID NO: 156554 - protein, 580 aa, Glycine max
  Clone ID: PAT_MRT3847_11238C.1.pep
FKKQSLEITVDLSKRSIVSTNVYIGHGFPMLTFDEQDFVAELPFKYKPFIESVNKRGLNISEVVCSTASVGWYGEIKSKRTLKLQCFHTQGSTNLFAMPLEGITVVADLDERKLVAYFDSKIVPVPKAEGTEYVASKQKPPFGPTFIGAAFVQPNGPGFKINGHSISWANWEFHLGYDIRAGPVISLASIYDIQQQRYRRVLYRGYISEFFVPYMDPTSSWYFKTFLDSGEFGFGQSMVSLEPFADCPSNAAFLDAYFAGEDGVPVKIANAFCVFEKYAGDIMWRHTESEIHDEEIREVRPDVSLVVRTVSTVGNYDYIVDWEFKPSGSIKMGVGLTGILGIKATAYTHVDQIKEDAFGTLLTDNTIGVHHDHYLTYHLDLDIDGEANSFVKTNLETVRVTDHSSPRKSYWTVVRETAKTEADARIKLGLKPSELAVVNPNKETKPGNKMGYRLFPFTVANPLLAPDDYPQLRGSFTNYNVFVTPYNKSEKWAGGLYADQSRGEDTLAVWSLRNRSIENKDIVLWHTVGIHHVPCQEDYPIMPTLSGGFELKPTNFFESNPVLKAKAPKPVHLPKCNSKP

SEQ ID NO: 156555 - protein, 61 aa, Glycine max
  Clone ID: PAT_MRT3847_112390C.1.pep
IELLHASWSMRECFGFYIVSQGGLLAMKYKLTSMDNCSFEFQIFACHLTFTDKFGHFSRAS

SEQ ID NO: 156556 - protein, 81 aa, Glycine max
  Clone ID: PAT_MRT3847_112391C.1.pep
CAEAISKKEEPEPPQHQNFIVNEPKRVQISRILENFLASEDEVYNFDELSTRDRALVEKLSQKWGLVVHFSGVGLERNILF

SEQ ID NO: 156557 - protein, 67 aa, Glycine max
  Clone ID: PAT_MRT3847_112392C.1.pep
MFEKEQRGNEQSPGFIIHAEKMKIETETIRVSKRKLMGKGMGALLKEGRGRFYILRRCIIMLLCSHD

SEQ ID NO: 156558 - protein, 54 aa, Glycine max
  Clone ID: PAT_MRT3847_112393C.1.pep
WMMPLENLENSSQRALMADTLAACAGFTRANGGSPKMALRLVAKYNNGCLGATK

SEQ ID NO: 156559 - protein, 96 aa, Glycine max
  Clone ID: PAT_MRT3847_112394C.1.pep
IHHGFSIQLWSTLCIGSGVLHVCDEIRVYSQFRPKFWGFSFLIVQFHHPTPRRTWVSSICVKLELFGGKILAFLFPLLFPFPAIEICNKGSFFLSL

SEQ ID NO: 156560 - protein, 226 aa, Glycine max
  Clone ID: PAT_MRT3847_112395C.1.pep
MNFLALSNKGRKKQPQLRLLEMVITVFLLVLAIPSPLKTAESLNFNITNFANSESAKNMLYVGDGAVNKNGSIELNIVDYDFRVGRALYGQPLRLWDSSSGVVTDFSTRFTFTIDRGNNKSASYADGIAFYIVLKGRVNCAIKCVKLNREHMVTGNEGIGGDVEECKSATSCVWGNLVAMRGYVERETVSIRSTFVVTDFSTRFTFTIDRANNKSASYVERETVSI

SEQ ID NO: 156561 - protein, 59 aa, Glycine max
  Clone ID: PAT_MRT3847_112396C.1.pep
FELVYDRVEVEATGVLNLAQFLTRGNLKMYKGVNFLFHGGGIVIYFVSSYAATHYTLSF

SEQ ID NO: 156562 - protein, 88 aa, Glycine max
  unsure (1)..(88): unsure at all Xaa locations
  Clone ID: PAT_MRT3847_112397C.1.pep
EKALDTILTQKRRFQNEMKIYLXMRKKLKEICPEETQKKIEIMFTKIAAFFPDSHKAEECLHKLNQIKDNSVFKLLEKLLEEQAFTTI

SEQ ID NO: 156563 - protein, 86 aa, Glycine max
  Clone ID: PAT_MRT3847_112398C.1.pep
SCERGISICMYPLLKQAQGPYSSLSYCSLLLNHCLSKKSLCFVKIVHDHYLKLGLNTYTYLGNRCLDLYSEFGHLNDAPKCLMIFP

SEQ ID NO: 156564 - protein, 96 aa, Glycine max
  Clone ID: PAT_MRT3847_112399C.1.pep
RVGKRGPLPLVLILFFLQGGGGGNPPHFTIGRGRGEVNGKSTPVPLFFDPFPGQLIGGGVFATRINFYCAPAMQLNGEWGRFPLLCSGEGEGPFFF

SEQ ID NO: 156565 - protein, 141 aa, Glycine max
  Clone ID: PAT_MRT3847_11239C.1.pep
MVKSSAFKSIEKEPKPAQLTIFYAGQVVVFDDFPAEKLEEIMSLAGKGISQSQNTSACAHTHNQQGNHPSFVPNVSPQAPSRPIVCELPIARKVSLHRFLSKRKDRIASKAPYQINNPNSASNKPAESMTWLGLGAQSTQF

SEQ ID NO: 156566 - protein, 103 aa, Glycine max
  Clone ID: PAT_MRT3847_1123C.1.pep
RERVVASFGVSQSLCLRRARIAVSRFGVVENWDRENNKNLVEVMGFRGTTTGARVRGIIFVFVVVCGLVLDLICIKLWLEFGLILAELTNGLITLKDSGLLEC

SEQ ID NO: 156567 - protein, 249 aa, Glycine max
  Clone ID: PAT_MRT3847_112400C.1.pep
MENIGEDQYGYLPETDLFFPNEDLGSWAIMDGEAVSWYYDSSSPDGTGASSSVASKNIVSERNRRKKLNDRLLALRAVVPNITKMDKASIIKDAIEYIQHLHEQEKRIQAEILDLESRNKFKNPTYEFDQDLPILLRSKKKKTEHLFDSLSSRNSPSIEIIELRVTYMREKTFVVNLTCSKRTDTMVKLCAVFESLKLKVITANITSFSGTLLKKTVFIQADEEEKDFLHIKIQTAISALNDPLSPMSI

SEQ ID NO: 156568 - protein, 323 aa, Glycine max
  unsure (1)..(323): unsure at all Xaa locations
  Clone ID: PAT_MRT3847_112401C.1.pep
FEELNMDLFRKCMEPVEKCLRDAKMDKSTVHDVVLVGGSTRIPKVQQLLXYGAAVQAAILSGEGNEKVQDLLLLDVTPLSTGLETAGGVMTVLIPRNTTIPTKKEQVFSTYSDNQPGVLIQVYEGERTRTRDNNLLGKFELSGIPPAPRGVPQITVCFDIDANGILNVSAEDKTTGQKNKITITNDKGRLSKEEIEKMVQEAEKYKSEDEEHKKKVEAKNALENYAYNMRNTIKDDKIASKLSSDDKKKIEDAIEQAIQWLDGNQLAEADEFEDKMKELESICNPIIAKMYQGAGGDAGGAMDEDGPAAGSGSGAGPKIEEVD

SEQ ID NO: 156569 - protein, 134 aa, Glycine max
  unsure (1)..(134): unsure at all Xaa locations
  Clone ID: PAT_MRT3847_112402C.1.pep
MSYLLPHLHSEEERVVVIRFGHDWDDTCMQDTMQXMPIELLNTEPFMSNKMDEVLASVAEKIKNFAVIYLVDITEVPDFNTMYELYEPCTVMFFFRNKHIMIDLGTGNNNKINWALKDKQEFIDIVETVYRGAR

SEQ ID NO: 156570 - protein, 282 aa, Glycine max
  Clone ID: PAT_MRT3847_112403C.1.pep
EKYKAEDEEHLLNLLLRKPSFVVGNCNLDLLLLDVTPLSLGLETAGGVMTVLIPRNTTIPTKKEQVFSTYSDNQPGVLIQVYEGERTRTRDNNLLGKFELSGIPPAPRGVPQITVCFDIDANGILNVSAEDKTTGQKNKITITNDKGRLSKEEIEKMVQEAEKYKAEDEEHKKKVEAKNTLENYAYNMRNTIKDDKIASKLSADDKKKIEDAIEQAIQWLDGNQLAEADEFEDKMKELESICNPIIAKMYQGAGGDAGGAMDEDGPAAGSGSGAGPKIEEVD

SEQ ID NO: 156571 - protein, 648 aa, Glycine max
  Clone ID: PAT_MRT3847_112404C.1.pep
MAGKGEGPAIGIDLGTTYSCVGVWQHDRVEIIANDQGNRTTPSYVAFTDTERLIGDAAKNQVAMNPINTVFDAKRLIGRRFSDASVQSDMKLWPFKVIPGPADKPMIVVNYKGDEKQFSAEEISSMVLIKMKEIAEAYLGSTIKNAVVTVPAYFNDSQRQATKDAGVISGLNVMRIINEPTAAIAYGLDKKATSSGEKNVLIFDLGGGTFDVSLLTIEEGIFEVKATAGDTHLGGEDFDNRMVNHFVQEFKRKNKKDISGNARALRRLRTACERAKRTLSSTAQTTIEIDSLYEGIDFYTTITRARFEELNMDLFRKCMEPVEKCLRDAKMDKSTVHDVVLVGGSTRIPKVQQLLQDFFNGKELCKSINPDEAVAYGAAVQAAILSGEGNEKVQDLLLLDVTPLSLGLETAGGVMTVLIPRNTTIPTKKEQVFSTYSDNQPGVLIQVYEGERTRTRDNNLLGKFELSGIPPAPRGVPQITVCFDIDANGILNVSAEDKTTGQKNKITITNDKGRLSKEEIEKMVQEAEKYKAEDEEHKKKVEAKNTLENYAYNMRNTIKDDKIASKLSADDKKKIEDAIEQAIQWLDGNQLAEADEFEDKMKELESICNPIIAKMYQGAGGDAGGAMDEDGPAAGSGSGAGPKIEEVD

SEQ ID NO: 156572 - protein, 649 aa, Glycine max
  Clone ID: PAT_MRT3847_112405C.1.pep
MAGKGEGPAIGIDLGTTYSCVGVWQHDRVEIIANDQGNRTTPSYVAFTDTERLIGDAAKNQVAMNPTNTVFDAKRLIGRRFSDASVQGDMKLWPFKVIPGPAEKPMIVVNYKGEEKQFSAEEISSMVLMKMKEIAEAYLGSTIKNAVVTVPAYFNDSQRQATKDAGVISGLNVMRIINEPTAAAIAYGLDKKATSSGEKNVLIFDLGGGTFDVSLLTIEEGIFEVKATAGDTHLGGEDFDNRMVNHFVQEFKRKNKKDISGNARALRRLRTACERAKRTLSSTAQTTIEIDSLYEGIDFYTTITRARFEELNMDLFRKCMEPVEKCLRDAKMDKSTVHDVVLVGGSTRIPKVQQLLQDFFNGKELCKSINPDEAVAYGAAVQAAILSGEGNEKVQDLLLLDVTPLSTGLETAGGVMTVLIPRNTTIPTKKEQVFSTYSDNQPGVLIQVYEGERTRTRDNNLLGKFELSGIPPAPRGVPQITVCFDIDANGILNVSAEDKTTGQKNKITITNDKGRLSKEEIEKMVQEAEKYKSEDEEHKKKVEAKNALENYAYNMRNTIKDDKIASKLSSDDKKKIEDAIEQAIQWLDGNQLAEADEFEDKMKELESICNPIIAKMYQGAGGDAGGAMDEDGPAAGSGSGAGPKIEEVD

SEQ ID NO: 156573 - protein, 62 aa, Glycine max
  Clone ID: PAT_MRT3847_112406C.1.pep
SGVPVFSIGYAPPQTVPPPLKNFLARRVSSPVPWAPPVGALLTRGFKQSFDLGPGKVFGGLV

SEQ ID NO: 156574 - protein, 60 aa, Glycine max
  Clone ID: PAT_MRT3847_112407C.1.pep
PRVRHASAHASAHASEISFLFILFSLRHSHCNLYLLVRGYYNLTIVVLSLSTGYVVEFNI

SEQ ID NO: 156575 - protein, 61 aa, Glycine max
  Clone ID: PAT_MRT3847_112408C.1.pep
YNVVPFFYNNARITNYAHAYENASSRRISRLASTHSEKRSQIVGLRHIKGTVHPGPARPST

SEQ ID NO: 156576 - protein, 58 aa, Glycine max
  unsure (1)..(58): unsure at all Xaa locations
  Clone ID: PAT_MRT3847_112409C.1.pep
HSLQVQVIQXXXFMHNQVGNIXNXQNPANVCGLWFHFIKMIGSSLFFFIKFKVFVFCM

SEQ ID NO: 156577 - protein, 587 aa, Glycine max
  Clone ID: PAT_MRT3847_11240C.1.pep
MKKKNIETKIIKKTKSDEEKWVHDASVDYKGRIPLRASTGVWKASLFVLAIEFSERICHFGIATNLIMYLTKVMHEDLKTATKNVNYWVGATTLMPLIGGFVADAYTGRFRMVLFSSLLYLKGLSLLTMSQFIPSLKPCNNEICHWPRKVHEVVLFLALYCVALGTGGFKPCLQSFGADQFDDDHLEERKKKMSFFNWWNFTLCTAMLLGATVIVYVQDFVSWGVSYLILSMFMALTIIAFYEGKRFYRYRSTEGNPFMLILQVLIAAIRKSNLSCPSNPDSLYEFPKSEKSQGRLLSHTCRLRFLDKAAIVEGKYTEHRDQNPWRLATVTRVEETKLILNVIPIWLTSLIIGICIAQGSTLFVNQAASMNLKIINSFKIPPASMTSVSAISPIIAIPIYDKIIVPIMRKVKGNERGISVLWRVGIGLAFLVIAMVVAALVETKRLRMVEHDETMSVLWLIPQYLILGIGADSLSLIGLQEYFYDEVPDSMRSIGMALYLSVLGVGFFLSSFLIIIVEHVTGKTGKSWIGKDINSSRLDKFYWMLAVINAFVLCVFLLVSKRYTYKTVQRRAMETDSCKSDGVEMVA

SEQ ID NO: 156578 - protein, 54 aa, Glycine max
  Clone ID: PAT_MRT3847_112410C.1.pep
KTFLGDILFQECYFLKINTKHEKLNFLTSNSRETKNFSGAKCPPSVIASRPMIS

SEQ ID NO: 156579 - protein, 70 aa, Glycine max
  Clone ID: PAT_MRT3847_112411C.1.pep
FFMFFTLHEKIHCTWACLKNWPVGVRFSVHKETAPMDKSIVYLALGSLKFVKKWGFFSPHEEMTRYLRIL

SEQ ID NO: 156580 - protein, 96 aa, Glycine max
  Clone ID: PAT_MRT3847_112412C.1.pep
GPPGALRQMGLPPGVGRFFCGVGPPGFLVVKRAFCPPGLVWGSSLFRPPRFSPGASGLYLWGGVAGFLFRAGVCPGQVVPGGHGPLYRGRWPASGA

SEQ ID NO: 156581 - protein, 60 aa, Glycine max
  Clone ID: PAT_MRT3847_112413C.1.pep
MNFGPCGCMTLDLYYQTLNKFLVEYNTYHIIETELGTRFTISLVHPYFFFSCFLVILTLF

SEQ ID NO: 156582 - protein, 80 aa, Glycine max
  Clone ID: PAT_MRT3847_112414C.1.pep
RHPKTLGLERKRNQGIGIPWGGEIFFIRANFHQTQNWVIFQSTFPLFQVSPIDRWPIATSVKVPGDYYHIYFELEPLELN

SEQ ID NO: 156583 - protein, 42 aa, Glycine max
  unsure (1)..(42): unsure at all Xaa locations
  Clone ID: PAT_MRT3847_112415C.1.pep
QSGXRXEXSSFPXNXXHPCXHQSRHIXIKQFRAXIXKQCXXX

SEQ ID NO: 156584 - protein, 188 aa, Glycine max
  unsure (1)..(188): unsure at all Xaa locations
  Clone ID: PAT_MRT3847_112416C.1.pep
QMQQIRMSLQGTAVVLMGKXNTMMRKAIRGHLERNPALEKLLAHIKGNVGFVFTRGDLVDVRDKLLENKVKAPARAGAIAPCPVVIPAQNTGLGPEKTSFFQALSIPTKISKGTIEIINDVHILKEGDKVGPSEATLLNMLNISPFNYGLIVEMVYDSGTIFEPKILDIKPEDLRVKFMEGVSRLAAV

SEQ ID NO: 156585 - protein, 62 aa, Glycine max
  Clone ID: PAT_MRT3847_112417C.1.pep
PSAECLSMERRLGKLMRKFQHSEAEASNAIRKDSHTRVQHVSVNKPPPPQPKKPRTIEVKIA

SEQ ID NO: 156586 - protein, 54 aa, Glycine max
  Clone ID: PAT_MRT3847_112418C.1.pep
LTRDTNIPLVYLNCVKEYKSNTLVRIFKSCKNNKDKKISEVKLLLVISQSHSMS

SEQ ID NO: 156587 - protein, 72 aa, Glycine max
  Clone ID: PAT_MRT3847_112419C.1.pep
MSAMVEVWVGELTKLREKVLARKPFLLSKAKEGSERNQEEKETQTAVVKRDTTNGTMSEATVCLLMDRFVPW

SEQ ID NO: 156588 - protein, 77 aa, Glycine max
  Clone ID: PAT_MRT3847_11241C.1.pep
IAGPTDANAQVENCGSRGRQQIPCTRQLWASFKTAVSTAIVMFLKASTWNPSRLIPACSLFIPPLSPSSPFSVFTTT

SEQ ID NO: 156589 - protein, 65 aa, Glycine max
  Clone ID: PAT_MRT3847_112420C.1.pep
KENKPSFLFIVRRNPIFLFFERNQGIFPLSKVKKKKSFPRNLRWEKKPRKLGGVLKFHSPHKAPK

SEQ ID NO: 156590 - protein, 103 aa, Glycine max
  unsure (1)..(103): unsure at all Xaa locations
  Clone ID: PAT_MRT3847_112421C.1.pep
HSNHMTHKDQKYRGITQTDTTIWQITNLRSILKIRHMDRQPXQTISSAEFYPKHQQXDXKNQPARGRGNHHTIRRTQXTXAKXKENQKGRKQKQXKPKPKKKN

SEQ ID NO: 156591 - protein, 60 aa, Glycine max
  Clone ID: PAT_MRT3847_112422C.1.pep
HYSVTHALKFTNLYCRLGCQIMFSLELSFFEKDMIYKFKGGGKERNLVNDCLVYLSYLIH

SEQ ID NO: 156592 - protein, 114 aa, Glycine max
  unsure (1)..(114): unsure at all Xaa locations
  Clone ID: PAT_MRT3847_112423C.1.pep
KGAKRKGQRPKNTGGGTXRRENKGQSRKTEGNPRASVELQRTHRIKGMIKMEATAGIPENTGIAKAXAMNSSLRGRASPEINTICSQDCELWNPACTKATTKPIKPNPGTEARR

SEQ ID NO: 156593 - protein, 401 aa, Glycine max
  unsure (1)..(401): unsure at all Xaa locations
  Clone ID: PAT_MRT3847_112424C.1.pep
PVRNPGSTHASAFLHSCNEVSLAVPSADQGQVDNSSSYTAAPPEVTGKKGGNGFNSIEIASITSASAIVSVLLALIVLFIYTRKWNPRSRVVGSMRKEVTVFTDIGVPLTFENVVRATGNFNASNCIGNGGFGATYKAEIVPGNLVAIKRLAVGRFQGVQQFHAEIKTLGRLRHPNLVTLIGYHASETEMFLIYNYLPGGNLEKFIQERSTRAVDWRILHKIALDIARALAYLHDQCVPRVLHRDVKPSNILLDDDYNAYLSDFGLARLLGTSETHATTXGVAGTFGYVAPEYAMTCRVSDKADVYSYGVVLLELLSDKKALDPSFXSYGNGFNIVAWACMLLRQGQAKEFFAAGLWDTGPEDDLVEVLHLAVVCTVDSLSTRPSMKHVVRRLKQLQPPSC

SEQ ID NO: 156594 - protein, 131 aa, Glycine max
  Clone ID: PAT_MRT3847_112425C.1.pep
KKKKKKKKKKKLKKKNQKKPKKKKKKKKKKQKTTRGGPPKGTQRTTPGRAPPNPCNGAPKTQSPARGFPPGARENPGRPPPKPPGSKTPSGRRGKKRKGPTRPPFPKVAHPEGPRDPSLNRRINPGGWGGT

SEQ ID NO: 156595 - protein, 53 aa, Glycine max
  Clone ID: PAT_MRT3847_112426C.1.pep
SSRTSPHLPENIGHLLSLLLCALMELETRRNKSCLLFLVSLDCFDVRVVLFLF

SEQ ID NO: 156596 - protein, 43 aa, Glycine max
  unsure (1)..(43): unsure at all Xaa locations
  Clone ID: PAT_MRT3847_112427C.1.pep
XRXXASAXFGCEXXLKFPXAFLERVSXPEAXXXXXLHDXXXAV

SEQ ID NO: 156597 - protein, 54 aa, Glycine max
  Clone ID: PAT_MRT3847_112428C.1.pep
HGVSPRMLSHHPLLRLTNPRRWPLCSAGRCRDVRFNCRSLVRNQSRCCARVSVT

SEQ ID NO: 156598 - protein, 91 aa, Glycine max
  Clone ID: PAT_MRT3847_112429C.1.pep
AFVSILEIFNNFLWAFIFLFRNGAFYPFFPLLSQLSQARKPSRTLKWPMNLFPLNEEKKKTKGFVLKKKKKKKKKKKKKKKKKKKKRAATS

SEQ ID NO: 156599 - protein, 563 aa, Glycine max
  Clone ID: PAT_MRT3847_11242C.1.pep
MEQEMEKRKRGKSEEKGEEKWVHDASVDYKGRVPLRASTGVWKASLFVLAIEFSERICHFGIATNLIMYLTKVMHEDLKTATKNVNYWVGATTLMPLIGGFVADAYTGRFRMVLFSSLLYLKGLSLLTMSQFIPSLKPCNNEICHWPRKVHEVVLFLALYCVALGTGGFKPCLQSFGADQFDDDHLEERKKKMSFFNWWNFTLCTAMLLGATVIVYVQDFVSWGVSYLILSMFMALTIIAFYEGKRFYRYRSTEGNPFMLILQVLIAAIRKSNLSCPSNPDSLYEFPKSEKSQGRLLSHTCRLRFLDKAAIVEGKYTEHRDQNPWRLATVTRVEETKLILNISNSFKIPPASMTSVSAISPIIAIPIYDKIIVPIMRKVKGNERGISVLWRVGIGLAFLVIAMVVAALVETKRLRMVEHDEVITVGGTRHETMSVLWLIPQYLILGIGADSLSLIGLQEYFYDQVPDSVRSLGVGLYLSVVGVGFFLSSFLIITVDHVTGKNGKSWIAKDINSSRLDKFYWMLAVINAFNLCFFLFLAKGYTYKTVQRKTREICSDGVETMES

SEQ ID NO: 156600 - protein, 42 aa, Glycine max
  Clone ID: PAT_MRT3847_112430C.1.pep
SPRPRVDFKGHVLLFKPGLLYSLENTHVYILIILHSLFKTMR

SEQ ID NO: 156601 - protein, 177 aa, Glycine max
  unsure (1)..(177): unsure at all Xaa locations
  Clone ID: PAT_MRT3847_112431C.1.pep
EGASGEIALTAAGGLRQIPGITETFENAALIGIHYGGNFYEFVPWNGVVNWEVTTRGYWFMSADNGRYVVELEXQSEDPGTTLRAPTAEAGLAPACKDTCFGDLKLQMWERRYDGSKGKIILDVSSNMAALEVGGGPWFNTWKGKTSTPAALSRVLELPIDVEGIFNPVPLFKPPGL

SEQ ID NO: 156602 - protein, 94 aa, Glycine max
  Clone ID: PAT_MRT3847_112432C.1.pep
GVFVHSIHSVAQNAHCVFINRFHSNTFSSFGIRIPLVRLSYFKPVVRPCIRHGRARFLSVPLRARLFPLWPRYHLHQITDNRSSLGLYHRVQPS

SEQ ID NO: 156603 - protein, 85 aa, Glycine max
  Clone ID: PAT_MRT3847_112433C.1.pep
IFINKEIQRIFDLYDTTVSVKGKLRKVRKVEFISILYYVRIRVLRQLNHWRTFLFLFFREKYCYFKYTRIYWEIKNGYFILCRKV

SEQ ID NO: 156604 - protein, 56 aa, Glycine max
  Clone ID: PAT_MRT3847_112434C.1.pep
VAARARWPSIIPGAQKGRSIWPCMSVLRLQDTRLVIRTCTRILHSLSSSKKGPSLY

SEQ ID NO: 156605 - protein, 57 aa, Glycine max
  Clone ID: PAT_MRT3847_112435C.1.pep
ASEDDDRMLLLQDDDRGGQQLPLIVMSMKNNMVGLKVCALLLFRAVVTSYLPELIVF

SEQ ID NO: 156606 - protein, 99 aa, Glycine max
  unsure (1)..(99): unsure at all Xaa locations
  Clone ID: PAT_MRT3847_112436C.1.pep
SPLCLPLESSSQTHPPTIVPKNGPPSTQKSNLSSNPLPLILPFPTQSIXDSPPPNXPPLHHFXDRVLPPSSTNTLMDKNPPPRKNPLSKEKKIPIFSSK

SEQ ID NO: 156607 - protein, 82 aa, Glycine max
  Clone ID: PAT_MRT3847_112437C.1.pep
RHPYSINFTFITGPTADSMDGRATKNLWFLFHPIVPVALSVVLPLFLQPSVVNIRFRKLEHMHKFKIRVDLHYCVLLCYRFF

SEQ ID NO: 156608 - protein, 51 aa, Glycine max
  Clone ID: PAT_MRT3847_112438C.1.pep
ILNTIIVECGEVAHMVLSCPTNCGDTSSIPKSNFGPHYPCWQASFLLSMLI

SEQ ID NO: 156609 - protein, 59 aa, Glycine max
  Clone ID: PAT_MRT3847_112439C.1.pep
VHAFALSTNKLNEGQLFNRQRGGNPPTQLKTEGGWIQTWNLSHPEPEKRLCHCFQTNPG

SEQ ID NO: 156610 - protein, 595 aa, Glycine max
  Clone ID: PAT_MRT3847_11243C.1.pep
MKQEMEKRKRGKSEEKGEEKWVHDASVDYKGRVPLRASTGVWKASLFVLAIEFSERICHFGIATNLIMYLTKVMHEDLKTATKNVNYWVGATTLMPLIGGFVADAYTGRFRMVLFSSLLYLKGLSLLTMSQFIPSLKPCNNEICHWPRKVHEVVLFLALYCVALGTGGFKPCLQSFGADQFDDDHLEERKKKMSFFNWWNFTLCTAMLLGATVIVYVQDFVSWGVSYLILSMFMALTIIAFYEGKRFYRYRSTEGNPFMLILQVLIAAIRKSNLSCPSNPDSLYEFPKSEKSQGRLLSHTCRLRFLDKAAIVEGKYTEHRDQNPWRLATVTRVEETKLILNVIPIWLTSLIIGICIAQGSTLFVNQAASMNLKIINSFKIPPASMTSVSAISPIIAIPIYDKIIVPIMRKVKGNERGISVLWRVGIGLAFLVIAMVVAALVETKRLRMVEHDEVITVGGTRHETMSVLWLIPQYLILGIGADSLSLIGLQEYFYDQVPDSVRSLGVGLYLSVVGVGFFLSSFLIITVDHVTGKNGKSWIAKDINSSRLDKFYWMLAVINAFNLCFFLFLAKGYTYKTVQRKTREICSDGVETMES

SEQ ID NO: 156611 - protein, 90 aa, Glycine max
  Clone ID: PAT_MRT3847_112440C.1.pep
PEGEFLIYIEGQPHQEENLPSYLKNLTNRETFSLTKGKGLVKLAFFFNPFLNKGPPLGVKKPPTLRRGGLVPFKGKAQGFCETSQSQKGG

SEQ ID NO: 156612 - protein, 42 aa, Glycine max
  Clone ID: PAT_MRT3847_112441C.1.pep
MIVGIFYFGPLKLYVPSAKDRKVLVKLIMIVNFRINCVILIP

SEQ ID NO: 156613 - protein, 45 aa, Glycine max
  Clone ID: PAT_MRT3847_112442C.1.pep
KMLFTFFPVESNHHPRIISMTADISHITLHTHASDATSNPYTHLN

SEQ ID NO: 156614 - protein, 83 aa, Glycine max
  Clone ID: PAT_MRT3847_112443C.1.pep
GSRFEAACFKHIVYSTHRSFFIGSGEPKPAPPDHLRFFNYNLLAAGDTMREEFYTVQVLGAAKAYVSAAHACECPVNYKPRNS

SEQ ID NO: 156615 - protein, 72 aa, Glycine max
  Clone ID: PAT_MRT3847_112444C.1.pep
EQIQFVKFSHSPVISTQALGIHESRNELTVDCEGPLVEVTAFSEGVLESSHVGAVMSGFGVHFSTNLARLQL

SEQ ID NO: 156616 - protein, 232 aa, Glycine max
  unsure (1)..(232): unsure at all Xaa locations
  Clone ID: PAT_MRT3847_112445C.1.pep
MATSNSRKSETSPSPSPTTNFIPIPAAPAPKTVDDVWREIVAGDRRECKEEAPDDDYDKEMMTLEDFLAKADQDQEPDYDNXQLKMPMPLTERLGSGTLFSFDHLPTTPFHDSAAAEGSVIGFGNGVEVVEGGRVKRRRPVLEQLDKAAQQRQRRMIXKNRESAARSRERKQAYQVELESLAVKLEEENDKLLKEKAERKKERYKQLMEKVLPIAQKQKPPCILRRARSLQW

SEQ ID NO: 156617 - protein, 97 aa, Glycine max
  unsure (1)..(97): unsure at all Xaa locations
  Clone ID: PAT_MRT3847_112446C.1.pep
SGSITGRKLTLNKDRAADGGLSLGTTECAVAEPDLPVWEPSVTHSTWLDGTLPDDFCYDDLGLGSDLXSLRWYDHAELXVHWRLATLSAAGLMIEKS

SEQ ID NO: 156618 - protein, 49 aa, Glycine max
  Clone ID: PAT_MRT3847_112447C.1.pep
LKRRSGYLIFHVIWYELGFSTKFMKQVFLYIISLVLNLKMRKIIGVNEC

SEQ ID NO: 156619 - protein, 41 aa, Glycine max
  Clone ID: PAT_MRT3847_112448C.1.pep
FIIQSLQRDLGERIDNLVSSSQGISVECLIRCGWKLEKYLI

SEQ ID NO: 156620 - protein, 147 aa, Glycine max
  Clone ID: PAT_MRT3847_112449C.1.pep
HDALKSAFKFSSAEASPLKSISDYNIDTNENMEGLPINDGNVKASPIDKKLRSPMNANHDGIPSSLSTFHESAMKSGNADDLMAKLKMQGNLSKTSAGKRKTGYLEHADSDLPYAQVEQYVNLKQSFEAFSVGSLHRIAFTNTDQTW

SEQ ID NO: 156621 - protein, 199 aa, Glycine max
  Clone ID: PAT_MRT3847_11244C.1.pep
MASFDPNVDSSNSDTLRESNHKKRRKIGDHAAGDLDFAAAAPWRSDVEQRIYSRRLVEALRRTPSSATKPRAAGQVRETADRVLAATARGRTRWSRAILKRWRKLRMQHKKAKAASSNNGLKRTRIGNGERRNRLPAVQKKARVLSRLVPGCRKVSFPNLLEEATDYISALEMQVRAMTALAELLAGAAPANLAGSTLS

SEQ ID NO: 156622 - protein, 45 aa, Glycine max
  Clone ID: PAT_MRT3847_112450C.1.pep
ARALHRSVAEPRIIVQTTSEVNLLDDGYRWRKYGQKVVKGNPYPR

SEQ ID NO: 156623 - protein, 61 aa, Glycine max
  unsure (1)..(61): unsure at all Xaa locations
  Clone ID: PAT_MRT3847_112451C.1.pep
AYGKHQXTRPESHADTFINTYLAADSDNTCEASHNTFLYINSGYYELMYRLTYYIYSTLSK

SEQ ID NO: 156624 - protein, 43 aa, Glycine max
  Clone ID: PAT_MRT3847_112452C.1.pep
DQAFHFFVIKNRSLIGLLKRPVRGHNSKLLLAREIAIVWGAHP

SEQ ID NO: 156625 - protein, 72 aa, Glycine max
  Clone ID: PAT_MRT3847_112453C.1.pep
TRCPTSFLFHMTLVHISTKALHSTICYHWPLTISCVNELGALWPSISPGFMHIIQVQHVELGQNSDTTYSKA

SEQ ID NO: 156626 - protein, 49 aa, Glycine max
  Clone ID: PAT_MRT3847_112454C.1.pep
LRGPKKEPDQFQIFYGGAKFPGGFFFGGIWGVIWAHFPLKVWGLPNYPK

SEQ ID NO: 156627 - protein, 503 aa, Glycine max
  Clone ID: PAT_MRT3847_112455C.1.pep
MRNHIFFLFVLIALAPTFSLHLQSHAAPAGPLIKHISSLIKWTRSTSKTPHSDGNVLQFENGYVVETVVEGNEIGVVPYRIRVSEEDGELFAVDAINSNIVRITPPLSQYSRGRLVAGSFQGYTGHVDGKPSDARFNHPKGITVDDKGNVYVADTQNLAIRKIGDAGVTTIAGGKSNVAGYRDGPSEDAKFSNDFDVVYVRPTCSLLVIDRGNAALRQISLDQEDCDYQSNSISSTDILTVVGAVIVGYATCMLQQGFGSSFFSKTQQPSQKQFKGLASNEKHMPILESSKEEPGWPSFGQLIVDLSKLSLEALASTFIQFIPSHFRPSNSKRGLTPLKDRLVMPEDDVRPPLVNRQNAQGHTPLTENRMASQVHTPLTENRMASQVHTPTIAEKYSEMKPPKIKSSSFKDPSMSSKHRSSRRPEYAEFYGSSEIPPYTKSKSQKERPRHRQREKSGEVVMGAVGAEAKPVETRAVDHNDPKFDHYSMRTKYASEETFRFNSQ

SEQ ID NO: 156628 - protein, 202 aa, Glycine max
  Clone ID: PAT_MRT3847_112456C.1.pep
MEAISPKHLMTSLVIIIASSLTAHCGCAKRGGERPYKEANTLFIRTSCSSTTYPRLCYSSLVKHADLIQTNRVVLTGAALNVTLASVKSTSAMMSTLAKKQGLKPREVAAMQDCVEQLSDTVDELRRSIAEMSDLRASNWLEIMSDVQTWVSAALTDETTCNDGFQEITAATDIKSTVRRLVIQVAQLTSNALALINKLANS

SEQ ID NO: 156629 - protein, 233 aa, Glycine max
  unsure (1)..(233): unsure at all Xaa locations
  Clone ID: PAT_MRT3847_112457C.1.pep
MTSKLIASNLRHQITKSAQNLRRQLLSTAAAVAVPEHDGNNSNSSGMTMKGVRISGRPLYLDVQATSPVDPRVLDAMLPFYLSGYGNPXSRTHFYGWESDEAVEHARAQVASLIGASPKEIVFTSGATESNNISVKGVMHFYKDKKRHVITTQTEHKCVLDSCRHLQXQEGFDVTYLPXVSSDGLXDLGALRAAGAPPAAPLAVVAVNNEIGVVQPMEEIGRICKEFNVPFHT

SEQ ID NO: 156630 - protein, 290 aa, Glycine max
  Clone ID: PAT_MRT3847_112458C.1.pep
MTSKLIASNLRHQITKSAQNLRRQLLSTAAAAAVPEHDGNNSNSLGMTMKGVRISGRPLYLDVQATSPVDPRVLDAMLPFYISRYGNPHSRTHFYGWESDEAVEHARAQVASLIGASPKEIVFTSGATESNNISVKGVMHFYKDKKRHVITTQTEHKCVLDSCRHLQQEGFDVTYLPVESDGLIDLDELRASIRPDTGLVSVMAVNNEIGVVQPMEEIGRICKEFNVPFHTDAAQALGKIPIDVERWNVSLMSLSGHKIYGPKGVGALYMRRRPKIKVEPQMNGGGQEKG

SEQ ID NO: 156631 - protein, 183 aa, Glycine max
  unsure (1)..(183): unsure at all Xaa locations
  Clone ID: PAT_MRT3847_112459C.1.pep
LLPISVTKSQNQLKACSTRCSLSTSLVQLLSTAAAVAVPEHDGNNSNSSGMTMKGVRISGRPLYLDVQATSPVDPYLSRYGNPHSRTHFYGWESDEAVEHARAQVASLIGASPKEIVFTSGATESNNISVKGVMHFYKDKKRHVITTQTEHKCVLDSCRHLQQGGFDVTYLPVESDXLIDLDE

SEQ ID NO: 156632 - protein, 33 aa, Glycine max
  Clone ID: PAT_MRT3847_11245C.1.pep
KRQKRIGKLKFQAALPLRRKRTFQAGLASHEEV

SEQ ID NO: 156633 - protein, 253 aa, Glycine max
  Clone ID: PAT_MRT3847_112460C.1.pep
LRWGKSPTILHKVCDLPLGAFHLMGFLLSHCASKWKAPNDQVGSLVLESLSLLGHFALFHPGNQAVLRWGKSPTILHKVCDLPFVFFSDPELMPILAGTLVAVCYGCEQNKFVVQQELSVDMLLSLLRSCRNAAPATQLNSTLDNSTTDESGECNQLGTEIKKPQVDFPVKNSRSNGKGPRASSGKSGASGNNIKNGRIRSQRDGKTPKNSEEVAPKHGEPSNLMLHCRFPPSFIDKVEQFFSAEIANRVDEL

SEQ ID NO: 156634 - protein, 101 aa, Glycine max
  Clone ID: PAT_MRT3847_112461C.1.pep
YSNFELLCSSTCFLTGPDHMMFEVWNPLGIVGVITAFNFPCAVLGWNACIALVCGNCVVWYAYISISVYSMRLLNWTFLSQIMIALTIFHDLYNILFCIFM

SEQ ID NO: 156635 - protein, 60 aa, Glycine max
  Clone ID: PAT_MRT3847_112462C.1.pep
HPLFFITVRMTELDQEDPEHQGVSKASRPVSAESMDSPGTSLPQLGTFKEGAYTIMYKVA

SEQ ID NO: 156636 - protein, 42 aa, Glycine max
  Clone ID: PAT_MRT3847_112463C.1.pep
KDLIVVWGEKHGRVLVSSDCINHLKILQDPMLMVCYWLHAPT

SEQ ID NO: 156637 - protein, 58 aa, Glycine max
  Clone ID: PAT_MRT3847_112464C.1.pep
HAFVHAFDHSFLFIDITRYRVNKNNDLAFFRAASVDAWQCHAYTMLRMAMNTDYAATA

SEQ ID NO: 156638 - protein, 42 aa, Glycine max
  Clone ID: PAT_MRT3847_112465C.1.pep
KNSTVGLLSLQDLASRSRITHLILHSYIMSVCMHLICVDAYR

SEQ ID NO: 156639 - protein, 254 aa, Glycine max
  Clone ID: PAT_MRT3847_112466C.1.pep
ARISLRLHTTNNNLTILNFTHLQITMTQQATTSSETTTSSSSSSSSSSSTFSPSQHSGPKAQAQKQSKRPRDCSKHPVYHGVRKRNWGKWVSEIREPRKKSRIWLGTFATPEMAARAHDVAALTIKGESAILNFPEIADLLPRPVTCSPRDIQTAATAAASMVKFDPVTQSSDSETPESSELSEIVELPNIEDSSFDSVDSRPEFVLVDVVDGWVFPPMGMGSEGIEICAAFSDELFPQQSFIGSEIEILPIWD

SEQ ID NO: 156640 - protein, 165 aa, Glycine max
  Clone ID: PAT_MRT3847_112467C.1.pep
HASVRLREDDRRGGRPDMAYFFFTKDILKGKQISVFEGPNGRSVARDFTYIDDIVKGCLGALDTANRSTGSGPAQLRLYNLGNTSPVAVSKLVRILEKLLKVNANKKLLPMPPNGDVFFTHADISLAKKELGYNPTIDLETGLRKFLDWYMDYYSSSSSLPKRAW

SEQ ID NO: 156641 - protein, 52 aa, Glycine max
  Clone ID: PAT_MRT3847_112468C.1.pep
EKKKKNSDCKVGGFTSTHPGTAILDSSPTQKKESTVTPPATLITTFIEVVGI

SEQ ID NO: 156642 - protein, 240 aa, Glycine max
  Clone ID: PAT_MRT3847_112469C.1.pep
GWAYGPDIKSLRWPPISSHFSTKSASDVVRRRRWIRTRQSLSEQGTESLQGGASTVQPGASAVLSWRSSSKNSDQCLQVRPKFDNSQPSYSWGCAIAVGSSYIYSKDQLLDPGSTRLTSVTPTCSLKLNELEKKDILVCCNPSSGSKQLWFSVCTDASVLNTELNVPVYDWRISINSPLKLENRLPCPAEFSISEKTKEGNCIERHHGVVSSRQSVHIYSADIQKPLYLTVDVQGGWVME

SEQ ID NO: 156643 - protein, 35 aa, Glycine max
  Clone ID: PAT_MRT3847_11246C.1.pep
ETEHRSINDEVCEFPECKLDQTYRQFCIYSCVRLT

SEQ ID NO: 156644 - protein, 211 aa, Glycine max
  Clone ID: PAT_MRT3847_112470C.1.pep
GQEEKWPARLTSIPYWLTNSQVGVYGKPAPEDFTADYGHWTRIVSKSYLNGIGINWSNMRNVMDMRSVYGGFAAALKDLNIWVMNVVSVNSADTLPLIYERGLFGMYHDWCESFSTYPRSYDLLHADNLFSNIKNRCSLKAVVAEIDRILRPEGKLIVRDTVEIINEMESMVKSMQWEVRMTYSKDKVGFLCVQKSMWRPKELETLEYAIG

SEQ ID NO: 156645 - protein, 638 aa, Glycine max
  unsure (1)..(638): unsure at all Xaa locations
  Clone ID: PAT_MRT3847_112471C.1.pep
LFDSDERENKSDSDENEKKSDDASETTDKTEEKVEQSSNQESDENSNEKKTDDNANSQGSNEVYPSVAQSELLNESTTQNGSFTTQAAESKNEKESQVSSKQSTNWKLCNVTAGPDYIPCLDNLKAIKSLPSTKHYEHRERQCPKESPTCLVPLPEGYKRPIEWPKSREKIWYSNVPHTKLAEYKGHQNWVKVTGEYLTFPGGGTQFKHGALHYIDTIQQSVPDIAWGNRSRVILDVGCGVASFGGFLFERDVLTMSLAPKDEHEAQVQFALERGIPAISAVMGTKRLPYPGRVFDVVHCARCRVPWHIEGGKLLLELNRVLRPGGFFVWSATPIYQKLPEDVEIWNEMKALTKAMCWEVVSISKDKLNGVGIAVYKKPTSNECYEKRSQNQPPICPDSDDPNAAWNIPLQACMHKVPVSSTERGSQWPEKWPARLTNTPYWLTNSQVGVYGKPAPEDFTADYEHWKRIVSKSYLNGIGINWSNVRNVMDMRSVYGGFGCXPLKDLNIWVMNVVSVNSADTLPIIYERGLFGMYHDWCESFSTYPRSYDLLHADNLFSNIKNRCNLKAVVAEIDRILRPEGKLIVRDTVEIISEIESMVKSMKWEVRMTYSKDKVGFLCVQKSMWRPKELETLEYAIG

SEQ ID NO: 156646 - protein, 107 aa, Glycine max
  Clone ID: PAT_MRT3847_112472C.1.pep
MENRNTGSDAGDVSSATAVLLGALAPGVNGPTWITLKSTFLLLGLCLAVMLALAFSSSDSWLIFHVAFLVLICLILFLLLSWFLTQTGLVSVEHQMREMGLENLKSK

SEQ ID NO: 156647 - protein, 41 aa, Glycine max
  Clone ID: PAT_MRT3847_112473C.1.pep
YIIGVPKQTNTHISITFQFSLNLYHIIFFCLQLFMDTTKKS

SEQ ID NO: 156648 - protein, 107 aa, Glycine max
  Clone ID: PAT_MRT3847_112474C.1.pep
RIEPRYQEMLSKDIAETMIDGIKVRVIAGEALGIKSPIYTRTPTMYLDFTLKPGAHLQQLIPKSWNAFVYILEGEGVFGNQKSQPVTSHHILLLGPGDGLEAWNKSS

SEQ ID NO: 156649 - protein, 80 aa, Glycine max
  Clone ID: PAT_MRT3847_112475C.1.pep
QFQRPPSPTYTSELSLKDLSLAPHSTPTNYLHSTTDCRSAAITQEIIGPISLASGCCYLVFSSGNLLLSHEPDFWIKTDR

SEQ ID NO: 156650 - protein, 188 aa, Glycine max
  Clone ID: PAT_MRT3847_112476C.1.pep
MEQDRRFELIDQAIQKLVHDNTNKVQESLHNNDAQYQHPLSHLLSVSQLKMLKGEEILEQFEASSSSEPVASITQETESENEDAGESKGSENDEIIKELKKLKRQNFVTHCLLSVMIVLTVAWQLSEVSLILKVKDGISHPFRSFGNMLKGMVKVPNMNGQEADDKEHPSESPSIPSMIIPNMSHNGN

SEQ ID NO: 156651 - protein, 339 aa, Glycine max
  unsure (1)..(339): unsure at all Xaa locations
  Clone ID: PAT_MRT3847_112477C.1.pep
MLDYEWGNPSTIMLTGNEDSSAAGSDQTHRQIFDHYASXHTHPRPLPTRANALHRHHRRRNHRGFHPSTTSPRNPTTIXHMNHHHHTMPSSTHALXHGASNTSYPPPPSMLSLDPLPHVNAVGSGPGHGPGPGPGPGGLLLVPKSEEVGRPMDFVGSRIGLNLGGRTYFSSSEDDFVSRLYRRSRPVEPGSTISSNSPRCQAEGCNADLSQAKHYHRRHKVCEFHSKAATVIAAGLTQRFCQQCSRFHLLSEFDNGKRSCRKRLADHNRRRRKTQQPTQEIQKSQPSLDNVARSPPDSGAQSSSSVTVAVSPPDYFRQRPYQSTNNPSSISSSLFFSSG

SEQ ID NO: 156652 - protein, 44 aa, Glycine max
  Clone ID: PAT_MRT3847_112478C.1.pep
SSFNFYNQQALQEQNAREFLTQNQTNKMNPNKGPPKGSKSSNYC

SEQ ID NO: 156653 - protein, 462 aa, Glycine max
  Clone ID: PAT_MRT3847_112479C.1.pep
MVVLREHKLVEKFQVGPAVRTITTLPLTFLDLPLAGPIYVRRQFFYHFPHSTLHFCETILPCLKTSLSQTLQHFFPLAGNLLCPPPPHKPFIHCTGDDFVTLTIIESEADFKNLSSNRPKSLKDLDHLVPKLTCSNTHHDTFIFPLVALQATVFPNHGLCIAITYCHVMDDSCCSHFMKSWSSICRSGGVDFTLVEKSTPCFDREVLKDPKGLEAIFLRDYFEERSTWKVGKTSEVSNGNSEDYVKATIVFGREDVEGLRRWVLNQWKRSKEFNTPQYISKFVVTCAFVWASLVKTRCRNDEEEDVKEEFFRFAADCRDRLEHPVPKTYFGNCLTLCYAMLKREDLKGESGFVNAVKVIERAVADMKSELFKDAENWRESFTKMFVLGSTLIVTGSPKFTVYETDFGFGRPTKVEMAHSFKGMSLAETGDNEGGLEIGLVCTSTEYEYLISLIEQGLQISKS

SEQ ID NO: 156654 - protein, 65 aa, Glycine max
  unsure (1)..(65): unsure at all Xaa locations
  Clone ID: PAT_MRT3847_11247C.1.pep
XFYXMVNXXSDLISSVYPHARXWEXPFVXGSXDGPXGIXXCTVXQLLPXIHFQXNSRGLTGLWXX

SEQ ID NO: 156655 - protein, 71 aa, Glycine max
  Clone ID: PAT_MRT3847_112480C.1.pep
VTGPVHLNMIMTAPCPSGICLCALTLIRCRCRINSQRLNPQTPLAASVSLKTSAKSKASASSPSSPNPYES

SEQ ID NO: 156656 - protein, 54 aa, Glycine max
  Clone ID: PAT_MRT3847_112481C.1.pep
SRHISIKLGKNNQPRIREAEITTHSGQGIIIHLPPPPPVIFISNKLTRVQSVAP

SEQ ID NO: 156657 - protein, 236 aa, Glycine max
  Clone ID: PAT_MRT3847_112482C.1.pep
MAAATLSVRPDRLSPGSVFPRPPVQPPLRKPIAAPEPWRAAAPRIRIRTVAPVQASSRADDSAPFEMSVENALKLLGVSEGASFDDILRAKNAIVANCKDDQDAIAQVEAAYDMLLMQSLTQRRAGKVVNSSVRYADVKRVKSPAGGSMPQWLKNSPVSIESPSTSDLGLQAGVYGALMGLTYLNGASAPAAGYAGADVPGLLLAGSFGASLYFMTKKNVKLDPASLYYMFLVMGL

SEQ ID NO: 156658 - protein, 37 aa, Glycine max
  Clone ID: PAT_MRT3847_112483C.1.pep
YRSIFKDFLGKNKEYISIWNVLDDGRDYVGELGIRWD

SEQ ID NO: 156659 - protein, 83 aa, Glycine max
  Clone ID: PAT_MRT3847_112484C.1.pep
VCICGTEISKKNLLLAFICVVGLILYKVQDYHVLLFNDIVFGEVSRSLRHVDDDMCCEWKMIPPSKRYLNCKKAQGHSNSKRI

SEQ ID NO: 156660 - protein, 589 aa, Glycine max
  unsure (1)..(589): unsure at all Xaa locations
  Clone ID: PAT_MRT3847_112485C.1.pep
MIMAALNSSTCAKPQFPHPLSSSFSSSSSLTRDLGFPTRFQKKPIRKVVDCALHSPPVIHFPNQPYNKPEITKEPTTSTAERPQWNPFQKAAAKALDMFESALLSRELNQPFPKTTDPRVQIAGNFAPVPEHPVEHSLPVIGTIPDAINGVYLRNGANPLFKPKAGHHLFDGDGMVHAVKFNDGTASYACRFTETQRLMQERKLGKPVFPKAIGELHGHSGIARLMLFYARGLXFGSSHRRGAGAANAGLVFFNGKLLAMSEDDFPYELRITASGDLETIGRYSFHGQLNSSMIAHPKVDPVSGELFTLSYDVTSKILKYFHFSPEDERKSPDIEIPLDAPTMTHDFAITENFVVIPDQQVVFKLGEMIKGGSPVIYDGEKKSRFGILPKYASDASSIVWVDSPDTFFFHFWNAWEERDKDEVVVIGSCMTPPDSIFNDREERLKSVLTEVRLNMRSGKARRRVLVEEMNLEAGMVNRKRLGRKTRFAYLCIAEPWPKVSGVAKVDLESGEVKRHEYGERRFGGEPFFLPTRGGNGNEDEGYVMAFVHDEMTWQSELQILNALDLKLEATVMLPSRVPYGFHGTFVEAH

SEQ ID NO: 156661 - protein, 155 aa, Glycine max
  unsure (1)..(155): unsure at all Xaa locations
  Clone ID: PAT_MRT3847_112486C.1.pep
XXAGRSHLAVPGPDVCPSPPYTPSDQXXASXSPXFFLYXPYSAFQRSQXKKSFQXHPXFKXPLFKIPPQREKTXXXIFSTLWAWHXXXXHXQNQPHXPKKLPFPSSLPKGGLDLQIIVXMPMWVXHNITQXXXXIEESVRLXNXXXHXKRVNPRN

SEQ ID NO: 156662 - protein, 41 aa, Glycine max
  Clone ID: PAT_MRT3847_112487C.1.pep
VSEYTFFFFIKKEKGETTFNYESKKPNKLSIAISQSPRKGD

SEQ ID NO: 156663 - protein, 75 aa, Glycine max
  Clone ID: PAT_MRT3847_112488C.1.pep
MSKSRLFYIVKPRGSLNLGFCSKKAGGPWYPTDAPFLRIPPSNPHLRNFYGRFKANQSIKKFFPCTGIFWPLFSS

SEQ ID NO: 156664 - protein, 58 aa, Glycine max
  Clone ID: PAT_MRT3847_112489C.1.pep
GQESVIYRFGARGTGVLGEDAEVTGKFTSVAARCLHRLPSSDNKFTYNCGGDAFNDLV

SEQ ID NO: 156665 - protein, 111 aa, Glycine max
  Clone ID: PAT_MRT3847_11248C.1.pep
WKATNQTQWGSNQREEGTNRETQDMTKATKANEQRKGRGPQEETTEEPAEEDTEEGDENEEENTQAGENTERRTDQRGTTEKQAKPKRRRDQKGSGKNKRGRGRSNPRQGR

SEQ ID NO: 156666 - protein, 47 aa, Glycine max
  Clone ID: PAT_MRT3847_112490C.1.pep
YTPMHFVTKEYIKTLVSHTEHTKPKGIMMQLNEAHGLNFDMVAPHAW

SEQ ID NO: 156667 - protein, 102 aa, Glycine max
  Clone ID: PAT_MRT3847_112491C.1.pep
MDRVTQMASERPVVIFSRSSCCMCHTIKTLFSDFGVHPNVHELDEIPRGKDIEQALSRLGCSPSVPAVFIGGELVGGANEVMSLHLNRSLIPMLRRAGALWV

SEQ ID NO: 156668 - protein, 206 aa, Glycine max
  Clone ID: PAT_MRT3847_112492C.1.pep
MASPPPPPSLLLLFLTLVAATASSLTCTTQKLTDSKNNLYSNCLDLPALDSFLHWTHDPTNASLSVAFAAAPPNSGGWVSWGINPTAIGMQGAQVLAAYKADNGAVTVKTLDLKSYTAIVPGKLSFDVWDVRGEEVRGVIRIFATVKVPDKAESVNQVWQVGPSVTAGRIDRHDFAPPNINAKGVLSFNGSKMVVVGGGAVDLITM

SEQ ID NO: 156669 - protein, 337 aa, Glycine max
  Clone ID: PAT_MRT3847_112493C.1.pep
MADEGGIEKRRYDVFLCFRGEDTRYTFTGNLYAALRQARLRTFFDDGFKSGDQIFDVVLQAIQESRISIVVLSENFASSSWCLEELVKILECRETKKQLVIPIFYRMDPSDVRRQTGCYGESLAQHQYEFRSDSEKVRNWQEALTHVANLPGWRFSRYQYEYEFIEDIVRQAIVAIVPRYSIFLSFSGNDTRSFTGFLNNALCRSRYQTFMNDGDQISQSTNGVIEESRLSIIVFSENYARSSSCLDFLLTILECMKTKNQLVCPIFYKVLPSDLRHQRNSYGEAMTEHENMLGKDSEMVKKWRSALFDVANLKGFYLKTGYEYEFIDKIVEMASKI

SEQ ID NO: 156670 - protein, 197 aa, Glycine max
  Clone ID: PAT_MRT3847_112494C.1.pep
MHYLSRIFEPRKQTKTMDRKNPRRKPKLERRNALKYSSSEYDVVSSPSDDTLYTRSMEFYDRTSFRIEGVEGEFDRICRSLGLSGPEDFAIPAAAWEAMKFRSSSDILPRLKLDNLDIPEEDVEEESKVNEVRMFKSAEEGELSENHGVSDSVRVREIDESSNGIKGIRPPMLKPPPGTRVQVVDDSACSSWDLLRD

SEQ ID NO: 156671 - protein, 43 aa, Glycine max
  Clone ID: PAT_MRT3847_112495C.1.pep
WIRCRLKRERSHSTVWKDSMVSDEKGKRNGIRDEGRSILMLKL

SEQ ID NO: 156672 - protein, 75 aa, Glycine max
  Clone ID: PAT_MRT3847_112496C.1.pep
MMAFQSKAHILFLCLLIFAFSSINILAAAVPKEQEQDRISALPGQPRVAFSQFSGYVTVNEQHGRSLFYWVTESP

SEQ ID NO: 156673 - protein, 89 aa, Glycine max
  unsure (1)..(89): unsure at all Xaa locations
  Clone ID: PAT_MRT3847_112497C.1.pep
APLTLLSIXNSXRVFPAXXIXSXXTSATLXHPTPPLFLVXXVLHYLVFXRXXXXXSXLSSSSASFXRQLSAKXEGWXERXYHSGRGGWX

SEQ ID NO: 156674 - protein, 91 aa, Glycine max
  Clone ID: PAT_MRT3847_112498C.1.pep
PGDTEMWHVVGIPRVPAQDDFPIMPCLSAAFELRPTTFFERDPVLETLSPPHVRWSGCPKCNQVASHFHYLGVVQVSQINVCPGSCEMRSA

SEQ ID NO: 156675 - protein, 102 aa, Glycine max
  Clone ID: PAT_MRT3847_112499C.1.pep
MDDVAFYSLLFLCFFQSVRGILDPNDFLALQSIRKSLHDVPGSNFFSSWDFTADPCNFAGVFCADDKVIALNLGDPRAGSPGLTGKLDPSISKLSALADFTV

SEQ ID NO: 156676 - protein, 200 aa, Glycine max
  Clone ID: PAT_MRT3847_11249C.1.pep
MSVRSKNLNSVFYADSYHPIQAGSIDGTDVVPHDNAVYRAQLCSSIGLYDPFGDPKATGDPYCTLFVARLSRLTTEDDLRKVMSKYGRVKNLRLVRDIVTGASRGYAFVEYETEREMRRAYMDAHHLIVDDSEIIVDYNRQQLMPGWIPRRLGGGLSGKKESGQLRFGGKEKPFRAPLKPIPYEELKKLGIPPPPEGRYM

SEQ ID NO: 156677 - protein, 104 aa, Glycine max
  unsure (1)..(104): unsure at all Xaa locations
  Clone ID: PAT_MRT3847_1124C.1.pep
KAGTPGTXPKPPEDKDEQQQATKHKGQRQRTNPEPETIFFFTHESKKEGRTVNISSRGHQRLTYRGGIPRDKRNEESSQEKCCANGQSKLATILHANELTRRPK

SEQ ID NO: 156678 - protein, 68 aa, Glycine max
  Clone ID: PAT_MRT3847_112500C.1.pep
LTREQKTTFPRDRIKRFPSAGLFDATKLPRKKNTTNNYLNNDEIDIESPDSSLIIILNYLKLLESPQQ

SEQ ID NO: 156679 - protein, 54 aa, Glycine max
  Clone ID: PAT_MRT3847_112501C.1.pep
MLCWLESLVGLLAFLGIQLPVIMADCPLNFTGSNFTLASSLCSNHGDRGKCCRY

SEQ ID NO: 156680 - protein, 148 aa, Glycine max
  Clone ID: PAT_MRT3847_112502C.1.pep
TRGLSLSFFLFLFLSTLMAEDQGSHAIDFHLGNHLLVSSNSDNSGESKNNMKPLNQQNEEGEALVNKKRNLEIASENEKAHFTSDEWLDGKHPESNNEMFDDLRGLLPQLPSEADEATVIKVAADYIKGLEESRKMLGKITKRMFPYV

SEQ ID NO: 156681 - protein, 370 aa, Glycine max
  Clone ID: PAT_MRT3847_112503C.1.pep
SGETRRIPFPDGSFDFVFAGDGALEKSPRPAEFAAEISRTLKPEGFAAFHVKANDTYSYNSFVDLLNFCCNVVKINPTRPFDSSIPHIREIVVKKVRHTIDSESNSNSNSNGKECSVPEYKEKLVRNAEALIEEEPLKPWLTLKKNVKNIKYLSSMVDISFKDRYVYVDVGARSYGSSIGSWFRKQYPKQNKTFHVYAIEADKTFHQEYETKKGVTLLPYAAWVRNESLVFEINRDPGEKEKEKEKEKVKGKGRGMGRIQPLKSSGGFDGGEVEKIPGFDFADWLKNTVSENDFVVMKMDVEGTEFDLIPRLFETGAICLVDEIFLECHYNRWQRCCPGQRSPKYEKTYDQCLQLFTSLRQSGVLVHQWF

SEQ ID NO: 156682 - protein, 73 aa, Glycine max
  Clone ID: PAT_MRT3847_112504C.1.pep
CSLHNSTSWRWLRNSLLAVVCSIELVAAKRLHYVRQTTPLKSPQSPAGTTKSAAKSRRSLLVSIGVGGRNCIL

SEQ ID NO: 156683 - protein, 155 aa, Glycine max
  unsure (1)..(155): unsure at all Xaa locations
  Clone ID: PAT_MRT3847_112505C.1.pep
TYVIRFLERYGILYYCLCITTEHKREGEILXVDXNXDFIVIVRYMXILLANFLRRYGNDIINIYYGLLLSFKGGNLSKXAFEVGVKLIGVISXYVTEELDVGSIIEXMVERVFYRDNLXEFCIEIRKLREXCFSKAIRFYCEFRVLLYEEKRTVV

SEQ ID NO: 156684 - protein, 44 aa, Glycine max
  Clone ID: PAT_MRT3847_112506C.1.pep
MADDEDIPPLFCDLGPGMVKAAFAGADVPTAVFPSIVGRPLHTG

SEQ ID NO: 156685 - protein, 126 aa, Glycine max
  Clone ID: PAT_MRT3847_112507C.1.pep
VQIFLCFRTLHFSKLQIILCNSKTLWIYDNEFFLCMIYKCLNKQAAWLLSVQTHCVIHFGLSQMHICMCHWDLFLLKMMLAVGRKWFSQFLLVGSTCLSHCAALLLKEKYMKRLVVFCNYTTGQLI

SEQ ID NO: 156686 - protein, 93 aa, Glycine max
  Clone ID: PAT_MRT3847_112508C.1.pep
GECWLARGFSQRRFTVDGTIRLRTRLHSPQKYFLHLFILQTSNHKIIGVATYLASFSLYFEGSLYTHVMCVVENLRCFLAKVKLRGMLSGSRS

SEQ ID NO: 156687 - protein, 47 aa, Glycine max
  Clone ID: PAT_MRT3847_112509C.1.pep
PRVRVLGESFNFRTIDGEIRARSLKTCRAINQSRHLTLFMACRLSSR

SEQ ID NO: 156688 - protein, 45 aa, Glycine max
  Clone ID: PAT_MRT3847_11250C.1.pep
IHGPPFNNVLLGKTLRLPNLTPLNKIPLSQAGVLPKRPEPLALPK

SEQ ID NO: 156689 - protein, 45 aa, Glycine max
  Clone ID: PAT_MRT3847_112510C.1.pep
QHIHSIFLHLLYNSTEIFTHRLLTMITKHSIFFSFISNHLSLSLY

SEQ ID NO: 156690 - protein, 224 aa, Glycine max
  unsure (1)..(224): unsure at all Xaa locations
  Clone ID: PAT_MRT3847_112511C.1.pep
MKLKQKLIHFKIVSRMRFSAVYFVLLLFATRPLEATTCFTFNKEKKLSEFKTKVHEKIQKLSAPASSSETKKSGRVLYVSEYGADPTGNEESSDGILKAVEDAFALQKGVEFVGGVNDLGGVVIDLEGGNYKISKPISFPSSGGANLVVKGGTLRASDTFPGDRHLIELWSSXSGKLETXESLNADVFKASKXXNNAIYYEDITFSXTXLFDSSYRGRGIFIVD

SEQ ID NO: 156691 - protein, 533 aa, Glycine max
  Clone ID: PAT_MRT3847_112512C.1.pep
MRFSAVCFVILLLLVVELEATTCFTFNKEKKLSEFKTKLHQKIQKLATPPLSALASPPASSSETNKSGRVLYVSEYGADPTGSEESSDGILKAVEDAFELQKGVELVGGVNDLGGVVIDLEGGNYKISKPIAFPSSGGGNVVVKGGTLRASDTFPGDRHLIELWSSNSGKLESKEPLNADVFKSIKAQNNAIYYEDITFRDILFDSSYRGGGIFIVDSARTRISNCFFLHFTTEGILVQQGHETFISSCFLGQHSTVGGDKAEKDFSGVAIDLASNDNAVTDVAIFSAAIGVVLRGQANILTGVHCYNKATYFGGIGILVKLAGNSLTRIDNCYLDYTGIVMEDPVQVHVTNGLFLGDANIVLKSIKGQILGLNIVDNMFNGDPNKKVPIVNLDGAFSSIDQVVIDHNNVNGMSLRSTVGKLTASGNGTKWVADFSSVLVFPNRISHFQYSFYAQDEPKFVALSVTNVSDNVVVVESEKEAKGFVSFIVEQLSKVLGVVGNEKIVEERTTKANPADIAPPIRHFAEATCPSHG

SEQ ID NO: 156692 - protein, 162 aa, Glycine max
  unsure (1)..(162): unsure at all Xaa locations
  Clone ID: PAT_MRT3847_112513C.1.pep
KNQGCMHMTCTPPCKFEFCWLCRGAWSDDSERTXGFYACNRYEAAKQEGVYDETERRREMAKNSLERYTHYYERWASNQSSRQKALADLHQMQTVHIEKLSDTQCQPESQLKFITEAWLQIVECRKVLKWTYSYGYYLPEHEHAKKQFFEYLQXEAESGLER

SEQ ID NO: 156693 - protein, 68 aa, Glycine max
  unsure (1)..(68): unsure at all Xaa locations
  Clone ID: PAT_MRT3847_112514C.1.pep
RXXWXTIKXXXXXXXXSLXXXXXXXSRXSXXXFXXXXXSLXPLEXLXPIRLEXEPNSELTYACXRRLX

SEQ ID NO: 156694 - protein, 65 aa, Glycine max
  Clone ID: PAT_MRT3847_112515C.1.pep
LTSPTFPSFYAPLVTVTLFCCLFASIILHVPCFLFWPFINQYLFDFNVPIFCILQSLTLHFFCAY

SEQ ID NO: 156695 - protein, 83 aa, Glycine max
  unsure (1)..(83): unsure at all Xaa locations
  Clone ID: PAT_MRT3847_112516C.1.pep
FSSGDNRLTEKTIFTCTVLDILVVDYTIATQFRKFLPLSIQWYLDTLLIYNLPSFITAESKYKXRNLSNIHISGLFYDGRYKF

SEQ ID NO: 156696 - protein, 40 aa, Glycine max
  unsure (1)..(40): unsure at all Xaa locations
  Clone ID: PAT_MRT3847_112517C.1.pep
XSHLIRTFQTVQDNLTGWKSKLNYFICNKLKIVLIFLFFF

SEQ ID NO: 156697 - protein, 74 aa, Glycine max
  Clone ID: PAT_MRT3847_112518C.1.pep
IFYDSAENSTLVFMVATLSEPSLSFKYYERTAEQQSSLGYLVGSTHIEGTHDQSPQRGEMTADQFMREPHGSIG

SEQ ID NO: 156698 - protein, 193 aa, Glycine max
  unsure (1)..(193): unsure at all Xaa locations
  Clone ID: PAT_MRT3847_112519C.1.pep
MALLWTFSILYSYYQLFKPLIHEKCSLFSHKLVSYPRCSPFTTTFKPVCVITGATSGLGLAAAYQLSKEGYFVVLVGRSQQLLSETITKIKDWNEDAHLEAFQVDLSSIESVVKFKMSLQQWLLDSDLHCSIQILINNAGILATSPRVTAEGYDQMIGTNYIGAFALTKLLLPLLXSSPVSSKIVNVSSFTHR

SEQ ID NO: 156699 - protein, 43 aa, Glycine max
  Clone ID: PAT_MRT3847_11251C.1.pep
FCHFSSHKAWIYCWRNPPVVSRYKVKDLFQGEFRRLEIELAED

SEQ ID NO: 156700 - protein, 112 aa, Glycine max
  Clone ID: PAT_MRT3847_112520C.1.pep
SLPPNTNLASPSFSSSSSSPREEWNVPSHGKNSPATTTLPTSSSPFWETPVDKSVTFRNESEETPKPKLKALHWDKVKASSDRVMVWDRLRPSSFQLNEDMIETLFMVNNHN

SEQ ID NO: 156701 - protein, 287 aa, Glycine max
  Clone ID: PAT_MRT3847_112521C.1.pep
YLKPTYSLFKLAMQEFMVLPVGASSFKEAMKMGVEVYHNLKSVIKKKYGQDAINVGDEGGFAPNIQENKEGLELLKTAIAKAGYTGKVVIGMDVAASEFYKEDKTYDLNFKEDNNDGSQRISGDALKDLYKSFVSEYPIVSIEDPFDQDDWEHYAKLTAEVGANVQIVGDDLLVTNPKRVQKAIDTKACNALLLKVNQIGSVTESIEAVRMSKKAGWGVMASHRSGETEDTFIADLSVGLATGQIKTGAPCRSERLAKYNQLLRIEEELGAEAVYAGANFRTPVEPY

SEQ ID NO: 156702 - protein, 232 aa, Glycine max
  unsure (1)..(232): unsure at all Xaa locations
  Clone ID: PAT_MRT3847_112522C.1.pep
MGLITVVKELWRAFFFLCSLQFWRMALLWTFSILYSYYQLFKDSLSHSQYFKPLIPEKCSLFSQKLVSYPRCSPFTTTFRPVCVITGATSGLGLAAAYELSKEGYVVVLVGRSQQLLSETITKIKDRNEHAHLEAFQVDLSSIESVVKFKTSLQQWLLDSDLHCSIQILINNAGILATSPRVTAEGYDQMIGTNYIGAFXFTKLLLPLLESSPVSSKIVNVSSFTHRAVLMC

SEQ ID NO: 156703 - protein, 106 aa, Glycine max
  Clone ID: PAT_MRT3847_112523C.1.pep
KKNEALKNKSFFFFQAHLDHGSINSKFPSSKSPMGGSPLICPNTGGFPRGSCFWDFFLSFSPINQPPNCIVWDPWGFPQNKNPNFFLTHSFHTGTFYLVRLKGALI

SEQ ID NO: 156704 - protein, 70 aa, Glycine max
  Clone ID: PAT_MRT3847_112524C.1.pep
DSNPKPKLSCGEVSSWGRTISVLFSLPVSYPITIKTLNYTPVAGGCVLILVGSYWLIRGRRWFKGPITNI

SEQ ID NO: 156705 - protein, 154 aa, Glycine max
  unsure (1)..(154): unsure at all Xaa locations
  Clone ID: PAT_MRT3847_112525C.1.pep
MRLCVFFVAAXVLGAWACHGAXVPKGPLXMRTGYGERAXEGKCASFRXAVEAHNIRAFKTIPEECVXPTKEYINGEQFXSDSKTGNQQAFFYASEREXHHNDIFIFGVDNTGLSNIPYYEKHGXGXEEFNETLYEXWGNKGDXPALPKTLKNYN

SEQ ID NO: 156706 - protein, 213 aa, Glycine max
  unsure (1)..(213): unsure at all Xaa locations
  Clone ID: PAT_MRT3847_112526C.1.pep
MATIVSIKARQIFDSRGNPTVEVDLTCSDGTFARAAVPSGASTGIYEALELRDGGSDYLGKGVSKAVDNVNTVIGPALIGKDPTEQTAIDNLMVQQLDGTVNEWGWCKQKLGANAILAVSLAVCKAGASVLKIPLYKHIANIAGNKKLVLPVPAFNVINGGSHAGNKLAMQEFMVLSCGSFLVKVDTNLLCIGVYHLFNWSITLSYGXDAINV

SEQ ID NO: 156707 - protein, 156 aa, Glycine max
  Clone ID: PAT_MRT3847_112529C.1.pep
MAYAFFRDGAMPLSSLWHKVNKQEVPIYAVWLSVFISFCMALTSLGSIVAFEAMVSIATIGLYIAYAFPIFLRVTLARKHFVSGPFNLGRYGVVVGWVAVLWVLTISVLFSLPVSYPITIKTLNYTPVAVGCLLILVVSYWLISGRRWFKGPITNI

SEQ ID NO: 156708 - protein, 203 aa, Glycine max
  Clone ID: PAT_MRT3847_11252C.1.pep
GGGGKLDEFQPHPVKEQLPGVDYCVTSSPSWPEGIILGFQHYLVVLGSILILSTILVPLIGGGNVEKAETIQTLLFVAAINTLLQTWFGTRLPVVVGASYAFLIPAFSVAFSSRMSIFLDPHQRFKQSMRAIQGALIVASFFQIIVGFFGFWRIFARFLSPLSVVPLVTLTGLGLFVLGFPRLADCVEIGLPALVILVILSQY

SEQ ID NO: 156709 - protein, 286 aa, Glycine max
  Clone ID: PAT_MRT3847_112530C.1.pep
AIIVIFLEVQIVCFIFLVEFRSCNIHSNDNFACVTSFGNGSFQQFQTFLVFLNVGDEGGFAPNIQENKEGLELLKTAIAKAGYTGKVVIGMDVAASEFYKEDKTYDLNFKEDNNDGSQRISGDALKDLYKSFVSEYPIVSIEDPFDQDDWEHYAKLTAEVGANVQIVGDDLLVTNPKRVQKAIDTKACNALLLKVNQIGSVTESIEAVRMSKKAGWGVMASHRSGETEDTFIADLSVGLATGQIKTGAPCRSERLAKYNQLLRIEEELGAEAVYAGANFRTPVEPY

SEQ ID NO: 156710 - protein, 376 aa, Glycine max
  Clone ID: PAT_MRT3847_112531C.1.pep
VSSEFGSSSSRENLRKVDGDDNTCIIVGKVVVTKNPCLHPGDIRVLDAIYSEELEEKGLRDCLVFPQKGHRPHPNECSGGDLDGDLFFISWDKDLIPCQTEAPMDYTGRRPRIMDHKVTLEEIQQFFVDYMINDTLGAISTAHLVHADREQDKAKSRKCLELAELHSMAVDFAKTGAPAAMPRVLKPREFPDFMERVDKPMYISKGVLGKLYRAIIESQMQIRYSFVWSEKHAEEAYDRSLEVNGFEAFLETASTHKEMYAEKMSSLMDFYGAETEDEMLLGNLQNRASYLQRDNRRYGDMKDRILLSVKNLQREAKEWFETSCEPHEYKPMASAWYHVTYHPSYYCRESPCFLSFPWIVGEILLQIRSVSKGVHK

SEQ ID NO: 156711 - protein, 54 aa, Glycine max
  Clone ID: PAT_MRT3847_112532C.1.pep
ETKKKHLIFHTQTLLTHFLQLPPTRKIGTGTLNEGTTFTSHFPLFRRHNLFNKT

SEQ ID NO: 156712 - protein, 62 aa, Glycine max
  unsure (1)..(62): unsure at all Xaa locations
  Clone ID: PAT_MRT3847_112533C.1.pep
NEQALKGFCTRXCMNPHLNSAKNCRRLPHRSPPLPPAGRSLVARQXSXEVQXGIHPCHAFDA

SEQ ID NO: 156713 - protein, 51 aa, Glycine max
  Clone ID: PAT_MRT3847_112534C.1.pep
FLSRLLRMLYRNNIHSPLLDLKVYYLFEPPMHNISYFWLPTIVTNKFLFTQ

SEQ ID NO: 156714 - protein, 44 aa, Glycine max
  Clone ID: PAT_MRT3847_112535C.1.pep
FGAVQEHDGRREAMVIKAVDYGDPKYTHHNIRPRLNYVGYSHGY

SEQ ID NO: 156715 - protein, 65 aa, Glycine max
  Clone ID: PAT_MRT3847_112536C.1.pep
TITPQSGQDSDKLQTATLTAYFSRLKHDANGKGPKNSLKSHIKPNRLRVDRKHPLCIVQVARGKP

SEQ ID NO: 156716 - protein, 100 aa, Glycine max
  Clone ID: PAT_MRT3847_112537C.1.pep
EHLLSLKTYTVFATHMENISELVTMYPNVKILHFDVELKNNHLDFKFQLKEGSKRIPHYGLLLAEVAGLPSSVVETARMITSRISEKVFTQLIKKRVLIF

SEQ ID NO: 156717 - protein, 76 aa, Glycine max
  unsure (1)..(76): unsure at all Xaa locations
  Clone ID: PAT_MRT3847_112538C.1.pep
MEKLPMSRLWEIPITXNVSIFVWKVIRDKIQTRGKLKKRQIKLQAEDYSCALCHGEEETIQHLLFTCPFASTIWNL

SEQ ID NO: 156718 - protein, 92 aa, Glycine max
  Clone ID: PAT_MRT3847_112539C.1.pep
FMLTYIIIPLSLVKRHYQDVLVCQYHNYVHFTICEDKSIHFFFYTVVFASNNLDSLMIKPLMRLLLNNETPSYICYHIVCLRSCSSSSPILL

SEQ ID NO: 156719 - protein, 239 aa, Glycine max
  Clone ID: PAT_MRT3847_11253C.1.pep
MGATKSGRVKLGAQGLEVSKLGFGCLGLTGAYNEPLPEQDGISIIKYAFSKGITFFDTADVYGAGANEILLGKALKQLPREKIQLATKFGIARLDFSNMLIKGSPEYVRSCCETSLKRLDVEYIDLYYQHRVDTSVPIEETVGELKKLVEEGKVKYIGLSEASPYTIRRAHAIHPITAVQIEWSLWTRDIEEEIVPLCRELGIGIVPYSPLGRGFFGGKGVVENVPTNSSLVYSILACT

SEQ ID NO: 156720 - protein, 48 aa, Glycine max
  Clone ID: PAT_MRT3847_112540C.1.pep
YIMSRNFKILLSGQQLTTMVTAITKATLMLIHFVSLSHFASWPTRFNP

SEQ ID NO: 156721 - protein, 721 aa, Glycine max
  Clone ID: PAT_MRT3847_112541C.1.pep
MQGQRRTVGSFPAIVSMMQGPSSSGTDMNHQSSLNHVQNAVDFCLSDYRGSSGETACLRGTGHNVQSFSGWNTGESSSRLNLINQVNDEGLKSEHGLSSSYNAATENDPLRSEERQFEPNNVIFPVSSNTNLHGNQSRVHPSFLQASSSTRISQNISLDMGHVTNAADRGKGKEAGSSVNANNTSGIDREKTLFGSASCNHTGASSESSGYMAWGDSANSSSSLVNWGPSCKRKALEGSSRQLCSGGSSSTLVQSGNGCWPTDPVDLNASSDLTDSTPIEDIPVTSPPLFQNATNEERQEAPNGFPLISIAENVERPLRNFDRRMSHLQHQESVPLNLPSTGSARHHNHSSLHQAPGSHSINDSLELRLTAGGTSSANSGASLNQSPALRIHSFPWNRTANPRGARSSTSYNSGERAVREDFNLRMFPRDSTEHPMNVPASSGHEPIGWHTPSGNVNNSGGAPPPSWIGSSSNVHSPANRSWIFNHEVPAENMQSVSEFSPWSLFPSISSASGVHNAHSAPSSSGPPSFTQGSSSNQSYARTALVMERRGGDVLSGGPHSLRALTFDNEGRRRLISEIRQVLMAMRRGENLRAEDYMVFDHPFLYHGMAEMHDRHREMRLDVDNMSYEELLALEEHIGDVSTGLNEDVIIKLMKQRIYVRAIIMTDSYTDLEPCCICQEEFSDGENVGSLDCGHEFHSGCIKQWLMQKNLCPICKTTALAT

SEQ ID NO: 156722 - protein, 55 aa, Glycine max
  Clone ID: PAT_MRT3847_112542C.1.pep
KKNLKRGGLVGWKPNTNLSALQFLCVHIATEYLLDCALMGDWIHFYDCSQPAEAH

SEQ ID NO: 156723 - protein, 196 aa, Glycine max
  Clone ID: PAT_MRT3847_112543C.1.pep
MQLEVFLTTFLLLITSAKSDLFSFNIPRFEPGALNILLDGSAKTTGGVLQLTKKDKSGNPTQHSVGLSAFYAALHLSDAKTGRVANFATEFSFVVNTKGAPLHGDGFTFYLASLDFDFPDNSSGGFFGLFNKKTAFNTSLNQVVAVEFDSFANEWDPNFPQSDSPHIGIDINPFGLWQQRHGATRYSTTKVNRKGT

SEQ ID NO: 156724 - protein, 160 aa, Glycine max
  unsure (1)..(160): unsure at all Xaa locations
  Clone ID: PAT_MRT3847_112544C.1.pep
MQTLEKIAHSTMPFTSGGQTITDRFNAAKHSLAGSQLGKTICKATTEELMAPKKKHLDYLLHCTNEPNVSIPSMANLLIERTQNPNWXVVYKALLTIHNLMCYGNERFSQYLASCNTTFNLANFVDKSNLQNGAIAAGCNIATHVRCYXKYVSEKIHTYR

SEQ ID NO: 156725 - protein, 73 aa, Glycine max
  Clone ID: PAT_MRT3847_112545C.1.pep
RKKILKKKKLFPLLRQTLKKLTKRKICKPSSNGSELNSGLKKSINGGRPLFFFFFFLFFFFPNLIYYFLSLNF

SEQ ID NO: 156726 - protein, 267 aa, Glycine max
  Clone ID: PAT_MRT3847_112546C.1.pep
MCCRLSNSLVGLLNLLSFLLSIPILVTGVWLHKQAETECERWLEKPLIVLGVFLLVVSLAGLLGACCRLSCLLWLYLFVMFILIIVVSAFTVFAFVVTNKGAGEVVSNRGYREYRLGDYSNWLQNRVTNPHTWNRIKSCLQSAKLCDKFETQFANDSAQQFYAENLSALQSGCCKPSNDCNFAYQGPSVWNKTDGVNHSNPDCNAWDNDSNVLCFNCESCKAGFLQNLKTDWKKVTIVNVIFLVFLIIVYSVGCCAFRNNMRGNWKY

SEQ ID NO: 156727 - protein, 130 aa, Glycine max
  unsure (1)..(130): unsure at all Xaa locations
  Clone ID: PAT_MRT3847_112547C.1.pep
NCTSSMLHSGIRGEEHYEPSQXALHILPRYYXLSGIIPILCSDPLSADYRLTALGALPRVRRLWQPLLLAHVXLGSTGYYVXLSATFTGSRWILFGDLYGPPALVWTRVGYIVGPTGAASILKLRCTLMI

SEQ ID NO: 156728 - protein, 163 aa, Glycine max
  unsure (1)..(163): unsure at all Xaa locations
  Clone ID: PAT_MRT3847_112548C.1.pep
LTEPKKAYYDGRXPLHVAPSIGYEDITVFLIQERGDVHTHXNLKDTPLLVSDGNGHDRVAFLLEKQGASRNIKNGGKKPFTGGARGDSDYNKGLLLLGMDPNLKIITTLVLKTKAPAECLYFLAKLLLKPXTRGGTQNTWGITPFAEAPTGGKRNPVKLLEDA

SEQ ID NO: 156729 - protein, 98 aa, Glycine max
  Clone ID: PAT_MRT3847_112549C.1.pep
KSKQARKNQIHELPSINKQIINFAELQTKTSKENRSLEIFHLLELVSLQFLQNTNEKKKNKEIELDRSKTLKSRSNQREKRELPEKFRCPPAGREAVA

SEQ ID NO: 156730 - protein, 570 aa, Glycine max
  Clone ID: PAT_MRT3847_11254C.1.pep
MALLDFIVTIAENGTLNPPFSHQSTNKVAAGLQVLQEKNLIHRDLKPQNLLLATTAATPVMKIGDFGFARSLTPQGLADTLCGSPYYMAPEIIENQKYDAKADLWSVGAILYQLVIGRPPFDGNSQLQLFQNILASTELHFPPDALKVLHSDCLDLCRNLLRRNPDERLTFKAFFNHNFLREPRPTMNVEQFQLHQSERLTNHQLGGSTSEKISESHSKYNPMVVSSAADETMLLQRKDGKITAGTTNAKVSHLMESIEKDYVFVNSHFASLEAFSDYFEASVQDSSSHRISLFPSKRTNMEVRDAKQTKDLPSSSTEGLENLKSNKLEACAASCEFAALRKEHQISPLHPSNRLQLLHQYVQIIAELSQEKYNTGLYLESLAVELVVLAIWKQTLEICSSWMASITKSELPGSSSANESISARDINLPQSTEQKINFSDPSSISLWAKHEFIDAVDRAEKLSCHVQNMDKATEMPDAMEIIFQKALLIGTSGAVDEYMEIRDRAAASYSKAMLLLSFIVAEAENLPLNPPFSLVATNKERISQYIHSLQSRKESSSESSSKKVLILLSK

SEQ ID NO: 156731 - protein, 87 aa, Glycine max
  Clone ID: PAT_MRT3847_112550C.1.pep
QPEKEYQNGTLLNQFTDTKGGYNIVYFQSQSTESFRPHARIKGALTTTNDHASMNTIIKRTYVLPPFQSLKQDHHMTTCHPCTTITS

SEQ ID NO: 156732 - protein, 51 aa, Glycine max
  Clone ID: PAT_MRT3847_112551C.1.pep
RLFMVFRIIMGSLNLKWNHHKSSWPLQNASENYLNSFSAISAPNLRTSSTQ

SEQ ID NO: 156733 - protein, 67 aa, Glycine max
  Clone ID: PAT_MRT3847_112552C.1.pep
LKGIKQETNIEAEAGGKYHQRWLKISPEKGGALLDRRWSRFIIVGHANEEGENKVPVLREKGRGFPP

SEQ ID NO: 156734 - protein, 472 aa, Glycine max
  Clone ID: PAT_MRT3847_112553C.1.pep
MHTSSFRATTPASPPTFSLYFLSPPPFRSRSITLSPSSTQSRSPPSLPSTPSSAATPKRTHHPLFLFLSTLQCDAVSSTPTSTPSPSCCTRAVRAQTPTRCSCVDSAKRVFAEDTLCSDVVTWNSMLAGAVRNGEVRFAEKMFDEMPERDVVSWSTMITGYVQNGLLEDGLECFRDMTETRVRPNEAILVTLLSVSAQLGLLGYGGVVHSTIEGLRFPMTVPIGTALVDMYAKCGCIEKARILFDGMVKKDVWTWNVMICGLASHDRAKEALTLFQRFIDEGFRPVNVTFVGVLNACSRAGLVGEGRHYFKLMVDGYGIQPEMEHYGCMVDLLARAGLVDDAVRLIEGMTVAPDPVMWATLLDACKLHGYAEMGEKIGNKLIELDPTHDGHYVQLAGIYAKARKWEDVIRIRGLMSEKIASKVAGWSLIEVQDRVHRFVAGDREHECSSDIYKMLETIGLRIAEAGLFTKVS

SEQ ID NO: 156735 - protein, 66 aa, Glycine max
  unsure (1)..(66): unsure at all Xaa locations
  Clone ID: PAT_MRT3847_112554C.1.pep
KETLDLPSTMGQATAVPLIARAEVVAWNKNXCIQSRXXVTSLLGTLLMQAVRXLEPNSELTYACXR

SEQ ID NO: 156736 - protein, 127 aa, Glycine max
  Clone ID: PAT_MRT3847_112555C.1.pep
LRFPMTVPMGTALVDMYLKCGCVEKARILFDGMAKKDVWIWNVMICGLASHDHAKEALALFQRFVGEGFQPVNVTFVGVLNACSTAGLVGDPRHYFKLMVDGYGIQPEMEHYGCMVDLLARAGLQIM

SEQ ID NO: 156737 - protein, 467 aa, Glycine max
  Clone ID: PAT_MRT3847_112556C.1.pep
MRRRFLNPNQHTFTFVLHACSKSTNTNPGVQIHAHLIKFGYACHVFVRNALIHLYCECSCVDSAKRVFAEDTLCSDVVTWNSMLAGAVRNGEVRFAEKMFDEMPERDVVSWSTMITGYVQNGLLEDGLECFRDMTETRVRPNEAILVTLLSVSAQLGLLGYGGVVHSTIEGLRFPMTVPIGTALVDMYAKCGCIEKARILFDGMVKKDVWTWNVMICGLASHDRAKEALTLFQRFIDEGFRPVNVTFVGVLNACSRAGLVGEGRHYFKLMVDGYGIQPEMEHYGCMVDLLARAGLVDDAVRLIEGMTVAPDPVMWATLLDACKLHGYAEMGEKIGNKLIELDPTHDGHYVQLAGIYAKARKWEDVIRIRGLMSEKIASKVAGWSLIEVQDRVHRFVAGDREHECSSDIYKMLETIGLRIAEAGKEEKVRKSTQYLVIASDDQNCGEFESLVGPLRVIKIIMSKLRSV

SEQ ID NO: 156738 - protein, 197 aa, Glycine max
  unsure (1)..(197): unsure at all Xaa locations
  Clone ID: PAT_MRT3847_112557C.1.pep
MRPPRGGGRGGGFRGGRDGGGRGRGGFGRGGGGFGRGGGGGYRDEGPPSEVVEVSSFMHACEGDAVWEMQXTKLTNEKVPFFNAPIYLKNMTQIGKVDEIFGPINEAYFSIKMMEGIVATSYSSGDKFYIDPRKLLPLARFLPQPKGQSAGRGGGGGGRGGCRGGRGGGGFRGRGGPRGGRGGPPRGGGGFRGRGRS

SEQ ID NO: 156739 - protein, 204 aa, Glycine max
  Clone ID: PAT_MRT3847_112558C.1.pep
MRPPRGGGRGGGFRGGRDGGFRGGRDGGGRGRGGFGRGGGGFGRGGGGFGRGGGFRDEGPPSEVVEVSSFMHACEGDAVTKLTNEKVPFFNAPIYLKNMTQIGKVDEIFGPINEAYFSIKMMEGIVATSYSSGDKFYIDPRKLLPLARFLPQPKGQSAGRGGGGGGRGGGRGGRGGGGFRGRGGPRGGRGGPPRGGGFRGRGRS

SEQ ID NO: 156740 - protein, 81 aa, Glycine max
  unsure (1)..(81): unsure at all Xaa locations
  Clone ID: PAT_MRT3847_112559C.1.pep
RDNKXIFPLQKGAAIIWEAGEGKNLTPDFQLKKNGFSNIMAKQTPGVPFGTEREYSAPHPLMCGFEHMVLKTHTGLQRAGV

SEQ ID NO: 156741 - protein, 397 aa, Glycine max
  unsure (1)..(397): unsure at all Xaa locations
  Clone ID: PAT_MRT3847_11255C.1.pep
MVSAEWSGPYGVVTLRNNSSAGERQGRVDKPRFNQLNLEPKALRYATKMTQAQIQPVKLGTQGFEVSKLGFGCMGLTGAYNDPLQEQDGISVIKYAFSKGITFFDTADVYGANANELLVGKALKQLPREKIQIATKFGIASRGFPDMKIKGSPEYVRSCCEAVXSLKRLDVEYIDLYYQHRVDTSVPIEETVGELKKLVEEGKVKYIGLSEASPDTIRRAHAIHPITAVQIEWSLWTRDIEEEIVPLCRELGIGIVPYSPLGRGFFGGKGVLENMPASTVLTLHHPRFQAENINKNKRIYEQIESLAKKYQSTPPQLALAWVLHQGNDVVPIPGTTKIKNLDQNIGALSLKFTESDLREISEAVPIHDVAGSQYFFGNDKDSWKFANTPPKDPRVST

SEQ ID NO: 156742 - protein, 51 aa, Glycine max
  Clone ID: PAT_MRT3847_112560C.1.pep
FPVSLERLSTSLLFTFLFFNLFHIFFNHLSPLHNKISQYFIIHPTSKTNKF

SEQ ID NO: 156743 - protein, 59 aa, Glycine max
  Clone ID: PAT_MRT3847_112561C.1.pep
IIAFARTSSCNMLGFQCSALIQSSLQNHNPSRKICKAPCEDLPPIPEVPGDSNTTFLFF

SEQ ID NO: 156744 - protein, 96 aa, Glycine max
  Clone ID: PAT_MRT3847_112562C.1.pep
GTQNPPPGVNRSRPPFFFFFLAMNPCFPKKGLPPFMGIKKKPVYLWAPNENPCLNKPPNPRGEPVGNRGPFPFPAQINKGPRDLVGDRGFHTFKGG

SEQ ID NO: 156745 - protein, 110 aa, Glycine max
  Clone ID: PAT_MRT3847_112563C.1.pep
MIRVARLTSMATDRSKEIVEFVITQHKHIYRKMSGAQGAQPKESKTATTYESVEGGENRTRTDLLSREDQGCIQVEKLQEKVHDPAGKGGPVFGAGKDEDKQDLGVTGTG

SEQ ID NO: 156746 - protein, 73 aa, Glycine max
  Clone ID: PAT_MRT3847_112564C.1.pep
GPARASVHEGASVAGSPTVSVEGEAAWSNTLDPSGTAAPGAHNSAYGIHPAKGVGPEKIHAGPLAPGRGAIRG

SEQ ID NO: 156747 - protein, 43 aa, Glycine max
  Clone ID: PAT_MRT3847_112565C.1.pep
FIDILHQSYHKLLNVLGMAQQHIGYPEIMDIYNASKRQSIRLV

SEQ ID NO: 156748 - protein, 72 aa, Glycine max
  Clone ID: PAT_MRT3847_112566C.1.pep
DSSRSRSLNSMLLTRVKEFNVVLKLKREKIMLNLLMLLLSIKLKLSIELANLINGSKLLSDFKTASAQKHVI

SEQ ID NO: 156749 - protein, 172 aa, Glycine max
  unsure (1)..(172): unsure at all Xaa locations
  Clone ID: PAT_MRT3847_112567C.1.pep
MFAQPPQSSQQQQQQRSLWKYKKFAIAQGQKSLTDYLHATRCIPYAYADKIAKNSLTSLTTLITTTLGGSFSPPHFPHNLNKFLRYHPINEFEFFFESIGIHPSKLGSLLPQDXFFFSEDDTLLNAARVLHEFGFPWDRLGILYVESGCFFKCGASELKGRLCGFKSMVFCM

SEQ ID NO: 156750 - protein, 47 aa, Glycine max
  Clone ID: PAT_MRT3847_112568C.1.pep
NRVVVEGNFITNKGPGTPLEFALAIVENLFGPKLALKLSKPKVFAPP

SEQ ID NO: 156751 - protein, 76 aa, Glycine max
  Clone ID: PAT_MRT3847_112569C.1.pep
RSSDLNQRTRTALVRGKKIEFLTRVHPHSVALLSVLFDVKNEIMRYNPTNTMLTRPFESCQTLKSLRDQSSLAYAN

SEQ ID NO: 156752 - protein, 329 aa, Glycine max
  Clone ID: PAT_MRT3847_11256C.1.pep
VSKLGFGCMGLTGAYNDPLQEQDGISVIKYAFSKGITFFDTADVYGANANELLVGKALKQLPREKIQIATKFGIASRGFPDMKIKGSPEYVRSCCEASLKRLDVEYIDLYYQHRVDTSVPIEETVGELKKLVEEGKVKYIGLSEASPDTIRRAHAIHPITAVQIEWSLWTRDIEEEIVPLCRELGIGIVPYSPLGRGFFGGKGVVENVPTNSSLKAHPRFQAENLDKNKNIYERIEGLAKMHQATPAQLALAWVLQQGEDVVPIPGTTKIKNLDQNIGALAVKLSEKDLREISEAVPIGDVAGGIHYYGLEHITWKYDNTPPKDSSIST

SEQ ID NO: 156753 - protein, 82 aa, Glycine max
  Clone ID: PAT_MRT3847_112570C.1.pep
ILMPNRTQIAVLVEEEISGLRSRWKTSREWQYSTTKSIDGSTSDSDPPRRVPSQGPLSRRICKMALVLDHELEFLLEPNRLE

SEQ ID NO: 156754 - protein, 54 aa, Glycine max
  Clone ID: PAT_MRT3847_112571C.1.pep
DSSFFAELLMLYCSCYLPHMTKTHFLELNIVFNNLNISFKFKSNMVSESINALT

SEQ ID NO: 156755 - protein, 143 aa, Glycine max
  Clone ID: PAT_MRT3847_112572C.1.pep
FGSRDCTNLLTAITGDNCCLNSSVFDQFITNEPQPTATKNMMHLAQIVRSGVLAKFNYGGKSPQIYNLSNIPHDLPLFISYGGEDALADVIDVRNMLADLKFHDEDKLSVQYIKEYAHVDYIMGVNAKDLVYNGITSFFKHHH

SEQ ID NO: 156756 - protein, 66 aa, Glycine max
  Clone ID: PAT_MRT3847_112573C.1.pep
RNSSSFIEHCAMTFDEVSMEHGKSFIFALQELKNLRPQLYSAADYCEKSYLNSDKKPMVLDNMKDY

SEQ ID NO: 156757 - protein, 182 aa, Glycine max
  Clone ID: PAT_MRT3847_112574C.1.pep
MLEMATLHSLALSSPLSNSLQKPRSCAVPSSIVHQSTNSSFNGQTLHLPCLRLPVLRQNTPMHMPVIMMVKPKIQFIQGTDEQTIPDVRLTKSRDGTNGMAIFTFDQPSVFDSSGEIGDITGFYMIDEEGVLQSVDVSAKFVNGKPSIIEAKYVMRSPRDWDRFMRFMERYSNANGLQFIKK

SEQ ID NO: 156758 - protein, 117 aa, Glycine max
  unsure (1)..(117): unsure at all Xaa locations
  Clone ID: PAT_MRT3847_112575C.1.pep
MIPWRSQGNHLRVLYYESDIGGESLHFREVIHQSHALVGITLSMIIHAQNEEXVSFPLQMFGLCHTXDSKFISAIVSILQDLXTAFSCYEYVLLVKLHEIRHFAQRAINWFTFNSDA

SEQ ID NO: 156759 - protein, 62 aa, Glycine max
  Clone ID: PAT_MRT3847_112576C.1.pep
GSPLVLTIECCKASSSFGHQIYVARSGPCKLYGVDSDLVTSQNNLGLVVKVVAGILGYVLLG

SEQ ID NO: 156760 - protein, 70 aa, Glycine max
  Clone ID: PAT_MRT3847_112577C.1.pep
IHNQVYPGFSFFFFTKKKKNNFPGAKKLGSSPPHVFFFATLVGNPFYVIGILLPLSFSLAMVAHNVADEG

SEQ ID NO: 156761 - protein, 134 aa, Glycine max
  unsure (1)..(134): unsure at all Xaa locations
  Clone ID: PAT_MRT3847_112578C.1.pep
SGMAVHDDCKLRFWSXEAKRTHXFIAFKIEEQQKQVIVEKLGEPAHGYEYITASLPADECRYAVYDFEYLTERNVPKCRIFVIAWSPDTSRVRSXMIYASSPYRFYMELDGYQVELLATDPTEMGLDVFISRAN

SEQ ID NO: 156762 - protein, 195 aa, Glycine max
  unsure (1)..(195): unsure at all Xaa locations
  Clone ID: PAT_MRT3847_112579C.1.pep
ARDESFNPSDSFFSVTANGVTLLSNFSATATCEALSQAYIDREYSLAPLNSEALTLTFKPSDKYNGTFAFVNGIQLIPMPELFDSGESVGYADQTTDVKSLNLQTMFRLNVGGQYISPIQDSGLTRMWYDDRPYLYGGSTGVTNQAEKNVLIDYQTMPKYIAPSDVYSTSRSMAPDMDVNLXLNLTWVFQVDPNS

SEQ ID NO: 156763 - protein, 110 aa, Glycine max
  Clone ID: PAT_MRT3847_11257C.1.pep
LSPQVQQRLTTRILHRANTSPHRAVLNASLRPPGSFLRIQPLPSSDTLSARLCPRSPPISVPCTTVVLPVAPLPLTGKHPYIINQVFICFYFSVIPTAFATRCCTSILIP

SEQ ID NO: 156764 - protein, 68 aa, Glycine max
  Clone ID: PAT_MRT3847_112580C.1.pep
VTLKRGPFLKRAHFLNLQELKQGLDSFKNQMGPEGPIKKLKGAFIQKFSLPGNPSPFHGQPPKQGYRA

SEQ ID NO: 156765 - protein, 70 aa, Glycine max
  Clone ID: PAT_MRT3847_112581C.1.pep
STYSVRVSSTPRPYLFTNGSTLMVHLSYKPSWFNACTYFVSLMQLFQIKKTNHRTQHHNHIFSGFRPESA

SEQ ID NO: 156766 - protein, 234 aa, Glycine max
  Clone ID: PAT_MRT3847_112582C.1.pep
INIGVGDFSSLTKFAQENNINLVIPGPEQPLVEGIELAFKKIGIPCFGPSPKAAMIEGSKAFAKDFMKKHQIPTAAYENFSDYGKAKAYLESVSHKVVIKASGLAGGKGVLIPADKQEALFALKEIMADKIFGSAGNEVVIEEFLEGQELSILAFSDGYTIVPLPPAQDHKRIFDGDQGPNTGGMGCYCPTPIAIPELIAQIKNEILQPTIDGMRRDGFPFVGMLFTGLMITSS

SEQ ID NO: 156767 - protein, 318 aa, Glycine max
  Clone ID: PAT_MRT3847_112583C.1.pep
CVALQDEHLVDHFVRSDFLKPIVDAFVANGNRYNLLNSAVLELFEYISKENLKLLLKYLVDSFWDQLVKFEYLVSIHSLKVKYEQCLDNDGTKGTAIMIDLRRRLDERALDKEEEDYFNDSDEEDTTSASISHNQKVQQQQPVLSNGVAASYSKLSPRPGGLVDYDDDEDEDYRPPPKRPEASEEDEGIMESLRQKRKLPSENPELAKKLSKNSKSKDSVFASLCSTLSQTVLPGKKPSVNVHTGPCREDNKEESNVSRNFCENSNATAEVNHVEKETAAYRNFSDGLYGTSDNGQLGGEEHTLVSPKSSPEMAVNGS

SEQ ID NO: 156768 - protein, 66 aa, Glycine max
  unsure (1)..(66): unsure at all Xaa locations
  Clone ID: PAT_MRT3847_112584C.1.pep
MHIRIALTLRADLTPGTVLILLTENFKGKRXVLLKQLPYGCVLVTSPYKINEATLIMLNQSHVIGT

SEQ ID NO: 156769 - protein, 64 aa, Glycine max
  Clone ID: PAT_MRT3847_112585C.1.pep
GSQRKSNSYIHKIRGSKGAIRGHNITKSRGVRKKAQFALIIFRRAHKISIHLEGSRRHRHQIFK

SEQ ID NO: 156770 - protein, 180 aa, Glycine max
  Clone ID: PAT_MRT3847_112586C.1.pep
HASASYIIASNLDDLPLQLALPTLLVTVTYWMGGLKAKASIFFRTLAVALLYSLVSQGFGLAIGALLINNQKVAITVGTVVMTLFLLVNGFFVRNTPAFVSWIKYLSHGYYSYKLLLGSQFNGYDTYHCGQNVTCSAVNYPTIKHVGIDKQGLSVAALVAMLVGYRLIAYFALRIGTKLN

SEQ ID NO: 156771 - protein, 451 aa, Glycine max
  unsure (1)..(451): unsure at all Xaa locations
  Clone ID: PAT_MRT3847_112587C.1.pep
PPDFCHFELDDPLIQLTENYKWINFFDFYWSFGIDGLSLGPILLTGFITXXXXTLAAQPVTRESKLFYFLMLAMYSGQIGTFSSQDILLFFIMWEFELIPVYLLLSMWGGKKRLYSATKFILYTAGSSVFLLLGILGMSFYSSNEPTLNFESLTNQSYPVALEIIFYIGFLIAFAVKSPIIPLHTWLPDTHGEAHYSTCMLLAGILLKMGAYGLVRINMEFLSRAHSIFSPWLILLGSIQIIYAASTSLGQRNLKKRIAYSSVSHMGFLLLGIGSISDTGLNGAILQIISHGFIGAALFFLAGTSYDRLRLLYLDEMGGMAIPMPKIFTVFTILSMASLALPGMSGFVAELIVLLGIITSQKYLLITKILITFVTAIGMILTPIYSLSMLRQMFYGYKLFNTPNSYFFDSGPRELFISISILIPVISIGIYPDFIFSFSADKVEAILSNFL

SEQ ID NO: 156772 - protein, 70 aa, Glycine max
  Clone ID: PAT_MRT3847_112588C.1.pep
LEVGLRPHYVDNSTKNLCERRYCLHRPSLSNTRAPTGATTGRARRDCPIAAAPGNGRPLERTRGPATIED

SEQ ID NO: 156773 - protein, 98 aa, Glycine max
  Clone ID: PAT_MRT3847_112589C.1.pep
PVNLVPVPTLQVDYSSAFLSASRRSWAWSSSYVSVRDCVAIGFLPDLSISGSLLVGLTLLPWPCSSRAVRFRCPPFPFPVVAVVNAKMFFCLCLFPRA

SEQ ID NO: 156774 - protein, 70 aa, Glycine max
  Clone ID: PAT_MRT3847_11258C.1.pep
IPTLSEHDSFMLKLALISDDYTDEADAHIPSIYDSDTDAKSNKIEEVDQILLNLSILFYKQSLYKQSFYY

SEQ ID NO: 156775 - protein, 81 aa, Glycine max
  Clone ID: PAT_MRT3847_112590C.1.pep
SRQCRNPNHPIPFLFYQTPGNSGQPPNPPKTFSLLRLRLHLRNCKPLPPPTFYSFSGAPGLGKATAMVNRTGVVRPRTFRV

SEQ ID NO: 156776 - protein, 64 aa, Glycine max
  unsure (1)..(64): unsure at all Xaa locations
  Clone ID: PAT_MRT3847_112591C.1.pep
RAESINSNNCIERLTRSTHTYKANLLTFKAKHGYLIYXVQVPKGGRIKPFPKGIVYSQPTNQCV

SEQ ID NO: 156777 - protein, 35 aa, Glycine max
  unsure (1)..(35): unsure at all Xaa locations
  Clone ID: PAT_MRT3847_112592C.1.pep
MFYVNDMXAYKFASVIGCVSFTNAIERSIFCFLGT

SEQ ID NO: 156778 - protein, 68 aa, Glycine max
  Clone ID: PAT_MRT3847_112593C.1.pep
TPTSIVAFNALPLAEPVHVLGDGIGERNHSMGPHLGPHLTLAPDVSVRTKGLPALGSEIDEIAITERI

SEQ ID NO: 156779 - protein, 47 aa, Glycine max
  unsure (1)..(47): unsure at all Xaa locations
  Clone ID: PAT_MRT3847_112594C.1.pep
KPTYQVIQPINFNPFIVNLQTPLTYIPFISXYFFNLSAYRTTISPLL

SEQ ID NO: 156780 - protein, 66 aa, Glycine max
  Clone ID: PAT_MRT3847_112595C.1.pep
TSHDFYGEANPSLQKQRYLNHPTLPFGEHLKAKTGYQRRLKGYQLQTERKKGWLRKPQFSSWCFQN

SEQ ID NO: 156781 - protein, 30 aa, Glycine max
  Clone ID: PAT_MRT3847_112596C.1.pep
DRKISLLVEHNDIYLCLKITTKPEHDTYQV

SEQ ID NO: 156782 - protein, 114 aa, Glycine max
  unsure (1)..(114): unsure at all Xaa locations
  Clone ID: PAT_MRT3847_112597C.1.pep
HTTGEISGRIVRKIEGTMVVTPKNVPDYDAVSYAIKCSAKGTATDFLGKCLDTXWHAFGAVTDFVSDFICLQIIMATITAAHTEGKGKSKAYFEKHFATLPTIVATLEALHDNF

SEQ ID NO: 156783 - protein, 76 aa, Glycine max
  unsure (1)..(76): unsure at all Xaa locations
  Clone ID: PAT_MRT3847_112598C.1.pep
GTHXTLPNQLKTPLGDRRQGEGMTPSGCCIQRGSPLHLNCLPPKMTLSSARGMPSLPQIFALPFGQGGRALPPLGN

SEQ ID NO: 156784 - protein, 49 aa, Glycine max
  Clone ID: PAT_MRT3847_112599C.1.pep
NTVHYFTRGASNITIRANPYLKPLFRNLYKLDPKPSSTTLLFIKTQPLK

SEQ ID NO: 156785 - protein, 227 aa, Glycine max
  Clone ID: PAT_MRT3847_11259C.1.pep
ALPTNIPGSNTKTVIENELKAVSSVATQNTELPSARAWKPAPGFKAKSLLEIQLEEQKKSLTEKLVSEVATPVNSMSSTTPWVGVVANPDSMKVSNDGHREAENTEYLAKAEKSQNSKSKKSPLHDLLAEDLVPKSSERDGKVPDSMLPSQNIAVHSKLVDDGDFIEAKDTKRSRKKSAKLKSSGAKVSMPVASSEVPISPIHIEKVKSSRSVQQEKEQLPSIPSGP

SEQ ID NO: 156786 - protein, 144 aa, Glycine max
  unsure (1)..(144): unsure at all Xaa locations
  Clone ID: PAT_MRT3847_1125C.1.pep
QLLIKSNLGKVIKPGQYKAINDEGMPXQHNRPFXMKXSPFNIPXLNVEFSPDLKGFLFPLNQCQFTWKKVFTLKRAASMXVRQMELGMIVKEEPLLHDXSTLKGRRMRXKSSNXAIFREAYXNEDDXMSHFWSKCNCQPVKCNL

SEQ ID NO: 156787 - protein, 55 aa, Glycine max
  Clone ID: PAT_MRT3847_112600C.1.pep
ESLGRNHWITAPIWVEQIHCLIHLFKYVPLRPSLYPHTIYMTTLAHGMIIMRNPS

SEQ ID NO: 156788 - protein, 30 aa, Glycine max
  unsure (1)..(30): unsure at all Xaa locations
  Clone ID: PAT_MRT3847_112601C.1.pep
GCRPCPWWLLCYMVDIAGVTXAITPGXLFT

SEQ ID NO: 156789 - protein, 228 aa, Glycine max
  Clone ID: PAT_MRT3847_112602C.1.pep
MASFVSTHCILPSGVGFVHDQDRSCGRTNTLHLQNAPKSPSSLSFLLSVRESRSDAVVVQSKGRSSFSQTAAVRHLTGSVTRAHGLRFAVVVARFNEIVTKPLLEGALGTFNNYSVQDEDIDVVWVPGSFEIGVVAERLGKSGKYDAIVCIGAVVRGDTTHYDAVANSAASGVLSASLNSGVPCIFGVLTCDDMDQALNRAGGKSGNKGAEAALTAIEMASLFEHHLK

SEQ ID NO: 156790 - protein, 58 aa, Glycine max
  Clone ID: PAT_MRT3847_112603C.1.pep
SPPDRSKGCSNELSRKYGEKGSRRLVSEDGVEMTSIPGTSGEEADSKLIAVLDTSAPT

SEQ ID NO: 156791 - protein, 204 aa, Glycine max
  unsure (1)..(204): unsure at all Xaa locations
  Clone ID: PAT_MRT3847_112604C.1.pep
TNSWGAIWAPHPFFFFFPSGPLPGLRGVVWFPPPLPRVFPGGYIPTPPLTPFFFGPPLFAPFRFFAGVKTLFFWPFRGGAFSNPNSFFRGGSLFSPSPLSGVGPWGLFFFPFLGPLFLANKVFWGPFFFLGPPFFYFYPVFFFPQIKFLGPPPFSQKKKKKKKKKKKKKKKKKKKKKKKXKKXKKKKKXKKXKKKXKKXGRXRS

SEQ ID NO: 156792 - protein, 95 aa, Glycine max
  unsure (1)..(95): unsure at all Xaa locations
  Clone ID: PAT_MRT3847_112605C.1.pep
PPPQGEDLRLFAAGVPIILVGPKLDLQEDKQFXIDHPVALPILPHTGKNLENSIGAPAYIECGSKTQRNVXAVFDAVIKEGLLPPKRKRKKRKAH

SEQ ID NO: 156793 - protein, 133 aa, Glycine max
  unsure (1)..(133): unsure at all Xaa locations
  Clone ID: PAT_MRT3847_112606C.1.pep
ASSYLVDHAEDMTNVAYFATAAAMVAWPCHGARYQTVPSTMKTGYCAATSEGKNARFTLAVAHTTCQPFXTIPEEGVEPTHDYINXEQPKPDSETANQQAVFYAGEQPIHRNDVFIFCVDYTALSNMPYYERH

SEQ ID NO: 156794 - protein, 183 aa, Glycine max
  Clone ID: PAT_MRT3847_112607C.1.pep
QYFQIKHLYTISYTITKPTICLASPIFLCQPYTKAREVGIDPLTHEPFNKQVSSKDSSSSEENLPQADNTHQVKESDRVLNSKENSSSSAAENSSGEESLLVESDVSLMNTMWLDETPLMDTLWDNTPKLENANSNMGLPIWEDNCAWLLDCQDFGIHDFGFNCFSEIESNVLQSIGMDRKGL

SEQ ID NO: 156795 - protein, 64 aa, Glycine max
  Clone ID: PAT_MRT3847_112608C.1.pep
DYAAFIHFNPFLCGQLSRLQSATTSLSKTKSRFSFRVSESISVVFLDTRSCVSDPSHRLGDGVA

SEQ ID NO: 156796 - protein, 73 aa, Glycine max
  Clone ID: PAT_MRT3847_112609C.1.pep
NRVASFDVSERESRIGSVLDITNPDPVLLVRAHCLRGSMNSVSRSIAATFPNHVIIIISRNHYPSSSTIRREA

SEQ ID NO: 156797 - protein, 19 aa, Glycine max
  Clone ID: PAT_MRT3847_11260C.1.pep
LTSSPLQHDLNTYKSMMPR

SEQ ID NO: 156798 - protein, 71 aa, Glycine max
  Clone ID: PAT_MRT3847_112610C.1.pep
MFPPVGCFPCGRGFGNKWGPFLALFRADSSEGNALDALGLVGFCCGGMLFPPVGFFGRLVNSKTLGRFGFH

SEQ ID NO: 156799 - protein, 152 aa, Glycine max
  Clone ID: PAT_MRT3847_112611C.1.pep
DPPARKPRRPTRALTVGPREGKNGDRETKETHRERQPQQKRKPEKAATTKRAKATTTPTNRPTEAQDHKANHTTTARHGETRPTRERTRNPPRTGNRADRNRTPKPTARPKRTGKQTPTRPSPRNKQNEHQGNNQTKTQGRPAKAATTNQRG

SEQ ID NO: 156800 - protein, 58 aa, Glycine max
  Clone ID: PAT_MRT3847_112612C.1.pep
LEPIRLEIIISHVQQYKVSELLFPNPFQHGNNRLRTLVLFSHLRLAWDCFCLSNIKKQ

SEQ ID NO: 156801 - protein, 124 aa, Glycine max
  Clone ID: PAT_MRT3847_112613C.1.pep
MKKGLEEVNCPAVVRSAAEFRCVRVSSMDEEAEEEYAYSTAVNIAGHVFKGILYDYGPEGMNTNYMDAVAAAGESSSTGVGALNLTTGAIVSEPLGVDPSSLYPAPLNSFMPGSGTQFFPHPRS

SEQ ID NO: 156802 - protein, 32 aa, Glycine max
  Clone ID: PAT_MRT3847_112614C.1.pep
IAIKKQDYYQNLCLLFLSTKPSFFMKKGNENL

SEQ ID NO: 156803 - protein, 53 aa, Glycine max
  Clone ID: PAT_MRT3847_112615C.1.pep
RAGTAAISIQGGLKSKDNIMSSDRMSPSDKRVSSPKLSIISLSTSVHEKSNKN

SEQ ID NO: 156804 - protein, 61 aa, Glycine max
  Clone ID: PAT_MRT3847_112616C.1.pep
LQILHWGVSPSSNPCDLPLIGGGLTIFQDQRLSTCSRITGHGGCFCAQQTFLVSQSCSELV

SEQ ID NO: 156805 - protein, 57 aa, Glycine max
  Clone ID: PAT_MRT3847_112617C.1.pep
TVISMAMVIVYHLSINVAANIVRMHAVQYSTDKHETKDEVKRRFFLTFHLCIYSVAN

SEQ ID NO: 156806 - protein, 86 aa, Glycine max
  Clone ID: PAT_MRT3847_112618C.1.pep
TKSNSGHTDAGENKQTAPQGMRKEKKKREPERPGTRPQAHKKSTGDNQTPSTQAPGTHPRDKHAPSPQHGHPSRKTSRLRGEGLQA

SEQ ID NO: 156807 - protein, 65 aa, Glycine max
  unsure (1)..(65): unsure at all Xaa locations
  Clone ID: PAT_MRT3847_112619C.1.pep
MRMHKETERQRRQEMGKLCATLRSLLPLEYIKGKRSTSDYVNEAMNYINHLQNKVKQLXAKRDEL

SEQ ID NO: 156808 - protein, 75 aa, Glycine max
  Clone ID: PAT_MRT3847_11261C.1.pep
VFVATFLTLIPSLMPYLGIIFCTLCIYCSIGVQIFGGIVNAGNPELELTALAENEYLLIIYKIVSFKPFMVGLIQ

SEQ ID NO: 156809 - protein, 126 aa, Glycine max
  Clone ID: PAT_MRT3847_112620C.1.pep
GGETPPKPQLKFQGNPPKTKGKGPGPNQKKKKFLPWGENGKIGPSQWGNRKGKTKTPLRPKATPPKFLERGKPYKQLPKGEKKALKKQKKFFGQGRKGKPNSWGKNPQKPGKRGEKKGPDFFKKGP

SEQ ID NO: 156810 - protein, 104 aa, Glycine max
  unsure (1)..(104): unsure at all Xaa locations
  Clone ID: PAT_MRT3847_112621C.1.pep
LLXXFXRXXSHPYTXWHHSRSEXHXXXXKSXAXFXXXSWNXSDFKLSFCXXVVXXMRAXXEELXSXXXWXXXXGLRXXXXXXRVXVXLXEVPRAEFRXTYACMR

SEQ ID NO: 156811 - protein, 91 aa, Glycine max
  unsure (1)..(91): unsure at all Xaa locations
  Clone ID: PAT_MRT3847_112622C.1.pep
CTSPYIKCTVSXFIAFGNMADDTINXFEAFPHMLVQFGEIQEKVXYLKFSQEEILTAWSTHERPATSIXADGCPYXYALVHDSSTSTIPGD

SEQ ID NO: 156812 - protein, 84 aa, Glycine max
  unsure (1)..(84): unsure at all Xaa locations
  Clone ID: PAT_MRT3847_112623C.1.pep
KYWLCLLLNAVAWQCHALLYMRSPLNTAILPDRPXKCSSCALDAYEHNILGYDTIAEXCIEATPEYIDAEQCLSDYGTPKQHAY

SEQ ID NO: 156813 - protein, 70 aa, Glycine max
  Clone ID: PAT_MRT3847_112624C.1.pep
QFIRGKTLGQKYQAIGENLAGEANPPRAGISRQQAHFKKKGRRERKKDQHSQKEREWVLAGLLCHRKNLF

SEQ ID NO: 156814 - protein, 53 aa, Glycine max
  Clone ID: PAT_MRT3847_112625C.1.pep
VDCVVFQRIQHHKDIMIWRIAINTALKHDTYRRAKYLFHLQKFCYTIENLKVK

SEQ ID NO: 156815 - protein, 63 aa, Glycine max
  Clone ID: PAT_MRT3847_112626C.1.pep
PIVRCGDTLMTTIEVLGTSNVAVCTGGALKTPTRDFYVGLLPGAYKIQRQIPYRLHDRCNENC

SEQ ID NO: 156816 - protein, 148 aa, Glycine max
  Clone ID: PAT_MRT3847_112627C.1.pep
GALEEDSVCCVEEEEEEEEEAVVTEDRDAALGGPREHALDWDSGFSEVSGSTWREEELPVSQRPAPSAQPLRRQCLSVSGLPMPSRAPVASVPPVHHPRPKSTPDACLEHWQGLEAEDWTAALLNRGRSRQPLVLGDNCFADLVHNWM

SEQ ID NO: 156817 - protein, 37 aa, Glycine max
  Clone ID: PAT_MRT3847_112628C.1.pep
TRSHYEILHKFPCLNWHFVSEFSNTLDFLSCHLFFPV

SEQ ID NO: 156818 - protein, 29 aa, Glycine max
  Clone ID: PAT_MRT3847_112629C.1.pep
YTIACEGILTKARLISYSIANKIEIKKQK

SEQ ID NO: 156819 - protein, 103 aa, Glycine max
  Clone ID: PAT_MRT3847_11262C.1.pep
MTTGAERYPDFFKVFLPERHSERMLIPNAFVRLPQSQGRIPEDVILRNISGRVWQVKTRYIGEKLYFDDGWNAFHEENCLGHADFLVFKHDRSNEFKVLILES

SEQ ID NO: 156820 - protein, 94 aa, Glycine max
  Clone ID: PAT_MRT3847_112630C.1.pep
SMQGVGILSLFSYGGFEVLVLSKRSHSQVSGPILAGSRPFEKINIYLFYKGGQLVIGEIPPSATGVPLMGQITFFSPAPEPGLIKVYGPWSLLV

SEQ ID NO: 156821 - protein, 91 aa, Glycine max
  Clone ID: PAT_MRT3847_112631C.1.pep
LLLLLVCSDQERVNYERLNDLALDFYARTSSIGAEGVRRACASLIEACERKDKNGCSLALYWTKNRFSYLRGRFETLVKMERNIIYLENML

SEQ ID NO: 156822 - protein, 58 aa, Glycine max
  Clone ID: PAT_MRT3847_112632C.1.pep
QILTVFVYLTRYMIADFTRVVIVRRMISRTILSVLVERYVRSFQNSLSFVNCDFGYVD

SEQ ID NO: 156823 - protein, 43 aa, Glycine max
  Clone ID: PAT_MRT3847_112633C.1.pep
PTACEKVSESVLNSIPIFVHICDLLLGIFLGRILGINYSIEQM

SEQ ID NO: 156824 - protein, 111 aa, Glycine max
  Clone ID: PAT_MRT3847_112634C.1.pep
NKYWCRSPGSCKSHQRAMLCLKTDMFLRVVWNFGSEATNLWRIVVASSRKTNARRFEYATKTKLLIPLDMFAFMRVFKPTVKKRHTTIAAVTAPCITFTYPLSSSRFDSRS

SEQ ID NO: 156825 - protein, 245 aa, Glycine max
  Clone ID: PAT_MRT3847_112635C.1.pep
MGLEKNPLVFFDVSIDGDPVERIVIQLFASIVPRTAENFRALCTGEKGIGELTGKPLHYKGTSFHRIIRGFMAQGGDFSRGNGTGGESIYGGKFVDENFKLTHDGPGVLSMANSVSMDNSGPNTNGSQFFITFKRQPHLDGKHVVFGKVVNGIDILKKIEQVGTSDGKPTQPVKIIDCGESLSSDDGSDKKSRGKRKKSSKDTRKRRRRYSTSDSDSYSSDSESDSDSESDSSVSDSSSSSDGKH

SEQ ID NO: 156826 - protein, 150 aa, Glycine max
  Clone ID: PAT_MRT3847_112636C.1.pep
KINWVLLLSNWLGFRESQHFQYKCTTTLLSKSGFVSADTNPNSERRQGQPNSDLKVKEISLWFYHKKGCRKREKDPEFGNEENLIWVSNSKEKGSNFGKEIQTPRESMKVSNVRNGRKPNHVIVNVMLFLCPFGKVLDFLSPPSVVFSQP

SEQ ID NO: 156827 - protein, 87 aa, Glycine max
  Clone ID: PAT_MRT3847_112637C.1.pep
FLLGLNSKWTKNGGTLKKSKWPSTFGNFMPKNPFSLKGKRSYCLPNHKGKSFKQDKNLPQKMEWGGEKKKACPRQNQSGGFEVLKGP

SEQ ID NO: 156828 - protein, 101 aa, Glycine max
  Clone ID: PAT_MRT3847_112638C.1.pep
MIQVGSVAVFVLRHKDLVGGGKKNLQHIAQVIALNMVIGLLSTGIDNWGHLGGLVGGVAASWFIGPAWKHESTSRDGRRLFIDTAPMYKLFKIKRVPKQWK

SEQ ID NO: 156829 - protein, 46 aa, Glycine max
  Clone ID: PAT_MRT3847_112639C.1.pep
HEQTRTLAAHSIHRHTNIRVVIIQLRFLTWGLQLTSIGRMEVDARV

SEQ ID NO: 156830 - protein, 101 aa, Glycine max
  Clone ID: PAT_MRT3847_11263C.1.pep
QNVGTGSKCKIIEHRDNHKKIEPFWLNKVINCTEKGNHADKGQEHPKIIERRRYPHENTYLGNKRMPRNTKLTKLNTKVTTLVIERNINVIATVMERNGKL

SEQ ID NO: 156831 - protein, 97 aa, Glycine max
  Clone ID: PAT_MRT3847_112640C.1.pep
TGGDKLVHRMGPPFLVTLMPYFHRKRLLSVRKMKQAWIQLYCYGVHGVQTSLRIFTKSRGVKTTTLMLRTLHPFCGGGNFILLEHFFRLSCNWFCGA

SEQ ID NO: 156832 - protein, 46 aa, Glycine max
  Clone ID: PAT_MRT3847_112641C.1.pep
LTTKGPVTRSSIACADKRTAKASRLMQRNSTTRGPLNWGGLIFNGF

SEQ ID NO: 156833 - protein, 255 aa, Glycine max
  Clone ID: PAT_MRT3847_112642C.1.pep
MVRDMMGTTTTTSSGGCGGGGDMNMNMNEKPAWLERLMAETFFGACGVHQDRRKNEKNVFCLHCCLSICPHCLSSHRSHPLLQVRRYVYHDVIRLDDLEKLIDCSNIQPYTINSAKVIFLNQRPQSRTCKGPANSCFTCDRILQEPFHFCSLSCKVDYMVYAGQSLGSILHRFDESDFAISQFEGLRVDGSEVIDEDTQFAPSSSYSNTEATSNSVISCEPNNNVKKGKANRFLPGIVLSLGSRRKGAPHRAPLS

SEQ ID NO: 156834 - protein, 157 aa, Glycine max
  Clone ID: PAT_MRT3847_112643C.1.pep
MGATEANTTLQARPETTSENIEALLDAARYDDMDDVKSLEASGVPLDSKDEQGRTALHMAAANGHIDIVEYLISRGVDLNSPNEEKNTPLHWACLNGHVEAVKKLIMAGANVSVLNSHERTPMDEAVSGGKPEVMDAINEAVALVELRGAMVFAQET

SEQ ID NO: 156835 - protein, 92 aa, Glycine max
  Clone ID: PAT_MRT3847_112644C.1.pep
MLTEAQQSKWNKDGYLRLEKFFDPAKRDKISRYVEEVARWDVSSDKWMLWFEKTSDSRKIISKAENFLDYHAPLRDALLADGRIRIAVETLF

SEQ ID NO: 156836 - protein, 300 aa, Glycine max
  Clone ID: PAT_MRT3847_112645C.1.pep
MDETKILLELKSVSSLCVHSFINLLCEETISFLSVFSSDPLFHCIVAFCTLVFLYLPHLFLKIILSPVPILTAILLLSILRLGAIQRLQHERRENHVKHEEQPIVYEENKGSKYKGEKQSPCTIEPDETKSVEQVHQWVHSETEVISDMGFESSSRFVEWNVKAPLEVIYEEYGEGEEAGDDANENVGIMRYPSLSRFYPESDSDSESESEFPAIGDWDSPEDLEFRWGEEEEEDDGYDDDEEEEDREGLIEIALDGCKRKRNLEFNFDEENLIEIDISPSRYRELSGDDEVFSGEISYN

SEQ ID NO: 156837 - protein, 50 aa, Glycine max
  Clone ID: PAT_MRT3847_112646C.1.pep
LRLREDDRRGKEVALIGFTEVLTFILCSKKENFAMLNRKHHKPKAPIIVN

SEQ ID NO: 156838 - protein, 63 aa, Glycine max
  Clone ID: PAT_MRT3847_112647C.1.pep
ARELDALPTIQKMLGATAWHLSLRHTQAVPLPDSYMSPLTLFPIFRNNFQLINVSHVLHGLRS

SEQ ID NO: 156839 - protein, 80 aa, Glycine max
  unsure (1)..(80): unsure at all Xaa locations
  Clone ID: PAT_MRT3847_112648C.1.pep
MEGKEQDVSLGXXKFXERQPIGTAAQSQEHGXXXQEPAPAPLVDPTDXTSWXFYRAGIAEFVAXFLFLXITVLTVMGVAG

SEQ ID NO: 156840 - protein, 152 aa, Glycine max
  unsure (1)..(152): unsure at all Xaa locations
  Clone ID: PAT_MRT3847_112649C.1.pep
MVARLMPGFFAVYTEVHSHMVTLPLDVSIAAEESTIGLMMDLTTSELTIALARGTIVGTILRADLLANVLPEGSVRARVAQQRTGRIKGMITMAATAGTPVXSGCALVCAMRGLFRGRASSVSYTICYKDCAAXTPAWTMAMTMSLSPDPCS

SEQ ID NO: 156841 - protein, 47 aa, Glycine max
  Clone ID: PAT_MRT3847_11264C.1.pep
SMNLQDAYGISINHIFDPIIWLMEMPYDWVKYIIWAGALKDPNLTYT

SEQ ID NO: 156842 - protein, 106 aa, Glycine max
  unsure (1)..(106): unsure at all Xaa locations
  Clone ID: PAT_MRT3847_112650C.1.pep
GNSDQPWTLSPILKVAVLMAQKTMPPHFIRPRSLRRLSPVGVAMGMAVDTKMAATERGPILRRWRLRWKTCRWLLRRGLWTMRMXARSTPLSAMDTRRTLRMSMVC

SEQ ID NO: 156843 - protein, 148 aa, Glycine max
  Clone ID: PAT_MRT3847_112651C.1.pep
MEDVTSKPMPSVHQGYEKESEFADKTSSIQRLETTSPPTTVSKMLPNSAGSNRESKSEIIGGKKTPKLNGSVKKGKVHANPPNGLKTEVTANRLQVSSIKHKKVEGSSNGRFEAVQEKLNELLDGDGGLAKRKDATKGYLKLLFLNVA

SEQ ID NO: 156844 - protein, 148 aa, Glycine max
  Clone ID: PAT_MRT3847_112652C.1.pep
KRQKILMEKHSRGSLAREDREARMQEKEKRKKIKENRVSKKDSARNQSQSNSHITRPQYQPQETNVPINPEKPEFPSRNSGLSANIRKETSSIVHKPAAVTGHHVDSKTLGRTSFTDNMHNQQAWSTGDCRNISDIGHMRRGADHSAY

SEQ ID NO: 156845 - protein, 49 aa, Glycine max
  Clone ID: PAT_MRT3847_112653C.1.pep
GFHLASCPKSYSIVFSSCPNSERLCYSISLCPVHRCVFCPIIHRTLNSR

SEQ ID NO: 156846 - protein, 74 aa, Glycine max
  unsure (1)..(74): unsure at all Xaa locations
  Clone ID: PAT_MRT3847_112654C.1.pep
YTFTFSQXXXXXXXXXXXXXXXXXLLPPRIPTPPTLPADLLCLLCLLAAPTLKPFALILPQPLLSVPKIFSASX

SEQ ID NO: 156847 - protein, 65 aa, Glycine max
  Clone ID: PAT_MRT3847_112655C.1.pep
LLRVGFRPVSPFIKYMFFCSCTQQNSISLLLREFVKYKVLSGLFGYGQHTSGYLIYREFHAILFD

SEQ ID NO: 156848 - protein, 294 aa, Glycine max
  Clone ID: PAT_MRT3847_112656C.1.pep
MHAKTDSEVTSLDASSSTRSPRRAVYYVQSPSHDGEKTTTSLHSTPVLSPMGSPPHSHSSSSRFSASRHRNNHNNKSWKGIDVIEEEGLLQSELDRQHSLSRRYYFLAFLLGFFLLFSLFSLILWCASRPMKPKILIKSIKFDHLRVQAGSDSSGVATDMITMNSTVKFTYRNTGTFFGVHVTSTPFDLSYSDIVIATGNLKKFYQSRKSQRLVSVAVMGNKIPLYGGGASLSSSTGVPTLPVPLNLTFVIRSRAYVLGRLVKPKYYKRVQCSINLDPKKINVPISLKHSCTYD

SEQ ID NO: 156849 - protein, 187 aa, Glycine max
  Clone ID: PAT_MRT3847_112657C.1.pep
MEVEAVQQQRKGAHLKKRALKNKALGITFNEKDLTDYVTGFHKRKKKRRKEAQKQQNEALRRKRTEERKRRKLEREHVLNGGVPPPDEIDGDQEETEEQVESIAETKTYENDDLKVTVVTSEINPEDGSYPSERKEAAVIPPSVVSDKRQGVPISNKKSFKKVAKQRSRPRPSSKRDKKKGKKQGKK

SEQ ID NO: 156850 - protein, 79 aa, Glycine max
  unsure (1)..(79): unsure at all Xaa locations
  Clone ID: PAT_MRT3847_112658C.1.pep
MEVEAVQQQRKGAHLKKRALKNKALXITFNEKDLTDYVTGFHKRKKKRRKEAQKQQNEALRLYTHRGTQKGTLPLLSYY

SEQ ID NO: 156851 - protein, 43 aa, Glycine max
  Clone ID: PAT_MRT3847_112659C.1.pep
PRILKHNLIQIFLNTSITVISFILYYLPFTCYFYQQISILKHT

SEQ ID NO: 156852 - protein, 209 aa, Glycine max
  unsure (1)..(209): unsure at all Xaa locations
  Clone ID: PAT_MRT3847_11265C.1.pep
KPGGQPGKPAGKPGGDPGGPKGGPKKGGKKQGQNRAQRKIFGKKKSPPKNHPKTKGETRGGPKGGAKRGNWGGSKGPVQRGKTGGPTRKKKGEKTRGKGGEKGPPGGVPKEPXQRQKKGPHEGGAPKKGPEGGPPGXPPPGKPPGGKTQRGEKRGGYGGGTPRDRGTLPGSPPTPEKGPDLPPQIGKKGRKKKVKKKLGAKKRKCTSVF

SEQ ID NO: 156853 - protein, 107 aa, Glycine max
  Clone ID: PAT_MRT3847_112660C.1.pep
MVFPLLGALGQISNILLKSEATHDKDQDDNSGSINTKVENSQLEGFYVDLSITKEVIVENSISVSIRKCSETAKNILYLETDIPGDILLHWGVCRDDLKWWEIPPVP

SEQ ID NO: 156854 - protein, 52 aa, Glycine max
  Clone ID: PAT_MRT3847_112661C.1.pep
FLHRLGLALMMGRLVVLLPPYLIKGLSSRLEDQDVNYMLIKSKMESFSGFQR

SEQ ID NO: 156855 - protein, 423 aa, Glycine max
  Clone ID: PAT_MRT3847_112662C.1.pep
RCIHYTELRTGIRDGLPTDLAKPLYVGQRVIALHPKTREIHDGSVLTVDYDKCRIQFDRPELGVEFVMDIDCMPLNPSDNMPEALRRHIGSQKASFMNKEPQINGNSNFGGCEMHSFPVKAKVATVDNLCAQAGCAQPCKVTHHQAKEADIHAVSELKRALDKKETLLMELRSANSDILENQNGIECLKDSEVFKKHYATVSDAMLQLRQRNTYRGNSLPSWMKPQASFNVHDDLPSMLDSSLTQELGSTVVQVIKGSRLRAHAMVDAAFQALSLAKEGEDAFIKIGQALDSINHQQLASQSRLPVIRSQEQVNANGSFYHLNHSTSGVSEPILNDPSLPKPHNCSDKFDTELPSDLITSCVATLIMIQTCTERQYPPADVAQILDSAVTSLHPCCSQNLPIYREIQMCMGRIKTQMLALIPT

SEQ ID NO: 156856 - protein, 167 aa, Glycine max
  Clone ID: PAT_MRT3847_112663C.1.pep
IPLLVLGFGHCSTKIQYTQQFTKNQPSLFQVPTPKMKVRFLALFLLISGIQAISTSEGKGLIQSNGQAQELLGKLYGSIEESIRLNDKVEETKDGYKEEILNTTRKAQGGGSSGGTGSRGKTGAGGTADVNRRPRQSSAPSEPLFWVSIFNPFVSLALVILFPFHLV

SEQ ID NO: 156857 - protein, 42 aa, Glycine max
  Clone ID: PAT_MRT3847_112664C.1.pep
FVSVYFRGWWDSNVPLGQDNFCFRCRLFNEQRSQVVFVFCTC

SEQ ID NO: 156858 - protein, 63 aa, Glycine max
  Clone ID: PAT_MRT3847_112665C.1.pep
KNHPWGVKIKILQLLPKPFKEFLRKLQKGHLILPPFTRQAVGALTLLLVKGIGWPPFLKWTWF

SEQ ID NO: 156859 - protein, 188 aa, Glycine max
  unsure (1)..(188): unsure at all Xaa locations
  Clone ID: PAT_MRT3847_112666C.1.pep
IKYVKGSEGKMNAFKACVVKVGSVDTKVGLCLGVPTRWNSTFVMLQSVLAYRCVFNTLAIEDANYVTCPTAEEXVRAEKICEFLKPFFHITELMYGSSYPTSNLFFXQVWQIECWLEKHTRHEDXKIREMVDKMKDKFDKYWNDYSDVLALGTILDPCYKMSFLKFCYTKLGLSEVSCQAKMKVLKHK

SEQ ID NO: 156860 - protein, 83 aa, Glycine max
  Clone ID: PAT_MRT3847_112667C.1.pep
PRVRPRVRAAARRRHKGNHNPVVLPKNALQPHFLEWVGFPIGPEYYVFSPDAQIFFCFSPAGLEFSGFSNSYAAELQPLCITL

SEQ ID NO: 156861 - protein, 93 aa, Glycine max
  Clone ID: PAT_MRT3847_112668C.1.pep
CELDRSNGTPGCTLLPYGSCAVCNCQRLSICLRHRLCPGQFIQVRFPYPSPLVLSFPYTLDHRHSSDHLVSSNEQVRLLDIAPSFQGIYTFNN

SEQ ID NO: 156862 - protein, 82 aa, Glycine max
  Clone ID: PAT_MRT3847_112669C.1.pep
DLGSHPYYYCSKSTLLLFNGLILTKKYRVRFFFHPENNTRFSVACNSTKTMYELTIPLLANSSSRDTTHSCNENIIHFESCV

SEQ ID NO: 156863 - protein, 59 aa, Glycine max
  Clone ID: PAT_MRT3847_11266C.1.pep
LTRSLITENVLCKNRTRLAYILWALNKPIYFPPILGPRILKVAGALRKKSVFTCNPPGS

SEQ ID NO: 156864 - protein, 234 aa, Glycine max
  unsure (1)..(234): unsure at all Xaa locations
  Clone ID: PAT_MRT3847_112670C.1.pep
KACQRSPHMIMRYAPXGVFALISVTVXNSGFASLWPLARLVTLVYAAIAXFGVVVFGLVARICGFSVFRLIRILKAELILGFSTASSETVLPRIIEKMEAFGAPRAISRFVVPTGYSFNLDGSTLYQSIAAVFIAQLYGIDLSLGQQITLVLTLMVTSKGIAGVPGVSFVVLLATLGSVGIPLEGLAFIAGVDRIMDMARTALNIVGNALAVVVVARWEGLYDDAAGERYWQSL

SEQ ID NO: 156865 - protein, 73 aa, Glycine max
  unsure (1)..(73): unsure at all Xaa locations
  Clone ID: PAT_MRT3847_112671C.1.pep
HERPRATNPNPPPPRAXSSYRLDPRPPPLSHHTRRPSPTSSAPPNRRCTPPPTPSTLTCDPTPAPSLNPPLKT

SEQ ID NO: 156866 - protein, 138 aa, Glycine max
  Clone ID: PAT_MRT3847_112672C.1.pep
SFTELGVPHFYTRYGVNESQGSTRGTSNLGLAHAKGIAFLMMGERWTCIITNTDGPDAGTDSDQCGENGTCTIEGEPETQELNDHTDVVSNTDTAAYCKCAEGWRRVIFRTDCPDASSGKDYAECARQSACTIDDPSS

SEQ ID NO: 156867 - protein, 124 aa, Glycine max
  Clone ID: PAT_MRT3847_112673C.1.pep
DGILLREVQNDILLRRYSVLILDEAHERSLNTDILIGMLSRVIKTRQMIYYEQKKMILSGERVSPEKMIFPLKLVLMSATLRVQDFTSGKLFHTTPPVIEVPTRQFPVTAYFAKKTEKTDYIGE

SEQ ID NO: 156868 - protein, 83 aa, Glycine max
  Clone ID: PAT_MRT3847_112674C.1.pep
PPLGSPFDFFRDQVLGDLLGSGASFGATRVYDWPSNWGKNVFPKMASASIGLPLLAFGALAISPLISGYNLCPLFSKPPFTPG

SEQ ID NO: 156869 - protein, 177 aa, Glycine max
  Clone ID: PAT_MRT3847_112675C.1.pep
RCDSVFSSITCMPTLNTHSPPLHHPLCRPPTPLTLSGTGCNTGRPLLAQTTHFAATSSALSVVVSILSLIIAFVQRRLSQSGRLFCRTVIYVYCGHILLLPYTSAVLLLQYAAIILCPSLYCALSISVSRIRFGCFTRRRCPTASLLLIFSPPVRPLATPPPPPPPPPPKQVVLLTM

SEQ ID NO: 156870 - protein, 170 aa, Glycine max
  Clone ID: PAT_MRT3847_112676C.1.pep
MPIRQFQVVGRKAPTEKEPNPPAYRMKLFAPNPVLAQSRFWYFLHQMKKMKKTTGEILDINELTEKNRRVVNNYGIWIRYNSRSGTHNMYKEYRDVTLCKAVEQMYSELAGRHRARPRSIQIMRTAIVAAKDTQKTNVQQFHDSKISFPLSHRLPRAAEKTTRRSSRPRA

SEQ ID NO: 156871 - protein, 68 aa, Glycine max
  Clone ID: PAT_MRT3847_112677C.1.pep
DMKEGSIPAALIYRIQYKVMNTCAYRVLLKPQKGETTLFITDMTKANVSLPRKIKWDEGTLPERWVYV

SEQ ID NO: 156872 - protein, 35 aa, Glycine max
  Clone ID: PAT_MRT3847_112678C.1.pep
MAIAPAMLTDDPTDKLVLLDAKPDKLRGKMLDLQH

SEQ ID NO: 156873 - protein, 89 aa, Glycine max
  Clone ID: PAT_MRT3847_112679C.1.pep
IGNICFLIKAILKPQEMRSVFLGEFHFTISESIEAKMFIYQLALIVFLLGLAGSHGKRYLKSSEISNSTFSRNKEAKMFKYEFEVFVFV

SEQ ID NO: 156874 - protein, 67 aa, Glycine max
  unsure (1)..(67): unsure at all Xaa locations
  Clone ID: PAT_MRT3847_11267C.1.pep
XLXLGGLFIXCAYLFIRPXIXIXXLAXMDXXRXIRXNRNTGXXYXXIXXXMXXXRAEFRAYVRVXAT

SEQ ID NO: 156875 - protein, 107 aa, Glycine max
  unsure (1)..(107): unsure at all Xaa locations
  Clone ID: PAT_MRT3847_112680C.1.pep
LSSITNRARGWAISDMVTFNGSVTPLALLADGRLXVIGWTPTVFXRSKRTSSGIVGLWALHQNQEXSWRPETDASSAVPLQGSLKRRRLYALXRGIPQASGAKSLGR

SEQ ID NO: 156876 - protein, 72 aa, Glycine max
  Clone ID: PAT_MRT3847_112681C.1.pep
AKSKSPFCPFNRFCFVKNLSWALFCRGPQPNIMTRVPKFFPHHPFRPLVFFYLFPFTECTQAFWSWKVSIFC

SEQ ID NO: 156877 - protein, 576 aa, Glycine max
  unsure (1)..(576): unsure at all Xaa locations
  Clone ID: PAT_MRT3847_112682C.1.pep
MKSESELVGFCIEAACESRESVDKWRMQSRSLDRLPSHLADSLLRRLIARRLLYPSLLEVFKHSAEEVDVRGDNSVDAEWMAYLGAYRHLRYLNLSDCHRVSTSALWPITGMSSLQELDLSRCFKVNDAGINHILSIPNLERLRISETSVTAKGVKLLASLKNLSLLDLGGLPVDDVALTSLQXISNKGASVLNTFPKLTYLNLAWTSVTKLPKLSFLEYLNMSNCTIDSILEDDKAPLAKLILSGAMFMNEAEALLYANTNFLSFLDVANSSFHRFFFLSKMKVIEHLNLSSCMMGDDSVEMVACAGGNLKSLNLSGTRVSSAGLGILAGHVPGLEILSLSQTPVDDTAISFISMMPSLKDVDLSNTNIKGFLHQGRTDVNSLLSLMALQNLKLERLNLEHTQVRDEALYPLSSFQELRYLSLKSASLADISLYYLSSIPKLTNLSICDAVLTNYGLDMFKAPETLKLLDLKGCWLLTEDTILSFCRNHPQVEVRHELGTLFPVNQNGLNHSSPSRSTSKTMQMTKKKDQIPLSPYFVDQRLKYSRDELLALQFTSLPLASSSESGNSIFEKQLG

SEQ ID NO: 156878 - protein, 412 aa, Glycine max
  unsure (1)..(412): unsure at all Xaa locations
  Clone ID: PAT_MRT3847_112683C.1.pep
MYSTHQQHQGKNIHSSSSSSRMPIPSERHMFLQTGNGSGDSGLVLSTDAKPRLKWTPDLHARFIEAVQQLGGADKATPKTVMKLMGIPGLTLYHLKSHLQKYRLSKSLHGQSNNVTHKITINSGAATDERLRENNETHMNSLNLAPQSNNKDLYISEALHMQIEERRRLNEQLEVQRLLQLRIEAQGKYLQAVLEKAQETLGRQNLGAVGLEATKLQLSELVSKVSSQCLNSAFSDRLKEIQGFSPHQQXKTNQPNTNDCSMDSCLTSCEGSQKEQEIQNGGMSLRPFNVHTFMERKEVIEGPNLNNLPNTDLNWCDPVKKNTFLTPLSMHADKRSPSNLSSIGLLEGETTENRSTIVRTESIKPAVAEKVSQDYGLPSNYFAASKLDQTTEDNKDTKTSCKQLDLNGFSWN

SEQ ID NO: 156879 - protein, 60 aa, Glycine max
  Clone ID: PAT_MRT3847_112684C.1.pep
LRRVYINAHVNKLCTDQSSFCHNKDQIDTNHCNNNLFTVHKSIFFNMQSPQLNALVDLEP

SEQ ID NO: 156880 - protein, 98 aa, Glycine max
  unsure (1)..(98): unsure at all Xaa locations
  Clone ID: PAT_MRT3847_112685C.1.pep
VRLPRPRVPGLSVSGLAVAVVAGSPXLGPPFGALLLSGLLAAPLALGALGGGGAPPPPCGVVFPPPRLVLASKPHKGILLFSFTIIYLFFSVLSKLML

SEQ ID NO: 156881 - protein, 60 aa, Glycine max
  Clone ID: PAT_MRT3847_112686C.1.pep
IQHTLDTSFQHVKRGCGNFHIGIEYLTRGSCLIDFMGFKQTQHASENPSSRSCRGFRIFR

SEQ ID NO: 156882 - protein, 101 aa, Glycine max
  Clone ID: PAT_MRT3847_112687C.1.pep
LTDISHAPGSPFIAFATPTPSNHHQLNKLAPNANAVTNVKRAHTNCFTLHARTQLPPSATNPPETTEVTPNTGRKKDTSNLKMQTALPGERARNSSHETTK

SEQ ID NO: 156883 - protein, 58 aa, Glycine max
  unsure (1)..(58): unsure at all Xaa locations
  Clone ID: PAT_MRT3847_112688C.1.pep
LVSRLPFFFFFFSNFLNXXNKLQTKVFLQIQIIQYHSYKLNQLNPALLINLQIDHTIF

SEQ ID NO: 156884 - protein, 70 aa, Glycine max
  unsure (1)..(70): unsure at all Xaa locations
  Clone ID: PAT_MRT3847_112689C.1.pep
VRSFTGLAPLNPILLSRPSSKYTGXDHSFTINDNGGLVTDLIHERRMPXLNRPTDQRDTVIRGITTQQIK

SEQ ID NO: 156885 - protein, 42 aa, Glycine max
  Clone ID: PAT_MRT3847_11268C.1.pep
KQREYIYIISHHNVSEERVIYWYVHTAKLLESAMCCKRYEVV

SEQ ID NO: 156886 - protein, 74 aa, Glycine max
  Clone ID: PAT_MRT3847_112690C.1.pep
GSEALLIVTFKLQFVSLQHEVQIPPAIAQQSLQGFIQFRFYYFLLASSKPTKKGLFGPNTKKKTPLHPNLPFKN

SEQ ID NO: 156887 - protein, 94 aa, Glycine max
  Clone ID: PAT_MRT3847_112691C.1.pep
GAGISRVRPTRPLEFCASSTPDLWRTCDRQFFFRAEAKGASLHHIFIIICLTASNSCYYIKELITFSFSLSVSVAQNQQPHACMRSRTSSLRPN

SEQ ID NO: 156888 - protein, 42 aa, Glycine max
  Clone ID: PAT_MRT3847_112692C.1.pep
CYMNCWKPLKNEHCYMNSIDGEGIKNAILRPLLISWLTNNPS

SEQ ID NO: 156889 - protein, 40 aa, Glycine max
  Clone ID: PAT_MRT3847_112693C.1.pep
LVTTYPSPARDNDAAPKRVPHTNMTSTGVNSHLTDHPVVG

SEQ ID NO: 156890 - protein, 137 aa, Glycine max
  Clone ID: PAT_MRT3847_112694C.1.pep
PLRLLPFLFCVWVFFRLGCSISLFVGVHALIFLCFVFFGSANACGGLDVPVSFRRFSAFFLLFLGIVFCPLGVQFLLRGVAAPFLSSLPFGRPRVISLVASLVLPFGVLCAFAVSFFHALFPFFSPPFFFLFPPGVV

SEQ ID NO: 156891 - protein, 203 aa, Glycine max
  Clone ID: PAT_MRT3847_112695C.1.pep
LEARIRKSGQKRARRETIVGPAIDKGVAHESVGVKPATLVPKEIPVIKKNHVLKINIVPKATVKEHKDDDTTHELQEPEKDVPDPNKFLTPDELERGKLPPEEILSLPMFKNYTAGNPAPVLYIKNLAKDVIADDFYFIFGSFVGRIDAAKSGLQVKLMLYGIMRGQPSNTLILLVKLRRKYKSFWLICIKKPKNDQTWIQTT

SEQ ID NO: 156892 - protein, 73 aa, Glycine max
  Clone ID: PAT_MRT3847_112696C.1.pep
VLYSCRTAVSLGGYSKLGQETVVLATTSSLRVAVHPPTSTNNDHCHTHTHQTQTTWFFSHTHTHPTLPQPSEV

SEQ ID NO: 156893 - protein, 37 aa, Glycine max
  Clone ID: PAT_MRT3847_112697C.1.pep
MSSPSTRQEMDWMGLMMSNYNVHIINDIMHKFYVHMN

SEQ ID NO: 156894 - protein, 117 aa, Glycine max
  Clone ID: PAT_MRT3847_112698C.1.pep
KRKWNKIRSRSRKQRKRRSLIWYLAKATKKKTMLAESDHYRVEFRACKDDAWYTARVSLEGETLTVKYLNLPDEYDNAFRASEFGERFRPLSKQVQDSECRSLPYLSCCRLLASLNK

SEQ ID NO: 156895 - protein, 44 aa, Glycine max
  Clone ID: PAT_MRT3847_112699C.1.pep
NCGLQFANLHTYSYLFCIAITLCDHHDHLFVNHLIQVYCFLHDT

SEQ ID NO: 156896 - protein, 108 aa, Glycine max
  Clone ID: PAT_MRT3847_11269C.1.pep
RVGNFSKSFLFFDWKNSTPGYFPHGAKGGVPLIKFRGKGGSFFFWEQNKFPGFFLGTKNFFLKFQKNFGFFPPERKAPAPLTFIWEAPETKNFTILFAKPPFFRARGC

SEQ ID NO: 156897 - protein, 127 aa, Glycine max
  Clone ID: PAT_MRT3847_1126C.1.pep
FLGASGGSYTDPTGRTDIEMMRFCQNFMSQMYPFLGPDTDLFYEEMSISTREMVYLPAQYGLVARHAQGCYTRPRIFWSVSTLLPQATGYGLVINVKLMLADMTKELQRLICAVSGSRQIDMHVSEK

SEQ ID NO: 156898 - protein, 135 aa, Glycine max
  unsure (1)..(135): unsure at all Xaa locations
  Clone ID: PAT_MRT3847_112700C.1.pep
TQHALPLPLRKCVLMPIGPGPQLANVDTIAXHGWFTNLVYLHDLLRLLRLCCYWLYEMFSTLACTVRWGQSIQPSLIPTLNQRLPPPPTRLTLYRPLMGWALVGSVVQNTPNHGATGTLSALLAWVTGPWTVRSR

SEQ ID NO: 156899 - protein, 327 aa, Glycine max
  Clone ID: PAT_MRT3847_112701C.1.pep
GCHPRPRAVRSLRPLRGALSGAARRGPRPRRRLMSKQSPETRPIIAQAGAIPYIAETLYSSSHPSQEDAAATLLNLSITLKEPLMSTRGVLDAIAHVISHHHTTSSPPAVQSAAATIHSLLSSVDSYRPVVGSKREIVYSLIDILRCHLSSPPRTIKDSLKALFAIALHPINRSTMINLGAVPALFSLVLKDGRVGIVEDPTAVIAQVAGCEDAVDAFRKPVDLGLVIADLCKNSTAASMFTKENIVSALLNLVRCGGDKVAANVRDVVAFGALDGIADVRDGGSVKGKNKAAELMKVLLGQNNGDVVVFNSDTCSSFGSTRNHDSE

SEQ ID NO: 156900 - protein, 127 aa, Glycine max
  unsure (1)..(127): unsure at all Xaa locations
  Clone ID: PAT_MRT3847_112702C.1.pep
INAQVADFGPGPQLMKPKKLATMKAEAGTFGYIAPQYAQTTRGIVKIECTPPGVELLELSTGKHPFPQKKNYELAEWAPRPTHIGTEGEDILDEETREASSXKKFPIFKLVVIRTATPTDRRPPMKE

SEQ ID NO: 156901 - protein, 42 aa, Glycine max
  Clone ID: PAT_MRT3847_112703C.1.pep
PQEVRQHIMVPKDNLVDLSIPERSIGVVAHVGVPFCLSPTRP

SEQ ID NO: 156902 - protein, 136 aa, Glycine max
  Clone ID: PAT_MRT3847_112704C.1.pep
ENAPFTKTLITNLFQTHQTNHYPQFPSLLIPSQTSISFDFSPKATSFRLFFSSGYTSTTSFLFPLWFKSRSSVLISNTHLFCFSNCFPPVSCSIRQISVHCLLILNFDLISVCLVAQIHSFLPKGVCFSVSDKFEG

SEQ ID NO: 156903 - protein, 187 aa, Glycine max
  Clone ID: PAT_MRT3847_112705C.1.pep
SAAQGDSDSLSLSCLIHGFLEQDTTNDDSDSVIHDSDWDPVDSVDDSPDSPSNSPSLSFLHSNNADPYRNLLIAHVSEALESLAFLRERNASLFRRSVAAFLRERRHDAAVCETARDSSGGSHEFIDVVQTGSATCRYFVDLDFRAQFEIARPTRRFSEALAAVPGVFVGGAEELKRTVSTACDAAR

SEQ ID NO: 156904 - protein, 180 aa, Glycine max
  Clone ID: PAT_MRT3847_112706C.1.pep
IRGVTRKLLEGISESLGLESNSIIESTDFDSGHQLFVVNLYPPGPRPQGARGPPSQPAEGLATRPTRGGTGGLQVKHNGKWVNVNPLPNCIIVLLSDQLEVVSNGKYARVMHRAILNNADTRISVVLANGPALDKEIGPLPELLQNYKPLFRSIKYRDYFQIQQKSRLQDKSSLDEIRLN

SEQ ID NO: 156905 - protein, 135 aa, Glycine max
  unsure (1)..(135): unsure at all Xaa locations
  Clone ID: PAT_MRT3847_112707C.1.pep
ILVRPRVRPRLGDFEAATDMLAQLGEIQEKVVSKFAQEETPTAWSTXQARPATTLLADGWPYLHAMVHDSSESTIPGDFDIGVQLATINSMCAYGLNPDITXSRHLGTIPQTMXQQTVWNXMATERTPLNIDPSK

SEQ ID NO: 156906 - protein, 147 aa, Glycine max
  unsure (1)..(147): unsure at all Xaa locations
  Clone ID: PAT_MRT3847_112708C.1.pep
QKFKEDFEFRLMNEKFKXDEVWGHLGKSKSHSKDNNEEENAFDEDYQDEDNDDVSNIEVKPVYNKDDFFDSLSSNMHGNASQNGRTRYSEQIKIDTETFGDYVRYHGGRGGRGPGRGGRTRGGYYGRGGGYGYSGRGRGRGMPSRTL

SEQ ID NO: 156907 - protein, 156 aa, Glycine max
  unsure (1)..(156): unsure at all Xaa locations
  Clone ID: PAT_MRT3847_112709C.1.pep
VLDINLAISHGGLFAPLQGISGLGPRKAASLQRSLVRAGAIFTRKDFLTEHKLGKKVFVNAVGFLRVRRSGLAASSSQFIDLLDDTRIHPESYILAQELAKDVYEEDGTGDANDDDDALEMAIEHVRDXPSYLKNLDVEEYASGKKRQNKYKLSMT

SEQ ID NO: 156908 - protein, 68 aa, Glycine max
  Clone ID: PAT_MRT3847_11270C.1.pep
SCRAVYFIRIRKRMRQMGGLVRFKPNTTLSAIQFLSVHIRNPTYLLLHFWWTGSIFITVLSKQRHITQ

SEQ ID NO: 156909 - protein, 77 aa, Glycine max
  unsure (1)..(77): unsure at all Xaa locations
  Clone ID: PAT_MRT3847_112710C.1.pep
PWXXXSXWFPSXAXXCXXXXXLVXXLXLCXXXXXXRXXSXXXXXXXAXXXXXXSXXPXXXXXPGVSXXXXXXXSXXR

SEQ ID NO: 156910 - protein, 42 aa, Glycine max
  Clone ID: PAT_MRT3847_112711C.1.pep
ADYLKYKSEGRIVPDGVNAKLLGNHGRLEKRAPGKAFLDADA

SEQ ID NO: 156911 - protein, 429 aa, Glycine max
  Clone ID: PAT_MRT3847_112712C.1.pep
MSVAVAPRFGRVPSLLRRATFLAVHTLSLSFSHCFSGVCDLSIKMELSSIKDAFDRVAKKQKLSSSKSQEVVDQVGREIEQALATIQSSHDPSAPVDQKSVLTELKFKLNAIGPLQQLEGSNKELNISLTKYQKLLEKLLNPDISKAYRNVDFDTHIVDQIIANHFYRQGLFDLGDSIINEAGEPDAAALRSQFLEMHQIIGAMRERNLQPALTWVSANREKLVQIGSNLELKIHTLQFVEVLQNGTRADALKYARTYLAPFASLNKGEFPKLMGCLLYAGRLESSPYSELLSPIHWEMTTEELTRQFCTLLGQSYENPLSVAVAAGVEGLPTLLKLANVMAAKKQEWQEMKQLPVPVELGKEFQFHSIFVCPVSRDQGSEENPPMLLPCLHVLCKQSIMKLSKNSTRTFKCPYCPAEATVANCKQLYF

SEQ ID NO: 156912 - protein, 57 aa, Glycine max
  Clone ID: PAT_MRT3847_112713C.1.pep
KSKRILVNPPQFHVTGFSQALQTQLREKVQIPPKGRKKKNFNNRLEKGTRHKKNFFF

SEQ ID NO: 156913 - protein, 95 aa, Glycine max
  unsure (1)..(95): unsure at all Xaa locations
  Clone ID: PAT_MRT3847_112714C.1.pep
RGWVNYPAAPKRSIKVLDSQKKDESLSKYGYIHGXGKWQKDSQNADLKRXGKRCIKRCLNYPKPSIKRSHIXSADKEDXIIRLERLLSNRWALIA

SEQ ID NO: 156914 - protein, 156 aa, Glycine max
  Clone ID: PAT_MRT3847_112715C.1.pep
SGSAKCISVDLPGHGKSILHGVKGAGEEPLLSLETIADLVHKLIHHIAPEKVTLVGYSMGARIALYMALKFCTKTKGAVLISGSPGLKDELSREMRTAKDDSRALAVIAHGLELFVSYWYAGELWKSLRSHPHCNRIIASRLQHDDMQNLAQMLSG

SEQ ID NO: 156915 - protein, 188 aa, Glycine max
  unsure (1)..(188): unsure at all Xaa locations
  Clone ID: PAT_MRT3847_112716C.1.pep
MPHILPDFSNSVKLKYAKLSYQYLVNHIKTLTLIPIMLGISIETLRLGPDEILNLWNSLHVNLVQIFLSTFLLIIIATIYFMSKPRTIFLVDYACFKPPVTCRVPFATFMEHSRLILKNNPKSVEFQMRILERSGLGEETCLPPAIHYIPPKPTMEAARGEAEHVVFSAVDSLFKKXGSQTKDIDILI

SEQ ID NO: 156916 - protein, 91 aa, Glycine max
  Clone ID: PAT_MRT3847_112717C.1.pep
RSKMKMRLVVIALTILMLASSSMAIHVKTLVANNMLQEKEGEHSNGNNNEHQIPLNRYSDIHEIPGTGGPGERTVSGHMEYTKPASPNRNG

SEQ ID NO: 156917 - protein, 47 aa, Glycine max
  Clone ID: PAT_MRT3847_112718C.1.pep
WWLINVIKKWKLDTVPNSPFLNLAVPIISYYSIPPLDLKFKSPCGQR

SEQ ID NO: 156918 - protein, 43 aa, Glycine max
  Clone ID: PAT_MRT3847_112719C.1.pep
NGRKFKQWLYCIHGNRSNSCMSYYFQKLFCIYSLPIIYPPHIL

SEQ ID NO: 156919 - protein, 280 aa, Glycine max
  Clone ID: PAT_MRT3847_11271C.1.pep
THLPLIKEITTTPPPPPRDVVLKTREKIPCKLVSKTSISHDVRLFRLGLPSKDQLLGLPVGKHIFLCATINEKLCMRAYTPTSSVDEVGFFDLAIKVYFKGVHPKFPRGGLMSQHLDSLSIGSVLDVKGPLGHIEYTGRGNFLVHGKQRFAKRLAMLAGGTGITPIYQVAQAILKDPEDPTEMHVVYANKTEDDILLKEEMMCGEEQCDRFKVVVRVETAREGWEYSVGFITESIMREHLPETSTDALALTCGPPPMIQFAVQPNLEKMGYDIKADLLVF

SEQ ID NO: 156920 - protein, 225 aa, Glycine max
  Clone ID: PAT_MRT3847_112720C.1.pep
MEKMMRLRPLFRSLSCRSYHFVLRPSLLSRSPNPLPSPSPSECRSPLSMGLGSMRFYSEDVTHMPNIKDPVLYNAFKDLMAVSWSELPDSVISDVKNALSKNTDDKAGKEVVENVFCAAKAIEEFGGILISLKLEFDDSIGMSGEDVKPLPDHIKNALHTIFDRYSTYLNSFGPDESYLRKKVETELGAKMIHLKMRCSGLGAEWGKVTVLGTSGLAGSYVEQRA

SEQ ID NO: 156921 - protein, 236 aa, Glycine max
  unsure (1)..(236): unsure at all Xaa locations
  Clone ID: PAT_MRT3847_112721C.1.pep
MEKMMRLRPLFRSLSCRSYHAFPFINHVVLRPSLISRSPNPLPSPSHSECMSPFSMGLGSMRFYSEDLTHVPNIKDPALYNAFKDLMAVSWSELPDSVVSDVKNVLSKNTDDKAGKEAVENVFRAAEAIEEFGGILVSLKLEFDDSIGLSGEDVKPLPDHIKNALCTTFDRYSTYLNSFGPDENYLRKKVETELGAKMIHLKMRCSGLGAEWGKVRVXGTSGLXGSYVEQKHRATI

SEQ ID NO: 156922 - protein, 176 aa, Glycine max
  unsure (1)..(176): unsure at all Xaa locations
  Clone ID: PAT_MRT3847_112722C.1.pep
MPLHSLRVRLEVKHRVLNIGHVGHNAFKDLMAVSWSELPDSVISDVKNALSKNTDDKAGKEVVENVFCAAKAIEEFGGILISLKLEFDDSIGMSGEDVKPLPDHIKNALHTIFDRYSTYLNSFGPDESYLRKKVETELGAKMIHLKMRCSGLGAEWGKVTVLGTSGLAGSYVEXRA

SEQ ID NO: 156923 - protein, 91 aa, Glycine max
  unsure (1)..(91): unsure at all Xaa locations
  Clone ID: PAT_MRT3847_112723C.1.pep
RERDHWGRPRCRPRERGTPANLSGKGPSPGGXXNKATPPEPRKXQGDPRVSARGXRGRAGTTRRPSWFCRTIEGEGEEGPHKQTQGNPKQP

SEQ ID NO: 156924 - protein, 39 aa, Glycine max
  Clone ID: PAT_MRT3847_112724C.1.pep
QSHSTTHYNHKQHHHLGISHYRFTHKLPISTKYHIIQTL

SEQ ID NO: 156925 - protein, 49 aa, Glycine max
  Clone ID: PAT_MRT3847_112725C.1.pep
PWYCFVCFSFGCVQILDTPSLIAEGSKGVKKNIFKDRPPQSDASASSCC

SEQ ID NO: 156926 - protein, 86 aa, Glycine max
  Clone ID: PAT_MRT3847_112726C.1.pep
YPKGHRSLARESLHVCLHGNIFVRYGIHDGVRRIIGTKRGCIIVHIGTASTEAKYLHTPIVCTTSDAEMPDTEYELTKEVDASTHM

SEQ ID NO: 156927 - protein, 94 aa, Glycine max
  Clone ID: PAT_MRT3847_112727C.1.pep
LAHVLRLWKMDMIAVVTELERQEQICLALMRFNVMQKQDLYNPDAYLYKDLIIAVAMACIMHGVLQLLESMREENLFPDSQTYTEVIRGFLNYG

SEQ ID NO: 156928 - protein, 88 aa, Glycine max
  Clone ID: PAT_MRT3847_112728C.1.pep
RRQKGDTLHVPLPNRSSHQSSVQVVEKNKVDAARFAPFWNEVIRNLREEDYVTNFEMELLLMPKNSGDLPLVQWPLFLLASKISLARD

SEQ ID NO: 156929 - protein, 36 aa, Glycine max
  Clone ID: PAT_MRT3847_112729C.1.pep
NGLARQDVNKLDNVVFREYDKSVKFRWRHQCGPSLL

SEQ ID NO: 156930 - protein, 77 aa, Glycine max
  Clone ID: PAT_MRT3847_11272C.1.pep
FQMDPFGQSFPWVKPLKVMVFYSTNFCSPPANRGPFQFTRFFLCWAEYVFLPPLLLRGGFLCRSKKKLCFFSNGPLL

SEQ ID NO: 156931 - protein, 98 aa, Glycine max
  unsure (1)..(98): unsure at all Xaa locations
  Clone ID: PAT_MRT3847_112730C.1.pep
VCKPVQPPRPMMKTSLLENPHHVGEAEKIXLYYMNLAASESPTPTETVRNALGKTYYACLACEAAIKQMATVLXPXLSMAGKFPTLATYQEYLAVKAH

SEQ ID NO: 156932 - protein, 47 aa, Glycine max
  Clone ID: PAT_MRT3847_112731C.1.pep
EHGIKIIFYVIISFQFRFRFRFLQRFDLPMASDGFIDKKTVFRKLMA

SEQ ID NO: 156933 - protein, 89 aa, Glycine max
  Clone ID: PAT_MRT3847_112732C.1.pep
LYPVIINHHLQCCLTLFPSPPPKKTANKEKSKRDSVSFSEQINQSNEETKTLLFPPPQLLRTTKTMYFPSNNHDLSFRTVLPPPLRSHT

SEQ ID NO: 156934 - protein, 99 aa, Glycine max
  unsure (1)..(99): unsure at all Xaa locations
  Clone ID: PAT_MRT3847_112733C.1.pep
FXWVASAXPVRLRPPXLXFLXAAVRGGXLPRLXPXAXXVXKAANSPCXLXRHFXLXASRGCGCSXGXXXAGXGGCXGXCXXXLXXPXAPATAXXVASPP

SEQ ID NO: 156935 - protein, 44 aa, Glycine max
  Clone ID: PAT_MRT3847_112734C.1.pep
RANLGGIGTKESGMHYRTGGVGLAIAVPTLRFSRLADRRLWPGF

SEQ ID NO: 156936 - protein, 62 aa, Glycine max
  Clone ID: PAT_MRT3847_112735C.1.pep
PLLPLACNYPYPGRTQPCAPKCNHLNPCLHSRKRSTELNRVLLYSLTICARVRGNFSPLYCA

SEQ ID NO: 156937 - protein, 40 aa, Glycine max
  Clone ID: PAT_MRT3847_112736C.1.pep
PLFSRCWPSIGSRNAGMDYCKSCFNSIEPGTHISEHHEQS

SEQ ID NO: 156938 - protein, 475 aa, Glycine max
  Clone ID: PAT_MRT3847_112737C.1.pep
MSWLNKNKSTCSDGSANNESSSSGIIGERDNHLDHEIAQLTKLRSSPHELLGCVVPGRMRLPASTVRMKDNREGNYSGRGRFSSADGCHVLSRYLPTKGPWIVDRMKSRAYVSQFSADGSLLIAGFQGSHIRIYDVDRGWKVKKDISARMLRWTVTDTSLSPDQLYLVYASMSPIIHIVTVGSGTTESIANVTEIHYGLNFSSDNGDDEFGIFSVKFSTDGRELVAGTSDCSICVYDLGADKLSLRIPAHQSDVNTVCFADESGHLIFSGSDDSFIKVWDRRCFVAKGQPAGILMGHLEGITFIDSRGDGRYLISNGKDQTTKLWDIRKMSSNAINLGLGDDEWDYRWMDYPEYARNLKHPHDQSLATYKGHSVLRTLVRCYFSPSYSTGQKYIYTGSSDSSVYIYDLVSGAQVAKLDHHEAPVRDCSWHPYYPMMISSAWDGDVVRWEFPGSDEAPASPNKREGRIHRRNLLYL

SEQ ID NO: 156939 - protein, 44 aa, Glycine max
  Clone ID: PAT_MRT3847_112738C.1.pep
AFQHYGNLLSHFVINMAHATEISKWPAHSRESLLRLLRSANLLT

SEQ ID NO: 156940 - protein, 49 aa, Glycine max
  Clone ID: PAT_MRT3847_112739C.1.pep
KVASKACRINNSCEEILGLLGDIILKGFPKGKNDWFASCARLIWNFYSK

SEQ ID NO: 156941 - protein, 52 aa, Glycine max
  Clone ID: PAT_MRT3847_11273C.1.pep
TGKYIYSYMYIPYRYKTGGKLHFTIKSQLRLFDRKRTLLMRRNYSKPFNFSH

SEQ ID NO: 156942 - protein, 112 aa, Glycine max
  Clone ID: PAT_MRT3847_112740C.1.pep
LVKLQFYFWGLGPFFTKGLKGLFKSFLTLKKWGFPQKKPPVLGGYLKMNFFLFFTGFLVRKTPTLEGRSGFFHFFFYWEKMFWSCYFPPLNVRYLVGERGKFPFRFFGFRPR

SEQ ID NO: 156943 - protein, 96 aa, Glycine max
  unsure (1)..(96): unsure at all Xaa locations
  Clone ID: PAT_MRT3847_112741C.1.pep
GGWGGVRSWECCGRRKIHSRVRSYSLQEWSHKNSPPAPPLGRKIIXFSXXLVXQTTSPTTFLFKNLFSMQCKEKVRRVFHVFLGYILVLFVNHVHV

SEQ ID NO: 156944 - protein, 112 aa, Glycine max
  unsure (1)..(112): unsure at all Xaa locations
  Clone ID: PAT_MRT3847_112742C.1.pep
PWDMVGWPRGLGVGLGPLGFGGLLALGERIGPVGPGLXRVFFSRFLXETIFCFFWPSPKKKGCAICLGEIQNMGHVGALKACGPDFPVGCLWKGVFFKKVCSFCQGFSFPWG

SEQ ID NO: 156945 - protein, 112 aa, Glycine max
  unsure (1)..(112): unsure at all Xaa locations
  Clone ID: PAT_MRT3847_112743C.1.pep
LEGLPVFKLQTKIGLRMVQFGDIAMRKVHDPDEDRIAGVNSFXDTNKVLACFTRXMAARQPIGISMGIHDKCHRHLKERKSFGAPFEGFQITQQKLAQKLGMVXAMTLVGWR

SEQ ID NO: 156946 - protein, 50 aa, Glycine max
  Clone ID: PAT_MRT3847_112744C.1.pep
LFITTHLRFISHPVFITPPCVPCTHAFVVIRSQTIKVWVRLLHQQNSICD

SEQ ID NO: 156947 - protein, 297 aa, Glycine max
  Clone ID: PAT_MRT3847_112745C.1.pep
MDRIKGPWSPEEDEALQKLVEKHGPRNWSLISKSIPGRSGKSCRLRWCNQLSPQVEHRAFTAEEDDTIIRAHARFGNKWATIARLLHGRTDNAIKNHWNSTLKRKCSSTMIDDNTQPLKRSVSAGAAIPVSTGLYMNPPTPGSPSGSDVSESSLPVASSSHVFRPVPRTVKVLPPVETTSSSNDPPTSLSLSLPGVGVVDSSEVSNRTTEPIHVTPPLPHRSNTMPLLPMMTSVSATVMAPFNFSAEFRAVMQEMIRKEVRSYMELHNQNGMCFQAAVNDGFRNASVKRIGISRVDS

SEQ ID NO: 156948 - protein, 117 aa, Glycine max
  Clone ID: PAT_MRT3847_112746C.1.pep
SSNDPPTSLSLSLPGVGVVDSSEVSNRTIEPIHFTPPMPHRSNTMPLLPMMTSVSATVMAPFNFSAEFRSVMQEMIRKEVRSYIELHNQNGMCFQAAVNDGFRNASVKRIGISRVDS

SEQ ID NO: 156949 - protein, 57 aa, Glycine max
  Clone ID: PAT_MRT3847_112747C.1.pep
PLVRTRQRGPPKPLIKVTFEDHLGGPKGYLVAHFPGGVSSLPLEPNFFKNCSFINYD

SEQ ID NO: 156950 - protein, 42 aa, Glycine max
  unsure (1)..(42): unsure at all Xaa locations
  Clone ID: PAT_MRT3847_112748C.1.pep
IPFXFFFFFFFFFFFFFFFFFFFFFFFXWSQSCFINHSIELN

SEQ ID NO: 156951 - protein, 96 aa, Glycine max
  unsure (1)..(96): unsure at all Xaa locations
  Clone ID: PAT_MRT3847_112749C.1.pep
KETSYGLSFFKPQPGNFEKNFSVNLYKVTGQFPWSSLRETDRGVSAEYSFPLCKTSHTVIWEGVWRELGXLARTASFAVRKESGHSLKSSLSHAMV

SEQ ID NO: 156952 - protein, 58 aa, Glycine max
  Clone ID: PAT_MRT3847_11274C.1.pep
VFGQYIVWNFCRVFIFPREQLWPYFFPPLIPLTIIKPGSPAGHSWKFRRPPPGLPKCP

SEQ ID NO: 156953 - protein, 69 aa, Glycine max
  Clone ID: PAT_MRT3847_112750C.1.pep
WKIEMYLSFWFFQHISDLYLVKIQSYKQHNTPHTDLSLTTPLKQGLSFNFTYYMLTNTNLYQKHNSNIF

SEQ ID NO: 156954 - protein, 100 aa, Glycine max
  unsure (1)..(100): unsure at all Xaa locations
  Clone ID: PAT_MRT3847_112751C.1.pep
EHVRGPTGKVGGMSGEGSVGPCGLGKGIGESWFGVFLVVKRFGKVGYDDEIEIEIEVGIHLSIGPREGKERIMNKKGAGPSAXFGIKKKVGGLXXLXCVG

SEQ ID NO: 156955 - protein, 93 aa, Glycine max
  unsure (1)..(93): unsure at all Xaa locations
  Clone ID: PAT_MRT3847_112752C.1.pep
RKTLTYANHNVWAVIGLSVAVLMLKMFNFSRWGVCWSRGFNDLIFESNSKTNTRLILFFFFVSXDIPXXXKIESIFLDXEIXFKELSYLCCLR

SEQ ID NO: 156956 - protein, 34 aa, Glycine max
  Clone ID: PAT_MRT3847_112753C.1.pep
NKCVENVESISSNGGVKTCYTGDILKNLSNPKMW

SEQ ID NO: 156957 - protein, 143 aa, Glycine max
  Clone ID: PAT_MRT3847_112754C.1.pep
MLSVSKRTDSDHEFHYFDEVVQINHTKDGWLILFAQLNDDTPFLEDHPSSDEELVSACLKDDTKDFEDEICNDSGKDMKQDNYIAYYHASTGALLRNMFHLMKLMTNADKSPRISEQTTRDVKIALHDRGQELRSSTPRKRGN

SEQ ID NO: 156958 - protein, 66 aa, Glycine max
  unsure (1)..(66): unsure at all Xaa locations
  Clone ID: PAT_MRT3847_112755C.1.pep
MPIRNIAVGRPEEATHPDTLKAALAEFISTINLEXAGIGXGNSNNKHIDNGAATPAGHNLSPSLSI

SEQ ID NO: 156959 - protein, 41 aa, Glycine max
  Clone ID: PAT_MRT3847_112756C.1.pep
YYLRRLLRCYSFSNSVSIIGYVELSGFYFEHHFRHKYEKLC

SEQ ID NO: 156960 - protein, 215 aa, Glycine max
  Clone ID: PAT_MRT3847_112757C.1.pep
MGTDKPNRVGSLISITDPIRDFLSGASKDATLSDELRRTSSDLLLQSEIPYAPLRAVWMASDPSTRPDLTRLFSGTRFIFSSPKPREKSEELKARLKKLEDIAERKAYQELVKDITPPKDVQEPFSSYKDQLGFGLHVVVTMFTGYLLGYAAFRALFNHSPAMNAAGGILGLVGAMFVETFLFIIRSSNADANKTRKSSQKARSSFSTSGIKKNQ

SEQ ID NO: 156961 - protein, 93 aa, Glycine max
  Clone ID: PAT_MRT3847_112758C.1.pep
FALGFPLKKVLGCKAAEVRLGPLKRPPIFYTFRLFIYSHAGVSKFGFTIICRCFFFIFFFFLRITNHYLQFFTSNDNVHNQSSRRKYNDKIHL

SEQ ID NO: 156962 - protein, 196 aa, Glycine max
  Clone ID: PAT_MRT3847_112759C.1.pep
MVTTTVDSSSNHYSPTAATAAADTSNNFPRKNLPSPWAQVVRGADAEPNDQSPPSSSSSSSLDSINSNGPAVQTSDIAVKPAWKKPEANGVAEVGPVMGAHSWPDLSESTKPTAKLTSDSSVKTAADEESTTTPQGPVTSDPPQKQATANAKPSPTPAMNYGMANRQRSMKQRGGANGNNVGSGPVQNNFSGTTPN

SEQ ID NO: 156963 - protein, 61 aa, Glycine max
  Clone ID: PAT_MRT3847_11275C.1.pep
YLNKLYTNFKKKKKKERERERERERERERERERERERERERERERERERERERERERERER

SEQ ID NO: 156964 - protein, 71 aa, Glycine max
  unsure (1)..(71): unsure at all Xaa locations
  Clone ID: PAT_MRT3847_112760C.1.pep
GRIIAXXMQFNWTRSITXTNSCPCNEVXHSVXSEHKLQXSXDWRTRRIEKEDDCLIGEKIEVLSXGNGEXC

SEQ ID NO: 156965 - protein, 64 aa, Glycine max
  Clone ID: PAT_MRT3847_112761C.1.pep
VSLQLDLLRNHYRRCSIALIIWWVLCGIVPSSALLLFLVCYLSTCCLSRHSSASVLVVDPNRIA

SEQ ID NO: 156966 - protein, 361 aa, Glycine max
  unsure (1)..(361): unsure at all Xaa locations
  Clone ID: PAT_MRT3847_112762C.1.pep
MGNSLVFLLFLITLLFVGNVQCNPNYREALAKSLLFFQGQRSGRLPSDQQIKWRSNSGLFDGRLANVDLSGGYYDAGDNVKFNFPMAYTTSMLSWATIEYGKRMGPQIKEARAAIRWATDYLLKCATSTPGRLYVGVGDPNVDHKCWERPEDMDTVRTVYWVSPNNPGSDVAAETAAALAAASIVFRRLDPTYSNKLLRTAQQVYHFALQYQGSYSHSLGSAVCPFYCSYSGFKDELLWGAAWLFRATNAVSYYXLVKSLGADDQPDIFSWDNKYAGAHVLLSRRALLNGDKNFDQYKQEAENFMCKILPNSPSSSTQYTQGGLMYKLPESNLQYVTSITFLLTTYSKYMSAKKHTFNCGN

SEQ ID NO: 156967 - protein, 68 aa, Glycine max
  Clone ID: PAT_MRT3847_112763C.1.pep
LNLWGQFCSCYHLFFFFFKKTKKKGFEKDFTGNKGVCLLRKRVPKNCVQKNILWPRENLGANRPTIWA

SEQ ID NO: 156968 - protein, 99 aa, Glycine max
  Clone ID: PAT_MRT3847_112764C.1.pep
GKVPFYEYGAPTQKEGPSQSEVFFFFCPRGFPKFPQKLGDFKIQRSFQQEEEQYFFPFFFPGAIFCSPSFSYGPKKVFWGVPALTGSGSNSWLHQSQSL

SEQ ID NO: 156969 - protein, 311 aa, Glycine max
  Clone ID: PAT_MRT3847_112765C.1.pep
MQAFRRRISTATISTAKQFNALPSIIAGEFPATRRRWSSRKSRSGEDEWNEAWETAWLPDDLTPKTQAPWESDVNFPSSSSSSSAAAANDGDGDEETKAFVAEMNENWNERRKGSKEKEKKEENGALYSVENMKKDYRLKKQRMHAGLWMKEIEKLEEAKLGDSDVAGDDDIQRLLDSCSGIFDPGNNDLNNVQVQTSEFKNMPDGWETISKNQEGNVWEMSQREEDILLQEFERRIAYSKFQIASFIKTHIFSRRRPIDGWKYMIELVGPNAKRGKGSVSRVPSLSDPSTQPFKEEKNSVDKTYVPRERR

SEQ ID NO: 156970 - protein, 184 aa, Glycine max
  Clone ID: PAT_MRT3847_112766C.1.pep
MEMEDHHQYGIADLRQLVNGPRPTHFPAMPPQPKAELFPGGGGGHPNLQAATQQHYEMMMFGRQVADIIPRCLHDFAPTDSATNIAVATPTTTTSASTPPLSCLEAETAGCIGGDASTGRWPRQETLTLLEIRSRLDSKFKEANQKGPLWVEVSRYHFKHYSLLFSTLTSENYNYLFGWFFAWD

SEQ ID NO: 156971 - protein, 151 aa, Glycine max
  unsure (1)..(151): unsure at all Xaa locations
  Clone ID: PAT_MRT3847_112767C.1.pep
MEMEDHHRHHHQYGITDLRQLVNGPRPTHFPTMPPPPKAELFPGDSNLQAATQQHYEMMMFGRQVADIMPPRCLHDFASTDSATNIAVATPTTTPSAFTPLSCLEAETAGCIGGDASTGRWPRQETLTLLEIRSRLDSKFKEANXKGPLWD

SEQ ID NO: 156972 - protein, 81 aa, Glycine max
  Clone ID: PAT_MRT3847_112768C.1.pep
SQVFGDDAKFLVEVKSGQVEASLNPDQELRRLKQMFEAWKKDYGARLRETKVIINKLGSEDGALEKMKKKWWGRRNSTRIN

SEQ ID NO: 156973 - protein, 75 aa, Glycine max
  Clone ID: PAT_MRT3847_112769C.1.pep
IVISPFSLPLLILVFIWITRAWHGLFTHVLLSSCFRGGTHSSLAFQVCKICLIYCPSSVASSVSCSKTKRVRGRV

SEQ ID NO: 156974 - protein, 52 aa, Glycine max
  Clone ID: PAT_MRT3847_11276C.1.pep
PNYRLVHLTLAGRIIRASAWHRAEYTVHDMPYEGRSKGNSHERLEIANLGIT

SEQ ID NO: 156975 - protein, 123 aa, Glycine max
  unsure (1)..(123): unsure at all Xaa locations
  Clone ID: PAT_MRT3847_112770C.1.pep
SWWPLGSLFLFXPLLGVLVAFLGVLLSSRLAPLCLCFSSXLGGLVLFVRGLFLSVSXFFCLCGCRCGVGWLRAGASFFAXCVFVLGGAPFLWPLPLVLCRLRDPSRGWXRAFRSGPGRGGGFP

SEQ ID NO: 156976 - protein, 100 aa, Glycine max
  Clone ID: PAT_MRT3847_112771C.1.pep
RVWQPFCHGSKRRRRSRPLSSKSSKRTAWPGASATRRSSFTRSCKEFLRFPFGTGDLCLHRLVYYRLSRLARSRCGAHAPYAFFPFDVYKVVIACTPSAP

SEQ ID NO: 156977 - protein, 118 aa, Glycine max
  Clone ID: PAT_MRT3847_112772C.1.pep
LDTLAASCIACLLLHTLFTCQRHPVICICHLHTSIFCPTVIQLSVSLISTTPALPDIVTTFFSTTKPTLYRPSSTLSFFTPTTIYLSTLLLQNDRHPTLILKSEVSPATDSLLPGCAP

SEQ ID NO: 156978 - protein, 230 aa, Glycine max
  Clone ID: PAT_MRT3847_112773C.1.pep
MASSSISAPTLTFPTQKLAVPFPAPRTPSLLPFPSQPPCRCLASASSDDRCSGAKRSGWDSVLHQFSEVAKRVDSYWKSLGNAAADDRVRVVGGDEDWDWDRWRRHFEEIDEQERLLSIFKSQLSRAVYLENYEDAARLKVAFAATANNDSVGRVMSYLNRAIKEERYGDAAFLRDKAGAGLVGWWSGISEGVDDPHGLIIRITPEHGRYVARSYSHRQLATSGGGIPLF

SEQ ID NO: 156979 - protein, 116 aa, Glycine max
  unsure (1)..(116): unsure at all Xaa locations
  Clone ID: PAT_MRT3847_112774C.1.pep
GPSSPIPANFVRFVPKISSRSGKELXKXPKFLKNRGLAMVKMLPPXPMVVETFSEXPPLGRFAVRXMRHTVAVGVFKFVENKVPTGAKVTKAAAPPHPPSLKWWFCWLHLRGLPPP

SEQ ID NO: 156980 - protein, 108 aa, Glycine max
  unsure (1)..(108): unsure at all Xaa locations
  Clone ID: PAT_MRT3847_112775C.1.pep
FVFPFFFXFCVVWCLFLGSFYERGHCGGFVGVWMIGGGYLAVGLFFSGVGFLVFSLRGGAFFWFRSNAKQNQRCPVPGKCKSRVVGFGLSDVKCRCKGVLERSKSQVK

SEQ ID NO: 156981 - protein, 45 aa, Glycine max
  Clone ID: PAT_MRT3847_112776C.1.pep
IHKIIEFRILFKKSENLIFIHSICSFFLFLLYNFRLFLFSLSILM

SEQ ID NO: 156982 - protein, 129 aa, Glycine max
  unsure (1)..(129): unsure at all Xaa locations
  Clone ID: PAT_MRT3847_112777C.1.pep
EGGPRVFLFFKTACRSLPPVIEIYNLLXVVFVSEIRSSFAPPIRKKNPVPDPKMIEMLPFQGMEKLKNFFGPSKQRPHIFGPNVIGRPKPDLPPKNPAPPSFFKNFSHPHYFLSLVLNFVFFPPIKNFL

SEQ ID NO: 156983 - protein, 61 aa, Glycine max
  Clone ID: PAT_MRT3847_112778C.1.pep
LSLLSSFLSDSTCHSEEDSSAATLDCARLLNPTTIMAMSSHSLPLAGYGAEIRSSSLTHTV

SEQ ID NO: 156984 - protein, 45 aa, Glycine max
  Clone ID: PAT_MRT3847_112779C.1.pep
NGTLSCLEGLKTYLTLFIIIPHKVSFGLFICERTKNENSYEIKAR

SEQ ID NO: 156985 - protein, 87 aa, Glycine max
  Clone ID: PAT_MRT3847_11277C.1.pep
YLYSQHYCYHSSRDQAKCSSNTQAPTIKLLNIISTSNALRVNTYAPIRCLQVNPNCSVFPPHNVILKIMLLLQPMPRRCTNFLTALL

SEQ ID NO: 156986 - protein, 122 aa, Glycine max
  Clone ID: PAT_MRT3847_112780C.1.pep
MAKSTGSLVFLSIFTLLLSCNLGGHLKFANGMLDQESWCVAKPSTSDVALNDNIQYGCIALGDCKMIQPGGSCFYPNTLLNHASVVMNQYYAANGRNTWNCFFSGSGLFVVSDPSYANCTYA

SEQ ID NO: 156987 - protein, 95 aa, Glycine max
  unsure (1)..(95): unsure at all Xaa locations
  Clone ID: PAT_MRT3847_112781C.1.pep
KKGSPFMANGKPVVVNXNRVXKFFFPAVKLNLPIFKNSKKAPVGLVSFPPPPVSPPAYFFLGAKGLLLEKKPRFFFFKGYCKNVGTLFSKVLSGF

SEQ ID NO: 156988 - protein, 346 aa, Glycine max
  Clone ID: PAT_MRT3847_112782C.1.pep
MLSAFVHAPSICSSNTLSHCVSPKLNLSRSSMAVSSIRIAVVGDVHDCWNLEQDSKALELLQPDLVLFTGDFGEENLEVIKSVVNLEFAKAVILGNHDAWFTKQFSGSKEKDKVQLQLECLGKEHVAYQRSDFPQIKVSVVGGRPFSIGGKPMFRKKLLLARYGVKDMDESAKRIQKAALGTPEDHFLILLAHNGPTGLGSDSNDICGKDWEFEGDGDHGDPDLAQAISLLKENNQISIPLVVFGHMHKELAYGNGFRKMIVVGADNTIYLNGAIVPRVKRLGGDEDKKSLDDESALASPEAKGTRRAFTLVEISEGRVAKIAESWVSVVEDRTTLEEEHILFESS

SEQ ID NO: 156989 - protein, 152 aa, Glycine max
  unsure (1)..(152): unsure at all Xaa locations
  Clone ID: PAT_MRT3847_112783C.1.pep
MANSKYEYVKCFEVEDEAMFPNIILVWIKASKLHKPHDSNTLKLMNSCAVEVLEEYADVVFAYGFSDEYTFVFKKTSKFHERRASKVLSIITSFFSSVFVRKWDEFFPHKELQCHPSLHGRVIACAXIKALQAYLXWRQTICHLSNQHEQCL

SEQ ID NO: 156990 - protein, 84 aa, Glycine max
  Clone ID: PAT_MRT3847_112784C.1.pep
PSRNPNSRCSTSVSSSSIFSFTPKTLTTPPHQSRFTVRALAALKSLLQQKLELGEDDEAVSILKRFFAAQADADDWKFLAARLR

SEQ ID NO: 156991 - protein, 99 aa, Glycine max
  unsure (1)..(99): unsure at all Xaa locations
  Clone ID: PAT_MRT3847_112785C.1.pep
MANSKYEYVKCVEVEDEAMFPNIILCXIKASKLHKPHDSNTLKLMNSCAXXVLEEYADVVFAYGFSDEYXFVFKKTFQFHERRASKVLSIITFFFLIPL

SEQ ID NO: 156992 - protein, 119 aa, Glycine max
  unsure (1)..(119): unsure at all Xaa locations
  Clone ID: PAT_MRT3847_112786C.1.pep
FMDIFLLLKMEXCSFSIVLLCLRAFIFFLFLLISCLPGILTKSFAWLIYSFSFYFFHQFYFMAPFFLFLFFHLTLSLLCYLFFFNIYFFFFSLSLFLHFFPLFSFFHPSFLVFLFFTNF

SEQ ID NO: 156993 - protein, 55 aa, Glycine max
  Clone ID: PAT_MRT3847_112787C.1.pep
NCVIFYFHSVSWFIGQSDCLNYASTYYVPAFSICAKSYIILAAHIEYFIVLYNFF

SEQ ID NO: 156994 - protein, 103 aa, Glycine max
  unsure (1)..(103): unsure at all Xaa locations
  Clone ID: PAT_MRT3847_112788C.1.pep
KTWGAPTPGFGGQKPPEGPPPPLLGPPGPLSAFRGPQSTPFGRNPPLGPNQGGLLTIGSPRALGGGGPMGEETPGXGEVGAPQGNPPPVHNPFGGPQNPFFKG

SEQ ID NO: 156995 - protein, 54 aa, Glycine max
  Clone ID: PAT_MRT3847_112789C.1.pep
IRLEISLLQMGISVDPARMDPMARRKSELGEIRTLYACAIVCPLKIVNDDSYVL

SEQ ID NO: 156996 - protein, 47 aa, Glycine max
  Clone ID: PAT_MRT3847_11278C.1.pep
STRLYSVLQQRRSFQDPSLYLPSTMTGVRKPDVEIFKSNNGCIFHPS

SEQ ID NO: 156997 - protein, 253 aa, Glycine max
  Clone ID: PAT_MRT3847_112790C.1.pep
MASLQHPTASLQSKHILIPRNTLSQKPILNLSLHGTTFTPLKLKFGVTTTTTAAAATRRSTGATGARMSATAASSYAAALADVAAANNTLDATTADIEKIDEIFSDPQVSDYFADPTLAVEKKRQLIDEIAESSEFQPHTRNFLYILVDAQRIDLINEIAKEFELVYNSLTETELAVVTSVVKLESQHLAQIAKQVQKLTGTKNVRIKTLLDPSLVAGFTVRYSGSKLIDMSVRKQLEDIAAQLELGDISLAV

SEQ ID NO: 156998 - protein, 84 aa, Glycine max
  Clone ID: PAT_MRT3847_112791C.1.pep
MARSVPLVSTIFVLLLLLIATEMGPTMVAEARTCESQSHRFKGPCLSDTNCGSVCRTEGFSGGHCRGFSRRCFCTKECNKNNNN

SEQ ID NO: 156999 - protein, 248 aa, Glycine max
  Clone ID: PAT_MRT3847_112792C.1.pep
MASLQHPTASLQSKHVLIPRNTLTQKPILNLSSLPGTTFTPLKLKFFSGGAVRRSTGASGARMSATAASSYAAALADVAAANNTLDATTADIEKIDEIFSEAQVSDYFANPTLAVEKKRKLIDEIAESSGFQPHTRNFLYILVDAQRIDLINEIAKEFELVYNSLTDTELAVVTSVVKLESQHLAQIAKQVQKLTGTKNVRIKTLLDPSLVAGFTVRYSGSKLIDMSVRKQLEDIAAQLELGDISLAV

SEQ ID NO: 157000 - protein, 541 aa, Glycine max
  Clone ID: PAT_MRT3847_112793C.1.pep
MPCFTPHPSLLFLLLTLLSISFFSPSTAARTSSFHSLRISDGVEDGGEGEYYHEVLPWKTRRSMAEEEATSNTSLILAQRRTTRKDPLDNYNHYTGGWNISNRHYIASVVFTAVPFFVVAAVWFVVFGLSLSFICLCYCCCPREPYGYSRLAYALSLIFLVLFTLAAIVGCVLLYTAQGKFHGSTTNTLKSLVSQADFTAENLRNVSDYLDAAQKIGVEAVFLPADVQKNIDEVQMKINSSAADLSSKTKENSETIKDVIDAMRRDLVIVAAVMLFLAFLGFLFSIFGLQGLVYFLVIVGWILVAGTFILCGVFLFLHNVVADTCVAMDGWVQNPTAHTALDEILPCVDNATAHETLLRTRDVTHQLVNLVDNIVSNVTNRNLPPAAGPLYYNQSGPLMPPLCNPFNSDLTNRSCADGEVSLDNAAEVWKNYTCEVSSSGICKTPGRMTPTIYGQMEAAVNVSYGLYHYGPFLVDLQDCTFVRKTFTDISNDHCPGLQRNSQLIYIGLVLVSAAVMLSLIFWVIYARERRHRVYTKQFIEG

SEQ ID NO: 157001 - protein, 63 aa, Glycine max
  Clone ID: PAT_MRT3847_112794C.1.pep
RSRLIFKRFPLTPFYFYPSKSGTNCWYHEYCLHHFLPSTTITIIVTSLITAQNTTLLSSSSSR

SEQ ID NO: 157002 - protein, 172 aa, Glycine max
  unsure (1)..(172): unsure at all Xaa locations
  Clone ID: PAT_MRT3847_112795C.1.pep
MDMKLNIPAINVLFLLLAISSTTQSVDINIKKFGGGADITQALTKAWEEACAATSASKIVIPGGSYKMEAVDLKGPCMAPIEIQFDGTLQAPADPNALDGADEWLKVQHVNFFTLSGKGVFDGQGATAWKQNDCGTNKNCKKRSKNFGFNFLDNSMVRDITSKDSXNFHVNV

SEQ ID NO: 157003 - protein, 76 aa, Glycine max
  Clone ID: PAT_MRT3847_112796C.1.pep
KTNKHRATFKNQSGNPPGPSTESTIAHSLSSISSRAAIGELLSTMDFSLSLPIYSQSSAFSAGSSQSQPSIATPAF

SEQ ID NO: 157004 - protein, 93 aa, Glycine max
  unsure (1)..(93): unsure at all Xaa locations
  Clone ID: PAT_MRT3847_112797C.1.pep
GFRMSLSYEHXSLIXDSVFHPANEECIKKAVHIAIKYCNIYSSESLEHDLXGHMLPYHIEVSNHGEFFEVSQFALFRYAKADVIGHQVDSHPP

SEQ ID NO: 157005 - protein, 62 aa, Glycine max
  Clone ID: PAT_MRT3847_112798C.1.pep
DWPGLPTPTHSSGLCLFSPYSCFISCHLPLLEIAACINPRLPITPKLLLYHVINTIDDYYYL

SEQ ID NO: 157006 - protein, 60 aa, Glycine max
  Clone ID: PAT_MRT3847_112799C.1.pep
PSVANPPRVLPVIKNKVSTISSSPLSEEANALVYHGRCAEVSGRRPIPSVTKEVLRGSTS

SEQ ID NO: 157007 - protein, 57 aa, Glycine max
  Clone ID: PAT_MRT3847_11279C.1.pep
YKNSTKEIAERDYYSVSSYTVPTGFRAQVISKLTRQSPQMRHTQNAETNPKIKNSES

SEQ ID NO: 157008 - protein, 80 aa, Glycine max
  Clone ID: PAT_MRT3847_1127C.1.pep
SPSVRSVSIYSQNHQVQSTSVPDSTSVPYPPATLTSRIKGTHLIKIRLKLPNAMARSSHHAHSIISRHNTPVMNSDYTCE

SEQ ID NO: 157009 - protein, 36 aa, Glycine max
  Clone ID: PAT_MRT3847_112800C.1.pep
QKKKFIKISQQNTNINIKNLTKLFKNNTFKNKTKFS

SEQ ID NO: 157010 - protein, 68 aa, Glycine max
  unsure (1)..(68): unsure at all Xaa locations
  Clone ID: PAT_MRT3847_112801C.1.pep
TXFIPTPXIFNNRRLYQKTIPTPHKPXXKTNIKYFNLNLTNQIYLTSYLLFIYNLRTSSLHTLQIYHT

SEQ ID NO: 157011 - protein, 167 aa, Glycine max
  Clone ID: PAT_MRT3847_112802C.1.pep
MANLVPGVLLKLMQHMNTDVKVAGEHRSSLLQVVSIVPALAGGELFPNQGFYLKVSDSLHATYVSLPDEHDDLILSDKIQLGQFVFVDRLEAASPVPILHGVRPVPGRHPWVGTPEDIVATTHSLGFLSNGKASKKSPCSGPLDLERSKSPRKVLSNHHVGEKEKKE

SEQ ID NO: 157012 - protein, 54 aa, Glycine max
  Clone ID: PAT_MRT3847_112803C.1.pep
NNSTYVTISLHTYLAFSMINQTKYFPSTTHKILLSLLNLLDPSTNPFFFMSPTH

SEQ ID NO: 157013 - protein, 53 aa, Glycine max
  Clone ID: PAT_MRT3847_112804C.1.pep
LSQGIYDCPRLKNVEMKLCTKKFLHRGRSEAYNLQLKTTIFGRNAIILIQWRF

SEQ ID NO: 157014 - protein, 84 aa, Glycine max
  Clone ID: PAT_MRT3847_112805C.1.pep
EKDITPDDGFPQYGVVKGDSLMIKGCCVGPKKRVVTLRQSLLKQTWRLALEEIKLKFIDTSSKFGHGRFQTTDEKQRFFGKLKA

SEQ ID NO: 157015 - protein, 40 aa, Glycine max
  Clone ID: PAT_MRT3847_112806C.1.pep
GGHVYKYCSHLSHILHIYCCICHQTAKLMIWQEKKCLKRS

SEQ ID NO: 157016 - protein, 87 aa, Glycine max
  Clone ID: PAT_MRT3847_112807C.1.pep
TITFWLRIMIISLILDNILFLSICVFYTTNYEIIYLEYIIYDPQQSNQSTTHCLNFGIRHSMPLFGIVNYCANIYNKRIDEWEGGKL

SEQ ID NO: 157017 - protein, 81 aa, Glycine max
  Clone ID: PAT_MRT3847_112808C.1.pep
GPPPASVCGHPWGGNPRDQKKPPGPKEGGVPPQRTMGGPLFHKGGGPRFPPPPPQGVFLGGTQKGPTVVVKLSPDYSPPSF

SEQ ID NO: 157018 - protein, 108 aa, Glycine max
  unsure (1)..(108): unsure at all Xaa locations
  Clone ID: PAT_MRT3847_112809C.1.pep
GSDYDSEHKGLPCKGDLHLKLLPGDHGTAFTGYHQASVQTTHDHIXLRAHVRLXGDTYXLHPKQVLRWTGNPEQPLHLWFXPTMDIDTYSVQWTTAIILFSADGTPIW

SEQ ID NO: 157019 - protein, 810 aa, Glycine max
  unsure (1)..(810): unsure at all Xaa locations
  Clone ID: PAT_MRT3847_11280C.1.pep
MYKLSSIQCVAPFTISLCTLSFSSSSLRFSVRATSSRAMASHIVGYPRMGPKRELKFALESFWDGKSSADDLQKVAADLRSAIWKQMADAGIKYIPSNTFSYYDQVLDTTAMLGAVPSRYNWNGGEIGFDVYFSMARGNSSVPAMEMTKWFDTNYHYIVPELGPDVKFSYASHKVVDEYKEAKVLGINTVPVLVGPVSYLLLSKPASFPNXQFSLLSLIDKILPVYQQVLVELSAAELPWIQFDEPTLVKDLNAHLLHAFTHAYAELESSLSGLNVLIETYFADVPAEAYKTLTSLKAVTAYGFDIVRGTKTLDLIKQGFPSGKFLFAGVVDGRNIWANNFASSLNTLQALGDIVGNDKVVVSTSCSLLHTAVDLVNETKLDQEIKSWLAFAAQKVVEVNALAKALSGQKDEVFFSANAAALASRKSSPRVINEAVQKAAAALKGSDHRRATNVSARLDAQQKKLNLSVLPTTTIGSFPQTADLRRVRREFKANKISEEDYIRFIKEEIYNVVKLQEELDIDVLVHGEPERNDMVEYFGEQLSGFAFTANGWVQSHLLPMGGCNXYGSRCVKPPIIYGDVSRPKPMTVFWSSTAQSLTKRPMKGMLTGPVTILNWSFVRDDQPRFETCYQIALAIKDEVEDLEKAGITVIQIDEAALREGXLPLRKSEEAFYLNWAVHSFRITNCGVEDTTQIHTHMCYSNFNDIIHSIIDMDADVITIENSRSDEKLLSVFREGVKYGAGIGPGVYDIHSPRIPPTEEIADRINKMLAVLESSILWVNPDCGLKTRKYTEVKPALTNMVAAAKLIRNQL

SEQ ID NO: 157020 - protein, 171 aa, Glycine max
  unsure (1)..(171): unsure at all Xaa locations
  Clone ID: PAT_MRT3847_112810C.1.pep
QKPSSIFHEGACVKNHNSVMFKKGAFXLGCTICPGAIKSNKIFVDAFWNSRKQSFSTHFLQLNTSWAVICNVWYLEPQNFKPGETPIEFAERVRDIISHRAGLKKVPWDGYFKYSRPSPKPRKGKPQIFPESVFRPFQKKKSQSFYFFRNNFFQPLFVLHLLLLYTCRSYM

SEQ ID NO: 157021 - protein, 199 aa, Glycine max
  unsure (1)..(199): unsure at all Xaa locations
  Clone ID: PAT_MRT3847_112811C.1.pep
MATTTVSNLPIAMSRPKIPSSQRIANVCPAILGGRSKVGSCYKLASVCHVASAQPFHQGLAMTSGAAKYGKILTKAMSESSSNKEVAGLPIDLKGKRAFIAGVADDNGYGWAIAKSLAAAGAEILVGTWVPALNIFESSLRRGKFDESRKLQDGSLMEIAKVYPLDAVYDNPEDVPEDVKANKRYAGATXWTVQKLLNL

SEQ ID NO: 157022 - protein, 77 aa, Glycine max
  Clone ID: PAT_MRT3847_112812C.1.pep
FVLYKWKTVRRVHLILHKTKEVSIFYICIRKYRSSEFLYLGKTFFFSITIFTSIYIFTPTQNLPILLHKKQKLIHKI

SEQ ID NO: 157023 - protein, 45 aa, Glycine max
  unsure (1)..(45): unsure at all Xaa locations
  Clone ID: PAT_MRT3847_112813C.1.pep
LCLQPXNLESTPXXLYYVKLHVXHXFTSSSYRLSLKSYVDIPVML

SEQ ID NO: 157024 - protein, 69 aa, Glycine max
  Clone ID: PAT_MRT3847_112814C.1.pep
PKEWLFGRSPLKAHPPLYLVKREGGPSDANSDTHCQSPAPAPRDHLLELTQESFPSEALGEGEVSPSVL

SEQ ID NO: 157025 - protein, 64 aa, Glycine max
  Clone ID: PAT_MRT3847_112815C.1.pep
RHRCCPQSIYIFLIYNSNFVFILYKNIKIRGIESLFLMCCISNGMERVSSRVRACFDELIQKPL

SEQ ID NO: 157026 - protein, 551 aa, Glycine max
  unsure (1)..(551): unsure at all Xaa locations
  Clone ID: PAT_MRT3847_112816C.1.pep
MSDPAEEAAFIEKLYEYGEQLNNAKDKSQNVQDYQGIIDAAKTSVKAKQLAAQLIPRLYKFFPDLSSPALDAHLDLVEAEELGVRVQAIRGLPLFCKDTPENIGKMVDILVQILGSEEFVERDAVHKALMSLLRQDVKASLTGFVKHIGSVEEPSTDDVIREKVINXFVRDKGFPXSKAELLKPQEEMERHITDLIKKSLEDVTGIEFRMFMDFLKSLSLFGEKAPAERMKELIGIIEGQADLDAQFNVSDADHIDRLISCLHMALPFVVRGASSNKFLNYINKYIIPVFDQLPGERKVDLLRSLAEFSPYTTPQDSRQMLPSIVQLLKKYMTWKKTGEEMNFTYVECLLYTFHHLAHKVPNATNSLCGYKIVTGQPSDRLGEDFSEHYNDFTERLNNVEEFTRATIKKLTQGMDENNKSMAGAKTDEEKEKIKTKKQNATTGLRTCNNILTMTKPLHAKVPSFIGDKRINLSWKEATKAASTAPAAGAKRPANAANGSNNIVSKKGRGAGGLQNQLVNRALEGLSGGGRGGMRGRGRGWGGRGRGRGGYR

SEQ ID NO: 157027 - protein, 52 aa, Glycine max
  Clone ID: PAT_MRT3847_112817C.1.pep
MDFWPEFLASGSGREFVAGGFGGIAGIISGYPLDTLRIRLQNSKNGSAFTIL

SEQ ID NO: 157028 - protein, 80 aa, Glycine max
  Clone ID: PAT_MRT3847_112818C.1.pep
SQAVARQELRHVVKSHNQSWPGAPVQVGEPDISGCRRHDLEPGTNSNHCQELNPGLRQVKVHIHHIQFLCLAIGIDILSL

SEQ ID NO: 157029 - protein, 125 aa, Glycine max
  unsure (1)..(125): unsure at all Xaa locations
  Clone ID: PAT_MRT3847_112819C.1.pep
GTVARDFTYYDDIVKGCLGALDTAKKSTGSGGKKKGPAQFRVFNLGNTSXPVPVSELVAILEKLLKVKAKKKVLPMPTNGDVKFTHANISLAHRDLGYRPTTDLETGLRKFVKWYLEFYSKKSSW

SEQ ID NO: 157030 - protein, 180 aa, Glycine max
  unsure (1)..(180): unsure at all Xaa locations
  Clone ID: PAT_MRT3847_11281C.1.pep
LHSVQPQPQQPMQMLPYQQPHPQMQHSQPQIQQPVQKYPVPQSQVHAQLQPNAPIQHHSQLPVPPHQPVTPNVQTPVQNAMSHSVTGHHSYPQPLPHPNMQPRVPQHTMHMHPQSGHQPQAQHPVQMQNQFPPQIPTARXNQSHAMFPNQQQPALLPSSVQGQTTPPFAQQSLYTHNQQP

SEQ ID NO: 157031 - protein, 396 aa, Glycine max
  Clone ID: PAT_MRT3847_112820C.1.pep
LSKLTLWSSFFLAFILFLFILSPPSPSASPRRSLGDSWGGPHWEKRVAKSARRSSPSSLSVLVTGAAGFVGSHVSLSLKRRGDGVLGIDNFNRYYDPALKRARQRLLDRAGVFVVDADLNDAALLRKLFDVVPFTHDMHLAAQAGVRYAMQNPQSYIHSNIAAFINLLEASKSANPQPSIVWASSSSVYGLNSKVPFSEKDRTDQPASLYAATKKAGEEIAHSYNHIYGLSITGLRFFTVYGPWGRPDMAYFFFTKDILKGKQIAIFESPDGGTVARDFTYIDDIVKGCLGALDTAKKSTGSGGKKKGPAQFRVFNLGNTSPVPVTELVAILEKLLKVKAKKKVLPMPTNGDVKFTHANISLAHRDLGYRPTTDLETGLRKFVKWYLEFYSKKTSW

SEQ ID NO: 157032 - protein, 144 aa, Glycine max
  Clone ID: PAT_MRT3847_112821C.1.pep
ETSVAVPFTWEAQPGTPKHPLSETSLPPLTPPPSYFSNKKSHNAKSRNYSKASNIFSSILPRRVGSRNSHPVSPASSSWSLSSSSSSSSSWSLAHYNNNYSSPSFSMRDKGPAPSKHNKCSNGFRGCYPFGNTRNANVNHGTVD

SEQ ID NO: 157033 - protein, 53 aa, Glycine max
  unsure (1)..(53): unsure at all Xaa locations
  Clone ID: PAT_MRT3847_112822C.1.pep
LRKSSLWIRLSGIKNGFXTTPSVIMVGNPRECSNERERTGEESLCGFKEFFHA

SEQ ID NO: 157034 - protein, 81 aa, Glycine max
  Clone ID: PAT_MRT3847_112823C.1.pep
VRRGMDGWCLQKLLIFHREGLSGDNLLLFITSYDQSRVNFLNELGGVWFDHIPDTLITEFASCKRVLEQSFQYKDPFFMLE

SEQ ID NO: 157035 - protein, 84 aa, Glycine max
  Clone ID: PAT_MRT3847_112824C.1.pep
RAVLYQIGECSTQSTKSGKMNDSQSLWPAHRVIFFPLRNRSPRRSKKLEDSCNQVTIASVTGFKVRQPVIAVNRNFPTRPRTRR

SEQ ID NO: 157036 - protein, 65 aa, Glycine max
  Clone ID: PAT_MRT3847_112825C.1.pep
SPLLIISRFSHILPTREQGSFPWGYWSLNEHAHKDPRTRLYCPATGPPHTKRVMLPLLLLLCSSP

SEQ ID NO: 157037 - protein, 49 aa, Glycine max
  Clone ID: PAT_MRT3847_112826C.1.pep
HCYYGRFDAQMSTTLWLCANADYRWQNCIDGRVHLLNLYISPMHINVGS

SEQ ID NO: 157038 - protein, 95 aa, Glycine max
  Clone ID: PAT_MRT3847_112827C.1.pep
LLTEWPTPGLWPGVVGRKASTNPFKLLAIVSNWLGFATAPFVVLIALTETDFGDLVVAFKPLPSMQRSSYDRNNSTKSKQVRVKCAMDKLIQKGG

SEQ ID NO: 157039 - protein, 84 aa, Glycine max
  unsure (1)..(84): unsure at all Xaa locations
  Clone ID: PAT_MRT3847_112828C.1.pep
RETRRFLLEVPRERRTTIXGRGGGGDEDWDWDRWRRHFEEIDEQERLLSTLKVLRHVPRVLFPICVFLRAFIVVCVQVIFLNRC

SEQ ID NO: 157040 - protein, 130 aa, Glycine max
  unsure (1)..(130): unsure at all Xaa locations
  Clone ID: PAT_MRT3847_112829C.1.pep
PWDFPHELPRKRGDXGKRGLAPGDGEKKTXLLPGTTDEEAYSKPXGELEKSVPTLVGIECPKDEKLARHRIFDKPKTRCFTILPTEDNTAELMKXVNAVRFXIIKNWDKRHVQAGINPHSMDWTDPDYRS

SEQ ID NO: 157041 - protein, 167 aa, Glycine max
  Clone ID: PAT_MRT3847_11282C.1.pep
LELLMQLVTEPLAWHGLVIQSCLRSCFPSGKKKKKSGSAYQSSANLAHAITDSVMHLFHVLEVVLKWITEWNKRPEDEHLENILLLLRRDGHNDGPGKVFHILETFISSVNDVELGDRISQSLKSWSPADVARKMMTGKLKVLTEFSAICGSKLKLFKSMKQQIAQL

SEQ ID NO: 157042 - protein, 457 aa, Glycine max
  unsure (1)..(457): unsure at all Xaa locations
  Clone ID: PAT_MRT3847_112830C.1.pep
ISSLHPCVGEAWKKYGSIFMHPQGLNISLKEKGKIREVLRNWPEKNIQVIVVTDGERILGLGDLGCQGMGIPVGKLSLYTALGGVRPSACLPITIDVGTNNEKLLNDELYIGLKQRRATGQEYAELMHEFMTAVKQTYGEKVLIQLEDFADHNAFNLFEKYRSTHLVFNVDIQGTASVVLAGLVASLKLVGGNLADHRFLFLGAGEAGTGIAELIALETSKQTNAPLEEVRKNIWLVDSKGLIVSSRKDSLQHFKKPWAHEHEPVKNLLDAVNKIKPTVLIGTSGQGRTFTKEVIEAMASINKRPIILSLSNPTSQSECTAEEAYKWSQGRAIFASGESXFPPVEYEGKVFVPGQANNANIFPGFGLGLIMSGPIRVHDDLLLAASEALAAQVSQENFDKGFIYPPFTNIRKISAPIAANVAAKAYELGLATRLPQPKDLVKFAESCMYTPAYRSYR

SEQ ID NO: 157043 - protein, 104 aa, Glycine max
  Clone ID: PAT_MRT3847_112831C.1.pep
QASIIGGVIVFIKELHQVLQALESQKRRKSLSPSPGPSPRTLQPMFHQLDSPSMIGTNSFKELGASCISPVADVEVKISGSYVILKVICHRIPGQVAKIITVLE

SEQ ID NO: 157044 - protein, 215 aa, Glycine max
  Clone ID: PAT_MRT3847_112832C.1.pep
LIVSSRKDSLQHFKKPWAHEHEPVRNLVDAVNKIKPTVLIGTSGQGRTFTKEVIEAMASINERPIILSLSNPTSQSECTAEEAYKWSQGRAIFASGSPFPPVEYEGKVFVPGQANNAYIFPGFGLGLIMWRTIRVHDDLLLAASEALAAQVSQENFDKGLIYPPFTNIRKISAHIAANVAAKAYELGLATRLPQPKDLVKFAESCMYTPAYRSYR

SEQ ID NO: 157045 - protein, 111 aa, Glycine max
  Clone ID: PAT_MRT3847_112833C.1.pep
QLRGVIKRVPIPVVSCVQCSPIQYYDFKWTESDALERQPFALQSLQIPTTHRSNYSPMLPNQHQQYHLFYILHSCESAFPIPEPQDYTIMSTAALSRFPDTRSLLCLDPDG

SEQ ID NO: 157046 - protein, 81 aa, Glycine max
  Clone ID: PAT_MRT3847_112834C.1.pep
STETNLNKTAFVFIFVQYFNNLNMKLKKLHQNQSYSVSYSSSLPTSYSASLPVAYSVSLSISECSFELNVNFISWLTNSAR

SEQ ID NO: 157047 - protein, 75 aa, Glycine max
  Clone ID: PAT_MRT3847_112835C.1.pep
ENHSTIPHVPLDNLHLGQITILTTVTGPVNGLRRPESYLFFSFCKHTRAGFWGEFYDLVVPVVGSLSCFGRTDKV

SEQ ID NO: 157048 - protein, 221 aa, Glycine max
  unsure (1)..(221): unsure at all Xaa locations
  Clone ID: PAT_MRT3847_112836C.1.pep
MTVITMPPFLSYSLLSLAFFFTLKYLFQRSRKVRNLPPGPTPLPIIGNLNLVEQPIHRFFHRMSQKYGNIISLWFGSRLVVVVSSPTAYQECFTKHDVTLANRVRSLSGKYIFYDNTTVGSCSHGEHWRNLRRITSLDVLSTQRVHSFSGIRSDETKRLIHRLARDSGKDFARVEMTSKFADLTYNNIMRMISVKRFYREESELNNVXEAKEFTDTVNEML

SEQ ID NO: 157049 - protein, 33 aa, Glycine max
  Clone ID: PAT_MRT3847_112837C.1.pep
LERDDDPTERDVSKSATREEESYSRAEADQGWG

SEQ ID NO: 157050 - protein, 68 aa, Glycine max
  unsure (1)..(68): unsure at all Xaa locations
  Clone ID: PAT_MRT3847_112838C.1.pep
VSSTYVPYYPPPXSLKHPPVPKPPSPMQACCPKDTINFAVCADVLCMINVQLGKPPHTPCSNLIDGLS

SEQ ID NO: 157051 - protein, 104 aa, Glycine max
  Clone ID: PAT_MRT3847_112839C.1.pep
KKKKKKKKKKKKKKKKKKKGKKKKKKKKKKKKKKNKKKKKKKKKKNNNKKTKKKKKNEKMNKNKKHKKKTRTKKNDTDKKKANLHVGGQVQRCKLLSGFNNRCS

SEQ ID NO: 157052 - protein, 116 aa, Glycine max
  Clone ID: PAT_MRT3847_11283C.1.pep
MEDDTTMPQDDQRNSDGTRGIGGLNRSSKKSKQTKVPQRGLGVAQLEKIRLEEQQKRDVGAILPSPSTLSSTKPPYLPLPVKNFHDSNLSPSTPLLPCEPSSERSPLSLQQQQQQQ

SEQ ID NO: 157053 - protein, 44 aa, Glycine max
  Clone ID: PAT_MRT3847_112840C.1.pep
LIPRTSIIPHSYLSNAFFTQFKRTVSKLLDEFSPLAFKNYHTLF

SEQ ID NO: 157054 - protein, 71 aa, Glycine max
  unsure (1)..(71): unsure at all Xaa locations
  Clone ID: PAT_MRT3847_112841C.1.pep
MGLGQKTHCRGLYCLLHTTLAXGYIPSDKTGGGGGDAFFTLWGVTGARSNLPRAVYVDPEPTPIVGDWSGT

SEQ ID NO: 157055 - protein, 315 aa, Glycine max
  unsure (1)..(315): unsure at all Xaa locations
  Clone ID: PAT_MRT3847_112842C.1.pep
MEWNPQTLQFLSECFLHTLSPSPEPRRRAESSLAEAADRPNYALAVLRLVAEPSIDDQIRQAAAVNFKNHLRLRWASDDSPVPDPEKDQIKTLIVPLMLSATPKIQSQLSEALALIGHHDFPKSWPSLLPELIANLQKASQSSDYASINGILGTANSIFKKFRFQYKTNDLLLDLKYCLDNFASPLLEIFLKTASLIDAGAMNLRPLFESQRLCCRIFYSLNFQELPEFFEDHMKEWMGEFRKYLTTSYPALESSGADGVALVDELRAAVCENINLYMEKNEEEFQGVLNDFAXLVWTLLGKCVTSRPARTGLRL

SEQ ID NO: 157056 - protein, 54 aa, Glycine max
  Clone ID: PAT_MRT3847_112843C.1.pep
GFKKCSPRPKTRGAHFKNAIDFPRRFEYKILRPGFSNWGGYFSTLASNYLDVKT

SEQ ID NO: 157057 - protein, 40 aa, Glycine max
  Clone ID: PAT_MRT3847_112844C.1.pep
HRNRMAVARSTCELSRLQSHQCLMVSACHSAPFWRLLATV

SEQ ID NO: 157058 - protein, 116 aa, Glycine max
  unsure (1)..(116): unsure at all Xaa locations
  Clone ID: PAT_MRT3847_112845C.1.pep
MRGRHSMKFTDSPAIXLAVNDAVLSLQPDNGDMRVGXSGWACSSVLVKFGERWGPPSDNNPYARVLYFQGXRSRELGTGCREAGMGLXLLGLTDLFLTDIAPVMPALKRNLKVNSP

SEQ ID NO: 157059 - protein, 61 aa, Glycine max
  Clone ID: PAT_MRT3847_112846C.1.pep
RPTTSGNRMNLILWCRSSVFRELKRYQRDFYSWCGECKQKKAERVCLSVMATKQELLKSEI

SEQ ID NO: 157060 - protein, 309 aa, Glycine max
  Clone ID: PAT_MRT3847_112847C.1.pep
VLVILCWIEQIQKHKEYRHRIMLNYPPLCKQIYSMDAEKFFTPSFLRAVEENTEASFRSIMAEPCKGVYTFEMLQPQFCEKLMSEVDHFERWVHGTKLKIMRPNAMNKNKHGVILDDFAFEAMLDRFMCDFIRPISQVFYPELGGSSLDSHHGFVVEYGINKDVELGLHEDEAEVTLNVCLGKEFSGGELFFQGVRCDAHVTSNAQPEEAFNYSHVPGHAILHPGRNRHGARPTTSGNRMNLILWCRRHSSGQLLSASAFMLSHSSVFRELKRYQRDFYSWCGECKQKKAERVCLSVMATKQELLKSEI

SEQ ID NO: 157061 - protein, 137 aa, Glycine max
  unsure (1)..(137): unsure at all Xaa locations
  Clone ID: PAT_MRT3847_112848C.1.pep
LEKVQPVDLRRAYKCEIMLSKIKNPLPDMLKADLALDSAVLDIDQGENLIKFCPTKEEMEMLKNYTGNKEMLVKCEQFFMELMKVPRVESKLRVFAYKINCSSQVNDLKLNLNTINNAGREVKESGELRXIMQTILT

SEQ ID NO: 157062 - protein, 119 aa, Glycine max
  unsure (1)..(119): unsure at all Xaa locations
  Clone ID: PAT_MRT3847_112849C.1.pep
RVPFLLVPNQLVASGNPKSFMGEQVVPTYRERSILNPKEKGSSTGYYKSASFHLGGRGWYKDLAKFIKTNAFSSKGKNTLRVDKSXPYTAXDIGVFDNVQPSFCPLGSKAPKDVKIQGI

SEQ ID NO: 157063 - protein, 204 aa, Glycine max
  unsure (1)..(204): unsure at all Xaa locations
  Clone ID: PAT_MRT3847_11284C.1.pep
GISQPLIHLLSRVAHAINHLAYENTIIQTLLRFFSFFTYLKIXPLVELLEFKDTKVQVPAAMALGTLAFQNDDNKNQIVECKALPTLVLMLRSEDITIHYVAVDVIRKLVNSSPNIKKEVLLARDLQPVLCLLSSRCSEIQTMAAFLLCQFATDSDCKVHVSQRGAIPLLVDLLKSPNALLQEVSTFALLRLANDSHNQASIAH

SEQ ID NO: 157064 - protein, 86 aa, Glycine max
  unsure (1)..(86): unsure at all Xaa locations
  Clone ID: PAT_MRT3847_112850C.1.pep
ARVVPAQEKXIKFLQDSRYVPVKLAPSGFVLLRDLHPTEPEVLALTDTPSSTSSAAGGSATGLQSSSSAMAVDEEPQPPQPFEYTS

SEQ ID NO: 157065 - protein, 376 aa, Glycine max
  Clone ID: PAT_MRT3847_112851C.1.pep
MSQNQNGKWVRIAPEQVRGSSNGHVEVGGSNRLCINPQKDHKSESYEDLQLEFNPLVFSSLEQYLPPHMLNLSREVKVQYMRNILLRYLPESERIRIQKHKEYRHRIMLNYPPLCKQIYSMDAEKFFTPSFLFGFEENSEASFRSIMAEPRKGLYTFEMLQPQFCEMLMSEVDNFERWVHDTKFRIMRPNIMNQYGAVLDDFGMESMLERLMNDFISPISRVFYTEIGGTSLDSHHGFVVEYGINRDVELGFHVDDAEVTLNICLGNEFSGGELFFQGVRCDAHVTTNTQQEEAFNYSHVPGHAILHPGRNRHGTRPTTSGNRMNLILWCRSSAFIELKRYQRDFYSWCAECRRKKAERVRLSVVAAKQELLKSEI

SEQ ID NO: 157066 - protein, 81 aa, Glycine max
  unsure (1)..(81): unsure at all Xaa locations
  Clone ID: PAT_MRT3847_112852C.1.pep
CSLXXXXQRLWVHLRTLKFLHYLLKTPQIKTHNTQGVIIYFIHNLILMALKRDGVGIRRCGYDRGSPRVYWVPRKRTCFRE

SEQ ID NO: 157067 - protein, 67 aa, Glycine max
  Clone ID: PAT_MRT3847_112853C.1.pep
KSFVPLKFCFEKIIPLFNKWFPPQFSSFFLSPAHFFPFCHSFFLGIGGLFPFPYFLPFDIYFFFFPC

SEQ ID NO: 157068 - protein, 157 aa, Glycine max
  Clone ID: PAT_MRT3847_112854C.1.pep
MVKDRNVGVALDFSKSSKIALKWAIENLADKGQTLYIIHVNPNSSDDRNQLWVKSGSPLVPLTEFRDAEVTKHYGVQTDAEVLDLLDTAARQKEVNVVVKLYWGDVREKLLDSIEDLKLNSLVLGSRGLGTIQRMILGSVSNFVMTHAPCPVTIVKE

SEQ ID NO: 157069 - protein, 179 aa, Glycine max
  unsure (1)..(179): unsure at all Xaa locations
  Clone ID: PAT_MRT3847_112855C.1.pep
MSSQNQNRSLEQAGPSGSGGQVGVRVVNWSGSDRLCISPKRDHKPENYDDLQFEFNPNIFASLEHYLPPHMLNLSRDVKLHYIRNILLRYLPENDRIWIQKLREYRLKIILNYPPLHKEIFTMDAESFFVPSFLRAIKENTEASFRSIMAEPCXGVYTFEMLQPQFCKKLMSEVGSFER

SEQ ID NO: 157070 - protein, 189 aa, Glycine max
  unsure (1)..(189): unsure at all Xaa locations
  Clone ID: PAT_MRT3847_112856C.1.pep
MATTLVSSAGGMLAMLNEPHLSLKLHALSNLNNLVDTFWPEISTSLPKIESLHEDEEFDQHQRQLAALLVSKVFYYLGELNDSLSYALGAGPLFDVSEDSDYVHTLLAKAIDEYASLKSKAAESSDESIKMDPRLEAIVERLLDKCIVDGKYQQAMGTAIECRRLDKLEEAIPRGXHVQGTLSYCIYVS

SEQ ID NO: 157071 - protein, 82 aa, Glycine max
  Clone ID: PAT_MRT3847_112857C.1.pep
SVEFCSSISILPDEIDACIFSEGHLLDDKVISNGNLTDTSPLVEWTNCNGADIVSCPPTKLGDCGDSHLDLEYVFPIHRSQQ

SEQ ID NO: 157072 - protein, 372 aa, Glycine max
  Clone ID: PAT_MRT3847_112858C.1.pep
SSQNENRSLEEAGPSGSSDGGVGVNWLCMSPKRDHNPENYDDLQFEFNPNLFASLEHYLPPHMLNLSRDVKLHYIRNILLRYLPENDRNWIQKLREYRLKIILNYPSLHKEIFTMDAENFFVPSFLRAIKENTEANFRSIMAEPCKGVYTFEMLQPQFCKKLMSEVDHFERWVHGTKLKIMRPNAMNKNKHGVILDDFAFEAMLDRFMCDFIRPISQVFYPELGGSSLDSHHGFVVEYGINKDVELGLHEDEAEVTLNVCLGKEFSGGELFFQGVRCDAHVTSNAQPEEAFNYSHVPGHAILHPGRNRHGARPTTSGNRMNLILWCRSSAFRELKRYQRDFYSWCGECKQKKAERVCLSVMATKQELLKSEI

SEQ ID NO: 157073 - protein, 64 aa, Glycine max
  Clone ID: PAT_MRT3847_112859C.1.pep
YTTHTNLFTLQLITKTLHYISKTNNDSKYLLPSHNSSIISNYTFHPPYHSINHLKLYLSHHPTI

SEQ ID NO: 157074 - protein, 50 aa, Glycine max
  Clone ID: PAT_MRT3847_11285C.1.pep
YIVRYRIPHAMLPPPLNKAIDTAIKLIEQRNQPLYSFTRIHELYSQVITI

SEQ ID NO: 157075 - protein, 1014 aa, Glycine max
  Clone ID: PAT_MRT3847_112860C.1.pep
MATSLVSSAGGMLAMLNEPHLSLKLHALSNLNNLVDTFWPEISTSLPKIESLHEDEEFDQHQRQLAALLVSKVFYYLGELNDSLSYALGAGPLFDVSEDSDYVHTLLAKAIDEYASLKSKAAESSDESIKVDPRLEAIVERLLDKCIVDGKYQQAMGTATECRRLDKLEEAITRSDNVQGTLSYCIYISHSFVNLREYRQEVLRLLVKVFQKLPSPDYLSICQCLMFLDESEGVASILEKLLHSENKDDALLAFQIAFDLVENEHQAFLLNVRDRLAPPKSQPLETAQPKPSETASTQNASANGQDDVQMTDDDSVPMVNVPEDPIETMYAERLNKIKGILSGETSIQLTLQFLYSHNKSDLLILKTKSGDAGPSVKQSVEMRNSVCHSATIYANAIMHAGTTVDTFLRENLDWLSRATNWAKFSATAGLGVIHRGHLQQGRSLMAPYLPQGGTGAGGSPYSEGGALYALGLIHANHGEGIKQFLRDSLRSTTVEVIQHGACLGLGLASLGTADEDIYEEIKNVLYTDSAVAGEAAGISMGLLMVGTGSEKANEMLTYAHETQHEKIIRGLALGIALTVYGREEEADTLIEQMTRDQDPILRYGGMYALALAYRGTANNKAIRQLLHFAVSDVSDDVRRTAVLALGFVLYSDPEQTPRIVSLLSESYNPHVRYGAALAVGISCAGTGLSEAISLLEPLTSDVVDFVRQGALIAMAMVMVQISEASDSRVGTFRRQLEKIILDKHEDTMSKMGAILASGILDAGGRNVTIRLLSKTKHDKITAVVGLAVFSQFWYWYPLIYFISLSFSPTAFIGLNYDLKSPKFEFLSHAKPSLFEYPKPTTVPTTTSTVKLPTAVLSTSAKAKARAKKAEEQKANAEISSAPDSASAVPSGGKGKSSGEKDGDSMQVDSPTTEKKSEPEPSFEILTNPARVVPAQEKFIKFLQDSRYVPVKLAPSGFVLLKDLRPTEPEVLALTDTPSSTTSAAGGSATGLQSSSSAMAVDEEPQPPQPFEYTS

SEQ ID NO: 157076 - protein, 133 aa, Glycine max
  Clone ID: PAT_MRT3847_112861C.1.pep
MCSNPNAKVLSSICGFSRMGPNRELKTRVETFWKEQAKLHMDGATEGELTVSIDQFERDIEQLQIQRWQQLQATGIDLIPSGDFSLYDHVLDCACLFNAIPTRYKSAAQLSGVPSHLRLYFAMARGLQEKGAD

SEQ ID NO: 157077 - protein, 75 aa, Glycine max
  Clone ID: PAT_MRT3847_112862C.1.pep
HSLSSSTHHPSHSKTDSCLCFCLYLHLHCYLLFLSIQKFLNLEPPKPPSPQKMIPVTTHTHSTPPYQNKSHVHPI

SEQ ID NO: 157078 - protein, 145 aa, Glycine max
  Clone ID: PAT_MRT3847_112863C.1.pep
GDFILVLLTLLQMYSLSLLSFFLVLFVLPLGVLFPFPSGISALFSQGPRRSAGLARLYALWNLMSLVNVVVAFFCGFIHYTARSHKLYNFQSWNFSMDESEWWILPSGLALCKIIQARLVDCHVANQEIQDPSLYSSDTNVFWNS

SEQ ID NO: 157079 - protein, 428 aa, Glycine max
  unsure (1)..(428): unsure at all Xaa locations
  Clone ID: PAT_MRT3847_112864C.1.pep
DAFNRFVDDINSLATYHWWEGSIYSILCIIAYPLIWSWLRMCRNKKLXSLREFVRSEYDHACLRSCRSRALYEGLKVGATSDLMLGYLDFFLGGDEKRPDLPPRLYQRFPMSIIFGGDGSYMSPFSLHSDNIALSIIMESVDPTGLLDYMVCRNAQLRLVRRGHLKITFGPVISWLDVYANPKLATYGVCVDLAWFQPTASGYCQFGLVVYATENESMSSSCEGYDDSRITEKQTCLLSCPRNPVHHIRSNEHLKMPALMGGSILHNVYTKPFGHQDLVGLVISIILLGDFFALLLTLPLLFSLSLXLFVLPLGVLFHLPSGSIALFSQGPRRSAGLARLYALWNLMSLVNXXVAFFCGFIHYTARSHKLSNFQSWNFSMDESEWWILPSGLALCKIIQARLVDCHVANQEIQDPSLYSSDTNVFWNS

SEQ ID NO: 157080 - protein, 125 aa, Glycine max
  Clone ID: PAT_MRT3847_112865C.1.pep
VQEDLSFIQHVETFFIDHLNPLPPKPALSEHSTSNPASSSEHIPAVMYTVVDPLAANPNLNDDMDEDIEEEEEEEEEDEEPESGSEDKAGYGIARQTPTPAMAAEPSELIQLEMPEDIRLGSPND

SEQ ID NO: 157081 - protein, 38 aa, Glycine max
  Clone ID: PAT_MRT3847_112866C.1.pep
GVTPASNEYWWLGQLNREGIHFHIMILPGKTRKRHSER

SEQ ID NO: 157082 - protein, 98 aa, Glycine max
  unsure (1)..(98): unsure at all Xaa locations
  Clone ID: PAT_MRT3847_112867C.1.pep
LGCGXFFASPCWFXLLVFFPCSPFFCPASLLRVSAPVLLFGASRCWAVFLLVFLLFSPSGAFPFGRWGLRSLAGSFPGLSAFLGLSXVSWAGSGSLKL

SEQ ID NO: 157083 - protein, 83 aa, Glycine max
  Clone ID: PAT_MRT3847_112868C.1.pep
EFYFFFFSFFFFLTKTKRVFLPGLRPPLKLGFFHQKKTRGSFYKLKKNMIFKTPPLLFPGIWSTLFFQYHHGGDQFAGGLHFF

SEQ ID NO: 157084 - protein, 66 aa, Glycine max
  unsure (1)..(66): unsure at all Xaa locations
  Clone ID: PAT_MRT3847_112869C.1.pep
MKGLVLFVSTILVAYECHGSYYQKFPFQMKTLFGGQYTNXVAFAIWRLGVETNNVVKLLTVLSFFR

SEQ ID NO: 157085 - protein, 91 aa, Glycine max
  Clone ID: PAT_MRT3847_11286C.1.pep
GWLSSISISATFSVPFRPKIIELVKLGYPGWFIDIDLLFKSSTKVLAQDFQAVKNTAAASVYMRHDVKVIYSLSLYFYSCCVPCDSRINIL

SEQ ID NO: 157086 - protein, 487 aa, Glycine max
  Clone ID: PAT_MRT3847_112870C.1.pep
MAAKLDTHAVASDLIDFLNASPTAFHAVDEAKRRLRSAGYHQLSEREVWELQPGNKYFFTRNHSTIVAFAIGKKYVAGNGFYIIGAHTDSPCLKLKPVTKVVKAGILEVGVQTYGGGLWHTWFDRDLTVAGRVIVREENAGSVSYSHRLVRIEEPIMRIPTLAIHLDKTVNDGFKFNNENHLIPILATSLKGELNKVSSENGPVESGNQTDGKKANDKTGTSNTKHHLLLLQLLASKLGCEPDDICDFELQACDTQPSTIAGAAKEFIFSGRLDNLCMSFCSLKALIDATSSDSSLEEESGVRMVALFDHEEVGSNSAQGAGSPVMLNAVTRVTNSFSSNPNLLEKAAQLSYLVSADMAHALHPNYMDKHEANHQPKLHGGLVIKTNASQRYATNVVTSFIFREIASKHKLPVQDFVVRNDMSCGSTIGPILASGVGIRTVDVGAPQLSMHSIREICAVDDVKYSYEHFKAFYQEFSHVDGKMVVDI

SEQ ID NO: 157087 - protein, 87 aa, Glycine max
  Clone ID: PAT_MRT3847_112871C.1.pep
APKPFLWASPPLNKPACFSLLYHPKLYAVAQNHVCKTVARHPRPLFAATARQSAPLVQSEAMCFVHVLTEQVLDRKLASVWSSNQYR

SEQ ID NO: 157088 - protein, 56 aa, Glycine max
  unsure (1)..(56): unsure at all Xaa locations
  Clone ID: PAT_MRT3847_112872C.1.pep
FFSTPIWVITMLFLLGHTDCWYSXYWLPFAPLIIGLLIGAQLPGVITKIGQRIQPP

SEQ ID NO: 157089 - protein, 37 aa, Glycine max
  Clone ID: PAT_MRT3847_112873C.1.pep
SLKIKFCNSNEFWEFQWQLPNVIYMIELVKRDTLGCM

SEQ ID NO: 157090 - protein, 45 aa, Glycine max
  Clone ID: PAT_MRT3847_112874C.1.pep
KKSIITGSVTPNRLFDTRVATQFIFNSSMMNLIYGDKIFMSFMYQ

SEQ ID NO: 157091 - protein, 61 aa, Glycine max
  Clone ID: PAT_MRT3847_112875C.1.pep
AFYKLCFSAPPTHIRFFSTLLFFYFFFKKKARSVVQTLNGICLSEYHLRERSESLYNRWVR

SEQ ID NO: 157092 - protein, 145 aa, Glycine max
  Clone ID: PAT_MRT3847_112876C.1.pep
MATRAAVAAPRVFRRFFCTNSASPSFPFVPTPPPGATPTPTRPTAEPNPNLFVSGLSKRTTTERLREEFAKFGEVVHARVVTDRVSGYSKGFGFVQYATIEEAAKGIEGMDGKFLDGWVIFAEYARPRPPPGQSLNNNSPQYGRQ

SEQ ID NO: 157093 - protein, 114 aa, Glycine max
  unsure (1)..(114): unsure at all Xaa locations
  Clone ID: PAT_MRT3847_112877C.1.pep
PCETGIACYTRGPHLPSDSSKHSPPSISTSLGLRSLKSSSXYGESLKVASKSTIKVTKTXNTSLGTRCETGDSLEELLTKATPDKGMNRLTVTQGRSIXTKSLKEKTDTCGGNT

SEQ ID NO: 157094 - protein, 60 aa, Glycine max
  Clone ID: PAT_MRT3847_112878C.1.pep
KINFIRNQFCHHLSKHTCSSFLYYHRRLCSMHLTISILLKMFKQVKIPKQMKHSTCLKSE

SEQ ID NO: 157095 - protein, 222 aa, Glycine max
  Clone ID: PAT_MRT3847_112879C.1.pep
MRKGRGGGASAAAAAAVNGSVLKEPRYRGVRKRPWGRFAAEIRDPLKKARVWLGTFDSAEDAARAYDTAARNLRGSKAKTNFPLSPFCYQHPTTDPFFYAGFHDHQNNSNNNNDNLNNPQRPTSSGMSSTVESFSGPRPPTTTTTTTTPFLTTTRRYPRTPPLVPEDCHSDCDSSSSVVDDSDDNIVSSSFRPPLPFDLNALPFDDDAAVVDDDLRCTALCL

SEQ ID NO: 157096 - protein, 90 aa, Glycine max
  unsure (1)..(90): unsure at all Xaa locations
  Clone ID: PAT_MRT3847_11287C.1.pep
PALETFNVSHNKLEGPVPENGVLRTINPNDLVGNAGLCGGVLPPCGQTSAYPLSHGSSRAKHILVGWIIGVSSILAIGVATLVARSLXMK

SEQ ID NO: 157097 - protein, 105 aa, Glycine max
  unsure (1)..(105): unsure at all Xaa locations
  Clone ID: PAT_MRT3847_112880C.1.pep
PPPSRGREALFWLKNRNLAGRPILAISPLLGGWAGFLGAAIKVFHFRCSIPEXGVSSLLEVXDGIGPGYFSTCPARDSCMCHGCTHHNHAEHCSQKCNLEASHGN

SEQ ID NO: 157098 - protein, 66 aa, Glycine max
  Clone ID: PAT_MRT3847_112881C.1.pep
IFKILQMTGFYREFLLKLKKKKFKLRIINSVPLYLVSKSINLLQTLPQIHLEFLLHHLPWTEAIHP

SEQ ID NO: 157099 - protein, 80 aa, Glycine max
  unsure (1)..(80): unsure at all Xaa locations
  Clone ID: PAT_MRT3847_112882C.1.pep
GCRTRIPNHKKKTALPKKVLRKTSSSCNKPLQDPDAKAPEYLYGSLIPDYPKDPYRLGKPLQYLQNEXTSLDQNHAKNKA

SEQ ID NO: 157100 - protein, 64 aa, Glycine max
  Clone ID: PAT_MRT3847_112883C.1.pep
QGKNIKIPFSDGGKLIQKSNLAKLIALTLTYTGFIFLKAFVSLSTSNIWNTNSIGGAKSMTFFK

SEQ ID NO: 157101 - protein, 52 aa, Glycine max
  Clone ID: PAT_MRT3847_112884C.1.pep
LELKGNPKRNFRYPTKTTPKDRTGHNPEASPSRHGHDPPNTAQQQLGRHRKS

SEQ ID NO: 157102 - protein, 141 aa, Glycine max
  Clone ID: PAT_MRT3847_112885C.1.pep
MAIAQDLYPSEDDLLYEEELLRNPFSLKLWWRYLIARSEAPFKKRFVIYERALKALPGSYKLWHAYLRERLDLVRNLPVTHSQYDTLNNTFERALVTMHKMPRIWIMYLKTLTNQILVTRTRRTFDRALCALLVTQHDRIW

SEQ ID NO: 157103 - protein, 50 aa, Glycine max
  Clone ID: PAT_MRT3847_112886C.1.pep
HLEDAKREILQLGYEWVHIKTLYISLSLRLMIYVSICNLIFAFWHVSYLC

SEQ ID NO: 157104 - protein, 56 aa, Glycine max
  unsure (1)..(56): unsure at all Xaa locations
  Clone ID: PAT_MRT3847_112887C.1.pep
LMYAKRAFVHWYVGXGMXEGEFWKARETLSAMKKDFXKVVPKSGNGNDDGEGDDDY

SEQ ID NO: 157105 - protein, 255 aa, Glycine max
  Clone ID: PAT_MRT3847_112888C.1.pep
RVRKNEREEGELSPNGDFEEDNFAFYGGNGLDAVHKGKDGGVSRQYQNRHGEEVCGETRGENDADADDEGEESHHRSSEDSENASENVDVSGSESADGEECSREEHEDGEHDNKAESEGEAEGIADAHDVEGDGMSLPYSERFLLTVKPLAKHVPPMLHEKDRNSRVFYGNDSFYVLLRLHQTLYERIQSAKINSSSADRKWKASSDTSSTDQYDRFMNALYSLLDGSSDNTKFEDDCRAIIGIQSYVLFTLDKL

SEQ ID NO: 157106 - protein, 167 aa, Glycine max
  unsure (1)..(167): unsure at all Xaa locations
  Clone ID: PAT_MRT3847_112889C.1.pep
MSWNACQYRGGPTRPPARKFIETFSRRKTEGKEQDGATGANKIPERQPIGTAAQSQDDGKDYQEPAPAPMVDPTESTSWPWYRAGIAEPEATXLGLYMTASTEMGAAGAKSKRSTVGTQGIARAFGGMICNLGDCTAGISGGHINPAATSGLNRARKETVPTATRYS

SEQ ID NO: 157107 - protein, 115 aa, Glycine max
  Clone ID: PAT_MRT3847_11288C.1.pep
VTLSKGWSPCKNWIPHFWPQGVCKIPVMAIVCFFSPPFSPFFFPRLFIKKRGVPLTPEKVWVSFPLVIQQRKWVIIKFTEGFSQKKKTPQSQCIFLPKKKKKKKKKKKKKKKKPP

SEQ ID NO: 157108 - protein, 33 aa, Glycine max
  Clone ID: PAT_MRT3847_112890C.1.pep
PVSDFISMLAIIFFIYYYVYKYVVSYLNKYKSL

SEQ ID NO: 157109 - protein, 89 aa, Glycine max
  unsure (1)..(89): unsure at all Xaa locations
  Clone ID: PAT_MRT3847_112891C.1.pep
PIDFLSPXXIERTEIAYMPTIAHPXXFHSMQKMMNAPDSNDNIXDLLTSMDLLGLQRACKAIPNKYILDDKLALAHTHEYSHRNFPVDS

SEQ ID NO: 157110 - protein, 68 aa, Glycine max
  Clone ID: PAT_MRT3847_112892C.1.pep
KLNFSSVKKSPYKTLTKSRVLTASSKKRKASLQSPVKPSYDIQFEDNPERAVEKLKVILDELTERRKQ

SEQ ID NO: 157111 - protein, 143 aa, Glycine max
  unsure (1)..(143): unsure at all Xaa locations
  Clone ID: PAT_MRT3847_112893C.1.pep
RWRGGGPFPSGAPLFPPFGPPFAFFPPGFXFXPPDPFFLPSNRGPPLPVGSTFSFPKTXWAKNLGFFPPPPLFLKKNFSPLLLWPPPVNPPTLIRPPCNPPPSFFQPGLVLKQIPPTPRGSPPGKKEFFSFSPPLVFPSKSWP

SEQ ID NO: 157112 - protein, 60 aa, Glycine max
  Clone ID: PAT_MRT3847_112894C.1.pep
LPLFAITSGFLPYGWEFIKSPHLFLFILRRIMRSKFVGQHLWLSDNRFEYEFSLGLPFIL

SEQ ID NO: 157113 - protein, 105 aa, Glycine max
  Clone ID: PAT_MRT3847_112895C.1.pep
MISDSGIHALAGAAGGALSMAVTYPLVNLSTRAQVETKKQGNESTLGAVRRIIQAEGIAGLFDGLESSIVGIAVTNGVYYLFFEETRAVILRRKVSSATAGQAAR

SEQ ID NO: 157114 - protein, 57 aa, Glycine max
  Clone ID: PAT_MRT3847_112896C.1.pep
PVESRASLTPNHPQFQEIISSPQTFPGEPEVLLKQAIQDQMDLFFPPGPVEKHCLPL

SEQ ID NO: 157115 - protein, 112 aa, Glycine max
  unsure (1)..(112): unsure at all Xaa locations
  Clone ID: PAT_MRT3847_112897C.1.pep
MILQIQRGYMATDTVSAAKLAIEAGGKGCSELFGLSSLLRILLFCRKTLEDPHADIEFKTYAAXAGADTCMDVPGAPLQGGIYGFARSGRNLLWCWHGRHDXPLEAIAINDT

SEQ ID NO: 157116 - protein, 278 aa, Glycine max
  unsure (1)..(278): unsure at all Xaa locations
  Clone ID: PAT_MRT3847_112898C.1.pep
MVAHLNIHTSFDLLDSSLRIDALIDXAXKEGYRALAITDTNVLYGYPKXYDACIAAHIHPIFGMTIYLTDGLYTIETVVLAKNNQGLKSLYQLSSAIMMRNKEEVPIEWLKRYDEHLIIIFKEAELSHKQVIDAFEALHAIRDNTKLDLIHEKETLDEHFPSIEELQTLNLSEDMITNANEIEELCQAEIAYHQSLLPQFVTPNGETSKDYLWTILIHRLREWELNDKTYFNRLKHEYKIITDMGFEDYFLIVSDLIHFAKTHEVMVGPGRGSSAGSL

SEQ ID NO: 157117 - protein, 49 aa, Glycine max
  unsure (1)..(49): unsure at all Xaa locations
  Clone ID: PAT_MRT3847_112899C.1.pep
MGRKFFVGGNWKCNGTTEEVKKIVTSLXNEAKVAGEXVVEVVVSLLLGA

SEQ ID NO: 157118 - protein, 53 aa, Glycine max
  Clone ID: PAT_MRT3847_11289C.1.pep
ISEQNPLVRVSQISLPNLNKSTLYPNPTLYLPPMYRPIPDIFSYLLIAATTPT

SEQ ID NO: 157119 - protein, 72 aa, Glycine max
  Clone ID: PAT_MRT3847_1128C.1.pep
VLLLLICVFVMLGIGISGNANCSIWHYFLSFSLCLASCFHLEMLPIFPQVLKERGIDDVAINNYDVVEHSNR

SEQ ID NO: 157120 - protein, 66 aa, Glycine max
  Clone ID: PAT_MRT3847_112900C.1.pep
SRLSHQTSPQGGKKAYSRLRLASRLKPPRSLRSRLASKRLPEDPIGGLRSHLATMLIISHTIESTL

SEQ ID NO: 157121 - protein, 43 aa, Glycine max
  Clone ID: PAT_MRT3847_112901C.1.pep
SFFPLCVWPFVICLFYICVDTRINTISVLFFVPQKKKKISKRY

SEQ ID NO: 157122 - protein, 222 aa, Glycine max
  Clone ID: PAT_MRT3847_112902C.1.pep
MRGWNQFETIYEEEQELSSTSSPFLSPSSSSSPPPPPSLHSIVNAWSLDSGSEPDVLICVQGTSFRLHKVRLISRSSYLKRHLTGVSDLTLSPPLNLTAETFAAVAEFCYSRRVHLTPSNVAAVRVAAELLGMTGEENLREVTESYFERVVGIGASMVLRSCVALLPEAETTASLASRCIEALVWEDDVSCMSDVVGMHPQDFQTGSYSLNRRVPNHDVLYK

SEQ ID NO: 157123 - protein, 103 aa, Glycine max
  Clone ID: PAT_MRT3847_112903C.1.pep
LCSTVPLILRSLSRAAPLLSPRWYVCRPDPSTPPRPYLPNWFRPPGPWSTRRQYLPNLNDAHPVSGSNRYPGKRPYLLRRLRSRTLATPHGEALRETARRDDT

SEQ ID NO: 157124 - protein, 94 aa, Glycine max
  unsure (1)..(94): unsure at all Xaa locations
  Clone ID: PAT_MRT3847_112904C.1.pep
LRSHPQNIRHLLKAXXPTIXQIXEFHXXQRMMNXPDSNDNIDLXLSIDXXGXQXAGKAXPNXIXXDDKLXXANXQXXXDGNXPVDSWXPXFXNC

SEQ ID NO: 157125 - protein, 68 aa, Glycine max
  Clone ID: PAT_MRT3847_112905C.1.pep
WLQAAGDPYTIGFTKPWIIHQQAWYRCRVKYGHKFLFYVQIHVSVVIDTQNQLISFVLSTLGVILPPS

SEQ ID NO: 157126 - protein, 79 aa, Glycine max
  Clone ID: PAT_MRT3847_112906C.1.pep
HVYIYHQLSILLSMHVSYINARIGNSFELSNNFNLSNFGHLGRNTVELVTPVPHLSFVASFDSKHRKFLHGISKVLEES

SEQ ID NO: 157127 - protein, 43 aa, Glycine max
  Clone ID: PAT_MRT3847_112907C.1.pep
FRLAELYTEASNFQTLKKKKRSNHELNTPITSSKHLNLLKGKT

SEQ ID NO: 157128 - protein, 61 aa, Glycine max
  Clone ID: PAT_MRT3847_112908C.1.pep
KSDTTMISGQLIRIMAIPNRASVVHCSHQLNNVGMPDQTFIYRIFTCWMLQNLCFAISKVF

SEQ ID NO: 157129 - protein, 63 aa, Glycine max
  unsure (1)..(63): unsure at all Xaa locations
  Clone ID: PAT_MRT3847_112909C.1.pep
THTFVLFDAALALLAWPFHDRYCQNFPXLQMKTGYCDPSSHVKCTCLTLAAXAHNILSFKTIP

SEQ ID NO: 157130 - protein, 215 aa, Glycine max
  Clone ID: PAT_MRT3847_11290C.1.pep
MENEVREHAQKLLEKHLKKPFFNERYGESVERMSVEEFEQGKLWLSDTFSLIRCEDNSLPNISWVLDLAKAAVLRHGVRGLVIDPYNELDHQRPPNQTETEYVSLLLTLISRFAQHHGCHVWFVAHPRQLHNWVGDPPNLYDISGSAHFINKCDNGIVIHRNRDPESGPIDQVQVCVRKVRNKVAGTIGEAMLLYNRVTGEYTPSDNNRPADRKR

SEQ ID NO: 157131 - protein, 55 aa, Glycine max
  Clone ID: PAT_MRT3847_112910C.1.pep
TGKTAIQLYKKKMSKERGCYFLLVLFGSPEIINLLIFQHQQRCCQLFTKLAGCVI

SEQ ID NO: 157132 - protein, 50 aa, Glycine max
  Clone ID: PAT_MRT3847_112911C.1.pep
INGLLFKGLIKKNFFPLQGGIVGKKKTRLISPFFTSLKNTIDYLLGIVYS

SEQ ID NO: 157133 - protein, 560 aa, Glycine max
  Clone ID: PAT_MRT3847_112912C.1.pep
MASTSLFNFRLPLFNFNPLHHRRIKRPKSLLSSPRNSPRLVSSINDHLALTRVTYPLLQSHSAPKRRFHVGVQKEYSDGESSESIVSDATYQEEFSWSSVVLPFLFPALGGLLFGYDIGATSGATISLQSPELSGISWFNLSAIQLGLVVSGSLYGALLGSLVAFAIADFLGRKKQLITAALLYLFGGVITAYAPELGVLLPGRLIYGLGMGLSMHGAPLYIAETCPSQIRGTLVSLKELFIVLGILLGYFVGSFLIETVGGWRFMYGFSAPVAVLMGLGMWTLPNSPRWLLLRAVQGKGSFQDLKEQAIASLSKLRGRPPGDKESEKQIEETLVSLKSVYADQESEGNFLEVFQGPNLKAFIIGGGLVLFQQITGQPSVLYYAGPILQSAGFSAASDATKVSVVIGLFKLLMTWIAVLKGDDLGRRPLLIGGVSGIALSLVLLSAYYKFLGGFPLVAVGALLLYVGCYQISFGPISWLMVSEVFPLRTRGKGISLAVLTNFASNAVVTFAFSPLKEFLGAENLFLLFGAIATLSLLFIIFSVPETKGMSLEDIESKILK

SEQ ID NO: 157134 - protein, 48 aa, Glycine max
  Clone ID: PAT_MRT3847_112913C.1.pep
SPLRKFLGAENLFLLLGAIAPLSLLVIIFSVPKTKGMSLEDIESKILK

SEQ ID NO: 157135 - protein, 65 aa, Glycine max
  Clone ID: PAT_MRT3847_112914C.1.pep
FIIILFNDRSGRGGTIINILNCIVYSQAKLALFVLASISVGKSIALSSSSLVIHHQFIIMMDAMQ

SEQ ID NO: 157136 - protein, 50 aa, Glycine max
  Clone ID: PAT_MRT3847_112915C.1.pep
TSEALNDMNILKIFKDNLLLFWIIMDTHFECLLSSILDYWLGLCAQTVSL

SEQ ID NO: 157137 - protein, 32 aa, Glycine max
  Clone ID: PAT_MRT3847_112916C.1.pep
LNPYLTKPVGGLGLIIKRKRGGRNLLWGGDNF

SEQ ID NO: 157138 - protein, 251 aa, Glycine max
  unsure (1)..(251): unsure at all Xaa locations
  Clone ID: PAT_MRT3847_112917C.1.pep
GGYGKVYRGILPNGRLIAIKRAKKESIHGGLQFKAEVELLSRVHHKNLVSLLGFCFERGEQILVYEYVSNGTLKDAILGNSVIRLDWTRRLKIALDIARGLDYLHQHAHPAIIHRDIKSSNILLDECLNAKVADFGLSKMVDFGKDHVTTQVKGTMGYLDPEYYTSQQLTEKSDVYSYGVLMLELITAKRPIERGKYIVKVVRKEIDKTKDLYGLEKILDPTIGLGSTLKGXEMFVDLALTGWKIPSDRPT

SEQ ID NO: 157139 - protein, 191 aa, Glycine max
  Clone ID: PAT_MRT3847_112918C.1.pep
MGYSKEHIIGAFTEVSKSHPNKDVSSLWPAVLCHLREEQVYGSQPESQRSRDLIVKDSRAVSLHVRNICSHDIPPFTLRACSSADRPMQNPNKDELVSKLNILNVPPLSLGERFEDAYDVVLILDDREQFATQGSRSRKIIENIRSQFKIQIEVRRLPVGDGIWIARHKTLNSEYVLDFIVERKKTNDLCS

SEQ ID NO: 157140 - protein, 68 aa, Glycine max
  Clone ID: PAT_MRT3847_112919C.1.pep
NKLLGFLLIKNEWHIFFGCDQAFTVWRNSRLWPLHHSLVSRVESTKDCIFLILNTLIGVKTDKFISTI

SEQ ID NO: 157141 - protein, 60 aa, Glycine max
  Clone ID: PAT_MRT3847_11291C.1.pep
TCCHCHCSDTTRCANGNGYCVIAYTDKSYVDTDVVDVSSAEHAGKCKCGTNWACTDCTCG

SEQ ID NO: 157142 - protein, 76 aa, Glycine max
  unsure (1)..(76): unsure at all Xaa locations
  Clone ID: PAT_MRT3847_112920C.1.pep
XRSXMXNXXRXXXXLXXXLMRXEEXXXXSFXAITXWXRGFDFVXMSDHRFFNGXXGTRVRVSRSPTETTSFSAXLP

SEQ ID NO: 157143 - protein, 57 aa, Glycine max
  unsure (1)..(57): unsure at all Xaa locations
  Clone ID: PAT_MRT3847_112921C.1.pep
MPIRNIAIXRPEEXTSPRXXXXGXXXKXISTLIXXXAGXGSXMAXNXLTDXGAXTPA

SEQ ID NO: 157144 - protein, 40 aa, Glycine max
  Clone ID: PAT_MRT3847_112922C.1.pep
GQSSNKINKIVLFLVKLINTILCRNFREYEKFNLVCIKHF

SEQ ID NO: 157145 - protein, 52 aa, Glycine max
  Clone ID: PAT_MRT3847_112923C.1.pep
GNIKMAGAAAVTVLLPPRIPTTTNGTRCSALPSITTSAYNKKSILSLPLLQH

SEQ ID NO: 157146 - protein, 96 aa, Glycine max
  Clone ID: PAT_MRT3847_112924C.1.pep
ESKKRERKNSCGLLKEIHQIEKCARVMNDLADSVHFPLTEGKEREVRQIVQEVSQVCDALKGGLDPLERQVRDVFHRIVRSRTEGLDSLGRPSNAE

SEQ ID NO: 157147 - protein, 108 aa, Glycine max
  Clone ID: PAT_MRT3847_112925C.1.pep
KADGVLSFDVPTSLHRSNTNHEHDQPPHLRLRDPKIPELVNLPVYAAPESRYCPARVYEYVADEQNQMKLQINAQNCLHCKACDIKDPKQNIEWTVPEGGGGPGYSVM

SEQ ID NO: 157148 - protein, 64 aa, Glycine max
  Clone ID: PAT_MRT3847_112926C.1.pep
SPPSPFKPSTVCNYCFTCANIATYSCIEKAQNTILECGRGDLEDASCFDDHYKRCPENYPTMNT

SEQ ID NO: 157149 - protein, 347 aa, Glycine max
  unsure (1)..(347): unsure at all Xaa locations
  Clone ID: PAT_MRT3847_112927C.1.pep
MECIYSLFLSTAFQLTHATEIMKKYNLREKGGSEHQTYALGIKEVWEIDEKKHQPGAVIHTLGWPLDHKTYGGSFLYHMRDKQISIGLVFALNYLNPFMNPYEEFXKQNPPYHFTSCHHLHFKSLAFVILPLIISIDCLLLHFVVFHFYGSIXAMISSQFLFSSQHPQINDACNKLLSIAWPAKIWEELHKSRNYRPAFEYGLIPGLALSGLEHYIFKGRHPVTLKHGKPDHEAMNAAKSHSPIHYPKADGVLSFDVPTSLHRSNTNHEHDQPPHLRLRDPKIPELVNLPVYAAPESRYCPARVYEYVADEQNQMKLQINAQNCLHCKACDIKDPKQTFIHFISLIL

SEQ ID NO: 157150 - protein, 84 aa, Glycine max
  Clone ID: PAT_MRT3847_112928C.1.pep
HASAEVNLHKMPFPLNQPFLFGILCIALVLTSGSVTCLGGDQSGIICIGDCSPTCSGDCVGRGYKNGGSCFLFFSSFMCCCNEN

SEQ ID NO: 157151 - protein, 58 aa, Glycine max
  Clone ID: PAT_MRT3847_112929C.1.pep
CFFSRLCRKKTRRRELSIRMRGIHWTICKHRSGQHLIDIPYGCTCQRIITRNEDCMLA

SEQ ID NO: 157152 - protein, 74 aa, Glycine max
  unsure (1)..(74): unsure at all Xaa locations
  Clone ID: PAT_MRT3847_11292C.1.pep
RGNGQKAHMARESNLYKLNASSTGSQLDSNNKAMSIQCNVCMQTFMCTTSEVKCREHAEAKLPXSDGYACFPHL

SEQ ID NO: 157153 - protein, 115 aa, Glycine max
  Clone ID: PAT_MRT3847_112930C.1.pep
NCLIVGSCWVVSLIMSPGLRVALLRLWEPLPLLLADMLLCSVGLCTRLFLCSQEAGGLFPPFFLFSVGLLGFWAPLVFGGLAGIMAIFGVSFGCLVIFAELCFFVGFFLFLFLTY

SEQ ID NO: 157154 - protein, 163 aa, Glycine max
  Clone ID: PAT_MRT3847_112931C.1.pep
SGEEGESKVTEQTSNKNGKSNANKNNNRETTSAETSKDNSKGSEVQNQKPEYIHVRARRGQATDSHSLAERVRREKISERMKYLQDLVPGCNKVAGKAGMLDEIINYVQSLQRQVEFLSMKLAAVNPRLDFNLDELFTKEVFPSCAQSFPNIGMPLDMSMSNN

SEQ ID NO: 157155 - protein, 75 aa, Glycine max
  Clone ID: PAT_MRT3847_112932C.1.pep
DNVENYLKLHYWKIVKKTIQPHLKKGLECTKTHPKPLAIHPLIQPTQVEKCQTTSSTALLMTMSAAMRTTGSKGP

SEQ ID NO: 157156 - protein, 125 aa, Glycine max
  unsure (1)..(125): unsure at all Xaa locations
  Clone ID: PAT_MRT3847_112933C.1.pep
VVCSFATVLSLSGCNIFFSVSPRFHRKESRGGEEVIATQSPTPFEYEILDSDAEVLRTVRASSNCANPWIEPERLKLRHRIGRGPFXYVCLATYHQSTXDFDEYHXIAANMLHSIREDHVKNVLY

SEQ ID NO: 157157 - protein, 132 aa, Glycine max
  Clone ID: PAT_MRT3847_112934C.1.pep
MESEALIWGDKLILKGLSFHGFHGALPEERKLGQKFVVDVDAWMDLKAAGKSDHLSDTISYTDIYDIAKEILEGSPQNLLESVAQKIAVTTLTNHKQISAVRVKVEKPHVAVQGPLDYLGVEILRRRSDLSE

SEQ ID NO: 157158 - protein, 81 aa, Glycine max
  Clone ID: PAT_MRT3847_112935C.1.pep
NLSKWGYIMWMLLSYDFLSQQRLCVRNLGWRLYHLVNCDVNGQDTCSRRIIRLYTSKTNWTIKTTTIEVLRHVSLLGRPDS

SEQ ID NO: 157159 - protein, 58 aa, Glycine max
  unsure (1)..(58): unsure at all Xaa locations
  Clone ID: PAT_MRT3847_112936C.1.pep
CVSGFYSSSARGIRVFNSGLLASRVLHWXFFPPPHIQKVSWPHFILQKKTRPNKIKNL

SEQ ID NO: 157160 - protein, 44 aa, Glycine max
  Clone ID: PAT_MRT3847_112937C.1.pep
CKTVGPPSTGCMVVKSESAGLKEHEHLCFESQQKDQHECAVIEF

SEQ ID NO: 157161 - protein, 54 aa, Glycine max
  Clone ID: PAT_MRT3847_112938C.1.pep
RVVFTVDPEDKHTEMSSAVISLIRASFTTLVIRPSILHLTSSSLFGDPYSFEVL

SEQ ID NO: 157162 - protein, 74 aa, Glycine max
  unsure (1)..(74): unsure at all Xaa locations
  Clone ID: PAT_MRT3847_112939C.1.pep
MATNRSVQTLFDGDXKGKTVLLRVYLNVPLDDNHYIIDDSTVCAVDPPSSTXTGHGPKVIFSSHWRRPKGVSPK

SEQ ID NO: 157163 - protein, 47 aa, Glycine max
  Clone ID: PAT_MRT3847_11293C.1.pep
SDMSNRAGVTLDRTKNGNNQIRIMNVIQHNYCSSLVLNTAKIRYFIQ

SEQ ID NO: 157164 - protein, 43 aa, Glycine max
  Clone ID: PAT_MRT3847_112940C.1.pep
CLQLENELLLAFSIMLFTYIESGILDHDAEISDKITTILLVPS

SEQ ID NO: 157165 - protein, 98 aa, Glycine max
  unsure (1)..(98): unsure at all Xaa locations
  Clone ID: PAT_MRT3847_112941C.1.pep
KASLFTHPTKHALKLPQVAXCGHEAEYTTRRSVVCAKPLEVNGTRIFVRSXSRPSARVYWVWDPYHXTGSPFVFDHVHHGALSEAAIPLLTACRRSYS

SEQ ID NO: 157166 - protein, 74 aa, Glycine max
  Clone ID: PAT_MRT3847_112942C.1.pep
LCLQKFKRRNGGCNKHNRDHVKFIRCSNCGKCCPKDKAIKRFLVRNIVEQAAVRDVLEACVYEHNFLLYLLSFF

SEQ ID NO: 157167 - protein, 134 aa, Glycine max
  unsure (1)..(134): unsure at all Xaa locations
  Clone ID: PAT_MRT3847_112943C.1.pep
LCLQKFKRRNGGCNKHNRDHVKFIRCSNCGKCCPKDKAIKRFLVRNIVEQAAVRDVXEAFFNCYLQNILFPKLYVKMQYCVSCDIHXHARVCSCTDKNNCEPPKRFIRMMHKGPVSLVSGQAPRPAGIGAPVRT

SEQ ID NO: 157168 - protein, 131 aa, Glycine max
  Clone ID: PAT_MRT3847_112944C.1.pep
MARSISYITGSQLLSLRRHPSIAVVDVRDDERSYDGHISGSLHYASDTFSDNISNLIQAVKGKDTLVFHCALSQVRGPTCARRLVNYLEENKEDTGIKNIMVLERGFNGWEASGRPVCRCTNIPCKGELSP

SEQ ID NO: 157169 - protein, 55 aa, Glycine max
  Clone ID: PAT_MRT3847_112945C.1.pep
TTVYHPFCSYQGFSISLAHSVIIFLPITFILISFFQPQIYFFNLDYTLNHSNWNQ

SEQ ID NO: 157170 - protein, 256 aa, Glycine max
  Clone ID: PAT_MRT3847_112946C.1.pep
MAAATATADSVSSQAYLEGNAVKETRILISELCRHFYSLGWVSGTGGSITIKVHDDSISKPHQLILMSPSGVQKERMEPEDMYVLSHTGSVLSAPSPKPYPHKPPKCSDCGPLFMKAYEMCDAGAVIHSHGIESCLVTMLNPLAKEFKITHMEMIKGIKGHGYYDELVIPIIENTAYEYELTESLAKAIEAYPKTTAVLVRNHGIYIWGDSWISAKTQAECYHYLFDAAIKLHQLGLDWSTPNHVPIKSLRSLMIA

SEQ ID NO: 157171 - protein, 32 aa, Glycine max
  Clone ID: PAT_MRT3847_112947C.1.pep
ISFTIVLQYIYRECLQYLNRIRFLFYRLIFCK

SEQ ID NO: 157172 - protein, 77 aa, Glycine max
  Clone ID: PAT_MRT3847_112948C.1.pep
KTKSLKGLFLKGKEPFLPVLVHPGAFSPQKEKGDPAPPFFSFGVLITPLIMLFFINHILYDFFRIFLLAHQSFCLIP

SEQ ID NO: 157173 - protein, 137 aa, Glycine max
  Clone ID: PAT_MRT3847_112949C.1.pep
GSSAPLHVVEESVFMLGDAAVPTLTLIMGANLLKGLKGSTTPVWTVVGIVAVRYIFLPLLGVAVVKGAIHFSLVHSDALYQFVLLLQYALPPAMNIGTIAQLFGAGESECSVIMLWTYILAAVAVTLWSTFFMWLVL

SEQ ID NO: 157174 - protein, 97 aa, Glycine max
  unsure (1)..(97): unsure at all Xaa locations
  Clone ID: PAT_MRT3847_11294C.1.pep
KPQKEEPXAPGEGRKAEPEAGTTQGQKTGGGPNAGDADTRNGPTGTAENRSDKETPKQKAKFFKKNRKRKIRDALNEEVWGRIANHIITGGEAEAAY

SEQ ID NO: 157175 - protein, 92 aa, Glycine max
  unsure (1)..(92): unsure at all Xaa locations
  Clone ID: PAT_MRT3847_112950C.1.pep
SLVGPHARSCLDNHYRDYATQPPVTSAGDLXLIAHRGCNAPMXLRLTHICCGNCISNRLERXRTCPLRLADDKPANLMTLGDGYTNWCSQEI

SEQ ID NO: 157176 - protein, 94 aa, Glycine max
  unsure (1)..(94): unsure at all Xaa locations
  Clone ID: PAT_MRT3847_112951C.1.pep
KLILKGFENPSPPKIGSFKTAARKNLIRQGLTLCGVFVDQMSALLGGLKGESRPFKVPNPXNTSSRSFTSQQFRLXPIYLYVIKWVQIGAPASL

SEQ ID NO: 157177 - protein, 40 aa, Glycine max
  Clone ID: PAT_MRT3847_112952C.1.pep
TNPKLSGPEYGIPGVIPTLHFRMIRCLACSYMHRYHLFSY

SEQ ID NO: 157178 - protein, 410 aa, Glycine max
  Clone ID: PAT_MRT3847_112953C.1.pep
MAVGKEDVEIVKARIDKRDYRRVVLRNSLQVLLISDPDTDKCAASMDVGVGYFSDPAGLEGLAHFLEHMLFYASEKYPVEDSYSKYITEHGGSTNAFTSSEHTNYFFDVNTDGFEEALDRFAQFFNKPLMSADATMREIKAVDSENQKNLLSDAWRMNQLQKHLSDEDHPYHKFSTGNWDTLEVRPKAKGLDTRSELLKFYEENYSANLMHLVIYTNESLDKIQNLVEEKFQDIRNINKSCFRARVQPCKSEHLQILVRTVPIKQGHKLRIVWPVTPEIHHYTEGPCRYLGHLIGHEGEGSLYYILKKLGWATALYAGESDWGLDFSFFKVVIDLTDAGHEHIQDIIGLLFKYIELLQRSGVCKWIFEELSAVCETKFHYQDKIRPSDYAVDIASNMQFYPVKDWLTGSS

SEQ ID NO: 157179 - protein, 124 aa, Glycine max
  Clone ID: PAT_MRT3847_112954C.1.pep
MGSRARQGRRLQTMMKCMCLREPLKGEDETVPSSDSLAIREFYSSTASGRSGPDGEIEMMGSGSGNMDEAELSLRESGIMDIMGNEEARALLGKDEYQERNIEAALHVYERINISAVTSKMKIS

SEQ ID NO: 157180 - protein, 78 aa, Glycine max
  Clone ID: PAT_MRT3847_112955C.1.pep
NSVIARESEEGTVSSSPPFFNGSLRHMHFIIFCNLLPCLALLPMMPPPQQHCHTLNSIQNHNHHSLLTLISINSHRIF

SEQ ID NO: 157181 - protein, 64 aa, Glycine max
  Clone ID: PAT_MRT3847_112956C.1.pep
AFSSFLLKQWILSTVEASLLAMMNTIHHHTLIHRSTIISVPSLTRNNHPWFHLILQCLIFPQAT

SEQ ID NO: 157182 - protein, 68 aa, Glycine max
  Clone ID: PAT_MRT3847_112957C.1.pep
LGGSLCITKPPRGFFPFYPSRLKAMIHIPLNFSIPLYYRPKIFKPGPNFPKNIGKILVYSWLILPRKV

SEQ ID NO: 157183 - protein, 45 aa, Glycine max
  Clone ID: PAT_MRT3847_112958C.1.pep
LWLFQLFMLLKKKIRWCLSAFKFIKTSTPTQRDFLHNEWYQIIQS

SEQ ID NO: 157184 - protein, 93 aa, Glycine max
  Clone ID: PAT_MRT3847_112959C.1.pep
QVCQEEDTLSDAESLDVGDVDKGGSTSPKEVVAEIIHRLELHAYHSTLEVLYASGPLSWEHEELLTNLRISLHISNDEHLMEIKNLVSSGQNF

SEQ ID NO: 157185 - protein, 186 aa, Glycine max
  Clone ID: PAT_MRT3847_11295C.1.pep
ASKTVIGNSQLHKILLQPFWRRIRFQTNTHSHIQIQIENTNTLSLFLIHTDTRIPPIRRRFPKLRAFKSNPHSHQSALESLQVLKPPSPSAAGQIRFRSPSSAELLATAELDLETTKMLKRSGRPPPPTPESLTDKIYHLRGAFLMVAVPLLLVTLVLYAMPSASSSESVEDYALTHRQVGNERST

SEQ ID NO: 157186 - protein, 401 aa, Glycine max
  Clone ID: PAT_MRT3847_112960C.1.pep
MAGPNPIPKWLFLSLTLILSLSVSVGARHFVLVLSQEDYKDDPPADPDSAAEWDEFGDGDSHKSEDDLDPGSWRPIFEPPAGDPQPLPESDAAYHSAVHKLMSGDPDLIQDGAAEIGALAETGHPASQSVLGFLWGMGLLRERSKGKAFLYHHFAAEGGNMQSKMALAYSYTRQDMFDKGVNLYGELAEVAVNSFLISKESPVIEAVRLHNGAEENKEALRKSKGEEDEDFQILEYQAQKGNAAAMYKVGLFYYFGLRGLRRDHSKALWWFLKAVDKGEPRSMELLGEIYARGAGVERNYTKAFEWLTLASRHHLYSAYNGMGYLYVKGYGVDQKNYTKAKEYFEKAADNDEVGGHYNLGVMYLKGIGVNRDVKLACKFFVFAANHGQPKAFYQLAKIFHT

SEQ ID NO: 157187 - protein, 55 aa, Glycine max
  Clone ID: PAT_MRT3847_112961C.1.pep
LLHISHSLPTLELPKILTYSGFSENFKANSISCSSVNPNLLTSPTKSLFEGSNCE

SEQ ID NO: 157188 - protein, 91 aa, Glycine max
  Clone ID: PAT_MRT3847_112962C.1.pep
QRPKYFEMARTKQTARKSTGGKAPRNQLANNAARKSEPTTGAVKKPHRYRPGTVPLREIRTYQISAVLLIRNLHIQMLVREIAQDFKTDLR

SEQ ID NO: 157189 - protein, 81 aa, Glycine max
  Clone ID: PAT_MRT3847_112963C.1.pep
GLSNHVFQRKRGFLSSWGLGQYLFFFVRLDRKIEGPPNFRFWGQFLSRGPFKRFHLISTCISVHFVRGFSKFRAALLFCFA

SEQ ID NO: 157190 - protein, 48 aa, Glycine max
  Clone ID: PAT_MRT3847_112964C.1.pep
KRKTGIKIQPHNEKSNFGFLPSNLPCLFLVLTTGGQSGQGSGRGSSAG

SEQ ID NO: 157191 - protein, 32 aa, Glycine max
  Clone ID: PAT_MRT3847_112965C.1.pep
SSSNIACSTICHMTTHLAISYSSFHSNKATIP

SEQ ID NO: 157192 - protein, 103 aa, Glycine max
  unsure (1)..(103): unsure at all Xaa locations
  Clone ID: PAT_MRT3847_112966C.1.pep
RXRRSKLGIRKXGXXVPXXSXXQXSXTQAESSXSARXLADSPPXXXLKSQXMAXXXXEAXDAVGGXXRTDIVXGXSXPRVPXLHXXLPGSXKLSXINXSTXEV

SEQ ID NO: 157193 - protein, 51 aa, Glycine max
  Clone ID: PAT_MRT3847_112967C.1.pep
SYSDAKGLSYIYIYIYIQQSQACVGSILESKLKSNISHSLIHMGFIGLLTW

SEQ ID NO: 157194 - protein, 39 aa, Glycine max
  Clone ID: PAT_MRT3847_112968C.1.pep
MFPLRMKSGYHDRCSQVKCTSSMLAVQSQNIGSFKAIPE

SEQ ID NO: 157195 - protein, 70 aa, Glycine max
  Clone ID: PAT_MRT3847_112969C.1.pep
KRKKKKLKLNEIKMKAKKPRNELKVLDLETYPLKNEERMKNGRRMVKNGGKPSRICLRKPLGSVTEALRL

SEQ ID NO: 157196 - protein, 51 aa, Glycine max
  Clone ID: PAT_MRT3847_11296C.1.pep
RFISIEINSATRPYNLKKKIHFRLIEFITEKEIKRFPSNILFSLSETKYKG

SEQ ID NO: 157197 - protein, 68 aa, Glycine max
  Clone ID: PAT_MRT3847_112970C.1.pep
DCSPSLITTRSNCNEGQEFIVFAIERNHIMLFFIQLTIQYLQIDSRCIDDKKEDNEMKSAEEFEDIFG

SEQ ID NO: 157198 - protein, 64 aa, Glycine max
  Clone ID: PAT_MRT3847_112971C.1.pep
SITQRNGSLVIDYQVCVIDYTVPFSGYHVLKLCDSSLASGNRLPRLCNRLPGRKSLEIPLFTCM

SEQ ID NO: 157199 - protein, 35 aa, Glycine max
  Clone ID: PAT_MRT3847_112972C.1.pep
FDGASAATVTSAARLCLQRFVIQISPRAELRSELT

SEQ ID NO: 157200 - protein, 253 aa, Glycine max
  Clone ID: PAT_MRT3847_112973C.1.pep
VVPPPCPGLRGARVSAPWFGFPPYVWWPRSVAAVGLSNSAAYVRIPRPVPTFVARAFSNPPHVMTHHACHFSTAGTGPISWLVDGPQTLHHDFSASFCEISLKMHIYNSSGATAFVRIDTLDSAGNGGHMNSVNVVQSATTDNQAGWHDITPVNELKVTSNVLETQPGKAPSLESVSSYIWSGSISTNLHIDAMSSAEIPLQICVFSPGTYDLSNYVLNWKLPSNGKGDSDETRQHSGKCQGYKYYLTVLQST

SEQ ID NO: 157201 - protein, 387 aa, Glycine max
  unsure (1)..(387): unsure at all Xaa locations
  Clone ID: PAT_MRT3847_112974C.1.pep
RVRNGSIPIEVYGLLGLTDLLLQTNTLVGSISPFIGNLTNMQTLALFHNNLQGDLPREVGRLGKLEIMFLYDNMLSGKIPLEIGNCSSLQMVDLFGNHFSGRIPLTIGRLKELNFFHLRQNGLVGEIPAXALGNCHKLGVLDLADNKLSGSIPSTFGFLRELKQFMLYNNSLEGSLPHQLVNVANMTRVNLSNNTLNGSLDALCSSRSFLSFDVTDNEFDGEIPFLLGNSPSLDRLRLGNNKFSGEIPRTLGKITMLSLLDLSGNSLTGPIPDELSLCNNLTHIDLNNNFLSGHIPSWLGSLSQLGEVKLSFNQFSGSIPLGLLKQPKLLVLSLDXNLINGSLPADIGDLASLGILKLDHNNFSGPIPRAIGKLTKSYELQLSKNRF

SEQ ID NO: 157202 - protein, 64 aa, Glycine max
  unsure (1)..(64): unsure at all Xaa locations
  Clone ID: PAT_MRT3847_112975C.1.pep
KFLIYSFMFKNWIKLVFSSXKSLLXRVLTXKXHYKKNTYDFERDSTHIINMVVVFNYHNNILKL

SEQ ID NO: 157203 - protein, 56 aa, Glycine max
  unsure (1)..(56): unsure at all Xaa locations
  Clone ID: PAT_MRT3847_112976C.1.pep
AXXTTSXEXVAAWDEVEELSAXASXAXXSKKEKXSDPLETYCKDNXETIECKTFED

SEQ ID NO: 157204 - protein, 536 aa, Glycine max
  Clone ID: PAT_MRT3847_112977C.1.pep
IDSILSQFHKPQPRFLCHPIHTAMDPNPGTFPLLSYIMSRLPSLTPRPAAPAPSDSDQFDIEQPPEIVGQMPHLADPELVASMGRAVAQVTQARSVLTLIGERPTHEEVDNARAKLADVEAQLSRELEEIVLQARPAEIEIQGWRAQQAERERECRERAETERRVWRSVLQLDEMHEAYEKLLKDAEKRLVKMYESKEDGGGGDADLAYGEEVNEEVVGILQEAYGKGMERIDLSGRQLKLLPEAFGRISGLARFDLSPNQLSAIPDSIAGWQNLEELNLWLELLESLPDSIGLLQKLKLLNVSGNKLTALPDSICQCRSLVELDVSFNNLSYLPTNIGYELPNLQKLMIYLNKIRSFPSSICELKSLHYLDAHFNELHGLPIAIGRLTNLEVLNLSSNFSDLKELPETFGDLANLRELDLSNNQIHALPDTFGRLDNLIKLNLEQNPLELPPMEIVNQGLEAIKTFMAKRWLDILLEEERKSNQEMQEPEQGGWLTRSTFWLKNVSGNVIGYIGTTVGSPMSPKSPRDAYLDQQL

SEQ ID NO: 157205 - protein, 60 aa, Glycine max
  Clone ID: PAT_MRT3847_112978C.1.pep
YSFREAYTVKEYLKHPSKSTVADAAAPTAECGAPAAAMGELTEQEPAEKSDDCKGFSQAE

SEQ ID NO: 157206 - protein, 87 aa, Glycine max
  Clone ID: PAT_MRT3847_112979C.1.pep
GLDEPTLVVSARPFILLCVFLFISLFSYLFFLSSFFLFFFKKRPNPEINPLNFSLGGKTKLFRTTLFFKMKNNFEKGGPNQNIIPLF

SEQ ID NO: 157207 - protein, 213 aa, Glycine max
  unsure (1)..(213): unsure at all Xaa locations
  Clone ID: PAT_MRT3847_11297C.1.pep
MKIAVEGCMHGDLDNVYRTLQQLEKSENTKIDLLLCCGDFQAVRNEHDLKSLNVPLKYRSMNSFWKYYSGAEVAPYPTIFIGGNHEASNYLWELYYGGWAAPNIYFLGAAGVVRVGNVRIGGLSGIYKSFDYKLGHFERPPYDHNTIKSVYHVREYDVRKLMQVKEPIDVFLSHDWPVRITDYGDXGKLVRRKHYFKQEIEEXRLXSKPAAEL

SEQ ID NO: 157208 - protein, 95 aa, Glycine max
  Clone ID: PAT_MRT3847_112980C.1.pep
KLELDNYYMENYIRENINQVVMVWTLNDAFLLTIEDSCSTSTMMLNQVRKVHGEENLKILLLESLLGCFEAEESLMPSAKCEIKEQCRELDLGSE

SEQ ID NO: 157209 - protein, 90 aa, Glycine max
  Clone ID: PAT_MRT3847_112981C.1.pep
LKGCLYFLYYILSNLFFDICLTYIIITTPQRLSNPTQHTLASAPAEIITKKQKPILSFCRQTQRKLTRHIFLLGLLNFSLFSLCIVSSQQ

SEQ ID NO: 157210 - protein, 32 aa, Glycine max
  Clone ID: PAT_MRT3847_112982C.1.pep
SHTRITLNFLGIKPYFIQTLWGSFLTKYITTV

SEQ ID NO: 157211 - protein, 61 aa, Glycine max
  unsure (1)..(61): unsure at all Xaa locations
  Clone ID: PAT_MRT3847_112983C.1.pep
LSVVDKFILNRKKIFYMPHVVFTSNSVKVNSYEQKKEKKKKEKRAXXXLRRXPXLTVRVGM

SEQ ID NO: 157212 - protein, 93 aa, Glycine max
  Clone ID: PAT_MRT3847_112984C.1.pep
QQIVLFFSLLIFYSVLTCARILVLPKQRCSLASCFSPRFEKEVKVNDIALANCLLSSLFLSFTQVKSQTNFLTPHCLLYFSFFHYLISCRNAT

SEQ ID NO: 157213 - protein, 82 aa, Glycine max
  Clone ID: PAT_MRT3847_112985C.1.pep
LSGIRSPIFNVCALLSCLKPPGFPISRPFASRGSSRVPSLPFARCLVACLMREDPTLKTLLSLFSSHGSKRRRTHTNGNIWL

SEQ ID NO: 157214 - protein, 64 aa, Glycine max
  Clone ID: PAT_MRT3847_112986C.1.pep
KEMNYARLTSGGGWRLRRLYTAVETLAGWGPLDRMSFTLDFTGESRAFAPWLSGAACFTSPFCR

SEQ ID NO: 157215 - protein, 100 aa, Glycine max
  Clone ID: PAT_MRT3847_112987C.1.pep
LKSFINSDTKSHRSKESEIPLKQLSPNLSVSVWINQGPMSRRSWAKLKFRVSDTTSREAPKVPAAQQSPAWLCCLTTSRVSESRASSGAQPGSSFVSLGP

SEQ ID NO: 157216 - protein, 51 aa, Glycine max
  Clone ID: PAT_MRT3847_112988C.1.pep
CFSQHNTIPTNTTFFITLLPLIFTSSFIILNNLSSYYIPIPNPPFYNSSLY

SEQ ID NO: 157217 - protein, 63 aa, Glycine max
  unsure (1)..(63): unsure at all Xaa locations
  Clone ID: PAT_MRT3847_112989C.1.pep
IYHEXSHIIINKGMDLSSGGPNCYTFFKFFTQTHQDSGHMSHLQTPGALHSFSTRWAYYFNWV

SEQ ID NO: 157218 - protein, 33 aa, Glycine max
  Clone ID: PAT_MRT3847_11298C.1.pep
TVPGYDVAGVVVKVGSQVKDFKVGDEVYGDVNE

SEQ ID NO: 157219 - protein, 70 aa, Glycine max
  Clone ID: PAT_MRT3847_112990C.1.pep
RFSGDLFRDLYGPRLVLQLYRGEYLSIVSLCSRGRFRRRRPSSSLLVVAPVRPVYHLVTTMQAHKSDQRF

SEQ ID NO: 157220 - protein, 47 aa, Glycine max
  Clone ID: PAT_MRT3847_112991C.1.pep
LSHSFYPCCSIKSQYSVFHKKLPNGTFFWVNLRYLFQFNYFSLVLMN

SEQ ID NO: 157221 - protein, 32 aa, Glycine max
  Clone ID: PAT_MRT3847_112992C.1.pep
APASASLPTLSLLCTGCLPNAYQGCYDRLPFI

SEQ ID NO: 157222 - protein, 56 aa, Glycine max
  unsure (1)..(56): unsure at all Xaa locations
  Clone ID: PAT_MRT3847_112993C.1.pep
SSPLGRVLFQIVTLKPXXXXMEXXXLXXXXRXPKXPNSXXXTLTLFLPTSQERRFL

SEQ ID NO: 157223 - protein, 229 aa, Glycine max
  Clone ID: PAT_MRT3847_112994C.1.pep
MISSGINLVMTVIGFAVSTMFIVFVCTRLICARIHLNAARRSFPIASRSNLSMMERGCHGLERVTVAKFPTKKYSDKFFAAAENSQCTVCLSEYQGEDMLRILPYCGHSFHVTCIDLWLQQNSTCPVCRISLREFPDRKRLMQPLFSSALQPHYDIESFDNRHYHCMIADNGLSSRTPDNHAVNPIEEDHFPSEGDGAVAMDNITCLSEGDFIKDEGKKHVESPSNFRI

SEQ ID NO: 157224 - protein, 97 aa, Glycine max
  Clone ID: PAT_MRT3847_112995C.1.pep
GDVPRVNGKLAVSRAFGDKSLKSHLRSDPDVQNTDVDVDTEILILASENLMKVMTNQEAVDIARRTRDPQKAAKQLTAEALKRDSKDDISCVVVKFR

SEQ ID NO: 157225 - protein, 50 aa, Glycine max
  Clone ID: PAT_MRT3847_112996C.1.pep
NKEHTREKHLCLRSIVKTEVWTRLSKRSPPSSTRQVCIMFNAGDGFAGVG

SEQ ID NO: 157226 - protein, 81 aa, Glycine max
  unsure (1)..(81): unsure at all Xaa locations
  Clone ID: PAT_MRT3847_112997C.1.pep
VPLPKNHQKGPVPKNHRKVPVPKNQQKVPVPKKHQKVPVAKKHKKVPVAKKHKKVLVPKKHKKGPXVKPGYPPNLNILITE

SEQ ID NO: 157227 - protein, 91 aa, Glycine max
  unsure (1)..(91): unsure at all Xaa locations
  Clone ID: PAT_MRT3847_112998C.1.pep
GWFAQIIILSKNWRWTVTDTFLSPDQRSLIYASISPIVHIVNARSHXTDSMVNVTHTHGGLDYSSNDYLKILLLNLVRATLNRWEPLICRK

SEQ ID NO: 157228 - protein, 55 aa, Glycine max
  Clone ID: PAT_MRT3847_112999C.1.pep
VQGHVTPYIIGTIQDRCLTHVYITSRDGTYKGTTAFHYEVLPQCQFLTIAVIHMS

SEQ ID NO: 157229 - protein, 66 aa, Glycine max
  Clone ID: PAT_MRT3847_11299C.1.pep
PHWGESNQNLTWIIYSATVEGTLTFLLALTKKVLVVTQKPYSRSLYCKIRGRYEKWGGFFFKQTFR

SEQ ID NO: 157230 - protein, 96 aa, Glycine max
  Clone ID: PAT_MRT3847_1129C.1.pep
ARNSARGPDNAYVNVWEVDTGVLTNSLLCSLTDGAGSGCDAMVVDGCRITTTSYSEDSGVLCFRDYNHDATNPVTKLENEPSSKFWISMSDDDSDD

SEQ ID NO: 157231 - protein, 137 aa, Glycine max
  unsure (1)..(137): unsure at all Xaa locations
  Clone ID: PAT_MRT3847_112C.1.pep
QYLAPEIFRGGRPRQLQNDWGTCGIYLYELVIGKTTVEGSGNRATLSTHVPAPLPFPQPPSATLAVRDLITGLLVIEPQHTLAYKICATADDQRPSFECEKSPLIPXATPPYIPKDAPLENIPSPTSSCGGDRAASP

SEQ ID NO: 157232 - protein, 34 aa, Glycine max
  Clone ID: PAT_MRT3847_113000C.1.pep
YHMICYRFYFIISYELCLLNTLIQFDKRYLNIPI

SEQ ID NO: 157233 - protein, 171 aa, Glycine max
  Clone ID: PAT_MRT3847_113001C.1.pep
HAHVFRKRACPIDSLSLRLSLLEKVLRSFLDHKILKDQLFGLLKANIKASAVVKFPLELERDISNNATLNRTIPDWRTRPGFERFWFEILARVEENKLKPLLIKEVRPFIESVSVSWANLMSNMSYTKLRPVFFLPEPLTLDVKWIGSCKYQNRRGERRKCNLRLHDLVIF

SEQ ID NO: 157234 - protein, 110 aa, Glycine max
  Clone ID: PAT_MRT3847_113002C.1.pep
RTETSGDEDTVSSRQRRRRHTAEVTKAMASKLLLKRRLFRFLQLSQPSFSSIHAAPILSVKASEFMFPYKENALLPPLSSSSRNFCSRSFNLDESQGPLTIDYSFSTARG

SEQ ID NO: 157235 - protein, 118 aa, Glycine max
  Clone ID: PAT_MRT3847_113003C.1.pep
MLGGNFYKGGPLAEGVRARDDHKSLDPKAEEFPEVRECFIIGGGHAANASPRHRKQEPHKVCSVKVVAPVYVQWSDKPITFAQCVHPDLVPSLGKTPLVVDPTVGDVRLIKVLMDGGR

SEQ ID NO: 157236 - protein, 227 aa, Glycine max
  Clone ID: PAT_MRT3847_113004C.1.pep
MENIGEEYGYWPENDMLFQNEDLGSWAIMDEAALSGSGYYDSSSPDGTGASSSVASKNIVSERNRRKKLNDRLFALRAVVPNITKMDKASIIKDAIEYIQHLHDQEKRIQAEILDLESGNKLKNPTYEFDQDLPILLRSKKKRTEQLFDSVSSRNSPIEIIDLRVTYMGEKTFVVSLTCSKRTDTMVKLCAVFESLKLKVITANITSFSGTLLKTVFIQVSLPFCPS

SEQ ID NO: 157237 - protein, 166 aa, Glycine max
  Clone ID: PAT_MRT3847_113005C.1.pep
ETSRQVPSEIRDQKFDEKENIVFITVVCCSPEKIRDKLCYKGGGSIKSIEILEPPKPKPAGPEKKEAEKPKAEPEKKKDPEKPKADPPKAEKPKTEPEKKKDGGGEKPKEEPEKKKDGGEKPKPGPEKPKDKPTPAPLPVQPHIAAPMAVPVGMLYAPPPCYGGRP

SEQ ID NO: 157238 - protein, 285 aa, Glycine max
  Clone ID: PAT_MRT3847_113006C.1.pep
FLYRPAAGLQIPVSIQEKPLPSTWSAISPSVFNLRGENFFRDKQKCPAPESCPYIPIGVDLFACPKKISHIAKHLELPLVKENESVPFLLIVNIQKPTYAASVFLGDANGEGLSLVLYFKLSENYEKEISPHAMGMIKRLIDDETEKVKGYTKESLVPYRERLKILAGVVNPEDLNLYSAEKKLINAYNGKPVLSRPQHEFYKGPNYFEIDLDIHRFSYISRKGLDSLRDRVKHGILDVGLTIQAQKQEELPEEVLCCLRLNKIDFVNHGQIPTLMTLDDNSGVH

SEQ ID NO: 157239 - protein, 94 aa, Glycine max
  Clone ID: PAT_MRT3847_113007C.1.pep
TREIRDQKFDEKENIVFITVVCCSPEKIRDKLCYKGGGSIKSIEILEPPKPKPAGPEKKEAEKPKAEPEKKKDPEKPKADPPKAEKPKTEPEKK

SEQ ID NO: 157240 - protein, 44 aa, Glycine max
  Clone ID: PAT_MRT3847_113008C.1.pep
LPEFMSSLTRSPNSVELDNGLLSSTELPDRVKELMNSDRGKSSV

SEQ ID NO: 157241 - protein, 191 aa, Glycine max
  unsure (1)..(191): unsure at all Xaa locations
  Clone ID: PAT_MRT3847_113009C.1.pep
MYCYLASGTKRPLVARTMINRNMMPLPNGDVLVHEKNMLVIMHEMTHAFGFSHSLFTHFIDANANPLQGQLKTVNMGGMTRTVLDVSPLTDKLRSFYGCSSLEGAPLENSGGDATAASHFERQFFLYEYMTSGAILNMRISEFTLALLEGSGWYAPDYSYADPFFVGQGQGCXFLNYQCSSGGTSSFDEYC

SEQ ID NO: 157242 - protein, 67 aa, Glycine max
  Clone ID: PAT_MRT3847_11300C.1.pep
VLKLSWINLTNLLFWDLSQGPKVASYDGMSKRTRFVADTPQRDIHRGRLYCHRFTTVFLLLLKQRNR

SEQ ID NO: 157243 - protein, 244 aa, Glycine max
  Clone ID: PAT_MRT3847_113010C.1.pep
SSLLHSRSSFKFNPWLKLNHPSHAAIGLRLRLKPYPTNFTCKAVFSDDAPFAAAIGACMFTSLLLPVSTSSEDDDADSAVTTTDARLAVMGILSFIPYFNWLTWVFAWLDTGKRRYAVYALVYLAPYLRSNLSLSPEESWLPIASILFCIVHIQLEASIRNGDIQGFQLFRNVADQLSSNNRKKDHLNLHQEMSEEGIKKEKKNLPHAQEQSRDIGGWEDSQRPLQPRQHLNEDLDDDKERNKH

SEQ ID NO: 157244 - protein, 157 aa, Glycine max
  Clone ID: PAT_MRT3847_113011C.1.pep
SIQTRPYPYIFRFQNLTTATPHFLGKPLVPNSSVVQISTHFLSRSLRTKPKLHLFHSLSFKPIEISNDSLKWRNHQRSERVLRVEANDIPRLKKRKFPPPFPLPHCSHLKNNGYGTQIFSLLIPLLIQSSLTWISFPMRVLNAFRHLRTPISFLSCL

SEQ ID NO: 157245 - protein, 70 aa, Glycine max
  Clone ID: PAT_MRT3847_113012C.1.pep
SCRIRHENNARILISGSFSNRYERITRCAKGWESNQVYDRKSQRLVEKIIDKKIVLSIRAIYQSKICLFC

SEQ ID NO: 157246 - protein, 40 aa, Glycine max
  unsure (1)..(40): unsure at all Xaa locations
  Clone ID: PAT_MRT3847_113013C.1.pep
TFTFKGQXXXXXXXXXXXSLLLNKRKYIITHLFFLIXSCA

SEQ ID NO: 157247 - protein, 74 aa, Glycine max
  Clone ID: PAT_MRT3847_113014C.1.pep
NGFTKCLEETGSFIGVHTGLARNIFPGMVEGTVKMVGASQGAMSGVRFLGKIKVGELFLYCKIFGVRHFPPRGF

SEQ ID NO: 157248 - protein, 95 aa, Glycine max
  unsure (1)..(95): unsure at all Xaa locations
  Clone ID: PAT_MRT3847_113015C.1.pep
XTSTLNFXEPIXNNGGXYLCHXDXNPRHQTRSLFYDSXSKPNNFXXSNXYXXFNPXXGXFYXCYKKCCXCXCXXHSFHFXSKVYTFSSHTXFRYR

SEQ ID NO: 157249 - protein, 61 aa, Glycine max
  Clone ID: PAT_MRT3847_113016C.1.pep
KDIQEERPTKERIDDRHYMYKELNLGMLCDQFQLKQNCISLIECNLFKECKMYSRIMNIYF

SEQ ID NO: 157250 - protein, 55 aa, Glycine max
  Clone ID: PAT_MRT3847_113017C.1.pep
GGGHPFRANALAYLARFCRNLKVLNLWGCVKAASDTALQAFGQYCIQLQSLNLGW

SEQ ID NO: 157251 - protein, 174 aa, Glycine max
  Clone ID: PAT_MRT3847_113018C.1.pep
FWIKCIAKGSIVPLNLILSSIISIFLLSQIWIRYQHNDVLNTRCGSPGYVAPELLLSKGYDGAAADVWSCGVILFELLAGYLPFNDRNLMNLYGKIWKAEYRCPPWFTQNQKKLIAKILEPRPVKRITIPDIVEDEWFQTDYKPVFASEFDQNINLDDVDVAFNSIKENIREST

SEQ ID NO: 157252 - protein, 90 aa, Glycine max
  Clone ID: PAT_MRT3847_113019C.1.pep
KGKGKFVLYSISRTVLVALTNFLCEKIIVPIFMCNGFLSPFLFLAANCSSFISKAFSHLPLNEVSASELVVPFFHGQPKAARRLWWVSGN

SEQ ID NO: 157253 - protein, 56 aa, Glycine max
  Clone ID: PAT_MRT3847_11301C.1.pep
FQRNLGLKRLINNTEYYTTCKICNKKKRFGMREKKIKKDPVSLFQPKNLQLPNHMC

SEQ ID NO: 157254 - protein, 48 aa, Glycine max
  Clone ID: PAT_MRT3847_113020C.1.pep
QGPSLPSCRFPGALASNGIRLHTTVTTPVLPGQFSRLLHLVRVLKRHC

SEQ ID NO: 157255 - protein, 84 aa, Glycine max
  Clone ID: PAT_MRT3847_113021C.1.pep
FVILMFFFPPRFIFYTRFGNQQKLKRKIMEMKIDLIMLQTLNHAQVLIQRNQRSLRQVIKLEAESNIKIFKSTKQISNLEGLRC

SEQ ID NO: 157256 - protein, 80 aa, Glycine max
  unsure (1)..(80): unsure at all Xaa locations
  Clone ID: PAT_MRT3847_113022C.1.pep
MSSFTAAMVYVKEKXSKAYFKRYQVKFNRRREGKTDYRARIRLINQDKNRYRTPKYRFVVRFSNKDIVAPIMSASIAGDI

SEQ ID NO: 157257 - protein, 146 aa, Glycine max
  unsure (1)..(146): unsure at all Xaa locations
  Clone ID: PAT_MRT3847_113023C.1.pep
MSARSEHQSVPLSVLLKRELANEKIEKPEVVILHGQASENKKGEDFTLLKTECQRVLGDGVSTYSVFGLFDGHNGSAAAIYAKENLLNNVLSAIPSDLNRDEWVAALPTALVAGFVKTDKDFQEKAXTSGTTVTFMIVERWVLTVA

SEQ ID NO: 157258 - protein, 81 aa, Glycine max
  Clone ID: PAT_MRT3847_113024C.1.pep
SLKASTEIPPTIGSATVFYELGYAKLRFTPYAYQFRSSNALHVSCCQCPFRVRKCCLVIGINVSTCMWILVVLIFNIRFMV

SEQ ID NO: 157259 - protein, 110 aa, Glycine max
  Clone ID: PAT_MRT3847_113025C.1.pep
MAWLQLQRIVTKGGANLISPLPLSRFFSKSSSPYVVKVGIPEFLNGIGKGVESHVPKLESEIGDFQKLLLTRTLKLKKLGIPCKHRKLILKYTHKYRLGLWRPRVESINA

SEQ ID NO: 157260 - protein, 68 aa, Glycine max
  Clone ID: PAT_MRT3847_113026C.1.pep
KRGLFLSRHNQLLACPKYRNIDPLGRGGHSRGQLFIPTGGAPPFFRLKTGRAFLTRIYPITLTGGNTP

SEQ ID NO: 157261 - protein, 76 aa, Glycine max
  Clone ID: PAT_MRT3847_113027C.1.pep
PRSQERTPPSLEPTQPILDTKNHSISADYFTGHYEGEGRLLFVQVTYFPKNCLFDSEYIGRTLGHMIEDFGGQFNI

SEQ ID NO: 157262 - protein, 86 aa, Glycine max
  Clone ID: PAT_MRT3847_113028C.1.pep
RLAMDVSLGVYCPLLGLHDNMALTVAHAQFFPFRWAPKSKLASVVGSQCASSPFGVKNPNCNRPETFDLHPNTLAYHIHAFQFRKH

SEQ ID NO: 157263 - protein, 83 aa, Glycine max
  Clone ID: PAT_MRT3847_113029C.1.pep
EMFIRALDKAVFPDALGDEGGLFSVDVVRVSASASAAVHAQSVVSGTTVTQSQCCFAVSSQTDSTLGSHNVRVFSLAPPQVVL

SEQ ID NO: 157264 - protein, 49 aa, Glycine max
  Clone ID: PAT_MRT3847_11302C.1.pep
NGFTIFFYFFFFFFMYFRFIFFIFFYFFSLFFLFFFFLIFFIFIVFIFF

SEQ ID NO: 157265 - protein, 268 aa, Glycine max
  unsure (1)..(268): unsure at all Xaa locations
  Clone ID: PAT_MRT3847_113030C.1.pep
ASRSNLYITSPRLREDDRRGNNDYLPTLFKANYPPYGRDFSNHQPTGRFCNGKLATDITAETLGFKSFAPAYLSPQASGKNLLIGGNFASAASGNDEKAAILNHAIPLSQQLKYYKEYQGKLAKVVGSKXAALIIKNALYILSAGSSDFVQNYYVNPLINKVFTPDHYSAYLVGAFSSFVKXGARKIGVTSLPPLGCLPAARTLFGFHEKGCASRINNDTQGFNKKIKSAAANLQKQLPGLKIVVFDTFKPLYDLVQSPSKFGKQYFG

SEQ ID NO: 157266 - protein, 116 aa, Glycine max
  Clone ID: PAT_MRT3847_113031C.1.pep
MQMGGLQVLHQNQWVDVPPVHGSLVVNIGDLLQLITNDMFVSVYHRVLSRYTGPRISVASFFANSSPQSSSKVVGPIKELLSEDNPPVYRDTTVKDVAAHYFEKGLDGNYLQPFRL

SEQ ID NO: 157267 - protein, 65 aa, Glycine max
  Clone ID: PAT_MRT3847_113032C.1.pep
VGDFSELADPGPVFINERVGLLGLTSGSADSLRETVSSKETTDLFTSALGVFELAPFYHHDHAST

SEQ ID NO: 157268 - protein, 375 aa, Glycine max
  Clone ID: PAT_MRT3847_113033C.1.pep
MVATSTNQSELETSKKDSTYDRIAEVKAFDETKLGVKGLFDSGITKIPRMFHHAKVEDHTETMPNDSNFSVPIIDLQDIDTNSSLRVKALDKIRSACKEWGFFQVVNHGIAVDLLDEMICGIRRFHEQDAEVRKRFYSRDMNKKVRYFSNGTLYRDPAANWRDTIAFFRTPDPPNPEEIPSVCRDIVIGYSEKVRALGFTIFELFSEALGLHSSYLKELDSVDGQFLLCHYYPPCPEPELTMGTSKHTDISFMTILLQDQMGGLQVLHQNQWVDVPPVHGSLVVNIGDFLQLISNDMFVSVYHRVLSSHTGPRISVASFFANSFQQSSLKVVGPIKELLSEDNPPIYRDTTVKDVKAHYFEKGLDGNNSLHPFRL

SEQ ID NO: 157269 - protein, 109 aa, Glycine max
  Clone ID: PAT_MRT3847_113034C.1.pep
LIFPHHENEIAQSWAADHDSHVSYWMHNGHVTNNNEKMSKSLGNFFTIRQITERYHSLALRHFLISAHYRSPLNYSISQLENSSDAIYYIFQVSSLQNCVRNSVLLLKS

SEQ ID NO: 157270 - protein, 81 aa, Glycine max
  Clone ID: PAT_MRT3847_113035C.1.pep
NQSFACRSWEKVYEGNFLIFFLSDVGDRRDGVGGGVLLKLERESFSSGARNLSLNVLVDFTFLIEGKAYVDIRNFGFGSSR

SEQ ID NO: 157271 - protein, 358 aa, Glycine max
  unsure (1)..(358): unsure at all Xaa locations
  Clone ID: PAT_MRT3847_113036C.1.pep
KLFGPCEWERFDLLVLPPSFPYGGMENPRMVFLTPTVIKGDATGAQVVAHELAHSWTGNLITNKILEHFRLNEXFTTYAERRIVEAVQGEQRAALNIGIGWRGLNEDVERFKDNLEFTKLKNNQEGIDPDNVYSQVPYEKGFQFLWRIERQVGRPAFDEFLKKYIATFKFKSIDTETFLDFLKANIPGIENQIDLLLWTEGTGIPPDAYEPESTAYKTIVSLANEFTNGRMPREDEVAGWQGQEWELYLDNLPKSIEASQVIDLDSRYKLSESKDYEVKVSFLQRAISCGCKTYYNEVEKTLKGVGRMKYLRPLYTALVKGSGKEDGKVFAKXIFSEARECYHPIAQGVVEAIFAKHL

SEQ ID NO: 157272 - protein, 78 aa, Glycine max
  Clone ID: PAT_MRT3847_113037C.1.pep
VPEQCSFPNEFTLLVKFGFLKKKKKKKKKKKKKKKKKKKKKKKKKKKKKKKKKKKKKKKKKRGGPFKRFFFNDPGQAR

SEQ ID NO: 157273 - protein, 35 aa, Glycine max
  Clone ID: PAT_MRT3847_113038C.1.pep
MAVKGEGPALGIDLGTTYPCVGVWQHDRVDIIAND

SEQ ID NO: 157274 - protein, 97 aa, Glycine max
  Clone ID: PAT_MRT3847_113039C.1.pep
MAPNSQQHEKCRCPLLLLLLLLLQQMQTPLTQRCQLHKVSEPKHHYQIQIQTSPKPNIPLIINNPMITHVTTMLHHHRRHQIPRLKAMRPICCFGIK

SEQ ID NO: 157275 - protein, 112 aa, Glycine max
  unsure (1)..(112): unsure at all Xaa locations
  Clone ID: PAT_MRT3847_11303C.1.pep
IVIDINGHDPGIPGSGTVVDHKIVRCGLVECIRRELRRHFLVLHEKPXEFVVISMYTYXMMPNGVDGIKKRQLREXGARKTISDPDMKAWRALGTWTKNKGGERKKELKQGR

SEQ ID NO: 157276 - protein, 97 aa, Glycine max
  unsure (1)..(97): unsure at all Xaa locations
  Clone ID: PAT_MRT3847_113040C.1.pep
ETEDYYLVGKGGMTCVYSEPAHGERGQQHCKPALCCEARYSTLLELAVAGWAVAPEVKNEHXEALTAYPNGFIRIIGFDNVRQVQCISFIAYKPPGF

SEQ ID NO: 157277 - protein, 60 aa, Glycine max
  Clone ID: PAT_MRT3847_113041C.1.pep
KKNHSALILPPPGIILLFFTREGRGGTIIYLVSYFLTLPMVEPLNQLRAPFIGLPTFKVF

SEQ ID NO: 157278 - protein, 82 aa, Glycine max
  Clone ID: PAT_MRT3847_113042C.1.pep
FLSLCYYCTLPPVSNVKCDLAPDAWNFRFTICAPLGSNRCDSSPVPLLVSSPQPHRPVYHNLMLCASLLPNLHSFALCSIAY

SEQ ID NO: 157279 - protein, 41 aa, Glycine max
  Clone ID: PAT_MRT3847_113043C.1.pep
AVLTYTNSGNLGDFLKQICLSLLQLKRILQNYIDKTSLIGN

SEQ ID NO: 157280 - protein, 418 aa, Glycine max
  Clone ID: PAT_MRT3847_113044C.1.pep
QIEYDEEKQTSKDRWGGLAYDTSDDQQDITRGKGMVDTLFQAPMESGTHYAVMSSYDYISAGLRQYNLDNTMDGFYIAPAFMDKIVVHITKNFLNLPNIKVPLILGIWGGKGQGKSFQCELVFAKMGINPIVMSAGELESGNAGEPAKLIRQRYREAADIIRKGKMCCLFINDLDAGAGRLGGTTQYTVNNQMVNATLMNIADNPTNVQLPGMYNKEENPRVPIIVTGNDFSTLYAPLIRDGRMEKFYWAPTRDDRIGVCQGIFRTDGVLKEDIIKLVDTFLGQSIDFFGALRARVYDDEVRKWISGVGVENIGKKLVNSKEGPPTFEQPKMTLSKLLEYGNMLVQEQENVKRVQLADKYLNEAALGDANDDAIKTGNFYGQGAQQVHVPVPEGCTDPTAENYDPTARSDDGSCTYKF

SEQ ID NO: 157281 - protein, 119 aa, Glycine max
  unsure (1)..(119): unsure at all Xaa locations
  Clone ID: PAT_MRT3847_113045C.1.pep
LSYLVLLLAALSISPRVIANYENPPVHKXSTAKPPDYTPAVAXPSVYKPTVENPAFNECSDAKPLRYKPPVEKPAAYKPSAEKPPVCKPPGEXPPVCMPPQAKPPSYMTQGEKPRVYKP

SEQ ID NO: 157282 - protein, 34 aa, Glycine max
  Clone ID: PAT_MRT3847_113046C.1.pep
KNTGKLRLVPRRTAQIKAQLTHCSHQKLKRASIC

SEQ ID NO: 157283 - protein, 52 aa, Glycine max
  Clone ID: PAT_MRT3847_113047C.1.pep
PALGFPLKGFQSVLKPWLSNQGIFFLFPIKIVSILPPLQVVACRTSFLCAKC

SEQ ID NO: 157284 - protein, 46 aa, Glycine max
  Clone ID: PAT_MRT3847_113048C.1.pep
PINYHFGEPIESSFLFFSSGITLFCYSPPFLFCFYASSNFLRSCFF

SEQ ID NO: 157285 - protein, 68 aa, Glycine max
  Clone ID: PAT_MRT3847_113049C.1.pep
DWNHAGNCAKKKNTTNNTNNKKHGDTTNNNDGTKTGAEKKFKAHTPSQSVPKNETIGSYMFDCNKDAM

SEQ ID NO: 157286 - protein, 154 aa, Glycine max
  Clone ID: PAT_MRT3847_11304C.1.pep
MASALSSRVESVRNSPFLRFSLNFIRALSSSSSSSSAVSSAENLKKSKRRKKKNLFEVAQFLPNWGIGYHMAKTHWNEVSYEITKINLYKDGRHGKAWGIAFKNGLPLADAPKKISGVHKRCWRYIPNVVKALESSTNLTSSTDSGLKVETEAS

SEQ ID NO: 157287 - protein, 77 aa, Glycine max
  Clone ID: PAT_MRT3847_113050C.1.pep
FLLFSQSASKFLFEVWISFVCFISWCVVYDQAGQYYPFGYKDLLFVTMLWHYSLNAVSLTKYKFLTVQCKLLSKSSK

SEQ ID NO: 157288 - protein, 66 aa, Glycine max
  Clone ID: PAT_MRT3847_113051C.1.pep
FQESLNCSLLFWVRFLTGRKTTLCAGHRLRELFSFAFLVYLLNTLLFDIGLRVRFKLVLCLFQSSG

SEQ ID NO: 157289 - protein, 106 aa, Glycine max
  Clone ID: PAT_MRT3847_113052C.1.pep
AILSILERSLTLLPGLYSKSTTMSPQRQQPQKKGKRETEDSKPFPFLKAGLQSRRRSSLPRPALRPARWLRFPGIYRGLEYLAASLELRERCRTQKTDRPRHIQLR

SEQ ID NO: 157290 - protein, 296 aa, Glycine max
  Clone ID: PAT_MRT3847_113053C.1.pep
MESMTTRLFLFAGTLLLLLLSRATHVSSATLCPPCGNTTVPFPLSTTPTCGDPSYKIRCSSSNTLVFDTLNNSYPIESIDPNSQRFVIRPAPLLTNTCVSTDKVHQGIQLNTTLPFNITSSNTIVYLNCTTTLLQSPLNCSAASACHSYIKATASAAACQGAGPLCCTYRTGGSSNSYMLRVRDSGCSAYSSFVNLNPALPVNRWPEPGLEIQWLSPKETVCGSQQDCDSATSTCGPDASSALGIRRCFCNDGLVWDPIQGVCAKKITCHNPGGCDDSTSRTAIIAGSVCGGWELH

SEQ ID NO: 157291 - protein, 35 aa, Glycine max
  Clone ID: PAT_MRT3847_113054C.1.pep
HQSWHRQTPLVRSYRVHPSHFYLVRTRLRLVERVR

SEQ ID NO: 157292 - protein, 191 aa, Glycine max
  Clone ID: PAT_MRT3847_113055C.1.pep
MGLSLLRWVLPLTLLLTCALGFQSDELLLDDEEFGIEGGRTSFDSDSHPPSTASTSRKRLSDSSSDSKIQFPLQHAFGDSDFSDAGNFSARLKTWSHGAQTLTKLRFKRDLLTDVEQRKFKELLREDDFYRIRLPSNVLSPPGREYIISSVKARCLPGDGLEEHFVIQMEGVNILAVSYGAPGACPYPRQL

SEQ ID NO: 157293 - protein, 310 aa, Glycine max
  Clone ID: PAT_MRT3847_113056C.1.pep
MGVLLFRWVLPLTLLLTCALGFQSDELLLDDQEFGIEGGRASFDSDSHPSPTSTLRKSFSDSSSDSKIHFPLQHAFGDSDFSDAGNFSARLKTWSHGAQTLTKLRFKRDPLTDVEQKKFQELLQGDDFYTIRLPSNVLSPPGREYIISSVKARCLPGDGLEEHFVIQMEGVNVLAVSYGAPGACPYPRHLKLPAKWSFKSHTVLKSSEQAPRAPIFAEEALGGQEGDGEAVQPIERSFWAKYWMYLIPLGLIVMNAVTQAMNMPEEQAGGQPGAPIQQQPGSAVMVPQGLALILGISSFLQRGLSSHTQF

SEQ ID NO: 157294 - protein, 140 aa, Glycine max
  Clone ID: PAT_MRT3847_113057C.1.pep
MTTTFATVAGLGGASLSSTSSRLTSGFVKSPVSARNPLRKAVAMGNGRVTCFERNWLRADYSVIGFGLIGWLAPSSVPAINGKSLTGLFFESIGAELAHFPTPPALTSSFWLWLVTWHLGLFICLTFGQIGFKGRTEEYF

SEQ ID NO: 157295 - protein, 173 aa, Glycine max
  Clone ID: PAT_MRT3847_113058C.1.pep
MTTTFATVPAPTSDSETLRHSTFSTPNPKSRAKMTTTFATVAGLGGALLSSTSSRLTSGFVKSPVIARNPLRQAVAMGNGRITCFERNWLRADYSVIGFGLIGWLAPSSIPAINGKSLTGLFFESIGAELAHFPSPPALTSSFWLWLVTWHLGLFIVLTFGQIGFKGRTEDYF

SEQ ID NO: 157296 - protein, 140 aa, Glycine max; identical to SEQ ID NO: 157294
  Clone ID: PAT_MRT3847_113059C.1.pep

SEQ ID NO: 157297 - protein, 75 aa, Glycine max
  Clone ID: PAT_MRT3847_11305C.1.pep
MQPTAALTMAEDLTQIAHLLDQTLSPDAIAVPAATDALDRLSLTPHFPFYLLSISTGAGNQGQKIAAATYLKNLI

SEQ ID NO: 157298 - protein, 92 aa, Glycine max
  Clone ID: PAT_MRT3847_113060C.1.pep
SSRFGSRVLKLLGEEQLLVCCLYFFQWMRSQEPSLVTPRACTVLFPLLGKARMGDKLMLLFTNLPSGREFRDVHVYNAAISGLLSSGRCEDA

SEQ ID NO: 157299 - protein, 61 aa, Glycine max
  unsure (1)..(61): unsure at all Xaa locations
  Clone ID: PAT_MRT3847_113061C.1.pep
ALVRALTAATVWVISXDTCEAAIPFGGYGLSGPATEKGLFSLATYSPVKPVVTSMRXPAWL

SEQ ID NO: 157300 - protein, 38 aa, Glycine max
  Clone ID: PAT_MRT3847_113062C.1.pep
PLIYSQLSMGDHLTVAFHQVICSIRTLYAQCRFRFIST

SEQ ID NO: 157301 - protein, 80 aa, Glycine max
  Clone ID: PAT_MRT3847_113063C.1.pep
MSLLEELLKFSPIPLEPEQAKVLIAKALGYSIIIASSLIKLPQLFKIVQARSGAGINFYGQALELFAYSLNCGYSFAKLY

SEQ ID NO: 157302 - protein, 56 aa, Glycine max
  Clone ID: PAT_MRT3847_113064C.1.pep
AQSKNFGGGNLRNPGFFRWLLTPRPTFYSGWKKKTTGGFQSLSYLAVLFNSMPWII

SEQ ID NO: 157303 - protein, 163 aa, Glycine max
  Clone ID: PAT_MRT3847_113065C.1.pep
MAQQDAQNGGSENAAAAVSFVALKPQLLIEAPKANDAVLFYKAAFAAEEVGRTLNPKRKAEHELPLILSAELKIAGSTILVADLVDDSASTAKAGGNRVVLCLETEDVEGAIEKAVSAGAVADGEVAEGENACCGGRVGKVKDPYGFVWLFCAPGKKCADVEA

SEQ ID NO: 157304 - protein, 95 aa, Glycine max
  Clone ID: PAT_MRT3847_113066C.1.pep
FHHKFATGTRFIAWRSVVYHFWRPIRVSCKPSSSGSEPPFHSNEYSTIPIRSLTRLTERLPRRRSASATPDSPEYPQDIPRNTTSEIPFITDLIQ

SEQ ID NO: 157305 - protein, 53 aa, Glycine max
  Clone ID: PAT_MRT3847_113067C.1.pep
RGFHLFKDRLIPIYIFALVLSLKKYMVINLIWNPKKIPLRKNMAYCTIKRAKF

SEQ ID NO: 157306 - protein, 59 aa, Glycine max
  Clone ID: PAT_MRT3847_113068C.1.pep
SFLLSIYRVAELFIKVNITSAFLSIDAAVCLFYSLDTLLIGCLTSHLFPPTLKFNPLFV

SEQ ID NO: 157307 - protein, 41 aa, Glycine max
  Clone ID: PAT_MRT3847_113069C.1.pep
SSVSTVDAKGVHCANDEVRLSKHPFVSQHSFLYMYCTYIRS

SEQ ID NO: 157308 - protein, 77 aa, Glycine max
  unsure (1)..(77): unsure at all Xaa locations
  Clone ID: PAT_MRT3847_11306C.1.pep
MKYDNPEQILEEFFPLRLEYYERRKNHILNNLERLLLILXNKARFILGVVNGEIIVSNRKKADLLIELQQKGFTPMP

SEQ ID NO: 157309 - protein, 101 aa, Glycine max
  Clone ID: PAT_MRT3847_113070C.1.pep
TSLKVKLIAIVHRKIREFQVSEASPEPMTESPLSAPQGAPSPSYTDCSFKPLAEQNSRLIHHFGSFLYQHESETVTKHFTVYRLGSVFTIDRSRLSFDQQV

SEQ ID NO: 157310 - protein, 104 aa, Glycine max
  Clone ID: PAT_MRT3847_113071C.1.pep
TKRDIMSLCQFFGFFHIIRAFHTYIVFIIISASRNGSLKYTCVTILNFHCNSIILSHYRISDYSRINFIYLFSLSRILILSSRYYHLLQDRRRSTEGIILFLCT

SEQ ID NO: 157311 - protein, 352 aa, Glycine max
  Clone ID: PAT_MRT3847_113072C.1.pep
MDNIYIKQALVLKEVKHVFQKLIGEDPMESMYMVDTIQRLGIEHHFEEEIEAALQKQHLIFSSHLSDFANNHKLCEVALPFRLLRQRGHYVLADVFDNLKSNKKEFREKHGEDVKGLISLYEATQLGIEGEDSLDDAGYLCHQLLHAWLTRHEEHNEAMYVAKTLQHPLHYDLSRFRDDTSILLNDFKTKREWECLEELAEINSSIVRFVNQNEITQVYKWWKDLGLNNEVKFARYQPLKWYMWPMACFTDPRFSEQRIELTKPISLVYIIDDIFDVYGTLDQLTLFTDAIKRWELASTEQLPDFMKMCLRVLYEITNDFAEKIYKKHGFNPIETLKRSWVRLLNAFLEEAH

SEQ ID NO: 157312 - protein, 56 aa, Glycine max
  Clone ID: PAT_MRT3847_113073C.1.pep
NFSRFLILGFDFSFLLSLPKTPILRYFLSLFKQEHSILKWILCLRVTFPSQHQSNE

SEQ ID NO: 157313 - protein, 204 aa, Glycine max
  Clone ID: PAT_MRT3847_113074C.1.pep
MANQNTLPLYDKYWVKHTLSRVMDSLTLLLLLLLLGYRINIFSHSNYTFPCLVAFICESWFTFFLILVISTKWSPAYTKTYIHRLLLRVPEGELPAVDLFVTTADPVLEPPIITINTVLSLLALDYPHNKLACYVSDDGCSPLTFYALIEAFQFAKLWVPFCKKYNIQLRVPFRYFSNNTSTDNNEDTPEFMQDWLKMKNEYER

SEQ ID NO: 157314 - protein, 37 aa, Glycine max
  Clone ID: PAT_MRT3847_113075C.1.pep
AAALFLFCYLKFGYILLLHKFLVSYHFMSTSDRQLVT

SEQ ID NO: 157315 - protein, 132 aa, Glycine max
  Clone ID: PAT_MRT3847_113076C.1.pep
GNCLTLCYAILKRKDLKGESGFVNAAKVIEKSVSDMKIDPFKDAEHWRELFLKMFVLGSALLVTGSPKLTVYETDFGFGRPTKVEMVHPFNCMSLAESEDEEGGLEVGLVCRSTEFEDLNSVIQQGLKTSKS

SEQ ID NO: 157316 - protein, 145 aa, Glycine max
  unsure (1)..(145): unsure at all Xaa locations
  Clone ID: PAT_MRT3847_113077C.1.pep
NTQKYGNTNIEGVDSTNACYGGTAALFNCVNWVESSSWDGRYXLLVCTDTCVYAEGPARHTGGAAAVAMLIGPNAPIAFESKLRGSXMAHAYDFYKPNLASEYPVVDGKLSQTCYLMALDSCYNHLSHKYDIQEGMQFSISDAEY

SEQ ID NO: 157317 - protein, 239 aa, Glycine max
  Clone ID: PAT_MRT3847_113078C.1.pep
LTSDAGEVLLRELEAARAKEKEMKKKRKQEIKAKLKASKMNCESSSSSSSESSDSDGDCDQVVDMNCFRAGAGVVVPAPVEESPLPKTPIVEDTNAKAHRDAMALCSKNDISVSSVRDCIKSESAVVTAAPQKRIEVCMGTKCKRSGAAALMQEFERVVGVEGGAVVSCKCMGKCKTAPNVKVQNSVDHSLARGLDDSVNIPANPLCIGVGLGDVDAIVARFLGESHTDIGMIGAATAT

SEQ ID NO: 157318 - protein, 74 aa, Glycine max
  Clone ID: PAT_MRT3847_113079C.1.pep
GPLCSHAPLKDAIRDAPSLALSDVHPVRNACIRSQYLSFAEHFREPEVHICNPLGSFRGGRGEFADDLHCVLDV

SEQ ID NO: 157319 - protein, 399 aa, Glycine max
  Clone ID: PAT_MRT3847_11307C.1.pep
MALQAASLVPASFSVLKEGKSGVSLKDSTLFGLSFSEPIKANFSSSALRCKREFEQKLCAVRAETVATASPAVTKSTPEGKKTLRKGSVVITGASSGLGLATAKALAETGKWHVIMACRDYLKAARAAKSAGMAKENYTIMHLDLASLDSVRQFVDNFRRSEMPLDVLVCNAAVYLPTAKEPTFTAEGFELSVGTNHLGHFLLSRLLLEDLEKSDYPSKRLIIVGSITGNTNTLAGNVPPKANLGDLRGLQGGLNGLNSSAMIDGGDFDGAKAYKDSKVCNMLTMQEFHRRFHEETGITFASLYPGCIATTGLFREHIPLFRTLFPPFQKYITKGYVSEDEAGKRLAQVVSDPSLTKSGVYWSWNKASASFENQLSQEASDTEKARKIWEISEKLVGFA

SEQ ID NO: 157320 - protein, 105 aa, Glycine max
  unsure (1)..(105): unsure at all Xaa locations
  Clone ID: PAT_MRT3847_113080C.1.pep
LLFAGHLLYHQFWKAKPSSFKELGLRTSIGATKLKVIKAAARSDTEVVSESTKGGGLRGKLNKVVLAYSGGLDTSVIVPWLTENYGCEVVCFTADVGQXIKELEV

SEQ ID NO: 157321 - protein, 97 aa, Glycine max
  Clone ID: PAT_MRT3847_113081C.1.pep
VSQSAIVLEILAGVFSLLLGQCQTSVSRPIFDPFPVASFLKKLGVGHPCISVIPSPRMSAPLLQPCRRLQFVVYLCPLEKITHRVLFVPLNKGQFFV

SEQ ID NO: 157322 - protein, 46 aa, Glycine max
  Clone ID: PAT_MRT3847_113082C.1.pep
MNAVIDFQGKAKCDFLQQQEEDPIISQLEKQEAYSSPRKIYKIKNK

SEQ ID NO: 157323 - protein, 119 aa, Glycine max
  Clone ID: PAT_MRT3847_113083C.1.pep
ANTIPFLISKQALARLRFSDTVAQSDVDEALRLMQMSKFSLYSEDRQKSGLDAISDIYSILRDEAARGNRMDVSYAHALNWISRKGYSEAQLKECLEEYAALNVWQIHPHTFDIRFIDA

SEQ ID NO: 157324 - protein, 97 aa, Glycine max
  unsure (1)..(97): unsure at all Xaa locations
  Clone ID: PAT_MRT3847_113084C.1.pep
SQDCENWNSACTKAMTMSFXANPCFDAWRREYLKRADYDXRWTCLTGKTGPSHACMDMDTIGRVXITDKEGATRTYGVINAQNACVPNRWLRKLTLR

SEQ ID NO: 157325 - protein, 72 aa, Glycine max
  unsure (1)..(72): unsure at all Xaa locations
  Clone ID: PAT_MRT3847_113085C.1.pep
LDAIIESRNLWFRSMVPQSRSFQRYKFSCTVDGTCWYSATRPXLNVLISCHCIDCSIIFLFNEYFSVAYACG

SEQ ID NO: 157326 - protein, 102 aa, Glycine max
  Clone ID: PAT_MRT3847_113086C.1.pep
KGREQKILKTPDVQTLQTRALLCLVMGWVRVPGPCFLEYECQPKGELGNKKYSSPLDLGFTILWAIGNPQSGEQPIGSCPLEARNIIFVWDLMEMKEFVVGG

SEQ ID NO: 157327 - protein, 575 aa, Glycine max
  unsure (1)..(575): unsure at all Xaa locations
  Clone ID: PAT_MRT3847_113087C.1.pep
MLCLGFDMVEVDSERLKLESRGVGIWLRIACGWLVFMLFFSPVAGLRPLSYRTNSWGDEWVFTRKDESDLGPFSQWNISGTYRGNWKFLDTTNGSTXFPDIRKINGNSVIELVSMPTKITGVHYVQGVVIFHDVFDNEYNVGGAQIRVEGVYIWPYRQLRMVANSGKEVGLNQDGDYILSNPYHLLGVFSSQVFQESSQHKMWRRKHSPLHGMEKHCNVEIAAHVSRLSSSKHEGEHDSFQLEGLMESPSVDDDGYSVCNLIIYSTLTKIDXYAYKALNYXLMFTFISFLHVAAILLLQEYRNTQSGAAKVSILMIGQQAIVDAYLCLTHLTAGILVESLFNAFATAAFFKFVVFSIFEMRYLLAIWKASRPLSNGEGWETMRRELSVLYSRFYGILLGGILLMYEFHNHLRPILLLVYSFWIPQIITNVIRDSRKPLHPHYILGITVTRLAIPLYIFGCPNNFLHIEPDQSWCVCLAIFVGLQAAILLLQHYFGSLWFIPRQFLPEKYCYYRRFAQDTNHATDCVICMTAIDLSPRSNDCMVTPCDHFFHSGCLQRWMDIKMECPTCRGPLPPA

SEQ ID NO: 157328 - protein, 105 aa, Glycine max
  Clone ID: PAT_MRT3847_113088C.1.pep
EVKKIIKKRGGGNLSGPFGTPHPGKIWVKKKGHWHANWTIQRRGQFPLFWPQPNFGHKKTGTFTDTTNFFSFHILHGKLPIIKFHSFGEPWDWTLTNFIRGQSHP

SEQ ID NO: 157329 - protein, 129 aa, Glycine max
  Clone ID: PAT_MRT3847_113089C.1.pep
KGREILKGGPKNKASPPLNCFPKSCSPRRLILGFFSSEGRKIFLQLVSPKCRSFSPGRPILNFYSSEGKILLLFDSGFYPFPLVILDLRPWKTPVAETPLGFPKSLINLCGPNKMFSKGPNLKKKLGAP

SEQ ID NO: 157330 - protein, 106 aa, Glycine max
  Clone ID: PAT_MRT3847_11308C.1.pep
NSARDSVLYYLILYRNGVLQRRNSWQDGVYGTNCPILPGHNFTYVLQVKDHIGSYFYYPFLAFHKAAGGYGGFKIESRPGIPVPFPPPAGDFTILAGDWCTRNHTH

SEQ ID NO: 157331 - protein, 287 aa, Glycine max
  Clone ID: PAT_MRT3847_113090C.1.pep
MALPVVVDAEYLKEVDKARRDLRALIANRNCAPLMLRLAWHDAGTYDAKTKTGGPNGSIRNEEEYSHGANNGLKKAIDFCEEVKAKYPKITYADLFQLAGVVAVEVTGGPTIDFVPGRRDSKVSPNEGRLPDAKKGVPHLRDIFYRMGLTDRDIVALSGGHTLGRAHPERSGFDGPWTEDPLKFDNSYFVELLKEDSAGLLKLPTDKALLEDAEFRCYVELYAKDEDAFFRDYAESHKKLSELGFVPSSKPISIKEGTILAQGAVGVVVATAVVILSYLYEVRKRGK

SEQ ID NO: 157332 - protein, 190 aa, Glycine max
  unsure (1)..(190): unsure at all Xaa locations
  Clone ID: PAT_MRT3847_113091C.1.pep
MASSSPPPSLFFLLLLALFAATASCLTCTTQKLTDSNKKLFSNCLDLPSLDSFLHWTHDPANASLSVAFVAAPPNPGGWVSWGINPSGTGMVGAQVLAAYKAEGTGAVTVKTLDLKSYSAIVPGKLSLDVWDMRGEEVRGVIRIFATVKVPDKAESVNQVWQVGPLVTAXRIDRHDFAPPIMPRASLAST

SEQ ID NO: 157333 - protein, 45 aa, Glycine max
  Clone ID: PAT_MRT3847_113092C.1.pep
NYIDHNQQKVLNNFQCTHHLLYIVDVVFVLTADRSMYIHIIIIKR

SEQ ID NO: 157334 - protein, 265 aa, Glycine max
  Clone ID: PAT_MRT3847_113093C.1.pep
MIPRRTSVSVALLRSLSLNTEAEGGEAERGDEAMAPKKPRTTSRNPDLVRGIGKYSRSQMYHKRGIWAIKAKNGGVLPLHDPKPKPEAPAQKPPKFYPADDVKKPLVNKHKPKPAKLRASITPGTVLILLAGRFKGKRVVFLKQLPSGLLLVTGPFKINGVPLRRVNQSYVIGTSTKVDISDVNVDKFDDKYFAKEAKKKKTKGEGEFFEAEKEEKNVLPQEKKDDQKTVDTALLKAIESVPELKSYLGARFSLKAGVKPHELVF

SEQ ID NO: 157335 - protein, 79 aa, Glycine max
  Clone ID: PAT_MRT3847_113094C.1.pep
APLPLYLRIQAQKQTNPNPNPNRNPLIRSWPPMPVTRVASITDLPLQRTWTDPRSVTSTAITAIATATGAKSATKRLNS

SEQ ID NO: 157336 - protein, 232 aa, Glycine max
  Clone ID: PAT_MRT3847_113095C.1.pep
MAPKKPRTTTRNPDLVRGIGKYSRSQMYHKRGIWAIKAKNGGVLPRHDPKPKPEAPAQKPPKFYPADDVKKPLVNKHKPKPAKLRASITPGTVLILLAGRFKGKRVVFLKQLPSGLLLVTGPFKINGVPLRRVNQSYVIGTSTKVDISGVNVDKFDDKYFAKEAKKKKTKGEGEFFEAEKEEKNVLPQEKKDDQKTVDTTLLKAIENVPDLKSYLGARFSLKAGVKPHELVF

SEQ ID NO: 157337 - protein, 125 aa, Glycine max
  unsure (1)..(125): unsure at all Xaa locations
  Clone ID: PAT_MRT3847_113096C.1.pep
EGKGLGAEKPPEATRAKTKVKKRPAPRPPRVGTQFPXGTNPQEVKQKGQTKGPXGPTAVGNWAPIRNNXIVKVLNLQGKLTKNLRGRRTPPRTLQLLTREKEKLKTSTKGTIVGGGGLPQNSTGL

SEQ ID NO: 157338 - protein, 136 aa, Glycine max
  unsure (1)..(136): unsure at all Xaa locations
  Clone ID: PAT_MRT3847_113097C.1.pep
FRSLVREXDRQEGVAHIGEXKAGDYAPLPTKTNLVGTPTEWQPDLPRDKITSGMTTTDERLSGTEHEGNDPFLGGIQKYATPMMPIDEEILYNVAQNMVERRIDCAAEEDSFEEEYIRAPLTGGEGLDYKQRIPLA

SEQ ID NO: 157339 - protein, 42 aa, Glycine max
  unsure (1)..(42): unsure at all Xaa locations
  Clone ID: PAT_MRT3847_113098C.1.pep
TLKAIFHHXIAQITXCDFGLSSQXEVXLPKLLGHGTIEMDIN

SEQ ID NO: 157340 - protein, 55 aa, Glycine max
  unsure (1)..(55): unsure at all Xaa locations
  Clone ID: PAT_MRT3847_113099C.1.pep
DHRMMLFGTKGAGVISTHXYVHKYSIIYTFLKVFIAKNTGEYNLFNTQSYSYRAK

SEQ ID NO: 157341 - protein, 100 aa, Glycine max
  unsure (1)..(100): unsure at all Xaa locations
  Clone ID: PAT_MRT3847_11309C.1.pep
FASLYPGCIATQGLXREHIPLFRTLFPPFQKYITKGYVSEDEAGKRLAQVVSDPSLTKFGVYWSWNKASASFENQLSQEASDTEKARKIWEISEKLVGFA

SEQ ID NO: 157342 - protein, 110 aa, Glycine max
  Clone ID: PAT_MRT3847_1130C.1.pep
FVIYDTKDGTVFVASGSNGQIGLYWGVAADGSIVISENLELIKASCAKSFAPFPNGCMFHSEHGLMSIEHPTKKMKAMPRIDSEGFMCGANFKDPSDAKLIGAHGANKLD

SEQ ID NO: 157343 - protein, 71 aa, Glycine max
  Clone ID: PAT_MRT3847_113100C.1.pep
GLFFVNSLYILVYMGMIGTEKKFTMIQQKRKHKLAEILDRQTGPLNSCQKGKIEATGHYRFLENPRQRGTL

SEQ ID NO: 157344 - protein, 215 aa, Glycine max
  Clone ID: PAT_MRT3847_113101C.1.pep
MMKVWNWYQNCLSVHPVKTQAISSAILWGVGYLSAQYITHSAAKKPLQLSDSDAKFTINWNRLVVTSMFGFGFVGPVGHFWYEGLDKFIRFKLQLKPKSVRSVATKVAMDGIIFGPLHLFVFFTYMGLCAGKNVAQVKDDLKRNYVPALILEGGVWPVVQVFNFWYLPVKYQLLYVNLFCLLDSVFLSWLEQQKDTPWKKWFASFHSTNEKGGRC

SEQ ID NO: 157345 - protein, 85 aa, Glycine max
  Clone ID: PAT_MRT3847_113102C.1.pep
TPASSGKCVFLKTPLNDADVGRNEAFSLLLRVGNCDATRVGTNKIAKQCNCAAVRLSNTRTSPVIYWTDIYFKYDAPHTILVISD

SEQ ID NO: 157346 - protein, 72 aa, Glycine max
  unsure (1)..(72): unsure at all Xaa locations
  Clone ID: PAT_MRT3847_113103C.1.pep
KCTSKLKEXXDATAVPTSLTMXENIKVQKILQGNIXLRGFVLVQNMHLSSKSFFYGLAIFLLMFARGYTLEV

SEQ ID NO: 157347 - protein, 53 aa, Glycine max
  unsure (1)..(53): unsure at all Xaa locations
  Clone ID: PAT_MRT3847_113104C.1.pep
VVLSACGSASTCRWWCLSMVYLRFIPLSLLLRNFVGAKYSFFRTAWVVGGFXG

SEQ ID NO: 157348 - protein, 79 aa, Glycine max
  unsure (1)..(79): unsure at all Xaa locations
  Clone ID: PAT_MRT3847_113105C.1.pep
KEDGALKXLAREFRRPRPDGDNVGPERKEEKAAREGEDSTMGVLGKAHEKEKEAGHFFFGSHGKRTEGELEPPARGAER

SEQ ID NO: 157349 - protein, 93 aa, Glycine max
  unsure (1)..(93): unsure at all Xaa locations
  Clone ID: PAT_MRT3847_113106C.1.pep
ARNSARVRLREDDRKXXGXDFSXXXXLXXSXEXQXXGXNRXXQXRRDXEMKPRLEXEEKXCXXIXXWAHTLYXGIEXXTYSXXXRSXQKXSTH

SEQ ID NO: 157350 - protein, 195 aa, Glycine max
  Clone ID: PAT_MRT3847_113107C.1.pep
GTTRGSAVGFKLDSLLKLSDTRARNNKMTLMHYLCKLLAEKMPELLDFDKDLVHLEAASRIQLKALAEEMQAVSKGLEKVEQELAASENDGAISTGFRKVLKNFLDIAEADVRSLISLYSVVGRSADSLGQYFGEDPARCPFEQVTQILVVFVKMFNKSREENERQADAEKKKLEKEALKERTANNSLSKKDGVR

SEQ ID NO: 157351 - protein, 239 aa, Glycine max
  Clone ID: PAT_MRT3847_113108C.1.pep
MNTLISPPSTNRYLCGVPYSFLSPLRHNNNTNLNLPRFHSTVATNFLSHSPVRATLSARATSDEVDTQTVVEELSEENKVEENTNEDNTNTSTFSAPIDKELKKVAQKTAATFAPRASTATKNPAVPGTVLYSVFEVQGYVSMLLGGALSFNLIFPSDEPDIWRLMGMWSIWMFTIPSLRARDCSKNEKEALNYLFLLVPLINVIIPFFWKSFAVVWSADVVALLGMYAWKFGWLQRTD

SEQ ID NO: 157352 - protein, 50 aa, Glycine max
  Clone ID: PAT_MRT3847_113109C.1.pep
ATRTTSLRFPDNAIPFSGGFDPDTNYQFPNATILTHKAFHHILDQHAIYW

SEQ ID NO: 157353 - protein, 47 aa, Glycine max
  Clone ID: PAT_MRT3847_11310C.1.pep
KRGTEKTLYFKKPPKGEKNIVKGPYLTKKKTPGFFLKKIRGHFKGLF

SEQ ID NO: 157354 - protein, 56 aa, Glycine max
  Clone ID: PAT_MRT3847_113110C.1.pep
SLNSASREKEALNYLFLLVPLINVIIPFFWKSFAVVWSADVVAFLGMYAWKVHTFK

SEQ ID NO: 157355 - protein, 53 aa, Glycine max
  unsure (1)..(53): unsure at all Xaa locations
  Clone ID: PAT_MRT3847_113111C.1.pep
MANAASGMAVHDYCNLRFLELKAXRTHLFIVFKIEEHHKQVIVEKLAQPVQGY

SEQ ID NO: 157356 - protein, 191 aa, Glycine max
  Clone ID: PAT_MRT3847_113112C.1.pep
MEQSGKSFIWIVPEKKGKEYENESEEEKEKWLPKGFEERNREKGMIVKGWAPQLLILAHPAVGGFLSHCGWNSSLEAVTAGVPMITWPVMADQFYNEKLITEVRGIGVEVGATEWRLVGYGEREKLVTRDTIETAIKRLMGGGDEAQNIRRRSEELAEKAKQSLQEGGSSHNRLTTLIADLMRLRDPKSAT

SEQ ID NO: 157357 - protein, 151 aa, Glycine max
  Clone ID: PAT_MRT3847_113113C.1.pep
MATLSTNHCTLQTASKNPSIVATIVKCPSSLRSVKSVSRSFGLKSASSFRVTAMASYKVKLIGPDGTENEFEATDDTYILDAAESAGVELPYSCRAGACSTCAGKIVSGSVDQSDGSFLDDNQLKEGFVLTCVSYPTADCVIETHKEGDLY

SEQ ID NO: 157358 - protein, 87 aa, Glycine max
  Clone ID: PAT_MRT3847_113114C.1.pep
EGNSAKASKVGITPGYHSIGRVRSRPVYWLGLPRHHGANHAPTRCLQSTQYKGHPRACPRKYPAVHSIVCPFFLFFLFFLFFFFFYR

SEQ ID NO: 157359 - protein, 63 aa, Glycine max
  Clone ID: PAT_MRT3847_113115C.1.pep
ESQKPTTDLALRMNDSLNWHWEARLLCYDDDPTPETRLNALPHLAKRNKPKTMCPWIGQVNFL

SEQ ID NO: 157360 - protein, 102 aa, Glycine max
  Clone ID: PAT_MRT3847_113116C.1.pep
TNFPYRYKAKVLSKFRSIAICQSPERCTIKVEQATVLFSNYCDFRFDTSYIRSFFCPQRTLTNGRSVALKGHRRSLDQLVVVLLARPSCEVVEQPCYSSYPF

SEQ ID NO: 157361 - protein, 261 aa, Glycine max
  unsure (1)..(261): unsure at all Xaa locations
  Clone ID: PAT_MRT3847_113117C.1.pep
MDAFLFIVFTFVLSFQTHFAQGSELPRTTSSSKTYIIHVKGPQDKSLDQTEDLESWYHSFMPPTIMSSEEQPRMIYSYLNVMSGFAARLTEEELIAVEKKDGFISARPERILHRQTTNTPQFLGLQKQTGLWKESNFGKGIIIGVLDTGITPGHPSFSDAGMSPPPPKWKGRCEINVTACNNKLIGVRTFNHVAKLIKGAEATIDDFGHGTHTASTAAGAFVDHAEVLGNAEGQXSGIAPYAHLAIYXVCSXVCRESDILA

SEQ ID NO: 157362 - protein, 68 aa, Glycine max
  Clone ID: PAT_MRT3847_113118C.1.pep
LTCLSLIEYGHKSEVQWEKRYTVLASQLACCLVPMTNSSNGHMVLCKIHGLHHVTTYKNGLSIGMGWT

SEQ ID NO: 157363 - protein, 164 aa, Glycine max
  Clone ID: PAT_MRT3847_113119C.1.pep
MPAGHGLRSRTRDSFSRPFRKKGTIALTTYLRTYHVGDYVDVKVNGAVHKGMPHKFYHGRTGRVWNVTKRAVGVEVNKQVGNRIIRKRIHVRVEHVMPSRCTEEFRLRKIKNDQLKAEAKVKGEKISTKRQPQGPKPGFMVEGATLETVTPIPYDVVNDLKGGY

SEQ ID NO: 157364 - protein, 188 aa, Glycine max
  Clone ID: PAT_MRT3847_11311C.1.pep
MALQAASLVPASFSVLKEGKSGVSLKDSTLFGLSFSEPIKANFSSSALRCKREFEQKLCAVRAETVATASPAVTKSTPEGKKTLRKGSVVITGASSGLGLATAKALAETGKWHVIMACRDYLKAARAAKSAGMAKENYTIMHLDLASLDSVRQFVDNFRRSEMPLDVPVCNAAVYLPTAKEPTFTAEG

SEQ ID NO: 157365 - protein, 47 aa, Glycine max
  Clone ID: PAT_MRT3847_113120C.1.pep
QKKKKKKKKKKKKKKKKKKKKKKKKKKKKKKKKKGGEKNKRKKKPRN

SEQ ID NO: 157366 - protein, 83 aa, Glycine max
  unsure (1)..(83): unsure at all Xaa locations
  Clone ID: PAT_MRT3847_113121C.1.pep
KHIGGEYPSIDAAGGDISKCLLAGCNNDQLTIYQPELTGVRNHCXGKNLFFSTDDEKHDSKADIAFDSFNTPTKTNGVQAGKA

SEQ ID NO: 157367 - protein, 262 aa, Glycine max
  Clone ID: PAT_MRT3847_113122C.1.pep
FFSALVQSRQVDRSKKGRVQEALNYYSIESTLALVVSFIINIFVTTVFAKGFYGSELANSIGLVNAGQYLEETYGGGLFPILYIWGIGLLAAGQSSTITGTYAGQFIMGGFLNLRLKKWMRALITRSCAIFPTMIVALIFDTSEESLDVLNEWLNVLQSVQIPFALIPLLCLVSKEQIMGTFRIGAVLKTTSWLVAALVIVINGYLLTEFFSSEVNGPMIGAVVGAITAAYVAFIIYLIWRAITYLPWQSVTQPKTIAHSAG

SEQ ID NO: 157368 - protein, 81 aa, Glycine max
  Clone ID: PAT_MRT3847_113123C.1.pep
LEPIRLEGMGNRAREIKEMAHKAVKDGGSSASNCKLFIQEIVGIHLSNACFMHGACTWCVVCIDTGMPKVVNLASVTIYKS

SEQ ID NO: 157369 - protein, 302 aa, Glycine max
  Clone ID: PAT_MRT3847_113124C.1.pep
MSRSHQEQPLLADSFIEEDEAQETAYDSSEKIVVVGVDESDNEDNWGRVPPFSWKKLWLYTGPGFLMSIAFLDPGNLEGDLQAGAIAGYSLLWLLMWATAMGLLIQLLSARLGVVTGKHLAELCRGEYPPWARRVLWIMAELALIGSDIQEVIGSAIAIRILSHGVVPLWAGVVITALDCFIFLFLENYGVRTLEAFFAVLIGVMAILFAWMFGEAKPSGKELLLGVLIPKLSSKTIQQAVGVVGCLIMPHNVFLHSALVQSRQVDRIKKGRVQEALNYYSIESTLALVVSFIINIFVTTVF

SEQ ID NO: 157370 - protein, 109 aa, Glycine max
  Clone ID: PAT_MRT3847_113125C.1.pep
LNVLQSVQIPFALIPLLCLVSKEQIMGTFRIGAVLKTTSWLVAALVIVINGYLLTEFFSSEVNGPMIGTVVGVITAAYVAFVVYLIWQAITYLPWQSVTQPKTIAHSEG

SEQ ID NO: 157371 - protein, 582 aa, Glycine max
  unsure (1)..(582): unsure at all Xaa locations
  Clone ID: PAT_MRT3847_113126C.1.pep
MARGSRSVGSSSSKWRYCNPSYYLKRPKRLALLFIVFVCVSFVFWDRQTLVREHQVEISELQKEVTDLKNLVDDLNNKQGGTSGKTDLGRKATKSSKEVLDDPIDIERREKVKEAMLHAWGSYEKYAWGQDELQPQSKNGVNSFGGLGATLIDSLDTLYIMGLNEQFQKAREWVANSLDFNKDYEASVFETTIRLLRXVVGGLLSAYDLSGDKVFLDKAIAXASYLRRPMKYFYLLSSPSSVIPLDEXGIHHCITGESILADSGTEQLEFIVLSQRTGDLKYQQKVENVIAQLNKTFPDDGLLPIYINPHSGAAGYSPITFGAMGDSFYEYLLKVWIQGNKTSSIKHYRDMWEKSMKGLSSLIRRSTPSSFTYICEKNGGSLTDKMDELACFAPGMIALGSFGYSADDDSQKFLSLAEELAWTCYNFYQSTPTKLAGENYFFHSGQDMSVGTSWNILRPETVESLFYLWRLTGNKTYQEWGWNIFQAFEKNSRIESGYVGLKDVNSGVKDNMMQSFFLAETLKYFYLLFSPSSVISLDEWVFNTEAHPLRIVTRHEEGLVKNLNEKQKPFSRIGGRKEGRSG

SEQ ID NO: 157372 - protein, 388 aa, Glycine max
  Clone ID: PAT_MRT3847_113127C.1.pep
PKSRVVGGLLSAYDLSGDKVFLNKAIEIADRLLPAWNTPTGIPYNIINLSHGRAHNPSWTGGESILADSGTEQLEFIVLSQRTGDPKYQQKVENVIAQLNKTFPDDGLLPIYINPHSGAAGYSPITFGAMGDSFYEYLLKVWIQGNKTSAVKHYRDMWEKSMKGLSSLIRRSTPSSFAYICEKNGGSLTDKMDELACFAPGMIALGSFGYSADDDSQKFLSLAEELAWTCYNFYQSTPTKLAGENYFFHSGQDMSVGTSWNILRPETVESLFYLWRLTGNKTYQEWGWNIFQAFEKNSRIESGYVGLKDVNSGVKDNMMQSFFLAETLKYFYLLFSPSSVIPLDEWVFNTEAHPLRIVTRHEEGLVKNLNEKQKPFSRIGGRKEGRSG

SEQ ID NO: 157373 - protein, 82 aa, Glycine max
  unsure (1)..(82): unsure at all Xaa locations
  Clone ID: PAT_MRT3847_113128C.1.pep
MQNEEGQITELYIPRKCSATNRLITGKDHASVQINIGHVDENGVYNGHFSTFALWGFIRAQGDADSALXRLWRKKKVEVKQQ

SEQ ID NO: 157374 - protein, 33 aa, Glycine max
  Clone ID: PAT_MRT3847_113129C.1.pep
FGYGPILPPCDVAIVIFKQVVSYVVLAEMYNVH

SEQ ID NO: 157375 - protein, 240 aa, Glycine max
  Clone ID: PAT_MRT3847_11312C.1.pep
MDDGNAELSDKLSDNNVLFLNPESCSSFQASSSSRTCTHTHTCNPPGPDAAHTHTCYHTHTQVFAPEDDGRKHSNSKQKRPSGNREAVRKYREKKKAHTAYLEEEVKKLHMVNQQLVRKLQGQALLEAELARLRSILARLRGKIDSELGAWPFQKQYCNTSYIFKEGDAGLECQKNNLPCFHPHVGSSSQVNICACGKSMIPLDGNCQPEMVDCQVDANNMTSTEGQTVDNIMSSASQDG

SEQ ID NO: 157376 - protein, 63 aa, Glycine max
  unsure (1)..(63): unsure at all Xaa locations
  Clone ID: PAT_MRT3847_113130C.1.pep
HLIVLXSXLXXXRXXNXXXXRXLVXSQXXILLIXSGXXXXXSSLXIYFXSEPNFRXXXSEXTX

SEQ ID NO: 157377 - protein, 56 aa, Glycine max
  Clone ID: PAT_MRT3847_113131C.1.pep
TIYIVLEAFLRPLTEKTNSNLIDYKYFHDKCFLEGCIDDNTQNNYNNTLVKSLSQS

SEQ ID NO: 157378 - protein, 121 aa, Glycine max
  Clone ID: PAT_MRT3847_113132C.1.pep
IVELLHLSLSNYTMTNLKLVFTISSILLALVFINGISSVMGRPLKKEHIITTTYENSVKEMGTVEDNNILLWRRSIIENAANDGGVDKWIDDFRPTDPGHSPGAGHSSPTPKDASNGAPRP

SEQ ID NO: 157379 - protein, 81 aa, Glycine max
  unsure (1)..(81): unsure at all Xaa locations
  Clone ID: PAT_MRT3847_113133C.1.pep
SLNIKLGRQRRRKRVDAVHSVHTPVGESLTDIVRLAKRSHIPEREELFTVAARAAMGNGWMGFVSFFVKLXIFIPINNIMV

SEQ ID NO: 157380 - protein, 68 aa, Glycine max
  Clone ID: PAT_MRT3847_113134C.1.pep
SYSSLFLLSGVGEKAKESAVALELVLQTSPVLGMRMARHASSYISFAGLRGLEYEYYAMVSSSLSSLP

SEQ ID NO: 157381 - protein, 59 aa, Glycine max
  Clone ID: PAT_MRT3847_113135C.1.pep
RERTSLEFFFFFFFFFFKQSKYPRPSLFTNYHILLENYQFIPPIVHMNKLFGPTFPLPL

SEQ ID NO: 157382 - protein, 132 aa, Glycine max
  unsure (1)..(132): unsure at all Xaa locations
  Clone ID: PAT_MRT3847_113136C.1.pep
GCEKTTEGVIDKIKFLLEEECPITVSCADILAMAARDAVELVSTALSQLNWKSYLILIILLLKNNFYCLFLKRGGPRWEVLLGRKDSLESSFGGANXFIPAPNSSSEVFIDNFKQQDLDIEDLVTLLGILLF

SEQ ID NO: 157383 - protein, 109 aa, Glycine max
  Clone ID: PAT_MRT3847_113137C.1.pep
MAVPAERNHNHFSVLIVLFLFLVHNALCIRFPDRIAQPALDPLDQHRLRVAVFALGSFWRSEAVFGCLPGVVRTTVGYAGGSKSNPEYRSLGDHAESVKVEYDPQLISF

SEQ ID NO: 157384 - protein, 141 aa, Glycine max
  Clone ID: PAT_MRT3847_113138C.1.pep
MPFRVRTATASRWWSLHTVFNTHCLCRNLYYSALSKRQFSGNCDDFLQWLERKAACSISSSLFIGNSSYGRSLFASKIIQTGDCILKVPYRVQITADNLLPEIRSLIGEEVGNIAKLATVILIEKKLGQGSEGDAYMEWAA

SEQ ID NO: 157385 - protein, 128 aa, Glycine max
  Clone ID: PAT_MRT3847_113139C.1.pep
PTRPEDSDIEERDVESFLEFLYKGKDDSLAIPTCIPSAVTKFRANGIGTICGRFYIGTAEKIPDSELIDTTGAGDAFIGAIMYAICANMVPEKMLPLAAQVAAAKCRALGARTGLPRRTDPHVVSFLH

SEQ ID NO: 157386 - protein, 313 aa, Glycine max
  Clone ID: PAT_MRT3847_11313C.1.pep
MAPVTPRTAFPKVLIERDSDSEQSSSEEEEEEEEEEKLDEEEEVGVSTANEKTEKLELGSDANRKGKAPITISLKKVCKVCKKPGHEAGFKGAAYIDCPMKPCFLCKMPGHTTLTCPHRVSTEHGVVPAPRRKACKPLEYVFERQLRPSLPSIKPKYVIPDQVNCAVIRYHSRRVTCLEFHPTKNNILLSGDKKGQLGVWDFGKVYEKVVYGNIHSCLVNNMRFNPTNDCMVYSASSDGTISCTDLETGISSSPMNLNPDGWQGPNTWKMLNGMDINSEKGLVLVADSFGFLHMLAVKVQYNCRTASVRSLFR

SEQ ID NO: 157387 - protein, 61 aa, Glycine max
  unsure (1)..(61): unsure at all Xaa locations
  Clone ID: PAT_MRT3847_113140C.1.pep
NVLALGVVVSPIPTCRMIIRNGSTVMFSGLPYIYSLLNCLICIWXGTPLISGDNFLVITGN

SEQ ID NO: 157388 - protein, 46 aa, Glycine max
  Clone ID: PAT_MRT3847_113141C.1.pep
VSEKPSIIGTHGLDYVSLGLVDVHKLPKYDLTVQDGSRLAKEYSRV

SEQ ID NO: 157389 - protein, 78 aa, Glycine max
  Clone ID: PAT_MRT3847_113142C.1.pep
TLKGALGRSLSRQNKGGRSIIGRHVKVDKPELFARVEGFLKKKLGEVLFGLHLGGGEMVRFAPEGSWGGAWVCGGGGG

SEQ ID NO: 157390 - protein, 112 aa, Glycine max
  Clone ID: PAT_MRT3847_113143C.1.pep
GVFFFFFFFFFFFFFFFFPPLPKGKGAFGGKDFSIKTKTPKKNQVSPKKTFSRGKKKLLVGNQGNFFPAFGFGPKKWPGNPLIYPTFAGTPRKGKAKTPFFPPPRPFMGPGI

SEQ ID NO: 157391 - protein, 58 aa, Glycine max
  Clone ID: PAT_MRT3847_113144C.1.pep
TLRIGCMGSRNPFRSAPLSSDKPITPPVAWAGQLCDDRCVSFHRSLCIVCVRTDPSLF

SEQ ID NO: 157392 - protein, 45 aa, Glycine max
  Clone ID: PAT_MRT3847_113145C.1.pep
KITFNILNLGLIQLQKLIQKGGLFCTYIYYFGHIISQCGICKTLL

SEQ ID NO: 157393 - protein, 59 aa, Glycine max
  Clone ID: PAT_MRT3847_113146C.1.pep
SSKPLPLFLANISWLEINKIGNQHPWKILKKLIPPFLIHIGNLHKTGPGRKLIHSWVPK

SEQ ID NO: 157394 - protein, 354 aa, Glycine max
  unsure (1)..(354): unsure at all Xaa locations
  Clone ID: PAT_MRT3847_113147C.1.pep
VTKQCLLDHGLTPNHTLRRLIQSWCTLNASLGVERIPTPRAPTXSAQIVKLLTEAKRFPEKQLKCLTRLRSIAFEGQRNKTCLESAGVIEFLVSTMKNNNTQEDSTVLSEAAIEVLFHLNLSEARIKALINNEEFHCIESLFHVLRLGNYQSRAFATMLLRSAFEVADPIQLISVKTALFVEIMRVLRDQISQQASKAALKLIVELFPWGRNRIKGVEGGAVLVLVELLLGASERRTCELILIALDQLCGCAEGRAELLNHGAGVAIVSKKILRVSHVASDRGVRILASICRYSANARVLHEMLQVGAVSKLCLVLQVNCSLKTKERAKEILQLHSVVWKNSPCIPVPLLSSYP

SEQ ID NO: 157395 - protein, 49 aa, Glycine max
  Clone ID: PAT_MRT3847_113148C.1.pep
VCGITIENNVFLKVNRTPRRLVAHECVKVKKGGECSRVQNLHNVVNKKY

SEQ ID NO: 157396 - protein, 128 aa, Glycine max
  unsure (1)..(128): unsure at all Xaa locations
  Clone ID: PAT_MRT3847_113149C.1.pep
PARKPRGDTRACYDILSSENARGDGTTTKQVMSKMAEMINSLCGGDEKLTRERTHLLLARCXRKANXKKDARRAEXGIPTGFPLTGICNSMLKEKLIRYSYEKKLRQAKAKSMCLQPLKNTGALRENG

SEQ ID NO: 157397 - protein, 111 aa, Glycine max
  Clone ID: PAT_MRT3847_11314C.1.pep
MGGSSETKLMQDLLLYAASAALSCLVLFAGLRHLDPNRESSKKALEHKKEIAKRLGRPLIQTNPYEDVIACDIINPDHIDVEFNSIGGLETIKQALFELVILPLKRPDLFR

SEQ ID NO: 157398 - protein, 98 aa, Glycine max
  unsure (1)..(98): unsure at all Xaa locations
  Clone ID: PAT_MRT3847_113150C.1.pep
XXXXSXXLPXXXXXRSXXXSXSLXFXXXXXVXXVGXRWPLVXCXGSGXXXVXXXSXCXXXXWXRRRXGXVRSXXVWXRGXCVXXXRAEFXAXVXVRXR

SEQ ID NO: 157399 - protein, 65 aa, Glycine max
  Clone ID: PAT_MRT3847_113151C.1.pep
MAGNQDQFEIKFRLTDGSDIGPKSFPAATSIATLKESVLAQWPKDKENGPKTIKDVKLNNAGKIL

SEQ ID NO: 157400 - protein, 86 aa, Glycine max
  Clone ID: PAT_MRT3847_113152C.1.pep
TPKLGCGINPFSYFPARVSSNPHPLVFVAPPQEPNQFAVGLFNGGVHVFDPLEFKGKWGVPPPIENGSPTNVAAVSVGPFPDQVQK

SEQ ID NO: 157401 - protein, 118 aa, Glycine max
  unsure (1)..(118): unsure at all Xaa locations
  Clone ID: PAT_MRT3847_113153C.1.pep
MAGNQDQFEIKFRLTDGSDIGPKXFPAATSIAXTLKESVLAQWPKDKENGPKTIKDVKIIXTGKILENNRTVGECQSPLCDTPDTVTTMHVVVQHPATEKDKKAANKATQNKCMCVIL

SEQ ID NO: 157402 - protein, 108 aa, Glycine max
  unsure (1)..(108): unsure at all Xaa locations
  Clone ID: PAT_MRT3847_113154C.1.pep
MSRPMEEDTAGKNEEEEFNTGPLSVLMMSVXNNTQVLINCRNNKKLLGRVRAFDRHCNMVLENVREMWTEVPKTGKGKKKAQPVNKDRFISKMFLRGDSVIIVLRNPK

SEQ ID NO: 157403 - protein, 108 aa, Glycine max
  Clone ID: PAT_MRT3847_113155C.1.pep
MSRPMEEDTAGKNEEEEFNTGPLSVLMMSVKNNTQVLINCRNNKKLLGRVRAFDRHCNMVLENVREMWTEVPKTGKGKKKSQPVNKDRFISKMFLRGDSVIIVLRNPK

SEQ ID NO: 157404 - protein, 55 aa, Glycine max
  Clone ID: PAT_MRT3847_113156C.1.pep
SVDYPVEYFNLFTMLSCYYVGIISHFSFFFFHNFAALQVIGHPVTDPSSIPTWKL

SEQ ID NO: 157405 - protein, 79 aa, Glycine max
  Clone ID: PAT_MRT3847_113157C.1.pep
IIMDRNTGSLAGYYLQFFITELLVPSSSNIITIVFMKRYLLIYLSLNADGSVFGFGIDVSPNSDCLLSHDSDLPCHRHR

SEQ ID NO: 157406 - protein, 196 aa, Glycine max
  Clone ID: PAT_MRT3847_113158C.1.pep
MSRPMEEDAAGKNEEEEFNTGPLSVLMMSVKNNTQVLINCRNNKKLLGRVRAFDRHCNMVLENVREMWILRPSSFTQSSFDFIWSFSKMSRPMEEDTVGKNEEEEFNTGPLSVLMMSVKNNTQVLINCRNNKKLLGRVRAFDRHCNMVLENVREMWTEVPKTGKGKKKAQPVNKDRFISKMFLRGDSVIIVLRNPK

SEQ ID NO: 157407 - protein, 29 aa, Glycine max
  Clone ID: PAT_MRT3847_113159C.1.pep
PTFLDGREKTTDGTLYLSMNLAFNNNKLN

SEQ ID NO: 157408 - protein, 28 aa, Glycine max
  Clone ID: PAT_MRT3847_11315C.1.pep
LVPVSSTFPVTHEPTVEYWTPTFGGTYR

SEQ ID NO: 157409 - protein, 153 aa, Glycine max
  Clone ID: PAT_MRT3847_113160C.1.pep
MSTCMSKKIQGQSLSIEEENMLVVQKQGIVTILGSNHDAPTTSLRRTLSADMSSKTWLSQNGFSLMKKTSSSEELSYSSLTKSTISDSSSSDEDNCEEAKQDQFQIWNTIQKEQQHEDNKPRQVDVWSSILVQKANEETLKLSTTPLCHPLVR

SEQ ID NO: 157410 - protein, 55 aa, Glycine max
  Clone ID: PAT_MRT3847_113161C.1.pep
ERQNPRKFRGAPGGGPRGETPPPNGVGQPAPSPGEKTGEPGAKKEFPPPGERGNN

SEQ ID NO: 157411 - protein, 109 aa, Glycine max
  Clone ID: PAT_MRT3847_113162C.1.pep
SGFPIDTSSMINPLGNSRALDGFGSSIPSATFTSTNWSLDSSTTFLFFFFFLLFFFTSCSLDSSLGSSWSESSCVFCSPSVVSTLSSVLSWSPSLTVTSLSLFLLFFFF

SEQ ID NO: 157412 - protein, 197 aa, Glycine max
  Clone ID: PAT_MRT3847_113163C.1.pep
PRVRAISHEGDVTESLARALADEYLHKDSPVTGTETVSKQPSRALMLVLHHLEKASLPRLVDGKTYGSWLLSGNGDENELRSQRKAASQNWTLVTNFCRLHQLPLSTKYLAVLARDNDWIEFLSEAQIGGYSFDTVVQVASKEFSDLRLRLHMLTVLRAMQSKKKASTVLFLDSLEKGSETTFPDENMGVPVELFQI

SEQ ID NO: 157413 - protein, 54 aa, Glycine max
  Clone ID: PAT_MRT3847_113164C.1.pep
SSIKAEIGFILMAILHYLLHLKLLVAVLKFQNQQQFPHKEATLVHLAPFWPAYW

SEQ ID NO: 157414 - protein, 70 aa, Glycine max
  unsure (1)..(70): unsure at all Xaa locations
  Clone ID: PAT_MRT3847_113165C.1.pep
XIERXMXALIMSPAVILAILXISACIAYTAXYXGLVXRXVEXPXRXXXXRGXXSXSGSXWRIINGCXGRA

SEQ ID NO: 157415 - protein, 550 aa, Glycine max
  Clone ID: PAT_MRT3847_113166C.1.pep
MGRVWTSMIALLLCLMTSSVRGEDPYIYYTWNVTYGTIAPLGVPQQGILINGQFPGPEINSTSNNNVVINVFNNLDEPLLFTWHGVQQRKNSWQDGTLGAQCPIAPGTNYTYRFQVKDQIGTYFYYPTTGLQRAVGGFGGLRIFSRLLIPVPYADPADEYWVLIGDWFGKSHTALKQTLDSGRSIGRPSGVHINGKNGGLEALYTMEPGKTYKYRICNVGLKEALNFRIQGHPMKLVETEGSHVVQNTYDSLDVHVGQCFTVLVTADQEPRDYFMVASTRFTKKVITATRVIRYSNGVGPASPLLPPAPHQGWAWSLNQFRSFRWNLTASAARPNPQGSYHYGQINITRTIKLVGTRSKIGGKLRYALNGVSHVDPETPLKLAEYYGVADKVFKYNLISDAPDAAIASRDPIIAPNVINATFRNFIEVILENPTKVTQSYNLDGYSFFALAVEPGKWTPEKRKNYNLLDAISRHTIQVFPNSWAAIMLTFDNAGMWNLRSEMAENRYLGQQLYVSVLSPNRSLRDEYNLPETQLLCGIVKDMPKPPPYSS

SEQ ID NO: 157416 - protein, 62 aa, Glycine max
  Clone ID: PAT_MRT3847_113167C.1.pep
CYVELVADGKAHHFNSLFKHLLRSWSNLWGFLLNLLKGLLLPLSSHLDQGRFSRFPQRWQIF

SEQ ID NO: 157417 - protein, 48 aa, Glycine max
  Clone ID: PAT_MRT3847_113168C.1.pep
VFPYCYFSYFSIYSYFCSSINLVCIRCSYISQLLTRLLCRTTGSSIMS

SEQ ID NO: 157418 - protein, 57 aa, Glycine max
  Clone ID: PAT_MRT3847_113169C.1.pep
LVSLACLLLYDCFEFFLVCGMEEPLKIPIIINDLTMILSSKSQVIANLVCFPLICCS

SEQ ID NO: 157419 - protein, 63 aa, Glycine max
  Clone ID: PAT_MRT3847_11316C.1.pep
LEPEAYVLLPPTDSMCLQWSSSIRQHHREPNRVCLLYTCPRGHDSRLLCLAAIPIGYELTCTW

SEQ ID NO: 157420 - protein, 57 aa, Glycine max
  Clone ID: PAT_MRT3847_113170C.1.pep
AIQIKGGGGTLRPLCTLGGLARGKNLFLFYQREPGSLITHKAGRIGVGTFETPLYKA

SEQ ID NO: 157421 - protein, 50 aa, Glycine max
  Clone ID: PAT_MRT3847_113171C.1.pep
CFACPLLELVVVSRRVLHEPVLVLVLRSGNYLLKVLCDRCAETFSLLILD

SEQ ID NO: 157422 - protein, 59 aa, Glycine max
  Clone ID: PAT_MRT3847_113172C.1.pep
AMKRPYLLVTKSGSKLCSSAARMSFTAVLYASCFIPSIKPRPMELSLNEQKWQQRLHLA

SEQ ID NO: 157423 - protein, 50 aa, Glycine max
  Clone ID: PAT_MRT3847_113173C.1.pep
GFIFFFSPKKKKKKKKKKKKKKKKKKKKKKKKKKKKKKTKDIKNKGCTYV

SEQ ID NO: 157424 - protein, 89 aa, Glycine max
  unsure (1)..(89): unsure at all Xaa locations
  Clone ID: PAT_MRT3847_113174C.1.pep
SHSLRSXGKASMSCVSLASPGSPYGNSFGSSYSSELSNGYSTAPTSVANSPPGTPFWDERTRLRMKTPDVPSSVPLPSARRPFXRDGTE

SEQ ID NO: 157425 - protein, 109 aa, Glycine max
  unsure (1)..(109): unsure at all Xaa locations
  Clone ID: PAT_MRT3847_113175C.1.pep
RDTFLARVYIREDSQQPFWKEKFLAGLPRSLGDKVRDKIRSQSANGDIPYESLSYGQLIFYVQKVALXCQDDKIHKQLVKEKAQTKRDLGSFCQQFGLPACPKQKKKKS

SEQ ID NO: 157426 - protein, 39 aa, Glycine max
  Clone ID: PAT_MRT3847_113176C.1.pep
MYHLGFGSLKFINLLFRTHYGFMMDERSWLEKRKECRLP

SEQ ID NO: 157427 - protein, 123 aa, Glycine max
  unsure (1)..(123): unsure at all Xaa locations
  Clone ID: PAT_MRT3847_113177C.1.pep
ASMKSTHDVMKXKEITREKDDLGDTPLHEAVNNGDLSVLQVILHRDKDMVHELNKSRCSPLFLAAASGNVAIVNLLLDIPFSADQKLPLCFGNSPLHAAILKRNPGIPSNSHQITSLIFFPAH

SEQ ID NO: 157428 - protein, 73 aa, Glycine max
  unsure (1)..(73): unsure at all Xaa locations
  Clone ID: PAT_MRT3847_113178C.1.pep
MMIEIARSSMMKMKVLVFXVTTMLGAWKCHVFDMVIMRMNIGYGDSTTEVECAHWTIAVGDHYMFGFVTIPEE

SEQ ID NO: 157429 - protein, 100 aa, Glycine max
  Clone ID: PAT_MRT3847_113179C.1.pep
KDRFNRENPGGQRNNKWGGQPIQRHTTGRGGKKNPPPHLGLGWPKQNPPAPKKNKTKLPGNLKTFSNNGLEKQRGLIKTPLYPGIKTFFTTTPYKGVKKN

SEQ ID NO: 157430 - protein, 125 aa, Glycine max
  unsure (1)..(125): unsure at all Xaa locations
  Clone ID: PAT_MRT3847_11317C.1.pep
FCQSQVESASHLFFSCKKIMPLWWEFTSWVKEARVMHCRPVDHFTQHLSLAASQAINRXWKVWWVAATVSIWNYRNAMIFKNQQFVISKLVDDAIFLTWSWLRGWEKDFAIPFQQWSSSMSFAFS

SEQ ID NO: 157431 - protein, 192 aa, Glycine max
  unsure (1)..(192): unsure at all Xaa locations
  Clone ID: PAT_MRT3847_113180C.1.pep
LHGGSSNLLKFFVHLPHVQRLEVQSYFLKYLAVGVVPIKLPRPCIDLSYLSIRIXLQLXIXFLGKNGGEXRINFNDLKEISASLCLLRSSPNLQELEILARPEEQTVLLTHTYCWEDVYFSCPVMQLRYVKIDGISGIKPELDFINFLLLHSPVLERMTVKPVANVGLELMKELLRFRRASGQAEIIYLEPS

SEQ ID NO: 157432 - protein, 59 aa, Glycine max
  Clone ID: PAT_MRT3847_113181C.1.pep
DWKLGNYISNMYTLNGIHTFQCLHCNQQEYHKIQYFERAIPFHNPDIYIIIDKLGALTY

SEQ ID NO: 157433 - protein, 184 aa, Glycine max
  unsure (1)..(184): unsure at all Xaa locations
  Clone ID: PAT_MRT3847_113182C.1.pep
MASQNPAEEENSNRHWSLEDFEVGKPLGRGKFGRVFVAREVKSKFVVALKVIFKEQFDKYRIHHQLRRXMEILTSLRHTNILRLYGWFHDADRVFLILEYAHKAELYKELRKKDCLTEKQAATGRLKIADFGWSVQSRSKRHTMCGTLDYLAPEMVENKAHDYAVDNWNLGILCYEFLYGAPSF

SEQ ID NO: 157434 - protein, 283 aa, Glycine max
  unsure (1)..(283): unsure at all Xaa locations
  Clone ID: PAT_MRT3847_113183C.1.pep
MASQNPAEEENSKRHWSLEDFEIGKPLGRGKFGRVYVAREVKSKFVVALKVIFKEQIDKYRVHHQLRREMEIQTSLRHANILRLYGWFHDADRVFLILEYAHKGELYKELRKKGHLTEKQAATYILSLTKALAYCHEKHVIHRDIKPENLLLDHEGRLKIADFGWSVQSRSKRHTMCGTLDYLAPEMVENQAHDYAVDNWTMGVLCYEPLPPLPXFRCQKSDQSGMFXILAKADSFIELLFFLTSICKLVPLLVKDSSQRISLDKIMEYPWIIKNADSFNSLI

SEQ ID NO: 157435 - protein, 137 aa, Glycine max
  Clone ID: PAT_MRT3847_113184C.1.pep
KTVEMDMVATQGPTNTRNVSPMNQDFVDLSPVSNRHRHIPPSPNRPSYMTPTQSAKAKVRAQGPSKPRVSVGQWNFSTKGGSTGDSSSSGGRIVAYQFPRSPGPKINGIRSQSKRIVGSSPDYTEDWTLPLGAHGWA

SEQ ID NO: 157436 - protein, 151 aa, Glycine max
  Clone ID: PAT_MRT3847_113185C.1.pep
MEQESETNIVLTKPFSLGNGNESDSEVYSAPNILQRILSLLTNVRPGSDLTRFQLPPQFNFPKSQLQCYGESIYSSTSDLLSRCNTGQSPLERLIFVVAWSISTTRPAIFGVAPYNPTLGETHHVSKGNLNVLLEQAHAFTFCYMLNVVTK

SEQ ID NO: 157437 - protein, 32 aa, Glycine max
  Clone ID: PAT_MRT3847_113186C.1.pep
MNACVICYSDNRLTENTFVTCGDWDIRVDNTT

SEQ ID NO: 157438 - protein, 48 aa, Glycine max
  unsure (1)..(48): unsure at all Xaa locations
  Clone ID: PAT_MRT3847_113187C.1.pep
XHARSLRXAXYXXEXXKESQXFFLLVMEXKXPNKPRFIQIVQLAGXXX

SEQ ID NO: 157439 - protein, 91 aa, Glycine max
  Clone ID: PAT_MRT3847_113188C.1.pep
QIDRSLPAFPPVASAYYRRLQILTLRYICTLHPHPYWSFRMLQHPHILSSTPFLHIYTHQIPSIKASKKNNGSPITFSRAASCYLSPLSLF

SEQ ID NO: 157440 - protein, 53 aa, Glycine max
  Clone ID: PAT_MRT3847_113189C.1.pep
MAASMISCPADTTDNRAGSGMVAPFTGLKFMAGLRISMTNNDMTYIASNGGRV

SEQ ID NO: 157441 - protein, 58 aa, Glycine max
  Clone ID: PAT_MRT3847_11318C.1.pep
KTRVGPVKVPNTLFHRSSEEGLSFQGIPTRFFFLLKRVGGFLINGGLLRNIAFMHVYG

SEQ ID NO: 157442 - protein, 60 aa, Glycine max
  Clone ID: PAT_MRT3847_113190C.1.pep
EIESKKPEFLRICLVDILMNWVFSSYIYRACGTVVFSNTYRNNCFKLLILRKSSYRIIQT

SEQ ID NO: 157443 - protein, 76 aa, Glycine max
  Clone ID: PAT_MRT3847_113191C.1.pep
FATSKTCKLKIFKVLIKHHVMNILHTYTQSISFWLCTKSSMTAFEFYIHTSIDKPKTQINPYLGGKSLIFFILFFF

SEQ ID NO: 157444 - protein, 98 aa, Glycine max
  Clone ID: PAT_MRT3847_113192C.1.pep
NASIKAALRPPNPKKDPRNEKTCLFLGSFSIKFSFTPNHLYSWSPAQCFLVLVFYLYKAPGGSWSICVKIFRVLLICKVCQMRLSVTLFCVTVLFCSV

SEQ ID NO: 157445 - protein, 74 aa, Glycine max
  Clone ID: PAT_MRT3847_113193C.1.pep
PPYSGFWQYIFLTHNILKILLGSYRDYFLPKISFLLIMGKREKKNSLKFGDEALLPKKKNSVSMGSPNFLSPPN

SEQ ID NO: 157446 - protein, 57 aa, Glycine max
  Clone ID: PAT_MRT3847_113194C.1.pep
PDPVSIFELNWEVPPFKNQPGYKAGFKGLGGWGDNRDRHLSLSFAKMDPSIGTGFPL

SEQ ID NO: 157447 - protein, 255 aa, Glycine max
  Clone ID: PAT_MRT3847_113195C.1.pep
QIQEVESQLEWIRSERDDEIAKLSAEKKALHDRLHDAETQLSQLKSRKRDELKKVVKEKNALAERLKNAEAARKRFDEELKRFATENVTREEIRQSLEDEVRRLTQTVGQTEGEKREKEEQVARCEAYIDGMESKLQACQQYIHTLEASLQEEMSRHAPLYGAGLEALSLKEWETLSRIHEDGLRQIHALQQRKGSPAGSPLVSPHALPHTHGLYPTAAPPMAVGLPPSIIPNGVGIHSNGHVNGGAVGPWFNRS

SEQ ID NO: 157448 - protein, 70 aa, Glycine max
  Clone ID: PAT_MRT3847_113196C.1.pep
GKPLAIVGCSYNEDLLRNASLCNHSTQPYICLHTVIKKLNMFLYRMIHDTIYKQVIKHILVDFRAGMTPQ

SEQ ID NO: 157449 - protein, 121 aa, Glycine max
  Clone ID: PAT_MRT3847_113197C.1.pep
LEPLLASAVNNKKKKEDIITTLCLMTIRFNGNPRCEQGKLDATSFLCSLPTTSIHDARASHRNERAPRTRMRLVPCGVRRVRGKRTKMQWGPCQGATDSVICVAINGLRVRQRHAHFSAAD

SEQ ID NO: 157450 - protein, 128 aa, Glycine max
  Clone ID: PAT_MRT3847_113198C.1.pep
GLTVRPADDDDVNRTVTKKLLEKLGCQVTAVSSGFECLGAISGSGNSFKIILLDLHMPEMDGFEVARRIRKFQSHNWPLIIAFTASAEEHIKERCLQVGMNGLIRKPILLREIADELGTVLQRAGEKL

SEQ ID NO: 157451 - protein, 49 aa, Glycine max
  Clone ID: PAT_MRT3847_113199C.1.pep
SNSCVTTTPLVSGMPTEQTQQPLISEEQEETAYDSSEKVVVVRIDDHYG

SEQ ID NO: 157452 - protein, 67 aa, Glycine max
  Clone ID: PAT_MRT3847_11319C.1.pep
LLMMGKKKPQKTKELSVAIAEASSAIDEKEQQIQVQVQPQPQAPRKRGKTRKNCFKEGRKVKRKKHN

SEQ ID NO: 157453 - protein, 75 aa, Glycine max
  Clone ID: PAT_MRT3847_1131C.1.pep
IKASCAKSFAPFPTGCMFHSEHGLMNFEHPTQKMKAMPRIDSEGVMCGANFNVDSQSKIQVMPRVGSEANWATWG

SEQ ID NO: 157454 - protein, 38 aa, Glycine max
  Clone ID: PAT_MRT3847_113200C.1.pep
VSSPRNVKNCSYREGQKQRGDKLLTYSKLSHISTKERA

SEQ ID NO: 157455 - protein, 63 aa, Glycine max
  Clone ID: PAT_MRT3847_113201C.1.pep
LDDRKHTLSTPISYLEEFLGKVICTIEELKRLLPSILATTKTESFSLDDANRGRSRSISALLT

SEQ ID NO: 157456 - protein, 47 aa, Glycine max
  Clone ID: PAT_MRT3847_113202C.1.pep
TEHPQRPTLSKGFRKEKVFTSESHAKKGFSYNYTMLLNLRLYRIIMG

SEQ ID NO: 157457 - protein, 142 aa, Glycine max
  unsure (1)..(142): unsure at all Xaa locations
  Clone ID: PAT_MRT3847_113203C.1.pep
MGQSLSCSGNHDHGLFTAVLHGDLQIVTTLLDSDPSLLHQTTLYDRHSPLHIAAANGQIEILSRLLDGSLNPDVLNRHKQTPLMLAAMHGNIACVEKLLQAGANVLMFDTIYGRTCLHYSAYYXHSSCLKAILSAAQSNPVA

SEQ ID NO: 157458 - protein, 56 aa, Glycine max
  Clone ID: PAT_MRT3847_113204C.1.pep
VGNLSSQSLYGPGLQLHTTSYLVATKLFTMVMLFLEGRGGWEKNMISQSLLFVLCH

SEQ ID NO: 157459 - protein, 444 aa, Glycine max
  Clone ID: PAT_MRT3847_113205C.1.pep
MGQSLSCSGNYDHGLFTAVQHGDLEIVTTLLDSDPSLLHQTTLYDRHSPLHIAATNDQIEILSKLLDGSLNPDVLNRHKQTPLMLAAMHGNIACVEKLLQAGANVLMFDTSYGRTCLHYAAYYGHSSCLKAILSSAQSSPVSASWGFSRFVNIRDGKGATPLHLAARQRRSECVHILLDSGALVCASTGGYGCPGSTPLHLAARGGSIDCIRELLAWGADRLQRDASGRIPYMVALKHKHGACASLLNPTSAEPLVWPSPLKFISELNPEAKALLEQALMDANREREKNILKGSSYSLPSPSHSDGVADNMSEVSESELCCICFEQVCTIEVQNCGHQMCAQCTLALCCHNKPNPATACLTPPVCPFCRSTITRLVVVKTECHDETDQDSADINCSKLSKSSRKLRHLNDSGSSSFKGLSSVSSFGKLGSRSSGRIAAEWLDKQ

SEQ ID NO: 157460 - protein, 29 aa, Glycine max
  Clone ID: PAT_MRT3847_113206C.1.pep
KLVILLEHHQCINMSMTFKTTHLLLSLST

SEQ ID NO: 157461 - protein, 145 aa, Glycine max
  Clone ID: PAT_MRT3847_113207C.1.pep
TRLAEALYQKGLALAEIESLKEVDKSLASAATEVAKQDVEKTDEQSNDDAVHPDLFLENFNELKKWVDVKCTKYGILLVTNERRNQRLGTALKVLSDIIQDDAEPSKKKFYELKLSLLEEIGWTHFAANEREWMLVRFPPSLPPF

SEQ ID NO: 157462 - protein, 316 aa, Glycine max
  unsure (1)..(316): unsure at all Xaa locations
  Clone ID: PAT_MRT3847_113208C.1.pep
MQAPQAASATDEEAPEISHQAVPQRNKEVSDGGPGGRRPDISLQVPPRPTGFGSTSGVRVLDHSQSFGKGISSSRGFLRALSFKRKGNVADGERSSLLNSDPKTAADSPNMASISEIAWKRCTSLPVTPASNLSPSVSTPISARAYNEQTKPHKDVDCSKVSRSLSVPGRNVVIVRSVSFSTRSEQEHQESNDDQITPVPVEVTADEEIPEEEAVCRICFDVCDERNXTFKMECSCKGDLRLVHEECLVKWFSTKGDKKCDVCRLEVQNLPVTLLRVTSSVQRENRQLQGQQNLHPESISAWQDFVVLVLISTICY

SEQ ID NO: 157463 - protein, 326 aa, Glycine max
  Clone ID: PAT_MRT3847_113209C.1.pep
KPFLFSLHPWPPLPPPPDPPSAVPLALVPIPAPPSSRRLPPPCWSPDETLALIDAYRDKWYSLGRGNLKATHWQEVADAVSSRCPNASPPKTPVQCRHKMEKLRKRYRTEIQRARSLPVSRFNSSWAHFKLMDSMEKGPSPVKPDINDSDHNNTDNDDDDDDAGQDLYHHQINHNGHTRSLNKLYRNGFPGSGGGAGGFRIRIPTGLSAPQQQHPGSASKVFGKVGNQRFSPNLNQNPNPNLGKKRERDPVGEVVAAIKVLGDGFVRMEQMKMEMAREIETMRMEMEMKRTEMILESQQRIVEAFAKAVSEKNRKKKPKTVPSASG

SEQ ID NO: 157464 - protein, 186 aa, Glycine max
  Clone ID: PAT_MRT3847_11320C.1.pep
KAGRLKLIELSKQFPETLECPDLKFSGPDKLGRKEYFEHLRNSKFCLAPRGESSWTLRFYESFFVECVPVILSDQIELPFQNVIDYSQISIKWPSSQIGPELLQYLESIPDEEIEKIIARGRQVRCWWVYASDSESCSAMRGIMWELQRKVRQFHHSAETFWLHNGSIVNRNLVEFPKWELPVPLP

SEQ ID NO: 157465 - protein, 101 aa, Glycine max
  Clone ID: PAT_MRT3847_113210C.1.pep
AREKKKKKKNKKKKKKKKKKKKKKKNIKKKKNKKKKNKGGGPPFLAFPPRNLISARSLGASPFSLLGALFKLGVIRALVVSGGKLFSVQNSPQHSTRKLKV

SEQ ID NO: 157466 - protein, 79 aa, Glycine max
  Clone ID: PAT_MRT3847_113211C.1.pep
TRPPPPAAPAAPSPASLPFSRSSALDNTAIFPPRTPHTPPQTPSTSTPLRKPRTSTSTMPSPSPPLHTISLSMSIFVMF

SEQ ID NO: 157467 - protein, 44 aa, Glycine max
  Clone ID: PAT_MRT3847_113212C.1.pep
VQMQRIPVLEVMLNELISALNQSMSINKFTALITSSSHSCTSVL

SEQ ID NO: 157468 - protein, 87 aa, Glycine max
  Clone ID: PAT_MRT3847_113213C.1.pep
YEIASGPYLVRLSSWSVREITLNTSSLFSPAGVPSVMATTSTGFWSALERAGPSTRGWRIFCHSCVPRGVRPENLTCCTSCSACCSV

SEQ ID NO: 157469 - protein, 155 aa, Glycine max
  Clone ID: PAT_MRT3847_113214C.1.pep
GSSIANPIRYHNLKDYIYRYFKAKPWVNKEGNPVKVGKVTVLDTMTSFQRYMFIRYLLPLKGLELANVAFCQYFQGMCLDIRRKIHIVMQLVDLYKPYVFFKGVFDNMNTEKLQTAVRQGEVEMEYSFYFDPKMIDWEDYFMNIHIPGIVKYVFK

SEQ ID NO: 157470 - protein, 250 aa, Glycine max
  unsure (1)..(250): unsure at all Xaa locations
  Clone ID: PAT_MRT3847_113215C.1.pep
EINYLGQLRHXNLVKLIGYCLEDHQRLLVYEFLTKGSLDNHLIRRASYFQPLSWNFRMKPTRPPTRPPTRPPTRPAKVIYRDFKASNILLDSNYNAKLSDFGLAKDGPAGDKSHVSTRVMGTYGYAAPEYMATGHLTKKSDVYSFGVVLLEIMSGKRALDSNRPSGEHNLIEWAKPYLSNKRRIFQVMDARIEGQYTLRESMKVANLAIQCLSVEPRFRPKMDEVVRALEELQDSEDRAGRGGKLSRSNC

SEQ ID NO: 157471 - protein, 106 aa, Glycine max
  Clone ID: PAT_MRT3847_113216C.1.pep
PRKIMLARQTGLTRNKVANWFTNARVRPWNPLVEEMYKEEFGDSEMNCNLSSENNTVTSKRDDVQESDNINNNNNKWEESQDNLITVDSVQVQPQAKMDKMVHVEN

SEQ ID NO: 157472 - protein, 222 aa, Glycine max
  unsure (1)..(222): unsure at all Xaa locations
  Clone ID: PAT_MRT3847_113217C.1.pep
MGCFFSVPSKIKAESPPRNGLNSKDGSKEENDLSCLSSKVSSSAMLLTPQSEDEILQASNLKNFTFNELRTATRNFRPDSMVGEGGFGCVFKGWIDEHTLAPTKPGTGMVIAVKRLNQESNQGHIEWLTQINYLGQLSHPNLVKLIGYSLEDDHRILVYEFVAKGSLDNHLFRRGSYFQPLSWNIRMKVALDAAKGLAFLHSDEVNVIYRXDFKTSNILLDS

SEQ ID NO: 157473 - protein, 54 aa, Glycine max
  Clone ID: PAT_MRT3847_113218C.1.pep
SSHSGGAFYTTNTGSVTPANSRLSPLPAEPYDRGATIDIRLDNCRDIMAKEKDL

SEQ ID NO: 157474 - protein, 399 aa, Glycine max
  Clone ID: PAT_MRT3847_113219C.1.pep
MGCCLSARIKAESPPRNGLSSKDGNKEEDGLSSKASTPSVPPTPRTEGEILKSSNMKSFNFSELKTATRNFRPDSVVGEGGFGCVFKGWIDEQTLAPVRPGTGMVIAVKRLNQEGLQGHSEWLTEINYLGQLRHPNLVKLIGYCLEDDHRLLVYEFLTKGSLDNHLFRRASYFQPLSWNIRMKVALDAAKGLAYLHSDEAKVIYRDFKASNILLDSNYNAKLSDFGLAKDGPAGDKSHVSTRVMGTYGYAAPEYMATGHLTKKSDVYSFGVVLLEIMSGKRALDSNRPSGEHNLIEWAKPYLSNKRRIFQVMDARIEGQYTLRESMKVANLAIQCLSVEPRFRPKMDEVVRALEELQDSEDRAGGVGSSRDQTARRSGHSSSSSGPRQHRGRQHETTRK

SEQ ID NO: 157475 - protein, 94 aa, Glycine max
  Clone ID: PAT_MRT3847_11321C.1.pep
PLMAASLRCKNSIGFLLTFYICLQSTMGADNRKLRSNWALTPGETSTLAVAVVHAYSGFTENWRAFHLQPLGFSFQHSYLLQLEDGVVGPEEPR

SEQ ID NO: 157476 - protein, 43 aa, Glycine max
  Clone ID: PAT_MRT3847_113220C.1.pep
RVDPRVRTAVRRGEKGEQTGSMIWYMVIEFSSIVGSCHAISSD

SEQ ID NO: 157477 - protein, 98 aa, Glycine max
  unsure (1)..(98): unsure at all Xaa locations
  Clone ID: PAT_MRT3847_113221C.1.pep
VEDRVTPMRIEIIIRATRTLAALGXNVRRIRELTYVAQMRLKFPENSVELYAEKVNSRGLCAIAQAESVRYNLLVGLAVRKACYGVLRFVMERGANGC

SEQ ID NO: 157478 - protein, 596 aa, Glycine max
  Clone ID: PAT_MRT3847_113222C.1.pep
MGAKKQSQGVKNKGNGANNDVFASCSFSSLGLDSNLCEQLRDRLGFEVPTLVQAQAIPVILSGRHALVNAATGTGKTVAYLAPIIHHLQGYENRIQRSDGTFALVLVPTRELCLQVYEILQKLLHRFHWIVLGYMVGDEKRSKEKSRLRKGISILIATPGRLLDHLKNTTAFLYSNLRWIIFDEADRILELGFGKDIEEILDLLGSRKKGHGDQENTVLTHSKIQRQNLLLSATLNEKVNHLAKMSLDNPVMIGLDGKKMEPISTIKRLDSSESDEDSEDKYSSKVPTVGDYKVPIQLIQRYMKVPCGSRLPVLLSILKHLFEREPSQKVVLFFSTCDAVDFHYSLLSEFQFSSYPQTEGVRQVFLGCKTFRLHGNMQQEDRRTSFQAFKTEKSALLLSTDVSARGLDFPKVRCIIQYDSPGEATEYVHRVGRTARLGERGESLLFLQPVEIDYLQDLEKHGVSLTEYPVLKVLDSFPLQKNHTKKSVFLESHPWVLCLQKALEAFIMSKPEMDEHARKAFCSWVRAYTAHRGELKRIFMIKKLHLGHVAKSFALKQQPSLVGQSFQKQNKKRKRFEKKNGFTKKRKVASVTECRP

SEQ ID NO: 157479 - protein, 110 aa, Glycine max
  Clone ID: PAT_MRT3847_113223C.1.pep
TFVITRFILFSFKNLKSIIGIAIFLLANFSFLEMSVWGFEPTTSPPFILLQPMDLISPIGIAIGVIVIEVLEITWIRSTCVFNLVVGIWGVSLVFYCYLDLDLQWVGLNC

SEQ ID NO: 157480 - protein, 257 aa, Glycine max
  unsure (1)..(257): unsure at all Xaa locations
  Clone ID: PAT_MRT3847_113224C.1.pep
RNIQNKPVVNQDFISNEMQQLRQQLKYLQAELCFQGGVPADEVRVLKERIAWLESTNEDLYRELHKYRSRCAFVGRCEIDEPNGHIYLMKTDGLERHFQSLDSSDHSLVGSLSGEDSKETDEAAKELEHVLLQNTMDKEMNELNKRLEQKESEMKVIAVDTETLKQHFGKKILELEEEKRKVQEERDRLLHEVENLASNSDGLAHKTQDXVRGQKLKALEAQILDLRKKQKALCSLLKQXKSEDAAXRLQTEIQYIK

SEQ ID NO: 157481 - protein, 42 aa, Glycine max
  Clone ID: PAT_MRT3847_113225C.1.pep
LYYLRGVDVFQSSRTVFLCAVFIIIIIIKLLNCMPIKLYFFS

SEQ ID NO: 157482 - protein, 124 aa, Glycine max
  Clone ID: PAT_MRT3847_113226C.1.pep
MRQRIDPQYNEVQAQMETKLLKLPLDDVATTKSSMLHLKISQSKIALSKNTVGGTILRSDLLANFLTEGNLRARVDLQLTHTIIRTIQMVATAGIPDNTSLALACPMNRSFRTRAKTDIYTISS

SEQ ID NO: 157483 - protein, 102 aa, Glycine max
  Clone ID: PAT_MRT3847_113227C.1.pep
SYSGWKLLHSIDTGHTANIFCTKFIPETSDELVASGAGDAGVRLFNLSRLSGSGFSDNAIIAPSAHYQCHTRRVKKLAVENGNPNVVWSASEDGTLRQHDFR

SEQ ID NO: 157484 - protein, 84 aa, Glycine max
  Clone ID: PAT_MRT3847_113228C.1.pep
SLGPGLGSVATGYMGCWSCRLVRQYMYVSEAQPCLFCSGPSGQYYESSRSMLHVWSSYCPPTNLQPAVRIKQEPGCELPDDRCL

SEQ ID NO: 157485 - protein, 79 aa, Glycine max
  unsure (1)..(79): unsure at all Xaa locations
  Clone ID: PAT_MRT3847_113229C.1.pep
CDXXLVXVTRRXVDGGGLXRWRVLPXSSYSSFHCXPSXAPFXVVXCLSDRAGDWTYSPLTTGRPSSTVSSFRSTLRRTW

SEQ ID NO: 157486 - protein, 76 aa, Glycine max
  Clone ID: PAT_MRT3847_11322C.1.pep
KDVFCDHITYNKIVNFYEYQLTMLKNSILSKQNLIILLQKNQIENNIINLQIVNKRKKYNKKIKFYFFTTNIFEHK

SEQ ID NO: 157487 - protein, 50 aa, Glycine max
  Clone ID: PAT_MRT3847_113230C.1.pep
VVQAWTHLKAVGREHSLFQMHTCEYQSTQVLACITSPLTWSTHQHHSQLP

SEQ ID NO: 157488 - protein, 38 aa, Glycine max
  Clone ID: PAT_MRT3847_113231C.1.pep
IYSEMHRRMKYSSPLFRFFEKKISRVSRYNSYPEDPSF

SEQ ID NO: 157489 - protein, 56 aa, Glycine max
  Clone ID: PAT_MRT3847_113232C.1.pep
YIDILYGRFDCVLYEALFMILLIFFIMLCFCSLIYDLYVYIIVIFLYSNSFYFFFS

SEQ ID NO: 157490 - protein, 74 aa, Glycine max
  Clone ID: PAT_MRT3847_113233C.1.pep
GSLSLFKNFGFEENLQAMMDDQRRRKRWLSNREFERRFGMRKQKPWANLVPKGFHFKRETHHIFKRVNITTQQL

SEQ ID NO: 157491 - protein, 73 aa, Glycine max
  unsure (1)..(73): unsure at all Xaa locations
  Clone ID: PAT_MRT3847_113234C.1.pep
LLVLSLKFFINPQVWSQREPQPVTHINTLFHTTHTAYSFLKKTIPTNKTAQTYTFTPPXIXXSPPKXELLVVW

SEQ ID NO: 157492 - protein, 76 aa, Glycine max
  Clone ID: PAT_MRT3847_113235C.1.pep
TLTLFFCPSLSPRCFPPPLSPTPWVKSPPFNKGSVYPFPMLAFLLSFFHLDHFVPPFDKKSVLLFFWKQISHFWGP

SEQ ID NO: 157493 - protein, 87 aa, Glycine max
  unsure (1)..(87): unsure at all Xaa locations
  Clone ID: PAT_MRT3847_113236C.1.pep
ALARSVTPSVAASALMCVARRDHSWWPRASSTSSTFCTYQGXXTAATRGGGLVWNDGVSXETLIDFDAPHIPKYQALRHWXCGLACL

SEQ ID NO: 157494 - protein, 268 aa, Glycine max
  Clone ID: PAT_MRT3847_113237C.1.pep
MDVEEPRDEGQPGGSVEQSPEQLVARAIAPVKKDFLRPPPVRSSSPNDGVSIPNDNNKTSVLAKEKKSKRQLKRERRLEQKSARNLCPEIAKTGDVSSCPYKDKCRFSHDLEAFKAQKPADLEGQCPFFKSGGACPYGLGCRFSSTHEDGVPSANLNGLKNNSEVNGLSKHVQKLLWKNKMSFSKADAQLKSLGLVGTSKSKRNDLENKDEGDTGSNKCDHSDYSGSCVVTSDSCCKLECPEEVMKDDDNDIDGKSESDVLCPQKRRK

SEQ ID NO: 157495 - protein, 49 aa, Glycine max
  Clone ID: PAT_MRT3847_113238C.1.pep
MLDSLAATDHYRKFVIGNAPWPIGVTMVGIHQRTAREKIYTNSDAYIMN

SEQ ID NO: 157496 - protein, 92 aa, Glycine max
  unsure (1)..(92): unsure at all Xaa locations
  Clone ID: PAT_MRT3847_113239C.1.pep
PFRSSTLPKDAGNGGVFDGNAALAFTTLRVLVAXSLKPNIYEVFHYRYLNCAXIKCIVWVEGXMSFYQSVLVTLSKRKARLIMGNTDAQILM

SEQ ID NO: 157497 - protein, 59 aa, Glycine max
  Clone ID: PAT_MRT3847_11323C.1.pep
LINLVGNGTPATIKKITTPAARESMLIFHKIEYVDEPHFRYTYSYGHGMALPDTLTNIT

SEQ ID NO: 157498 - protein, 585 aa, Glycine max
  unsure (1)..(585): unsure at all Xaa locations
  Clone ID: PAT_MRT3847_113240C.1.pep
PRPSKRGFIYHLRNRQPAAESPASAPAYCGPSSGAGSSSGAGNSGSRYAAPRNDYRPGYGGGGERTGGWGNKSGGWDRGREREVNPFEEEGNAEEAFSEQENTGINFDAYEGIRVDTSGDNVPPPVNTFAEIDLGEALNQNIRRCKYVKPTPVQRHAIPISLAGRDLMACAQTGSGKTAAFCFPIISGIMRGQPLQRPPRGVRTVYPLALVLSPTRELSMQIHEEARKFSYQTGVRVVVAYGGAPINQQXLERGVDILVATPGRLVDLLERARVSLQMIRYLALDEADRMLDMGFEPQIRKIVEQMDMPPPGARQTMLFSATFPKEIQRLASDFLSNYIFLAVGRVGSSTDLIVQRVEYVQESDKRSHLMDLLHAQRANGVQGKQALTLVFVETKXGADSLEHWLCLNGFPATTMDGDRSQQERELALRSFKSGNTPILVATDVAARGLDIPHVAHVVNFDLPNDIDDYVHRIGRTGRAGKKGLATAFFNDNNSSLARALSELMQEANQEVPAWLSRFAARSSFGGGRNRRSGGRFGGRDFRRDGSFSRGSSDYYSAGNGSGGGYGGSGGYAGGGYGPGVTSAWD

SEQ ID NO: 157499 - protein, 167 aa, Glycine max
  unsure (1)..(167): unsure at all Xaa locations
  Clone ID: PAT_MRT3847_113241C.1.pep
MVSKPTDSASKPRKQHGEPANDAIGNLSLKINQLKKQIQAERILYIKEKIQSNEKKLQFHMSGVLSEISTRGSSPPEENRKTPILSSRIDHPLCKFSGFSPVSGDKDHSNQDALSGTSIKITYIETLPLYTSWIFLDRNHHLIPXDISGRKSEKYYDQHGSEALICS

SEQ ID NO: 157500 - protein, 180 aa, Glycine max
  unsure (1)..(180): unsure at all Xaa locations
  Clone ID: PAT_MRT3847_113242C.1.pep
HASGFPATTIHGDRTQQERELALRSFKSGNTPILVATDVAARGLDIPHVAHVVNFDLPNDIDDYVHRIGRTGRAGKKGLATAFFNDNNASLARALADLMQEANQEVPDWLSRYAARSSFGGGRNRRSGGSRFGGRDFRREGSFSXGGGSDYYSAGNNSSGYGNXGVYGAGYGPWVTSAWD

SEQ ID NO: 157501 - protein, 38 aa, Glycine max
  Clone ID: PAT_MRT3847_113243C.1.pep
MQGQLSTRELRRYKVDLVVKEEGKGGKAIGLNLRLIKN

SEQ ID NO: 157502 - protein, 652 aa, Glycine max
  unsure (1)..(652): unsure at all Xaa locations
  Clone ID: PAT_MRT3847_113244C.1.pep
MRTSWADLAANSAAENAGPGSSADNVGTGSTLAPTRPVYVPPHLRNRQPAAESPAPAPAYSGPSSGAGSSSGAGNSGSRYAAPRNDYRPGYGGGGGRTGGWGNKSGGWDRGREREVNPFEEEDNAEEAFSEQENTGINFDAYEDIPVETSGDNVPPPVNTFAEIDLGEALNQNIRRCKYVKPTPVQRHAIPISLAGRDLMACAQTGSGKTAAFCFPIISGIMRGQPVQRPPRGVRTVYPLALVLSPTRELSMQIHEEARKFSYQTGVRVVVAYGGAPINQQGDARDTYTVASGVDILVATPGRLVDLLERARVSLQMIRYLALDEADRMLDMGFEPQIRKIVEQMDMPPPGARQTMLFSATFPKEIQRLASDFLSNYIFLAVGRVGSSTDLIVQRVEYVQESDKRSHLMDLLHAQRANGVQGKQALTLVFVETKKGADSLEHWLCLNGFPATTIHGDRSQQERELALRLFKSGNTPILVATDVAARGLDIPHVAHVVNFDLPNDIDDYVHRIGRTGRAGKKGLATAFFNDNNASLARALSELMQEANQEVPAWLSRFAARSSFGGGRNRRSGGXRFGGRDFRREGSFSRGGSDYYSAGNNSSGQFWCVWCRIRSWGNQCLGLIFNLIALYTVLGIRCRHTPRVIFLPFLSSF

SEQ ID NO: 157503 - protein, 104 aa, Glycine max
  Clone ID: PAT_MRT3847_113245C.1.pep
MGAVCCVAAKDKTIQSASPSEILHRNIRHSPTWNFRWDHRGRVAGEDTAVTWFSNDISGNNGLENKNESSYVSEDGDPLQNYQIQRIDCKISISEELLKCDNSF

SEQ ID NO: 157504 - protein, 49 aa, Glycine max
  Clone ID: PAT_MRT3847_113246C.1.pep
VNWVNSFKYSRGSAHVFSSMHVFGEQLAHIRGRAAIVRFPHPDLENTKM

SEQ ID NO: 157505 - protein, 35 aa, Glycine max
  Clone ID: PAT_MRT3847_113247C.1.pep
DSTVLFATQHIMSSQRARFIKRSSMKTPIYYVFSF

SEQ ID NO: 157506 - protein, 37 aa, Glycine max
  Clone ID: PAT_MRT3847_113248C.1.pep
LQLYGTGFLVSELIDERHINALSAIAPTSLADPIIVS

SEQ ID NO: 157507 - protein, 88 aa, Glycine max
  Clone ID: PAT_MRT3847_113249C.1.pep
PTRPPTRPQTDASNLCLNMLDCLYISFLMSSKLVSLFLWSNYEKSIYTYSQTDASNLCLNMLHSLSYKLKKYSKKKKKGRPPFCSFFS

SEQ ID NO: 157508 - protein, 54 aa, Glycine max
  unsure (1)..(54): unsure at all Xaa locations
  Clone ID: PAT_MRT3847_11324C.1.pep
FRVRSCPNSIEFSFLLTKSDFRILKLLFSVTTYKXRKQKEGKMKFLPKLKLAYS

SEQ ID NO: 157509 - protein, 55 aa, Glycine max
  Clone ID: PAT_MRT3847_113250C.1.pep
AFLIFILAGFRPYFFAEVGGHPTSYRLQVLYIFVAFALLSHVGHVGKPSLSSPWV

SEQ ID NO: 157510 - protein, 48 aa, Glycine max
  Clone ID: PAT_MRT3847_113251C.1.pep
ITRSQCSIFKGRYDHYAYNSRNTTSINMGMPTSTAWESTHPYTLRITR

SEQ ID NO: 157511 - protein, 91 aa, Glycine max
  Clone ID: PAT_MRT3847_113252C.1.pep
GSRRRQKGSYFLFYSFCFIVGQVPSLLNALSTTTKIFSLPKDIFPISCKNGFFFFRKSLKMYMGLFPMMGDLLFYRIALCILNDFFFSINS

SEQ ID NO: 157512 - protein, 39 aa, Glycine max
  Clone ID: PAT_MRT3847_113253C.1.pep
YLLMALHSYRITYDRFSRNDKVAKPAAQTSLSSTCSCGE

SEQ ID NO: 157513 - protein, 89 aa, Glycine max
  unsure (1)..(89): unsure at all Xaa locations
  Clone ID: PAT_MRT3847_113254C.1.pep
IFITRTLITYTREKGIKMFLTGGYTEKREYTTLLEKNLNXEGXXXKXKRLINKTPHFRGTRGGKIILHVYINKTKHLDQRLRTVLEWKM

SEQ ID NO: 157514 - protein, 67 aa, Glycine max
  unsure (1)..(67): unsure at all Xaa locations
  Clone ID: PAT_MRT3847_113255C.1.pep
IFXNILLFXXTLQILEERGIDXLSGHDXISXSEARTLQPPXSTSRXNXIXTTXXKGXQIPRKMVRSG

SEQ ID NO: 157515 - protein, 189 aa, Glycine max
  unsure (1)..(189): unsure at all Xaa locations
  Clone ID: PAT_MRT3847_113256C.1.pep
CLAGSAPPARKDHKEGSSSRVREGRGQKTAWGEGRPPPPRPXPAPPTRPPPPCGESPSPSTPPPLPLPVPHPPLPPSHSPPRLPPALLPPRPWPPPPPRLPSPPXPTPPSPPSRCAPPPPDPTSPAPFPPPFPAVTPNPLSPPPHDPWFSPPMPPPXPLPPPPPTYPPYPPLPPPPPRPPPSPPSPRPP

SEQ ID NO: 157516 - protein, 67 aa, Glycine max
  Clone ID: PAT_MRT3847_113257C.1.pep
MSEIKYGYPYPAQGPYQGPPPVAAPPQYYAAPPPRREPGFLEGCLAALCCCCLLDECCCDPTIVFAS

SEQ ID NO: 157517 - protein, 65 aa, Glycine max
  Clone ID: PAT_MRT3847_113258C.1.pep
PFWGANLINPHNFRGFQKRLEQPKGNCFPLNPKLGEVPLFSNPGGLFFALKNFLPQRGAPCWEPH

SEQ ID NO: 157518 - protein, 65 aa, Glycine max
  unsure (1)..(65): unsure at all Xaa locations
  Clone ID: PAT_MRT3847_113259C.1.pep
LLIXAMRWGRSRCVRRXXXSXPDXSXIKIXLDQLNSKIXILESXISEKLEEVXKKDKIIAXKENS

SEQ ID NO: 157519 - protein, 63 aa, Glycine max
  Clone ID: PAT_MRT3847_11325C.1.pep
KKKKKKKKKKFYLKKKKKKKKGGGKKKKGGAVNIKRAGLFKGATLSHASLQQKTFFLGSPNFI

SEQ ID NO: 157520 - protein, 70 aa, Glycine max
  Clone ID: PAT_MRT3847_113260C.1.pep
VMCALLGADRLVKVKASDDAPSRDGRYVKGRRHKGSPLISLRLVQPGTQREALTRSMYFLKMPKVPFSSK

SEQ ID NO: 157521 - protein, 103 aa, Glycine max
  unsure (1)..(103): unsure at all Xaa locations
  Clone ID: PAT_MRT3847_113261C.1.pep
AKRTVESRASRGSARHWACARASAGLALELTLKTYWRNCCXHRVRIAVILYGLKYEYMLMDVLSGDQSLHVNLELNAVGLVHDLVDDHDALYDTMDMIKYYED

SEQ ID NO: 157522 - protein, 87 aa, Glycine max
  unsure (1)..(87): unsure at all Xaa locations
  Clone ID: PAT_MRT3847_113262C.1.pep
EIGARRVLGTGTGPLGCVPAELAQRSTNGDCSAEXQRAAALFNPQLVQIIQQLNSEIGSNVFVGVNTQQMHIDFISNPQRYGKYYYN

SEQ ID NO: 157523 - protein, 402 aa, Glycine max
  unsure (1)..(402): unsure at all Xaa locations
  Clone ID: PAT_MRT3847_113263C.1.pep
MDYFNAPGRNHLFVPGPVNIPDQIIRAMNRNNEDYRSPAIPAMTKTLLEDVKKIFKTITGIPFLIPTTGTGAWESALTNTLSPGDRIVSFLIGQFSLLWIDQQQRLKFNVDVVESEWGQGAKLDVLESKIASDTSHTIKAICIVHNETATGVTNDLAKVRQILDSYRHPALLIVDGMSSICALDFRMDEWGVXDVAITGSQKALSLPTGIGIVVAGPKAIEASKHAKSLRVFFDWKDYLKFYQLGTYWPYTPSIHLLYGLRAALDLIFEEGLENVIARHSRLGKATRLAVEAWGLKNCTQKEEWYSDTVTAVLVPAYIDSTEIVRRAWKRYNLSLGLGLNKVAGKVFRIGHLGHLNELQLLGCLAGVEMILKDVGYPVKLGSGVAAASAYLQNTIPMIPSRI

SEQ ID NO: 157524 - protein, 92 aa, Glycine max
  unsure (1)..(92): unsure at all Xaa locations
  Clone ID: PAT_MRT3847_113264C.1.pep
NTVKLGCERELTTDTPCLTTVGLGLATASIINKGCELAFSLDWQMQICILQRRRGFGYXLTGRLHTKRQWTTXRSLWLCMAHVCSSSCCSMH

SEQ ID NO: 157525 - protein, 125 aa, Glycine max
  unsure (1)..(125): unsure at all Xaa locations
  Clone ID: PAT_MRT3847_113265C.1.pep
PRVRSDVVKRVLSIEDPSAQDGVRLGIKDYPYAAHGLEINNAIKTWVHEYVSLYYPTDAAVQQHTELQTYRKEAVDKGHGDLKEKAWWSRMHTTYYVIXQSCFIIVWTASAIHAAVKFXQYSYGG

SEQ ID NO: 157526 - protein, 141 aa, Glycine max
  Clone ID: PAT_MRT3847_113266C.1.pep
MRIYKDIFTGDEMFSDTYKIKLVDEVIYEVYGKLIQRRQGDIQLDGANPSAEEADEGTDSAVESGVDIVLNHRLCETYAFGDKKSYTAYLKDYMKKLVAKLEEKAPDQVEVFKTNMNKVMKDILGRFKELQFFTGESMEID

SEQ ID NO: 157527 - protein, 79 aa, Glycine max
  Clone ID: PAT_MRT3847_113267C.1.pep
PWKPPGVYTTANSGLRGKRAFYSWTISFSSQNRRGSNPCIGSSQEHLVSRCWNNYGINVNSWIYYLGRHKGDKSRSGYT

SEQ ID NO: 157528 - protein, 108 aa, Glycine max
  Clone ID: PAT_MRT3847_113268C.1.pep
GIGLVVFEKDSKNPTTKKMFDCSDSSDCSSFCSTVERIKDGSYVIMGIKGDVFKTLTSDCKRCISTLGSSEINRLSNKDSWAMMVKKGSPQTLLEYRKQDLVTFNQTF

SEQ ID NO: 157529 - protein, 77 aa, Glycine max
  Clone ID: PAT_MRT3847_113269C.1.pep
APFPILSLLQGCTIQSPSFFPCFSLYPWQLSHLELIAVNRLHKHHCAKHFINSVRTMRSNVKRFPILSVNTYDRVFA

SEQ ID NO: 157530 - protein, 37 aa, Glycine max
  unsure (1)..(37): unsure at all Xaa locations
  Clone ID: PAT_MRT3847_11326C.1.pep
LVQIYAQRSIDLYXXEDGIGRHDPISFGRSHIRYLLF

SEQ ID NO: 157531 - protein, 75 aa, Glycine max
  unsure (1)..(75): unsure at all Xaa locations
  Clone ID: PAT_MRT3847_113270C.1.pep
MLFLGSTPSITVFSPDRHLFQVECALEAFRXGNSCVSLRRTYNVVLCVEKKSTGQLXESRSGRETMDLDNHIALS

SEQ ID NO: 157532 - protein, 91 aa, Glycine max
  Clone ID: PAT_MRT3847_113271C.1.pep
NTKRKPTNIGINVKNMRNTETPQFCAPIHGFGMYPRFNMQQEGLIERVEKIKILPKFLEGRLINHEGSIALNQMHHSNKKEISRGVENILT

SEQ ID NO: 157533 - protein, 56 aa, Glycine max
  Clone ID: PAT_MRT3847_113272C.1.pep
LLSISRKCLAIGSMKVSCVRVGIVSSIEGRIVMSAAVVQSEKDWHRIINQQFQISL

SEQ ID NO: 157534 - protein, 128 aa, Glycine max
  unsure (1)..(128): unsure at all Xaa locations
  Clone ID: PAT_MRT3847_113273C.1.pep
DPKKGAVKVETQKPKEKLLESKNKPKPPFFXTRNSPMALRSHGRKIMEELIFAKRVAQFPRRGHGGVGGFRGRGSWAKVPLKQPPVPVVGGDLLERFEILSLTGIFLPGPVPPEPPGLTGILVEEQGQ

SEQ ID NO: 157535 - protein, 74 aa, Glycine max
  Clone ID: PAT_MRT3847_113274C.1.pep
RADSSRARAALRAYLHPQTMIKSHSRNYYKGGLGHTYIYRTTYASCITMSTCIAPSTHMLLFFLILSLTLYTKI

SEQ ID NO: 157536 - protein, 52 aa, Glycine max
  Clone ID: PAT_MRT3847_113275C.1.pep
NVEAAYAPLHNSTPNIDVNYQDLLSLDKHKLVTFYMATITSELLIFQQAKLN

SEQ ID NO: 157537 - protein, 70 aa, Glycine max
  Clone ID: PAT_MRT3847_113276C.1.pep
YFMPTSGPDGLCFNNHHGACLLVAVSTGTLLTIPAIGMPTASITTISKNESADYQAQCSAQVPSELTIYT

SEQ ID NO: 157538 - protein, 83 aa, Glycine max
  unsure (1)..(83): unsure at all Xaa locations
  Clone ID: PAT_MRT3847_113277C.1.pep
RIEVNVKVKSVIGAXIFALGVAVKIPVPKQTANTXFTVTSSHAKHNASIDCLVRKIRKFPWQTEXTLYAQIELIFTITKKKFL

SEQ ID NO: 157539 - protein, 57 aa, Glycine max
  Clone ID: PAT_MRT3847_113278C.1.pep
RIQTLSLNQLMDLPPQFIRLANDMPESTIAIDGVTVPLISLSHTYHLTVTAIAEAAP

SEQ ID NO: 157540 - protein, 54 aa, Glycine max
  Clone ID: PAT_MRT3847_113279C.1.pep
FLSFLQSELVILFPFSSHTFTESSDLVVSSPNFGVSTPAEACNKACGCCMVLGC

SEQ ID NO: 157541 - protein, 89 aa, Glycine max
  unsure (1)..(89): unsure at all Xaa locations
  Clone ID: PAT_MRT3847_11327C.1.pep
LGCFTSGRSFHNFVFXPTRRAKGGGLFVLWHGFTNTVARLQAEHVFGNVKNQKLAPPAREKTSTVQKRANAAPTRNTAGLSTRLIPTSP

SEQ ID NO: 157542 - protein, 82 aa, Glycine max
  Clone ID: PAT_MRT3847_113280C.1.pep
MLVKVYGPTYGAPKRVLVCLIEKEIEFETVHIDLFKGENKEPEFLKLQPFGSLPVIQDGDYTLYESRAIIRYFAEKYKDQRT

SEQ ID NO: 157543 - protein, 128 aa, Glycine max
  Clone ID: PAT_MRT3847_113281C.1.pep
GKSQESVSEAINAYYSVYLVGKSFQVPEVEHMGHILLALEIRGAQTYWQMPSTSNIYEPIYAANKMTGQVAATKVSYTTWFGPQVEHMHLINMIPFTPITGEFLKPAYVQEEYPILQQQAFDRAKDPI

SEQ ID NO: 157544 - protein, 48 aa, Glycine max
  Clone ID: PAT_MRT3847_113282C.1.pep
SQRLLKQGMQMQQPCILFCLLCHLFSAHNLSMVVSGCLFCLFSFFSPR

SEQ ID NO: 157545 - protein, 140 aa, Glycine max
  unsure (1)..(140): unsure at all Xaa locations
  Clone ID: PAT_MRT3847_113283C.1.pep
NTLLILASFGAAVATPTNDGDKIAGSYTREEKFAPYQGCPNASYNFCGGSLISDQXVVSAVHCYKIRIQLRLGEYNIXDLLEGNEQFINSAKDIRHPNYYXWILDNDIMLIKLCSPEVLNARVATIFLTKACATPGTQCL

SEQ ID NO: 157546 - protein, 80 aa, Glycine max
  unsure (1)..(80): unsure at all Xaa locations
  Clone ID: PAT_MRT3847_113284C.1.pep
YKSVVHRVMPDNSGSRTSIATFYNPIGDAIISPAPKLLYPSNFRYGDYLKLYGSTKFGEKGXPRFECMKNMTNGHKNIPA

SEQ ID NO: 157547 - protein, 73 aa, Glycine max
  Clone ID: PAT_MRT3847_113285C.1.pep
GPLFGKLVFAFWGHGPLGPFPQGFMGKQNRAPPLVGLGATLSAPIFSLIWGRDGPFLPHPTGPVVHPFGGGCL

SEQ ID NO: 157548 - protein, 87 aa, Glycine max
  Clone ID: PAT_MRT3847_113286C.1.pep
MQASDRFNINSQLEHLQAKYVGTGHADLNRFEWAVNIQRDSYASYIGHYPLLGFFAIAENESIGRERYSFMQKMLLPCGLPPEREED

SEQ ID NO: 157549 - protein, 126 aa, Glycine max
  Clone ID: PAT_MRT3847_113287C.1.pep
RHPHWLQNLQVMQQRRLKPIRTDHLLQIRHGLIPLNRTLAPRRSVFMECGCHLDLHWWQQRCQLDGEGWISQLSISFFKTRMYLYICGCLVLGFVCVSLGSVSLNYVKGLHDCAVFCFHKIYRATY

SEQ ID NO: 157550 - protein, 87 aa, Glycine max; identical to SEQ ID NO: 157548
  Clone ID: PAT_MRT3847_113288C.1.pep

SEQ ID NO: 157551 - protein, 118 aa, Glycine max
  Clone ID: PAT_MRT3847_113289C.1.pep
LALFLFLLGICVSLPCVASLLSCLGSGCSSSVFGRFFFWLPGLLPSFVRAVAVWFRLVWAVLLVPFVLFLVVVCLGCCLVVGSPGAVGVGLSVGSLFGCLCALSWVWFFLAVWSSALC

SEQ ID NO: 157552 - protein, 90 aa, Glycine max
  Clone ID: PAT_MRT3847_11328C.1.pep
RSLAAQIQCGLRELRTRIVIVKNTHKDTEGVKLAAVAKVRRAYEAGVNGRPFLETLVGVLYNINEQLLTEDVDIPLTKVMPNKKVALVVV

SEQ ID NO: 157553 - protein, 45 aa, Glycine max
  Clone ID: PAT_MRT3847_113290C.1.pep
TPGSKKKKGFFSEWKASKIKPGNSSGSHKNFFYNWGPLYCKLVLN

SEQ ID NO: 157554 - protein, 86 aa, Glycine max
  Clone ID: PAT_MRT3847_113291C.1.pep
SGLGPSYARLARPASISKSSLSACCFGVARLARAVCLARLLILGVLRASCALSATLGWAILIPSFLRYFSTFLLFVTPVFISTAMI

SEQ ID NO: 157555 - protein, 38 aa, Glycine max
  Clone ID: PAT_MRT3847_113292C.1.pep
GSSTNAHKGYLFSMTDLHGGPGDILLKLMTHCIAYHPT

SEQ ID NO: 157556 - protein, 53 aa, Glycine max
  Clone ID: PAT_MRT3847_113293C.1.pep
LLILKRNTTESPKLKEEEIIRTKRGQSRRLLIVILVNQHPKLQIFITCCRNLN

SEQ ID NO: 157557 - protein, 92 aa, Glycine max
  Clone ID: PAT_MRT3847_113294C.1.pep
GRIWKALDAFPYPNWARATLKLNQKPPPNHPLFPPRDWGTKKLCLFFYGPPGFKSKPFGPRPKGGLLELGKTGGGPRGIQKKFPPFYPPKHK

SEQ ID NO: 157558 - protein, 80 aa, Glycine max
  Clone ID: PAT_MRT3847_113295C.1.pep
PKTSFPSLRNMSRSTVAWHQSKVGRWTNSYKQLTLQIAKFRHLKLTKSNLHIFSAPLENSFLNTNQALWLTLCYRGSIRI

SEQ ID NO: 157559 - protein, 234 aa, Glycine max
  unsure (1)..(234): unsure at all Xaa locations
  Clone ID: PAT_MRT3847_113296C.1.pep
MAVPLRMNHNKRGGMLARLKILVNSHSQSFHSPAPKRPKQDQSSTENDLDYSICRGRIDVSKWKTLDAKELGITSSMISYPSQFVLKLLRRNGFGXYLVGGCVRDLLLNKTPKDFDVITTAKLMEVRKRFRXFSRAEVVGRCFPICLVHIKGSVVEVTSFETVARTSNRKEQFLHSLLPKCSNKKDLFRCKNSLRRDFTINSLXFMTPFGNKIYHYTDGMADLKSLKLENCIPA

SEQ ID NO: 157560 - protein, 136 aa, Glycine max
  unsure (1)..(136): unsure at all Xaa locations
  Clone ID: PAT_MRT3847_113297C.1.pep
FCIESLYSAPHAQESESYGLAYVALRLEYLNATSTRRVRDYITKLLKKATSTHYLEHLQKCASDYETAISAIETAXNDMNSETYELADLAGAASHGVENCQDTFKGCHHSPLDFMNNALKGLCEICVVVSKLFTRS

SEQ ID NO: 157561 - protein, 78 aa, Glycine max
  Clone ID: PAT_MRT3847_113298C.1.pep
CSKSVLSSPVLSAHIVLYLCMSSRVIVLVILVMSKSHQDGHLGQCKLEEGCFIIICHALHATETFPSRFNRNLSDSKQ

SEQ ID NO: 157562 - protein, 153 aa, Glycine max
  unsure (1)..(153): unsure at all Xaa locations
  Clone ID: PAT_MRT3847_113299C.1.pep
ALQGLHYFQTYDWLMLFSVITLGYVGWMIYLVLHVLQSYTSLPGNAFGMEQAVQKNNRXKIYLYGSMVTGMLCLLLLLEQSPPLYHAYIIMTSFLWVRIISEYQFIKTLWKHLSRRRMNYIIKLLAITAISVFILEFLVNSFTERKLYTWCFL

SEQ ID NO: 157563 - protein, 42 aa, Glycine max
  Clone ID: PAT_MRT3847_11329C.1.pep
KKKLLLLPPLELFFRNRHYGVLWNCCKKILCPLYPNSAQDKL

SEQ ID NO: 157564 - protein, 192 aa, Glycine max
  Clone ID: PAT_MRT3847_1132C.1.pep
MLGIFKQKLVNAPKELNSPASLNSCTKPKLSHEVLKDFMSCNSSNAFSMCFGSDALLAYSPSNKPSIHHRLFSGLDNIYCVFLGGLHNLSMLNKQYGLSKGTNEARFIIEAYRTLRDRGPYPVDQVLKELESSFAFVIYDNKDGTVFVASGSNGHIGLYWGIAGDGSVIISENLELIKASCAKSFAPFPAGM

SEQ ID NO: 157565 - protein, 122 aa, Glycine max
  Clone ID: PAT_MRT3847_113300C.1.pep
KILFPGMIRKAPRGWGGFFPFKKGPPQTPPPGGGGTKKGQTASLQGGGSLEHLQKGIGGGPPFGRELRSPVLRVLCPKIILKQVFLGPIFLENLGNPLMGPMRGGSIRAPRFFFFFYKNKIK

SEQ ID NO: 157566 - protein, 55 aa, Glycine max
  Clone ID: PAT_MRT3847_113301C.1.pep
NISYGKDKHHSQSDKGTLSHLAHDLTPTSHHEHSYQPLSNPSPPNSYPTQQRYPP

SEQ ID NO: 157567 - protein, 234 aa, Glycine max
  Clone ID: PAT_MRT3847_113302C.1.pep
MKMSVIRVSPCLPGVYASPITSSQLRRRDFNSRPRSLPMMGFDPLSVASLSLRAEPSPRLQCQPALKSRRPLLVCFAASGQGMMENNREAMGQWKGQSIEDILRQQMEKGGSGGKPPGGRGGGGGSDSSSGGSDGMSNETLQVVLASVSFILMYIFVINGLELLKLFKDCIKFVSGRGQSVRLKRAVYKWVRIFKNIIEKMEAARNGLEKASTCLLDRDFFRGVFQCNMKSNPE

SEQ ID NO: 157568 - protein, 46 aa, Glycine max
  Clone ID: PAT_MRT3847_113303C.1.pep
VQDTTLFRSMGLFKPNNKEILDVLVLAIASASLMHSSILPRSHNFH

SEQ ID NO: 157569 - protein, 132 aa, Glycine max
  Clone ID: PAT_MRT3847_113304C.1.pep
MEKKPLLAESDYYYRVEFRACKDDAWYATRVSLEGETLKVKYFNFPDEYDNAFRASEFGDLEKLQEFGERFRTLSKQAQDSDCRSLAEGVWVCACQCFGDDDLRYYDAVVDGVQHGKHYWKAGKETCFCTFI

SEQ ID NO: 157570 - protein, 105 aa, Glycine max
  unsure (1)..(105): unsure at all Xaa locations
  Clone ID: PAT_MRT3847_113305C.1.pep
KWRTYSKSAVAVLKIAMTTVPVLQLPXFALPFDDETDVFTTAIGVILSQLGHPXFSGKKLCLRMQLASTYARGMPSITDAVRKWHHYLICNKFRIFTNHQNLNAL

SEQ ID NO: 157571 - protein, 69 aa, Glycine max
  Clone ID: PAT_MRT3847_113306C.1.pep
DPSGCHQKKALELQISPQPHPLEPHEHVQPQQLEEPVKDQHQLVVSLILSHVFWFVLLSFFPPMKLRKR

SEQ ID NO: 157572 - protein, 107 aa, Glycine max
  Clone ID: PAT_MRT3847_113307C.1.pep
KEASISTHVFLVSPKVSHHLSGSQQNRHSLIGIFGSPALAMCFQGNLNPTMQEKSAPHMPRGSLGGQLSPTIFLEVKILIPKFHHYPILLDSSNIKRYKRMDFSPWF

SEQ ID NO: 157573 - protein, 59 aa, Glycine max
  unsure (1)..(59): unsure at all Xaa locations
  Clone ID: PAT_MRT3847_113308C.1.pep
MXXXGLNNETXXKTFLDSTTTNTLSASLSLCSHNTSHSLAGLTPMKKEVKKRYPNMRYP

SEQ ID NO: 157574 - protein, 57 aa, Glycine max
  Clone ID: PAT_MRT3847_113309C.1.pep
AQAMTLVLKMKNKIGFVDCTISKPHEQHPNYSSWKRCNNLIRSWINHPISPDIATSI

SEQ ID NO: 157575 - protein, 82 aa, Glycine max
  Clone ID: PAT_MRT3847_11330C.1.pep
PPKKKKPTKIQKKKKGGREKRKNRKKIFLGGPKPKKKPPKSKKTPQRGNGGKKKKKKTLSPKKKGPPNPGSAKKPRGGKETI

SEQ ID NO: 157576 - protein, 77 aa, Glycine max
  Clone ID: PAT_MRT3847_113310C.1.pep
GPTDASAHASELFSFLCDCKTEKAKLAYSPSSRMSLLSASFTASTPIALASSSSLSSRPTARSILGDGPAETLCESC

SEQ ID NO: 157577 - protein, 512 aa, Glycine max
  Clone ID: PAT_MRT3847_113311C.1.pep
PASGVRNRPLLHMSKEDKTSQAMLSTRQMDTVTVHEENNTENADQVVLDFRKHLHHWSNLQYLLTSSQIGEVAASSTLEHVSVDLERRPNGVQFNGVSLAKKALSTSKQESSVVEDLKSIKADDDSIPFGLASTSLADPSIGRNKTVRSTRLLERRSKQRKVPKSKVIDDETYLARKDDAQEKLRAEKKKNEELDQDDPLRLFLWGPETTKLLTPREESQLISQIQDLLRLEEVKTNLQSQFGREPTMAEWAEGAGLNCRLLQSQLHSGNRSREKLIQANLRMVVHVAKSYQGRGLSLQDLLQEGSMGLMKSVEKFNPLAGSRFGNYAFWWIRQAIRKAVFRHSRTIRLPEKVFILLGKVMEAKKLYIQEGNLHPTKEELARRVGVTVEKIDKLLFSARIPISMQQTVWADQNTTFQEITADPTVEATDVTVEKQLMRRHVLNVLSVLHPKERRIIRLRYGFEDGEQKSLSEIGDIFGLSKERVRQLEIRALYKLKKCLVKQGLDAYVDLLL

SEQ ID NO: 157578 - protein, 495 aa, Glycine max
  Clone ID: PAT_MRT3847_113312C.1.pep
MGCCQSSTLLRVGERETHPEKEKEKDHQRLSEAEKEGFDFSFSEFSLAELKAATNNFSSDYIVSESGEKAPNLVYKGRLQNHSRWIAVKKFSKSAWPDPKQFVEEASGVGKLRHPRLAILIGFCCDGDERLLVAEYMPNDTLAKHLFHWETQTIEWAMRLRVALYIAQALHYCSSEGRPLYHDLNAYRVLFDQEGDPRLSCFGFMKNSRDGKSYSTNLAYTPPEYLRNGRVTPESVIYSFGTVLLDLLSGKHIPPSHALDMIQGKNNMLLMDSHLEGKFSTEEATVVVNLASKCLQYEPRERPDTKDLVTTLAPLHTKPDVRSHIMLGIPKHEEAPSTPQRPLSAMGEACSRMDLTAIHQILVATHYRDDEGTNELSFQEWTQQMRDMLEARKRGDYAFRDKDFKTAIDNYSQFIDVGTMISPTVFARRSLCYLLCDQPDPALRDAMQAQCVYPDWPTAFYMQSVALAKLDMHKDAADMLNEAAALEEKRQRGAR

SEQ ID NO: 157579 - protein, 276 aa, Glycine max
  unsure (1)..(276): unsure at all Xaa locations
  Clone ID: PAT_MRT3847_113313C.1.pep
MGCCQSSMLLRVGERETHPEKEKEREKEKEQAYGNHQRQSEGGEGDGEKEVVDFSFSEFSLAELKAATNNFSSEYIVSESGEKAPNLVYKGRLQNQSRWIAVKKFSKSAWPDPKQFVEEASGVGKLRHPRLANLIGYCCDGDERLLVAEYMPNDTLAKHLFHWETQTIEWAMRLRVALYIAQALHYCSSEGRPLYHDLNAYRVLFDQEGDPRLSCFGFMKNSRDGKSYSTNLAYTPPXEXLKKRRVTXPESVIYSFGTVLLNLLKCQALSFQVMAL

SEQ ID NO: 157580 - protein, 52 aa, Glycine max
  unsure (1)..(52): unsure at all Xaa locations
  Clone ID: PAT_MRT3847_113314C.1.pep
KATTAILHAPRTFINQLPDWSMLLAIITTXLLAGEKHWMMLXDWKTLRPDML

SEQ ID NO: 157581 - protein, 71 aa, Glycine max
  Clone ID: PAT_MRT3847_113315C.1.pep
INIYIYLVFEDGSFSHFLNHGHPSFVGDAELIYVGDSRVSPTNNLMVFFCWILLIICLLNNSPKIEKGMGH

SEQ ID NO: 157582 - protein, 36 aa, Glycine max
  Clone ID: PAT_MRT3847_113316C.1.pep
VLSEGISGSCLGHVKESTIVPMVRFMRTHTSQYKRC

SEQ ID NO: 157583 - protein, 181 aa, Glycine max
  Clone ID: PAT_MRT3847_113317C.1.pep
AHSNEKTHMVLGIPKHEEAPSTPQRPLSTMGEACSKMDLTAIHQILVATHYRDDEGTNELSFQEWTQQMRDMLEARKRGDHAFRDKDFRTAIDNYSQFIDVGTMVSPTVFARRSLCYLLCDQPDPALRDAMQAQCVYPDWPTAFYMQSVALAKLDMHKDAADMLNEAAALEEKRQRGARGS

SEQ ID NO: 157584 - protein, 70 aa, Glycine max
  Clone ID: PAT_MRT3847_113318C.1.pep
SGTWFLGCDACSRVMTVVRKIWGLPVRDAAWQGLGVPPRLWRGALEPGLVGLGSPLNLCHLHFTFSIAVK

SEQ ID NO: 157585 - protein, 70 aa, Glycine max
  Clone ID: PAT_MRT3847_113319C.1.pep
HNIDTIQQVISSVVVLFKRLQIAPGQIGLELNSMFPTTTKKNHCCLKSSSPIYCNIPLEYPHLSLSHKLN

SEQ ID NO: 157586 - protein, 81 aa, Glycine max
  Clone ID: PAT_MRT3847_11331C.1.pep
GNIVMSGGTTMYPGISDRMQKEITALAPSSMKVKIIAPPERKYSVWIGGSILASLSTFQQMWISKQEYDESGPSIVHRKCF

SEQ ID NO: 157587 - protein, 174 aa, Glycine max
  Clone ID: PAT_MRT3847_113320C.1.pep
HEAVTGIWGLLALRLADDSIIPFNYLSYANQLQVYNNILSNLLDKQITLHPLNTSIQEFASAAKEANDESKKLKWQEASDRSIDMKMRALNDRLMLAERGFLDVDGLQGRQWFKHLVFGPPSDHESKLDFFPGIADSLSGMDKMSEKDRLAAIQHEIWGVARAIQRAASALRGA

SEQ ID NO: 157588 - protein, 88 aa, Glycine max
  Clone ID: PAT_MRT3847_113321C.1.pep
PPKETPFTPGLLFAQIMEPSKKHRVRVSGQNWFKLGVPGGFSQIKKILFGDNVLGLFPFHKRGGFFFFPKHFPLFQGFVRTLNHPERP

SEQ ID NO: 157589 - protein, 115 aa, Glycine max
  Clone ID: PAT_MRT3847_113322C.1.pep
TLSEPVTAKHSDTGMDERYVYGVSEMQGWRISMEDAHATVLKLDPQTNNAFFAVFDGHGGSTIAKYSGSHIHERLKSDAGYQSKDYKAALKRAFLGTDDDLRADPAFFHDPSGCT

SEQ ID NO: 157590 - protein, 35 aa, Glycine max
  unsure (1)..(35): unsure at all Xaa locations
  Clone ID: PAT_MRT3847_113323C.1.pep
XILLDPERPIPFAEKEXXPVADFLVVLLLPEPCSS

SEQ ID NO: 157591 - protein, 90 aa, Glycine max
  Clone ID: PAT_MRT3847_113324C.1.pep
MIRQVGNRKWNTLREEGIGSRCLPIPSVELRFTCTREHNKVTHDTYDGRYWTMWKLTMVGCTDASDVWKELREAKTAYPNGFIRIIGFHN

SEQ ID NO: 157592 - protein, 85 aa, Glycine max
  Clone ID: PAT_MRT3847_113325C.1.pep
MARAGGITNAVNVGIAVQADWENREFISHISLNVRRLFDFLVQFEATTKSKLASLNEKLDVLERRLELLEVQVGNASANPSLFAT

SEQ ID NO: 157593 - protein, 137 aa, Glycine max
  unsure (1)..(137): unsure at all Xaa locations
  Clone ID: PAT_MRT3847_113326C.1.pep
CAKCIKHWYLETRGKEKVARAGGITXNAENVGIAVQADWENREFISHISLNVRRLFDFLVQFGTHAFPFPTLQNEPIPVSFYLSMKQHHHFVLHIXEATTKSKLASLNEKLDVLERRLELLEVQVGNASANPSLFAT

SEQ ID NO: 157594 - protein, 96 aa, Glycine max
  unsure (1)..(96): unsure at all Xaa locations
  Clone ID: PAT_MRT3847_113327C.1.pep
RPLTDIERQREDDRRGVIQALYRLTTGAREAAFTNNKTSAGCMADELSNAGKGXTNSYAXIKKKDEIERAARGSIVNTTQQPVLWPERIPPLAEMI

SEQ ID NO: 157595 - protein, 107 aa, Glycine max
  Clone ID: PAT_MRT3847_113328C.1.pep
QSANKGYLQLKWRRVVSKSTYLGGVIYFKDKCGAVTHYILFRNMLQLYLFTLDDPWKQVYLFSESFGRDFPSNLLLVVLARKHTIFVVYFILFTCGDGEFFNFPMTP

SEQ ID NO: 157596 - protein, 69 aa, Glycine max
  Clone ID: PAT_MRT3847_113329C.1.pep
HEAEIEAVSMLWVVETEGDKEKEQGQNRTDAKIEEQRQIQQVLDEYAQVFSEPKSLPPNRANHRIPNRC

SEQ ID NO: 157597 - protein, 94 aa, Glycine max
  Clone ID: PAT_MRT3847_11332C.1.pep
FAHVAFTAGAGGLVLNAPPVVKKKTEFAVVIKKVPTNAQIPVIKAVRALTNQALKKAKELIKGFPKKFKEGISKNEAENAKKQLEKAGAKVTFV

SEQ ID NO: 157598 - protein, 103 aa, Glycine max
  Clone ID: PAT_MRT3847_113330C.1.pep
HPFNNLCRLLTRTLLKHLRSNTFDLLTCYHTSPSYSNLHFITRSSIPPITCTSIFTDASSSTNNSKLYPRSNHAHVIKSKIRLKMVYLLPIGNILHQKPILQI

SEQ ID NO: 157599 - protein, 58 aa, Glycine max
  Clone ID: PAT_MRT3847_113331C.1.pep
FIFSLSFFWANCFGHPAFEGSFFYPPFVLPNCILGGGAIFHFCKAIIFIKNEYFFGFS

SEQ ID NO: 157600 - protein, 125 aa, Glycine max
  Clone ID: PAT_MRT3847_113332C.1.pep
VRKIFMTDTIYWITFTIRRTHTGFSNAISPSAIECDPQSRTYRESHNRLLIFSFPSLPTQHKSKLRLSQFVNKQSVAHLTISDQDKSYWHILGVPKLRATRTVFVKIKDINEKRKRNQNSFHLHG

SEQ ID NO: 157601 - protein, 59 aa, Glycine max
  unsure (1)..(59): unsure at all Xaa locations
  Clone ID: PAT_MRT3847_113333C.1.pep
RKSIRKKTLERKVSNVDMDSSFDCVGNIFTIYTLPHPFYNDYLYHLYLTLXIKNSFVTP

SEQ ID NO: 157602 - protein, 109 aa, Glycine max
  unsure (1)..(109): unsure at all Xaa locations
  Clone ID: PAT_MRT3847_113334C.1.pep
PPPPPPPPPPPPPPSPPPXHPPPPAHPPTTSAVIRLHSPLLATLTLAPPTAMSALTPSPLTVRLQCHFNSAHVKQHNGALPRVCVLARTHTTGAHCVSLRATRGSLPAN

SEQ ID NO: 157603 - protein, 102 aa, Glycine max
  unsure (1)..(102): unsure at all Xaa locations
  Clone ID: PAT_MRT3847_113335C.1.pep
RISALGLLELFAYKQAPPGTFGPGFFKEEPGPPPPPLFYRXGPWGGPPSFWGGPPPPVFPGPIPRPGQKKPWPPGDGGGKPPRPPGPPPKSPPGPRGRPPFP

SEQ ID NO: 157604 - protein, 116 aa, Glycine max
  unsure (1)..(116): unsure at all Xaa locations
  Clone ID: PAT_MRT3847_113336C.1.pep
IQNTPVSSAHPVDIQIRVALFCQACRRCPETGGNIMQPGGAIFAKDFETNGVYTXNKPSMGTPXGKGRKAGFGKKGKSGGQXTFGAGLEKGNIQIMAEFVKXQAEQMWPRIQSKKG

SEQ ID NO: 157605 - protein, 126 aa, Glycine max
  unsure (1)..(126): unsure at all Xaa locations
  Clone ID: PAT_MRT3847_113337C.1.pep
GETYNGEDLVCYSWGYNSRGQLGLGDRESRLHPEVVRTFDEESPYEVACGAFHTALLTLKKKPSDTVESTCWTFGLGGNGQLGHGTTQSTLFPTPVKELPQNVSLICVDCGLFHTXVVSSNGDVWS

SEQ ID NO: 157606 - protein, 57 aa, Glycine max
  Clone ID: PAT_MRT3847_113338C.1.pep
LHMGLSVDKVDLHRTNAIKAVAKKKSLQLGNFASTCDHHRGYTFIIILSMQSPKCSV

SEQ ID NO: 157607 - protein, 61 aa, Glycine max
  Clone ID: PAT_MRT3847_113339C.1.pep
KTVIIGDPITRVINASSASQLVDPNPNWLIVRYTQNYFKHPKYVQTNLPAKPTIRTLRIIP

SEQ ID NO: 157608 - protein, 51 aa, Glycine max
  Clone ID: PAT_MRT3847_11333C.1.pep
PCDFPRVKWVIKWSPPHSLWCAQIIGLVKAFLKELRRFRKILKSYQPCANF

SEQ ID NO: 157609 - protein, 163 aa, Glycine max
  Clone ID: PAT_MRT3847_113340C.1.pep
MAAASASSMISTPALSPTIQKHHHLKPSNVCFQGLRPLARFTKASSTKVSTTTKRVIPKGGVRAELNSALVISLSTGLSLFLGRFVFFNFQRENVAKQVPEQNGLTHFEAGDTRAKEYVSLLKSNDPVGFNIVDVLAWGSIGHVVAYYILATTSNGYDPAFFG

SEQ ID NO: 157610 - protein, 142 aa, Glycine max
  Clone ID: PAT_MRT3847_113341C.1.pep
PVGQGLLGAGEDRMEQSYSWENWALDKEMGEDEEEFLRDILSKPAFSSESESQAPVVSCSAKSKRAPMTYILSFDNSTITPAPSSPPTLEAQPGKRAKRASHIMAERKRRQQLTQSFIALSATIPGLNKILLSSLASVLEMK

SEQ ID NO: 157611 - protein, 60 aa, Glycine max
  Clone ID: PAT_MRT3847_113342C.1.pep
MNDMKVRSGLCVWPNLRQLCFRKGILYGFMRLFSTPLKTLRGASRSLRVAQFCSVANMSS

SEQ ID NO: 157612 - protein, 331 aa, Glycine max
  Clone ID: PAT_MRT3847_113343C.1.pep
LPIKVRIQRKGEFKEMEQIKHRTVEVNGIKMHVAEKGEGPVVLFLHGFPELWYSWRHQILSLSSLGYRAVAPDLRGYGDTEAPPSISSYNCFHIVGDLVALIDSLGVQQVFLVAHDWGAIIGWYLCMFRPDKVKAYVCLSVPLLRRDPNIRTVDGMRALYGDDYYVCRFQKPGEMEAQMAEVGTEYVLKNILTTRNPGPPILPKGRFQFNPEMPNTLPSWLTEEDLAYYVSKFEKTGFTGPLNYYRNFNLNWELTAPWTGGQIKVPVKYITGELDMVYNSLNLKEYIHGGGFKQDVPNLEQVIVQKGVAHFNNQEAAEEIDNYIYDFINKF

SEQ ID NO: 157613 - protein, 57 aa, Glycine max
  Clone ID: PAT_MRT3847_113344C.1.pep
CRSRAVPCHYLKSSDHIPLIPLIPMCMLSITLRSPILTPFYDESFSCFIHNSFTPVF

SEQ ID NO: 157614 - protein, 34 aa, Glycine max
  Clone ID: PAT_MRT3847_113345C.1.pep
KNPGFTQLNGLAAHPLFASCRNSKKARTDRLSKQ

SEQ ID NO: 157615 - protein, 50 aa, Glycine max
  Clone ID: PAT_MRT3847_113346C.1.pep
RLFRRELEDPIGQCLLTPKLLVNETAQLALAAAIHMIITYACHDECPHAC

SEQ ID NO: 157616 - protein, 143 aa, Glycine max
  unsure (1)..(143): unsure at all Xaa locations
  Clone ID: PAT_MRT3847_113347C.1.pep
MHTDMRLESGTCNVCXAPCSSCMHLNHALMGSKAEELSDENCRIGEANTMDEDNACSLRSRACESSQHTVSETSNMQSGNSSHDAVSENADSRQIIPNKYQDYKHLERYDDNTSCISRASDANLANDSHRNEERMILHAERDH

SEQ ID NO: 157617 - protein, 63 aa, Glycine max
  Clone ID: PAT_MRT3847_113348C.1.pep
LIKRMLMLWVELMQIPSFEPLTKASILPKPLERPFGAACPVFQFHQSPPLELTKLCLIGKLMV

SEQ ID NO: 157618 - protein, 40 aa, Glycine max
  Clone ID: PAT_MRT3847_113349C.1.pep
GAHCNATHDRSSPAKVTPTCPLPLRVLLKARGLAPIVPRT

SEQ ID NO: 157619 - protein, 162 aa, Glycine max
  unsure (1)..(162): unsure at all Xaa locations
  Clone ID: PAT_MRT3847_11334C.1.pep
SHHRLNVLFLPYPTPGHLLPMGDTARVFAKRGVSVTILTTPAIAFXQWQNALDSDFNGGDHIRTQVGPFPSGQVXGLIEGLENMEDATTLEMCGKIGDGLSTLQEEMELRCQDLQPDCVVTEMRCPWTGESGEKLGIPRIFFYRSSDFSNCASHFIRRHRPH

SEQ ID NO: 157620 - protein, 50 aa, Glycine max
  Clone ID: PAT_MRT3847_113350C.1.pep
EIADKLRKQKIQKSLCCGQNHCDMPFIKTLMGLELYANMVLKICNVLKLY

SEQ ID NO: 157621 - protein, 67 aa, Glycine max
  Clone ID: PAT_MRT3847_113351C.1.pep
VHSMQRIMNASGSNGNIGLLVGIDLVGLQRARKGFSNPNGFCDKAGVAYTQKILCGNFSMDSWLPIF

SEQ ID NO: 157622 - protein, 102 aa, Glycine max
  unsure (1)..(102): unsure at all Xaa locations
  Clone ID: PAT_MRT3847_113352C.1.pep
PFPLTTYSPTGKLAQTQHASTAVPSQQTSIGINAANXVVIATEKKLPSIXVDESSVXKIHVSTPNIGVIYSIIVPDIRVFVHTSTKQAEHYHRTYKEPIPGT

SEQ ID NO: 157623 - protein, 133 aa, Glycine max
  Clone ID: PAT_MRT3847_113353C.1.pep
KIILKVYIPGWRFVPTTTHRRIKEIDRVIKALLMDMINKREKALKADEATKNNLLDILLESNHKEIQEHKNNKNVGLNLEEVIQECKLFYFAGQETTSVLLVWTMILLSRYPDWQTRAREEVLKVFGNQKPNF

SEQ ID NO: 157624 - protein, 323 aa, Glycine max
  Clone ID: PAT_MRT3847_113354C.1.pep
STSFNFRIQGHLLKIIEVEGSHTIQESYDSLDVHVGQSVTVLVTLSGSISDYIIVASSRFTDPIVLTTTATLRYSGSNSKAQIPTRSGPATNDVEWSIKQARTIRLNLTANAARPNPQGSFHYGTIPVQRTLVLANSKAIINGKLRYAVNGISHINPNTPLKLADWFNIPGVFDLNTIKDVPSPQGTPAKLGTSVIGFTLHDFAEIIFQNNENYTQSWHMDGSSFYVVGYGNGLWIPDSRKTYNLVDGMTRHTVQVYPNSWSAILVSLDNKGMWNLRSAIWPQRYLGQELYLRVWNNEQSVYTETLLPPNALFCGKAKHLPKS

SEQ ID NO: 157625 - protein, 69 aa, Glycine max
  Clone ID: PAT_MRT3847_113355C.1.pep
MDAIDSVFDPLREFAKDSVRLVKRCHKPDRKEFSKVAVRTAIGFVVMGFVGFFVKLIFIPINNIIVGSG

SEQ ID NO: 157626 - protein, 123 aa, Glycine max
  unsure (1)..(123): unsure at all Xaa locations
  Clone ID: PAT_MRT3847_113356C.1.pep
PQKGGGGLWNVPLVSSLQKGPRCVYTSTRLCEYXGWELKAANPKHRRFTWGLRAAERHGVDWYISDIQSGLRALVKTGYGARVTPYVDDSVDIDVKSANGDMVPEFLRWLGERKFASGGRIMQ

SEQ ID NO: 157627 - protein, 74 aa, Glycine max
  Clone ID: PAT_MRT3847_113357C.1.pep
PTRTLVFFYYCQQILGIINALACPSTIGGVSQLFNSHMLPPLNFECLTIHSYTNGRVTTRLWINICSGTHCGYT

SEQ ID NO: 157628 - protein, 81 aa, Glycine max
  unsure (1)..(81): unsure at all Xaa locations
  Clone ID: PAT_MRT3847_113358C.1.pep
RGLGIKLESSATQVRRVRMTNTVTRHVSTGSPWYGPDXVKYLGPFSGEPPSYLTGEFPSDYGWDTAGLSAXPEDFATNREL

SEQ ID NO: 157629 - protein, 104 aa, Glycine max
  unsure (1)..(104): unsure at all Xaa locations
  Clone ID: PAT_MRT3847_113359C.1.pep
HALVHSARGEMERFKICDKETQTXAFFKRSLCQQPKTYPRGNAGSXTXDWLNNAVXESKNQIDNYEADLEGLSVKKGKNRPPRLTHLQTSITSFNAHIKKCEFI

SEQ ID NO: 157630 - protein, 80 aa, Glycine max
  Clone ID: PAT_MRT3847_11335C.1.pep
MAERGRALPKFGDWDVNNPSAAQDFSVIFNKARNERKTGANKIHFPPNHNNTTKCIPPQVVLGKSHYKKWFCCINTSAES

SEQ ID NO: 157631 - protein, 170 aa, Glycine max
  unsure (1)..(170): unsure at all Xaa locations
  Clone ID: PAT_MRT3847_113360C.1.pep
SQELXXXLQVXXXXXKRLXXQSGKVYLQKCNTTIGFPPXXEHNKLNAKPAGPKLQDLNFPSSSPSNVLLNXFDETSLDLKLVSSTLPSSNNYQSVCTLDKVKSALERAEKEPIVRKRTSFLKSPLSVSSPSYSSSSSSIRETTIQEDECEERLNVSSSPMAAGCPGCLSI

SEQ ID NO: 157632 - protein, 251 aa, Glycine max
  Clone ID: PAT_MRT3847_113361C.1.pep
MAAEVSSLIRVMGGGYKEEQHRTVGNESHGEKSTALITRDLLGGSSSIESQELDLDLQVPSGWEKRLDLQSGKVYLQKCNTTIGSPPIYDHNKLNAKPAGPKLQDLNFPSSSTSNVLLNLFDETSLDLKLVSSTLPSSNNYQSVCTLDKVKSALERAEKEPIVRKRTSFLKSPLSASSPSYSSSSSSIRETIQEEECEERLNVSSSPLAAGCPGCLSYVMIMKNNPKCPRCNSLVPIPSMKKPRIDLNISI

SEQ ID NO: 157633 - protein, 66 aa, Glycine max
  unsure (1)..(66): unsure at all Xaa locations
  Clone ID: PAT_MRT3847_113362C.1.pep
KXPPPPXXTXTXTITXFYPTIILSLFTIYILQTFXISSNQHLFHFYNNNIKHLTQNINTYQFPLQF

SEQ ID NO: 157634 - protein, 123 aa, Glycine max
  unsure (1)..(123): unsure at all Xaa locations
  Clone ID: PAT_MRT3847_113363C.1.pep
AHVSGGIRYHPEADPDEVNAVAQLMTWTAAVANLPYGGAEGGPGRDPWKVRVSAXEGVTRVYTHALQDVIGSHTNVPPPDTGAGPHNTVWFLDELYKVPGHSAAVYTGKPIDLDDTVKLYADT

SEQ ID NO: 157635 - protein, 420 aa, Glycine max
  Clone ID: PAT_MRT3847_113364C.1.pep
TIFLRKCFLNKFIVNGFDIRAGLVISQASIYDLQKQKYRPVLYKGFVSELFVPYQDPSEEWYYATFFDSGEYRDLELVSSLQPLTDCPPNAEFIDAYYASSDGTPVKISNAFCIFEKYAGDIMWRHTEVGIPDEVITEVRSDVSLVVRMVSTVANYDYVIDWEFKPSGSIKSVVGLTGILGLKAGTYTNTDQIKEDIYGTLIADNTIGIYHDHFFTYYLDLDIDGEANSFVKSNLETVRVKDDTTPRKSYWTVVSETAKTEADAKINLGSKPSQLLVVNPNKKSKQGNKIGYRLLPGPAARPLLLNDDYPQIRAAFTNYDVWVTPYNKSEKWVGGLYVDRSRGDDTLAVWSRRNRKIENKDIVLWYTMGFHHVPCQEDFPVMPTLSGGFELRPTNFFESNPVLKTLSPKLVGWPNCTSQH

SEQ ID NO: 157636 - protein, 66 aa, Glycine max
  unsure (1)..(66): unsure at all Xaa locations
  Clone ID: PAT_MRT3847_113365C.1.pep
MAKLVXPLCFLLFSGCXFDFSSREQLVXNECQIEKLNVVKPDKRIESEGGLIETWNPSNKPFQCAG

SEQ ID NO: 157637 - protein, 102 aa, Glycine max
  Clone ID: PAT_MRT3847_113366C.1.pep
PRQVKECYCRLWRYCVRERKCVVVRLNTVSTGAGEACKRSNCKAATKLEATTTHKTRQNWNIDTQNGLERCWGFGGEICDREIEERLCDTIKLMNTSWYIAR

SEQ ID NO: 157638 - protein, 79 aa, Glycine max
  Clone ID: PAT_MRT3847_113367C.1.pep
FHTHTHKHNHSLWNIVYTNTNTKTSRRSGYNNTGTQPRIQLNSGLILVKPSVVVVVVVVVVVSLNKFSCWFDCSTSSNA

SEQ ID NO: 157639 - protein, 66 aa, Glycine max
  Clone ID: PAT_MRT3847_113368C.1.pep
AGPPPGPGPGFQARPTFPVRQRWKAEDRLADLNHRHQNRTGLHFFNLHLAISVFECYRLGGGKSLS

SEQ ID NO: 157640 - protein, 73 aa, Glycine max
  Clone ID: PAT_MRT3847_113369C.1.pep
LRVSSRISNAKIILIIDCDMYSNHSQSVRDALCFFMDEEKGQEIAFVQFPQNFENLGKNDLYGNAISATVEVS

SEQ ID NO: 157641 - protein, 116 aa, Glycine max
  unsure (1)..(116): unsure at all Xaa locations
  Clone ID: PAT_MRT3847_11336C.1.pep
LPIEKRDSWPPLSTLTQXKLTFYKLHPSELTKDXELMQINNSKLLTXLSPSIFSDHSKRPGDEDPSPPYNMFSNVLDMNALFGGLNSAWAQTKYSEQAINVNALRALNLLLKAPYK

SEQ ID NO: 157642 - protein, 61 aa, Glycine max
  Clone ID: PAT_MRT3847_113370C.1.pep
SSLAWIHVKLHLGFEFEAVVVVLLSRAFPESRNFLLGTVSSTSAMLSANIHYRVSFCGLYI

SEQ ID NO: 157643 - protein, 400 aa, Glycine max
  unsure (1)..(400): unsure at all Xaa locations
  Clone ID: PAT_MRT3847_113371C.1.pep
MESGEDYSLFETRKDKGRHIRRIYAISLFVAICFIWAYRLSHIPAYGKWAWLGLFAAELWSGFYWLFGQALRWNMLFRKTFINRLSERYENSLPRVDMFVFTADPIIEPPMMVINTVLSVMAYDYPAEKLSVYLSDDAGSDITFYALLEASTFAKHWVPFCKRFKVEPRSPAAYFNTLVSTNSHDHNHAKDLDAIKKLYVDMKRRIEDVVKLGGVPSEARSKHNGFSQWDSYYSRHDHDTILQILLHERNPHNSKDVDGFVMXTLGKQLHGAYQYHHNQKLGSXSFIDLNXLRVSSRISNAKIILIIDCEMXNNPSLESGEDLSFFKDRKNEGEIAFGQFPKNFEILGMNHLDGKTISETRKWQMGLAWFVCCRTLVRFLLALCPAFRWDVLFGQEIAVS

SEQ ID NO: 157644 - protein, 96 aa, Glycine max
  Clone ID: PAT_MRT3847_113372C.1.pep
MPNHKLRTTHMESSIALVTIIDVIFVYMLIQGATADYGSSHSAYATIYVDADASGTMGGACAYGNHYSHRYGTDTRALTTALVNNTLTCGACYAMT

SEQ ID NO: 157645 - protein, 127 aa, Glycine max
  Clone ID: PAT_MRT3847_113373C.1.pep
MHRQSLGSPSPKLPKLETLVTDEDDAPKPHRLSLSPPPPPPHKFVHLIPVLTLLCFFVLYLFSHTPSPSDLNHFTGFNRSPSHRLDLAEKIGGDIGQYMDVKRSDVLAIRSLQQIPKPRPHRKLADF

SEQ ID NO: 157646 - protein, 38 aa, Glycine max
  unsure (1)..(38): unsure at all Xaa locations
  Clone ID: PAT_MRT3847_113374C.1.pep
MQDHDHHHHDHDQHHHHAGAGACSASVGKAGXVYHSHD

SEQ ID NO: 157647 - protein, 51 aa, Glycine max
  Clone ID: PAT_MRT3847_113375C.1.pep
RPQIYRLNLNLILSKIVRNCLQRAPILLVGMNLPKPLRLLSLVRRDSNYIG

SEQ ID NO: 157648 - protein, 78 aa, Glycine max
  Clone ID: PAT_MRT3847_113376C.1.pep
PIPGRQLTSSRLSFFFFFFFFFFFFFFFFFFFFFFFRTKGKGPKFNLRGPFNPKFFGKTGPFEKFCKNLLNLGFSFCT

SEQ ID NO: 157649 - protein, 56 aa, Glycine max
  Clone ID: PAT_MRT3847_113377C.1.pep
KMGAPQLPHTTLDRCYLHPHEKKGLNRSIRIVLSFFQNGLRAKPNFCAKRAYKNNT

SEQ ID NO: 157650 - protein, 120 aa, Glycine max
  unsure (1)..(120): unsure at all Xaa locations
  Clone ID: PAT_MRT3847_113378C.1.pep
GGAPISRQMRELDYFVYIAVGTPMGDGLTFSTRGALNFNDVXFVVLDEAYHILHVGFXEDLDNILVRLPXNIRLLMFSATLPSWIMHIFRNYLDNXPLTIDLVAYSDHIFADGISLYSIA

SEQ ID NO: 157651 - protein, 42 aa, Glycine max
  unsure (1)..(42): unsure at all Xaa locations
  Clone ID: PAT_MRT3847_113379C.1.pep
NEAEDIEETRRKSYYSYFAMIFKRKRKQVYNNIASQQQFTXK

SEQ ID NO: 157652 - protein, 100 aa, Glycine max
  Clone ID: PAT_MRT3847_11337C.1.pep
SHSMPMHTKFSYGVFVHNVFILMLFVTAPEIACMRIPYGVSTQETIRLAVRTIATITPSTVYGLWCEILRGTVLGMVTGGWWNGWASGWGGRCGGGGGGG

SEQ ID NO: 157653 - protein, 38 aa, Glycine max
  Clone ID: PAT_MRT3847_113380C.1.pep
SVYILNIHGLGKTNFLRIQYLILLFIYYLCESVHLSID

SEQ ID NO: 157654 - protein, 24 aa, Glycine max
  Clone ID: PAT_MRT3847_113381C.1.pep
PKFLILPNIIKAGIIVLQCEHSHL

SEQ ID NO: 157655 - protein, 59 aa, Glycine max
  Clone ID: PAT_MRT3847_113382C.1.pep
HSTSLAARVVAQIILDRRNMVNEPDHIYIASTGHINSGQCTTTVHLIYQPVDIHILQLR

SEQ ID NO: 157656 - protein, 171 aa, Glycine max
  Clone ID: PAT_MRT3847_113383C.1.pep
MTILPHSNNKSSNHKFIAHQNYMASETHHHVQGLTPEELTKLEPIIKKYHLFEQSPNTCFSIITYRIEAPAKAVWPFVRSFDNPQKYKHFIKGCNMRGDGGVGSIMEVTVVSGLPASTSTERLEILDDDKHVLSFKVGGGEHRLENYRSITSGNEFNKEGQVNTIVLESYS

SEQ ID NO: 157657 - protein, 79 aa, Glycine max
  Clone ID: PAT_MRT3847_113384C.1.pep
GFQPVASVYILSCSMTQQCSCVNSDRSSSLMNDMYTSDYGYAVCVWFSIFRALRSEPIAAQCTPLSIHLNMMYVQHLIC

SEQ ID NO: 157658 - protein, 216 aa, Glycine max
  Clone ID: PAT_MRT3847_113385C.1.pep
EEISSVPIQRHDKDTMLWLAEPNGQYTTKSTYRLCMNPSTTSSDRKIFKTIWKLKIPPRVVIFCWRLLKNRLPTKDNLLRRNVITQEANCPLCGCVQGVVGHLFFNCNLTKGLWWESMRWIRVVGPLPITPVCHFTQFCDGFGAAVNHSTRCGWWIALTSFIWQHRNQLIFQGKSFDPYKVMDHAIFLAWSWLKAKEKDFNISFNHWSSNISNFFG

SEQ ID NO: 157659 - protein, 54 aa, Glycine max
  Clone ID: PAT_MRT3847_113386C.1.pep
IDVLGNLVHGVILTFQTRVVSLVCYWWEYQILESSPRNNMYPTPITTRISPDEW

SEQ ID NO: 157660 - protein, 165 aa, Glycine max
  unsure (1)..(165): unsure at all Xaa locations
  Clone ID: PAT_MRT3847_113387C.1.pep
YGLGRLLGLVPFYLKGSEDWRAVSTIHTYAIWNYGGSXNGVRNPKLKVVIYSWVXIGYDSLMCYHCPKDSSLNIFDIHHSHILIXSSHLFKCYSILRSLDADIKPLDNTVFSLHEHEIKSVSNRNPPYLPCNDLTIDLFIXRTRATLDRLCAKAHILAGANXVLI

SEQ ID NO: 157661 - protein, 127 aa, Glycine max
  unsure (1)..(127): unsure at all Xaa locations
  Clone ID: PAT_MRT3847_113388C.1.pep
MMNFDGFQKAIEERLEGIPVASEEFLLVSGSSSSASXKDDAEALLSQVTLIDPHARQGSKVVPVALNKVLPLSLSVSVLYFSLAFGLLCFLLQVFQLKVNSVAFRLIPEFSQVKNALKVSLFLAIGH

SEQ ID NO: 157662 - protein, 122 aa, Glycine max
  Clone ID: PAT_MRT3847_113389C.1.pep
GKIVRGPNTCGGSPHGCGTCIYLADSGGEGVPSGIDDYGVVATPTGGATVLKTTVDGLGAHRVLCFHHPLSVFTDPHPLKEPTGICCASGGPGIFACTIWGTSCTLVMQKQICHDNVQPNLP

SEQ ID NO: 157663 - protein, 159 aa, Glycine max
  Clone ID: PAT_MRT3847_11338C.1.pep
NDVKMSDAEGSLNGGEPSVVPMEEGGKETQMAGIYDLGAVLTHKGRSADSGHYVGWVQPENGQWIEFCHVHPQPKLEEGLTCLFGGGDWHLAYIIMDKGRGGFVELLRTGTELVFTSKIQGVNYKWFNPGIIWTGLPRVYASIRQCLIMCASTRKCICI

SEQ ID NO: 157664 - protein, 113 aa, Glycine max
  Clone ID: PAT_MRT3847_113390C.1.pep
VGETETLTNIEEEDEHSKVEAEESQTLYSLLRAEQRSLHEILSQFNAAIPSSRHFTLSSYLLILLQDNKVLSTTERLIAFALLVEAYSSQKPASNPFISFIVNVSTYYCCCTC

SEQ ID NO: 157665 - protein, 157 aa, Glycine max
  Clone ID: PAT_MRT3847_113391C.1.pep
AARRRQKGRLKARVEVLQRSQRNLLGEDLAQMNTNELEQLENQLEAALRNIRSTKTQFMLDQLSDLHHRETLLIETNNVLRSKLEETDHSQVQVSLALEAGGPSIQYTNFPPQSEGFFEPVGVNPTLQIGYNQTGPDDTNVGASSLSMHGFASGWML

SEQ ID NO: 157666 - protein, 138 aa, Glycine max
  Clone ID: PAT_MRT3847_113392C.1.pep
MAPTIYNFSYSKRFSESFNSSKSKRESSSSNILAFHSTAQWNAHYKATKETNKLMVLDFTATWCGPCKLMDPVIQEFAGNYTDVDFIKIDVEELTEVSQALQVYQLPTFILVKKGKVADRVVGVKKEELKRSIEKHRK

SEQ ID NO: 157667 - protein, 363 aa, Glycine max
  unsure (1)..(363): unsure at all Xaa locations
  Clone ID: PAT_MRT3847_113393C.1.pep
MAHPRLTNSLSSSPLRNLNPNPKLIPLCTCSCRPFSSQSLILHSHPLFLAKPKPLLRFARRTGPPLVLAAVGQAEPELPQTSAPTVIPEDEEDLPSKSQQQLRNRVVFGLGIGISVGGIVLAGGWVFAVALAAAVFTGAREYFELVRSHGITEGMTPPPRYVSRVCSVICALMPLFVMYRGHIDVSVTSAAFVLATALLLQRGSPRFAQLSSAIFGLFYCGYLPSFWLKLRCGLAAPALNTRIGATWPILLGGQAHWTVGLVATLITISSVIAADTFAFLGGKAWXTLTHGILYFIAIGLGVLSLFGSVFGDLTESMIKRDAGVKDSGTLIPGHGGVLDRADSYVFTGALIQLLAISRYHCME

SEQ ID NO: 157668 - protein, 84 aa, Glycine max
  Clone ID: PAT_MRT3847_113394C.1.pep
VVRTICYSAKDTRKHLLVVQQHTGSTKRRRQRDDRRTRQARPRTHRHGHGCQPHKRPPPESLQQRTTEKNNMGHTKLTNLPTCT

SEQ ID NO: 157669 - protein, 106 aa, Glycine max
  Clone ID: PAT_MRT3847_113395C.1.pep
AVPHVPLYLIRFTHKQRYYCRCYIAFYLGLIMPHMSVLSAPLTRRCQVTEVALLSVVFIAYPLAHFNLEFSHPGHVPPLVGFLSNPVHLIYKQSYLDTHFWGYLTF

SEQ ID NO: 157670 - protein, 155 aa, Glycine max
  Clone ID: PAT_MRT3847_113396C.1.pep
PRIGATWPILLGGQAHWTVGLVATLITISSVIAADTFAFLGGKAFGRTPLTSISPKKTWEGTIIGFCGCIVTSAVLSKIFSWPIPLSSAIGLGVLSFFGSVFGDLTESMIKRDAGVKDSGTLIPGHGGVLDRADSYVFTGALAYNFIKTVLPLYE

SEQ ID NO: 157671 - protein, 168 aa, Glycine max
  unsure (1)..(168): unsure at all Xaa locations
  Clone ID: PAT_MRT3847_113397C.1.pep
KGCPRFAQLVIPIFGLFYCGYLPSFWLKLRCGLAAPALNTRIGATWPILLGGQAHWTVGLVATLITISSVIAADTFAFLGGKAFGRTPLTSISPKKTWEGTIIGFCGCIVTSAVLSKIFSWPIPLXGVKDSGTLIPGHGGVLDRADSYVFTGALTYNFIKTGLPLYGV

SEQ ID NO: 157672 - protein, 587 aa, Glycine max
  Clone ID: PAT_MRT3847_113398C.1.pep
MESVKFINMNAKHSSIFLLAMIFVLILASANAKIHEHEFVVEATPVKRLCKTHNSITVNGQYPGPTLEINNGDTLVVKVTNKARYNVTIHWHGVRQMRTGWADGPEFVTQCPIRPGGSYTYRFTVQGQEGTLWWHAHSSWLRATVYGALIIRPREGEPYPFPKPKHETPILLGEWWDANPIDVVRQATRTGGAPNVSDAYTINGQPGDLYKCSSKDTTIVPIHSGETNLLRVINAALNQPLFFTVANHKLTVVGADASYLKPFTTKVLMLGPGQTTDVLITGDQPPSPYYMAARAYQSAQNAAFDNTTTTAILEYKSPHHSNHSHHHSKGALKKKTKPIMPSLPAYNDTNTVTAFSKSFRSPRKVEVPAEIDQSLFFTVGLGINKCPKNFGPKRCQGPINGTRFTASMNNVSFVLPNNVSILQAHHLGIPGVFTTDFPGKPPVKFDYTGNVSRSLWQPVPGTKAHKLKFGSRVQIVLQDTSIVTPENHPIHLHGYDFYIVAEGFGNFDAKKDTAKFNLVDPPLRNTVAVPVNGWAVIRFVADNPGAWLLHCHLDVHIGWGLATVLLVENGVGKLQSIEPPPLDLPLC

SEQ ID NO: 157673 - protein, 88 aa, Glycine max
  unsure (1)..(88): unsure at all Xaa locations
  Clone ID: PAT_MRT3847_113399C.1.pep
LHISSFLSLSQAFYCGIKVILKMNCYGLXHNAFAACEEMTGPVNFVEQKEPVICPXPRRVGVVSNMPMTHLRRHFKEFIGIHCFPFEF

SEQ ID NO: 157674 - protein, 70 aa, Glycine max
  Clone ID: PAT_MRT3847_11339C.1.pep
LPLAHELLPWIQHHCLHCCFPNIHHGYFYPLWRPATPKPCTSLFHLTRIFESISTAIVAQINYFYLTAIT

SEQ ID NO: 157675 - protein, 252 aa, Glycine max
  Clone ID: PAT_MRT3847_1133C.1.pep
YEAQFVRAKALKGLIELVNGNADSAEDFFDKSLREKYCDGTAGLSYAEFLHKIGNYPMAKEVYRNVVQGAIEVKNAGRPYLGAGNMSVDELIVGSMFALGQLELLMGNYSNAECHLTQALSRAEEAYGDSKHPTVGVALTSIALLYRRKAIQEHSSSLLVQEGLYRKVIDILKVPTMETESEDAAPLVDRSDIAALATGAYAEVLSVQEKRQAEGEKMKDLAESLWKPRWLSLANAIDSDKNIIDSRICRIL

SEQ ID NO: 157676 - protein, 589 aa, Glycine max
  unsure (1)..(589): unsure at all Xaa locations
  Clone ID: PAT_MRT3847_113400C.1.pep
MEPAKTIHNNVKYSPIFLAIFVLILASALSSANAKIHEHEFVVEATPVKRLCKTHNSITVNGQYPGPTLEINNGDTLVVKVTNKARYNVTIHWHGVRQMRTGWADGPEFVTSVPDXPGGSYTYRFTVQGQEGTLWWHAHSSWLRATVYGALIIRPREGEPYPFPKPKRETPILLGEWWDANPIDVVRQATRTGGAPNVSDAYTINGQPGDLYKCSSKDTTIVPIHAGETNLLRVINAALNQPLFFTVANHKLTVVGADASYLKPFTTKVLILGPGQTTDVLITGDQPPSRYYMAARAYQSAQNAAFDNTTTTAILEYKSPNHHNKHSHHRAKGVKNKTKPIMPPLPAYNDTNAVTSFSKSFRSPRKVEVPTEIDQSLFFTVGLGIKKCPKNFGPKRCQGPINGTRFTASMNNVSFVLPNNVSILQAHHLGIPGVFTTDFPGKPPVKFDYTGNVSRSLWQPVPGTKAHKLEFGSRVQIVLQDTSIVTPENHPIHLHGYDFYIVAEGFGNFDPKKDTAKFNLVDPPLRNTVAVPVNGWAVIRFVADNPGAWLLHCHLDVHIGWGLATVLLVENGVGKLQSIEPPPVDLPLC

SEQ ID NO: 157677 - protein, 396 aa, Glycine max
  Clone ID: PAT_MRT3847_113401C.1.pep
MAHPRLTNSLCSSPLRNLNPNPKLIPLCTCSCRPFSSQSLILHSHPLFLAKPKPLLRFARRTGPPLVLAAVGQAEPELPQTSAPTVIPEDEEDLPSKSQQQLRNRVVFGLGIGISVGGIVLAGGWVFAVALAAAVFTGAREYFELVRSHGITEGMTPPPRYVSRVCSVICALMPLFVMYRGHIDVSVTSAAFVLATALLLQRGSPRFAQLSSAIFGLFYCGYLPSFWLKLRCGLAAPALNTRIGATWPILLGGQAHWTVGLVATLITISSVIAADTFAFLGGKAFGRTPLTSISPKKTWEGTIIGFCGCIVTSAVLSKIFSWPIPLSSAIGLGVLSFFGSVFGDLTESMIKRDAGVKDSGTLIPGHGGVLDRADSYVFTGALAYNFIKTVLPLYGV

SEQ ID NO: 157678 - protein, 148 aa, Glycine max
  Clone ID: PAT_MRT3847_113402C.1.pep
HPKKKSRWSEKPPKKPLAGVFGNSGWGPLLMDPGSIKRLNENPLQFGRQPPLGAKDLKKAAPRVSPGNPARALEGNQLSLMGGDINFGEKRGKTLSRGKRFIRHHSQQITGPKIKGLTPGGPKGGATSAQGGGPHPPFYLGKPPPPPG

SEQ ID NO: 157679 - protein, 64 aa, Glycine max
  Clone ID: PAT_MRT3847_113403C.1.pep
VSLFALLPRALRCANKFSISSILVMVPFVAGLEGPHLLLEVVRYFVAQDGDTKFVLRGLNPVDF

SEQ ID NO: 157680 - protein, 64 aa, Glycine max
  unsure (1)..(64): unsure at all Xaa locations
  Clone ID: PAT_MRT3847_113404C.1.pep
TFGSLXPWRLECSSSGSTRYARXSSSSEGASPCAFSSRILSTCICITNVAYHSRPEYVRPASIL

SEQ ID NO: 157681 - protein, 127 aa, Glycine max
  unsure (1)..(127): unsure at all Xaa locations
  Clone ID: PAT_MRT3847_113405C.1.pep
VYSFGVVLLKLLTXRRVVEDDRPGFSEETLVDWARPFLSDSRRILRIMDSRLGGQYSKKGARAAAALVLQCLNTDPKYRPTMVTVLAELEALHSSNSFPRTPKSGTENHTTEHSSHSHKSATSSNKL

SEQ ID NO: 157682 - protein, 92 aa, Glycine max
  Clone ID: PAT_MRT3847_113406C.1.pep
LLFVVQQGLADLLDPNTLQQRAFNALFPFTPYFNFLVKKGLGTLNLEKPAVHHRASYNRGNPLKMPAKTGKRGSEITSPKRSGQCGLGTTEA

SEQ ID NO: 157683 - protein, 117 aa, Glycine max
  Clone ID: PAT_MRT3847_113407C.1.pep
PLHYTTSSDADRIMLAFSTISTRMSPMRKHAMMALIAHHPNLIFPPQSILCFLLQQASFLEICSVCFSKSFKITFNCSSYAAQRRSHFCLSLYNSSDSSRILLSFSSCPVQHNNYRR

SEQ ID NO: 157684 - protein, 52 aa, Glycine max
  unsure (1)..(52): unsure at all Xaa locations
  Clone ID: PAT_MRT3847_113408C.1.pep
WHEFQMGSLPYTXFLTKDLLPSLGARINQETRLXRYIISPFNPRYRAWEMIL

SEQ ID NO: 157685 - protein, 45 aa, Glycine max
  Clone ID: PAT_MRT3847_113409C.1.pep
GTFQYADFKQYCRTFQILLNLGVKTYNLNLQIYTCHPNNMLMNQQ

SEQ ID NO: 157686 - protein, 127 aa, Glycine max
  unsure (1)..(127): unsure at all Xaa locations
  Clone ID: PAT_MRT3847_11340C.1.pep
FCSFPTQDLRTGDVIYHVAEGDHYHVERAVAAGRTVFDRGPWTKMTVYERQRISLRADHLYEKHSDDLGGLMTWDHGKAYEQSAQIQISMVAXRLFRVYAGXADTIHGLTAAADGPYHVHTLHEPIG

SEQ ID NO: 157687 - protein, 236 aa, Glycine max
  Clone ID: PAT_MRT3847_113410C.1.pep
MELWKLFVTALMPVLKVLLITAVGTFLALHRFNILRESARKHLNTIVYFVFTPALVCSILAKTTTFKSLVAVWFMPLNILLTFIIGTTLGWLFMKITKAPSDMQGLVLGCCAAGNLGNLPLIIVPAVCKESSSPFGAVDVCNKKGMAYASLSLAIGNIYLWTFAYNIIRIYSCKIFNVNKVDDSTVGPVSAIETDLESHSTVPVVTAEDLSETNDHEPKQKHDSIWKCIGTKARAI

SEQ ID NO: 157688 - protein, 86 aa, Glycine max
  Clone ID: PAT_MRT3847_113411C.1.pep
TKSEPHSWELDFPIKGWGPNKGFEMGRSEWANQTSLHLKFLNAIPNSSILISLGISELNGVSLSAFVKLCDLKRSCDGWFFLSCIE

SEQ ID NO: 157689 - protein, 45 aa, Glycine max
  unsure (1)..(45): unsure at all Xaa locations
  Clone ID: PAT_MRT3847_113412C.1.pep
FCXCGDGGLPCLKIQTWLVVLPRNNMLNGPAKVKHKRKGIGKPTT

SEQ ID NO: 157690 - protein, 38 aa, Glycine max
  Clone ID: PAT_MRT3847_113413C.1.pep
SFPSTGFLRPSSYVRSMPVKQCATSPCKSGFFWSSTNV

SEQ ID NO: 157691 - protein, 57 aa, Glycine max
  Clone ID: PAT_MRT3847_113414C.1.pep
FFFTQGKMAFLGNQRQTKSTMHIIQRNKAEQDNSVLQHCLMHGLVHLVYTLQCDHPF

SEQ ID NO: 157692 - protein, 95 aa, Glycine max
  Clone ID: PAT_MRT3847_113415C.1.pep
AEELEVKRHRCHEEKPRFSKVGVLEETEEKPILSGSCVADDSIDELKEITTGFEQCQTSEECMATTLKNVKSEVAGESEEMERELDEVVKNSGIG

SEQ ID NO: 157693 - protein, 67 aa, Glycine max
  unsure (1)..(67): unsure at all Xaa locations
  Clone ID: PAT_MRT3847_113416C.1.pep
XYLXELXLDARRQWCSAFRSXVLLXXXXNXWPPXXGSXXNRXTESXHAIAAXXXEATRRRXKXQGVT

SEQ ID NO: 157694 - protein, 131 aa, Glycine max
  Clone ID: PAT_MRT3847_113417C.1.pep
RLDKKKKKYDVDLCIPPEIWELLKGAKKSEYEKIAFQYGITDLRCMLNRLKMVKVEVKKSAFFLKKLDPAYQADRGGKIKLVVEISDPDLPLKWYKNGQEIKPSSKYVFENVVSKRILTIYNITLADDAAY

SEQ ID NO: 157695 - protein, 103 aa, Glycine max
  Clone ID: PAT_MRT3847_113418C.1.pep
QESCALRHYDFYPPVPFEAPSEYYGSHFQFLFHCHQKLPTRVQKFHSFQHYYNLEQENCPKDFIFPVLLIKRIKVGQHERMIFPEMIFYKIPFHRFSTMTRVL

SEQ ID NO: 157696 - protein, 188 aa, Glycine max
  Clone ID: PAT_MRT3847_113419C.1.pep
PTDEGTRGRTRGRTRGQGAGVCPAAYRLIEKIVLLLYCGDIPERYSAIASKSRECFGFFRRGSRLLGWWSIDEGSREEEARLFCAGSPGYNTFTPDTVKKMPRADLVEEIWRLQAALGEQTQVTKFSQDEYERLQNEKILCRICFEEQINVVLLPCRHHILCSTCCEKCKRCPVCRGPIEERMPVYDV

SEQ ID NO: 157697 - protein, 49 aa, Glycine max
  Clone ID: PAT_MRT3847_11341C.1.pep
QRVWTMCKIRVHGFEILSPLGKSKKLYLHNHLFEFCYCTCIFCYKIINN

SEQ ID NO: 157698 - protein, 132 aa, Glycine max
  unsure (1)..(132): unsure at all Xaa locations
  Clone ID: PAT_MRT3847_113420C.1.pep
SKPHDGAGAGCRVPTTSPSPKIPISYRVAQLDTICDGPDYSNVQMPESFFTKPLDRHXATQSRTKAPTLXPFMTTGSPXVVEPLNVIACYHRIDITLDDTKDVLAEDFVHRVDITGHMRVVVLKDTMEPHDS

SEQ ID NO: 157699 - protein, 325 aa, Glycine max
  unsure (1)..(325): unsure at all Xaa locations
  Clone ID: PAT_MRT3847_113421C.1.pep
GSEFGSSSSRSSRFHRMCRALVPGDDENLTDEAVWETLAHFWISISMVFFIAATVFTLLKICGDVAALGWWDLFINFGIAQCFAFLVCTKWHNPTIHGGCHITEPCSSSNTIRYLDLRTGGLVVYTDEDRQQNGFCNLQDIGGHIMKIPFIGFQILLFMHLEGTPSSAKNLPHWVIFSPLFLLQGAGVLFAAYRLIEKIVLLLYFGDIPERYSAIASKSRECFGFFRHGSRLLGWWSIYEGSREEEARLFCAGSPGSVLYPQEVKXEYERLQNEKILCRICFEEQINVVLLPCRHHILCSTCCEKCKRCPVCRGPIEERMPVYDV

SEQ ID NO: 157700 - protein, 195 aa, Glycine max
  unsure (1)..(195): unsure at all Xaa locations
  Clone ID: PAT_MRT3847_113422C.1.pep
MSLTSTHAMDPEGGTTRQNSAKRESWRTVLTLAYQSLGVVYGDLSISPLYVFRSTFAEDIKHTESNEEVFGVLSLVFWTITLVPLLKYVFVVLKADDNGEGGTFALYSLLCRHAKVSSLPNYQVADEELQEYKKDSRGAAPETSFAARLSSTFEKHEVLQRVLLVLALIGTCMVIGDGIFTPAISVFSXVSGLEL

SEQ ID NO: 157701 - protein, 280 aa, Glycine max
  Clone ID: PAT_MRT3847_113423C.1.pep
MSVSVEGSAFGALFEEKNVHSEDSNELVLHGAFPLAKHERQNGFNATDMNAFGNSFRNYDAESERQRMVEELYRMQHINQTYDYGKRMREEYGKLDKLEMGIWECCELLNEVTDDSDPDLDEPQIQHLLQSAEAIRKDYPNEDWLHLTALIHDLGKILMLPSFGGLPQWSVVGDTFPLGCAFDESNVHHKHFKDNPDNTNPTYNTKNGIYKEGIGLDNVVMSWGHDEYMYLVAKENGTTLPPVALFIIKYHSFYALHRAGAYTHLMNEEAILQVVQENGT

SEQ ID NO: 157702 - protein, 69 aa, Glycine max
  Clone ID: PAT_MRT3847_113424C.1.pep
MYVAAEDIEAGPRTKFQTEPTLPIYLKFTDVTYKIVIKGMTTTEEKDILNGITGSLHPRLVVVEEEKSR

SEQ ID NO: 157703 - protein, 109 aa, Glycine max
  unsure (1)..(109): unsure at all Xaa locations
  Clone ID: PAT_MRT3847_113425C.1.pep
EKLFSEGEVRNWCFQVFQGLGYMHQRGYFHRDLKPENLLVTKDFIKIADFGLAREISSQPPYTEYRAPEVLLQSYLYTSKXDMWAMGAIMAELFSLRGPPTRPRVRFAV

SEQ ID NO: 157704 - protein, 101 aa, Glycine max
  Clone ID: PAT_MRT3847_113426C.1.pep
SGSSHDSRVKFGACRRPPIYNLLGLGPRLVDSAPGYFDISKVMCCAVYVRKAGYSRLFGATWDGNFRILMLWDFRGQNMLFSGFLRIRLPGVPFDSLAQHG

SEQ ID NO: 157705 - protein, 113 aa, Glycine max
  unsure (1)..(113): unsure at all Xaa locations
  Clone ID: PAT_MRT3847_113427C.1.pep
AMRSSIIXKIVVVGQDKRRLGAVIVTSKEEVLKVARKLSIIDSNSSDVSEEKVTSLIYKELKTWTSESPFQIGPILLVNEPFTIDNGLMTPTMKIRRDRVVAQYREQIDNLYM

SEQ ID NO: 157706 - protein, 89 aa, Glycine max
  Clone ID: PAT_MRT3847_113428C.1.pep
DQSLKDKDDAIPRVRKKVDTLTKAMEVEAKKMRREVAAMEKEVAAMRVEKEHENRAKRFSNIKGPVNIAQQQLISGRNVTRGGLTRSTQ

SEQ ID NO: 157707 - protein, 82 aa, Glycine max
  unsure (1)..(82): unsure at all Xaa locations
  Clone ID: PAT_MRT3847_113429C.1.pep
GDAIEMLAKKVDTLTKAMEVEAKKMRREVAAMEKEVAAMRVEKDQETRAKRFSNVKGPVNSAQQQLIFGRKRXRGGLTRSTQ

SEQ ID NO: 157708 - protein, 40 aa, Glycine max
  Clone ID: PAT_MRT3847_11342C.1.pep
RLQFLISYQQCSQYCEIDGHTLMPYFLLTTLCHIIKMPNL

SEQ ID NO: 157709 - protein, 63 aa, Glycine max
  Clone ID: PAT_MRT3847_113430C.1.pep
LKLFFCCTSFPLPGTCYYISLIEVLYMDHWLNRTLQKSTHYRSSNVIDGRVINTARLVHVTSE

SEQ ID NO: 157710 - protein, 86 aa, Glycine max
  Clone ID: PAT_MRT3847_113431C.1.pep
LALDPATEVHNFPKRLVGVAMLILHHHVTLRGGSKLRQVSGGEHPSPAVWGVALRRGHGCRHPKAEQVTHLFMVFVLLFSEWWHVV

SEQ ID NO: 157711 - protein, 74 aa, Glycine max
  Clone ID: PAT_MRT3847_113432C.1.pep
RLLKKKKKKKKKKKKKKKKKKKKKKKKKKKKKKKKKKPGGGPGPQLPLLGVFFPPPPGRFLKTLGWGKPGGYPI

SEQ ID NO: 157712 - protein, 131 aa, Glycine max
  unsure (1)..(131): unsure at all Xaa locations
  Clone ID: PAT_MRT3847_113433C.1.pep
QIFLKTLTGXTITSEVESSDTIDIVKARIHDKERIPTDQPRLIFFGKPLXDRRTLADYNFHKESTLDLVLRLLGCANNRRMNTYTMPKMIKLKHKKVKLGILQFYKVDYSGXVQRLLKECPNSECGAGTLM

SEQ ID NO: 157713 - protein, 63 aa, Glycine max
  Clone ID: PAT_MRT3847_113434C.1.pep
TAMFLPKYWLWIGGETKHRMATLNTMHLDEIQSKILLHNQILMRNKGILPIIILFKTLTITYS

SEQ ID NO: 157714 - protein, 73 aa, Glycine max
  Clone ID: PAT_MRT3847_113435C.1.pep
TPSFSSMIVNKFKISGILISFNGRVMTEGKCSRPLVAIVKEELLLTSRRVAQSSESKVSVVDGAPVCRLLSSV

SEQ ID NO: 157715 - protein, 178 aa, Glycine max
  Clone ID: PAT_MRT3847_113436C.1.pep
HRPGQHSRNFKILWKLKIPPRAELFSWRLFRDRLPTRANLLRRHVALQDIMCPLCGNHQEEAGHLFFHCRMTVGLWWESMNWTRTLGPFLDDPAAHFIQFSDGFGAQRNHNRRCIWWIALTSTIWQHRNSLLFKGTPFQPPKVMDNALFHAWTWLKATEKGFNIPFNQWSTNLLESFG

SEQ ID NO: 157716 - protein, 74 aa, Glycine max
  Clone ID: PAT_MRT3847_113437C.1.pep
ISECHRRTVRVIATESLNCIMIQANSHLRESTDCGAEVTASPVLYARLNIGELVVGLGANYAAGYMTLWETRLA

SEQ ID NO: 157717 - protein, 172 aa, Glycine max
  Clone ID: PAT_MRT3847_113438C.1.pep
MGSIVEDADTDTVYVAVGKNAEKTQQLLHWTVKNFSGKEICLLHIHQPHSLNSFSDRNLSGYEPKDHAIKAFQEHGNQKVHELLDQYILTLVPAGVRAYKLLIEMDDIEKGITKAIAQHNIRWLVMGAAAADGYNLGKLAKQESEKAIFVREQALLSCNTWFICKGNVICNR

SEQ ID NO: 157718 - protein, 51 aa, Glycine max
  Clone ID: PAT_MRT3847_113439C.1.pep
LSKIYYITFKGIFLYNYVFFLSTKLECEILSESNSTYTKVMLLRNALCSKY

SEQ ID NO: 157719 - protein, 73 aa, Glycine max
  Clone ID: PAT_MRT3847_11343C.1.pep
TLDSITNQMLLHTELQIRSPLLMTTLNGDLPDLTNDRNLSHQVSVHDVGIFTTLVYRYFGGYMFWFLCWCLGL

SEQ ID NO: 157720 - protein, 140 aa, Glycine max
  Clone ID: PAT_MRT3847_113440C.1.pep
MISSGLKPKHFNNVHSLFNLSKSQQPPNPIIVPCCRTNTNNNISSPFSIRFNSPFPYRSPKIPLKCAPLHSSDSLPPDPSSASTQMEQNSMSILEILKQSNSYLPHALIASILLALIYPRSLTWFTSRFYAPALGFLMFA

SEQ ID NO: 157721 - protein, 188 aa, Glycine max
  Clone ID: PAT_MRT3847_113441C.1.pep
NCQHSWGQTQLVGLLGLENSEVQEIPSFHKLQYAFMSMEGAATHWFYIWSQNNPDSNWESFSTALIKRFRDHHGNHIFERLSILKQEKPTETKTHIKKWETSTEFLEGRINISERKHMLCKILNEEVDSHASQQDKNSMEGSGSEFSEAKASSWARKVELPSFDRSIEGGTDLKGVAVLSVTMTHCSS

SEQ ID NO: 157722 - protein, 225 aa, Glycine max
  Clone ID: PAT_MRT3847_113442C.1.pep
IKERGMNNRLADRIKNFLNRLVEEHGSIDLEWLRDVPPDKAKEYLLSIRGLGLKSVECVRLLTLHHLAFPVDTNVGRIAVRLGWVPLQPLPESLQLHLLELYPVLESIQKYLWPRLCKLDQETLYELHYQMITFGKVFCTKSKPNCNACPMRAECRHFASAFASARFALPGPEQKSIVSTTGNSVINQNPSEIISQLHLPPPENTAQADDIQLTEVSRQLESNLK

SEQ ID NO: 157723 - protein, 58 aa, Glycine max
  Clone ID: PAT_MRT3847_113443C.1.pep
KKTNHGVAGFFLYFLGKNFPKGVKHFLVYPLGFFPNGFLTQNCFSRINKRVLRNNWGV

SEQ ID NO: 157724 - protein, 58 aa, Glycine max
  unsure (1)..(58): unsure at all Xaa locations
  Clone ID: PAT_MRT3847_113444C.1.pep
IRLARHLVSMGHQAGVALXLWNYPERLIELGPQDIYSAGRPGHVDLAAIDSIVNCNVS

SEQ ID NO: 157725 - protein, 203 aa, Glycine max
  Clone ID: PAT_MRT3847_113445C.1.pep
MAQAKYTRIDNNKRPSSYCSTVTIVVFVALCLFGIWMMTSSSVTPVQNVDVSQENNSEVKEQATDPSNNNSQQFEDNRGDLSEDATKGDGSVTPDKNSDVKEKQEEKSDEKSQEKPSEDTKTENQDTSVSEKRSDSDESQQKSDSDESQQKSDSDESEKKSDSAESEKKSDSDESEKKSDSDETEKSSESNDNKAFDSDEREK

SEQ ID NO: 157726 - protein, 81 aa, Glycine max
  Clone ID: PAT_MRT3847_113446C.1.pep
QEIFVFQSAILERQSQQPVCQFRLHFFITTSKTVDHFCRLCSIHSFVVKPAEQVLALRTKLLVGCSVISRQRQSIPRGLVI

SEQ ID NO: 157727 - protein, 64 aa, Glycine max
  Clone ID: PAT_MRT3847_113447C.1.pep
NNPKTPVRPPRWSEKGNTEVTINVQIQNARDAQRSAYSANYTSEDPSPPLSAATAIPVRYRSRE

SEQ ID NO: 157728 - protein, 152 aa, Glycine max
  Clone ID: PAT_MRT3847_113448C.1.pep
MSTPARKRLMRDFKRLQLDPPAGISGAPQDNNIMLWNAVIFGPDDTPWDGGTFKLTLQFTEDYPNKPPTVRFVSQMFHPNIYADGSICLDILQNQWSPIYDVAAILTSIQSLLCDPNPNSPANSEAARMFSENKREYNRRVRDIVEQSWTAD

SEQ ID NO: 157729 - protein, 46 aa, Glycine max
  Clone ID: PAT_MRT3847_113449C.1.pep
TIERHRVGNKRFFADLASKDQIQHQLGSYLQKPIKRANKLKIGLTV

SEQ ID NO: 157730 - protein, 139 aa, Glycine max
  Clone ID: PAT_MRT3847_11344C.1.pep
IPKALLPLEISGETFGEVKTVANMHERKSVMAKHADAFIALPGGYGTMEELLEVIAWSQLGIHDKPVGLLNVDGYFHSLLSLFDKGVEEGFIDNSARHIVVIADTAEELIKRMEEYVPNHHKVATRQSWARDQLLFEPT

SEQ ID NO: 157731 - protein, 58 aa, Glycine max
  unsure (1)..(58): unsure at all Xaa locations
  Clone ID: PAT_MRT3847_113450C.1.pep
MESMAVATDGGERPGVPAGSGLXASQRRAELRRRKLLMNSEQRINRIMGFHRPGSGAE

SEQ ID NO: 157732 - protein, 79 aa, Glycine max
  Clone ID: PAT_MRT3847_113451C.1.pep
ARGQGINVRIKIAKTKALGLRINGPFGKPGNESIIPIKDPSNFYDRAYHYVVWDGENRNFCLLWNETHAESIYHLTIWE

SEQ ID NO: 157733 - protein, 120 aa, Glycine max
  unsure (1)..(120): unsure at all Xaa locations
  Clone ID: PAT_MRT3847_113452C.1.pep
VKPGDGTTLIQKSPMSNSLRAAAWKNGWLMVKTVMSSNAGGKRSDWASXVQVLLTNSNSTEHCDACKWTKSEPHSWELTXPIEVRGPNNGYEMXSPERANQTSWNWSFLIDNAKQSTVVD

SEQ ID NO: 157734 - protein, 508 aa, Glycine max
  Clone ID: PAT_MRT3847_113453C.1.pep
MQATDIILLGLGLLFVRWWWRRWSTTGGGPKNLPPGPPGWPIVGNLFQVILQRRHFIYVIRDLRKKYGPIFSMQMGQRTLIIVSSAELIHEALIQRGPLFASRPRDSPIRLIFSMGKCAINSAEYGPLWRTLRKNFVTEMITPLRIKQCSWIRKWAMEAHMKRIQQEAREQGFVQVMSNCRLTICSILICICFGAKIEEKRIKSIESILKDVMLITLPKLPDFLPVFTPLFRRQVKEAKELRRRQVELLAPLIRSRKAFGNLLELGNHYDMASPVGAAYVDSLFNLEVPGRGRLGEEELVTLVSEIISAGTDTSATAVEWALLHLVMDQDIQERLYKEIVECVGKDGVVTESHVEKMPYLSAVVKETFRRHPPSHFVLSHAATEETELGGYTVPKEASVEFYTAWLTENPDMWEDPNEFRPERFMSGDGVEVDVTGTKGVRMMPFGVGRRICPAWTLGILHINLLLAKMVQAFHWLPNPNAPPDPTETFAFTVVMKNPLKPLIVPRSI

SEQ ID NO: 157735 - protein, 32 aa, Glycine max
  Clone ID: PAT_MRT3847_113454C.1.pep
AISLITCWDTKVPSTNDLKLTPPLCCYILLFA

SEQ ID NO: 157736 - protein, 79 aa, Glycine max
  Clone ID: PAT_MRT3847_113455C.1.pep
FGWVLRSSWVCLVRVFSCASARGPCLARGSFARCSLRSCGSVLRAFLRRPRALPSLLLLRGVSGDSFEPAPPPLSSSRG

SEQ ID NO: 157737 - protein, 70 aa, Glycine max
  Clone ID: PAT_MRT3847_113456C.1.pep
CMPAEKISSCLTVYISPFSHLPLNTLLYGTYNYCPVYVLYMFQKVLNTPSAPKYKTLLTNLHPLKKLVLI

SEQ ID NO: 157738 - protein, 97 aa, Glycine max
  Clone ID: PAT_MRT3847_113457C.1.pep
RYCKNKPYPKSRFCRGVPDAKIRIFDLGRKKAKVDEFPLCGHMVSDEYEQLSSEALEAARICANKYMVKSCGKDGFHIRVRLHPFHVIRINKMLSCA

SEQ ID NO: 157739 - protein, 25 aa, Glycine max
  Clone ID: PAT_MRT3847_113458C.1.pep
LTSLFIINDIYYQYTIRTIIYSKSY

SEQ ID NO: 157740 - protein, 83 aa, Glycine max
  Clone ID: PAT_MRT3847_113459C.1.pep
RKIKCNTCVQSTRASWTWFLSREVDHLDINHALLPFLRPHALLLMYVILKKTAYHLYIYIYIYIYIYIYIYNLYVHVKLYIIL

SEQ ID NO: 157741 - protein, 66 aa, Glycine max
  Clone ID: PAT_MRT3847_11345C.1.pep
TTDSTHPLLSYDFKNTFKVIVKLMDRDKRKTFIDNLRFPYQFSLPCLLCLLTLILLYISAPFTLFL

SEQ ID NO: 157742 - protein, 90 aa, Glycine max
  Clone ID: PAT_MRT3847_113460C.1.pep
AYLSAAKVSIGLRRVQKRGKRRVKPRNDEHFVSNQHSAATAHPKVSAFSIHSLLLSGLRCGPHSQFLLPQARPNPRTGVRVPCLQREGPL

SEQ ID NO: 157743 - protein, 92 aa, Glycine max
  unsure (1)..(92): unsure at all Xaa locations
  Clone ID: PAT_MRT3847_113461C.1.pep
AGLATMIAAMRPDIDNIXXYLRNTXARAXSVVASALGIPALLPFLKAVXQSKKSWQARHTGIKIVQQIAILIGCAVLPHLRSLVEIIEHGLN

SEQ ID NO: 157744 - protein, 82 aa, Glycine max
  Clone ID: PAT_MRT3847_113462C.1.pep
NDLGFIVNDKLAEFNDFGLLTSIHLSPRKQTQHSTDRALGSYHNFLSFLISIFFILLLIGYYFPQLISIHGSQFFVNYILFS

SEQ ID NO: 157745 - protein, 100 aa, Glycine max
  unsure (1)..(100): unsure at all Xaa locations
  Clone ID: PAT_MRT3847_113463C.1.pep
TXFXPLILXLXXXSXSXXXXXSXNILXXGXLNSXXNXXXXSXSXXXXXXHSNLHICLFXIXXCLXXXMNXXNXNHESLQKXXIXRVXXXCXXEXXXXXXT

SEQ ID NO: 157746 - protein, 222 aa, Glycine max
  Clone ID: PAT_MRT3847_113464C.1.pep
DLVAIDKGFNFELDELLRASAYVLGKSGLGIVYKVVLGNGVPVARGRLGEGGEQRYKEFAAEVQAIGKVKHPNSSRFGSSYWAPDEKLLISDFISNGNLATALRGRNGQPSPNLSWSTRLKIIKGAARGLAYLHECSPRKFVHGDIKPSNLLLDTDFQPHISDFGLNRLISITGNNPSSGGFMGGSLPYLKPSQTERTNNYKAPEARVPGCRPTQKWDVYSF

SEQ ID NO: 157747 - protein, 206 aa, Glycine max
  unsure (1)..(206): unsure at all Xaa locations
  Clone ID: PAT_MRT3847_113465C.1.pep
HVEVYKKVRTNXTNXAGFQDVVEIAKSNERFRLLYDVKGRFTLHRITAEEANYKLLRIVRKAVGKKASIGRNPTQSGQAGAIPYVVTHDGRTIRFADPAWKVNDTVRFDLTTNKVTGHYPFQSGQVTMITRGANIGRVGEIVSQEKHPGSNEIVHLRDKKGNNFATRIENVFVLGNGKDAAVSLPKRRGIQLSILEEREQRNKGKE

SEQ ID NO: 157748 - protein, 66 aa, Glycine max
  Clone ID: PAT_MRT3847_113466C.1.pep
LQHYMKMLKLYLLNSNWMFRSGLTLTNIMVLSKYGSTVHVLIPCPHRELCRSTFHDSQTGRNTRTI

SEQ ID NO: 157749 - protein, 71 aa, Glycine max
  Clone ID: PAT_MRT3847_113467C.1.pep
ITHQGHKKNFGKILGFWVMRTISCVNGLSFLGDFVFSWRGPNGGITPDPFSVFIFPRTCINRLLRGLYYVA

SEQ ID NO: 157750 - protein, 196 aa, Glycine max
  Clone ID: PAT_MRT3847_113468C.1.pep
NEVEKKTHRGNTVAYNHLISHNAALRSKGGMMRAWKLQKANCKKQLNREYITMLGCLVKLGELDKAEKVLGEWELSGNTCDFRVPNILLIGYCQRGLVEKAEALLRKMVAEGKTPIPNSWSIVASGYVAKENMEKAFQCMKEAVAVHAQNKRWRPKVDVISSIFSWVTNNRDIEEAEDFVNSWKSVNAMNRGMYLS

SEQ ID NO: 157751 - protein, 128 aa, Glycine max
  Clone ID: PAT_MRT3847_113469C.1.pep
FFFFFFSFFLPLFFSFLSLFFFFFPCAQKKKYLFRQRTQSLIPARFLIFPHQGPRTGPNKSSGAPAASSNGTPFKSNGHGSPGNHHPPLSPSPASTTEDHKSQPLRPPPGITGGPRGYPRPGAPGAAA

SEQ ID NO: 157752 - protein, 1085 aa, Glycine max
  unsure (1)..(1085): unsure at all Xaa locations
  Clone ID: PAT_MRT3847_11346C.1.pep
EEIMDPDVCISEPLVSEDEESVISRDSEQRQAVDNCLSKWTRPPLSAGYVAQSRSIMXGSKCRHTLIXENKTEWLRQMYEQFMAMKTIAYIIEGDTDSVKVQFCESSVYISINXGIETAEIISGNFTQXDLIETXNYFINSKKVLRRSKIARERSITYYQQSNSQPFLKIVVALPTMVASCRGILDRGIQLDGLGMKSFLTYESNVLFALRFMIDCNIVGGNWIGIPAGKYKKTAKSLSYCQLEFDCLYSELISHAPEGEYSKMAPFRILSFDIECAGRKGHFPEPTHDPVIQIANLVTLQGEDQPFIRNVMTLKSCSPIVGVDVMPFETEREVLLAWRDFIREVDPDIIIGYNICKFDLPYLIERALNLKIAEFPILGRIRNSRVRVKDTTFSSRQYGTRESKEVAVEGRVTFDLLQVMQRDYKLSSYSLNSVSSHFLSEQKEDVHHSIISDLQNGNAETRRRLAVYCLKDAYLPQRLLDKLMFIYNYVEMARVTGVPISFLLSRGQSIKVLSQLLRRARQKNLVIPNAKQAGSEQGTFEGATVLEARAGFYEKPIATLDFASLYPSIMMAYNLCYCTLVIPEDARKLNIPPESVNRTPSGETFVKSNLQKGILPEILEELLTARKRAKADLKEAKDPLEKAVLDGRQLALKISANSVYGFTGATIGQLPCLEISSSVTSYGRQMIEHTKKLVEDKFTTLNGYEHNAEVIYGDTDSVMVQFGVSAVEEAMNLGREAAEYISGTFTKPIKLEFEKVYYPYLLISKKRYAGLFWTKPDNFDKMDTKGIETVRRDNCLLVKNLVNDCLHKILIDRDIPGAVQYVKNAISDLLMNRMDLSLLVITKGLTKTGDDYEVKAAHVELAERMRKRDAATAPNVGDRVPYVIIKAAKGAKAYEKSEDPIYVLENNIPIDPHYYLENQISKPIMRIFEPILKNASKELLHGSHTRSISISTPANSGILKFAKKQLXPALVVKLYLAMVITLSVHIAKEGRLSFTVKQYLKCLSWRCFLGGCGHSVRSAKVHFIRMFSAPVGIVQFFIDEKRHRKIWVKQSCNWTDGTSKFCQEFDLADLFEPMDTNTIWCLPQS

SEQ ID NO: 157753 - protein, 61 aa, Glycine max
  Clone ID: PAT_MRT3847_113470C.1.pep
YKPPVYKPPVYKPPVYKPPLHKPKPPLYKPKPPFYKPPYKKPPYGKPPYGKDPTDEDSTHA

SEQ ID NO: 157754 - protein, 341 aa, Glycine max
  unsure (1)..(341): unsure at all Xaa locations
  Clone ID: PAT_MRT3847_113471C.1.pep
MAQLPPKIXNMTPNWPDFSSPHQKNPFLXTTSSNQNPQWVKEFLESSLGGRGAPRRPVSDSVTFLEAPLLDHLLGKGGGVVGGGGGNKECERVYDVQFLSMFIDEAXGNNNNNNTMMAHTLSSSYPSTPPDHNSINDEKEMENKEEEEKKQVQHETDDEDKSECKHEITQLPNTNDTNNTTTKRVKRILANSNANATCSSEKITDPKRVKRILANRQSAQRSRVRKLQYISELERSVTSLQAEVSVLSPRVAFLDHQRLLLNVDNSALKQRIAALAQDKIFKDAHQEALKREIERLRQVYHQQNIKKMDNAAGSPPSQSPPSPSPKPRCETHTEKEQLINV

SEQ ID NO: 157755 - protein, 81 aa, Glycine max
  Clone ID: PAT_MRT3847_113472C.1.pep
FPTDASASRSSSKMQAFLRRISTATISTSNQFDALPSIIADQFPTTRLPFSSLKSRICENEYLKPHYPVLLSDVLTLITLT

SEQ ID NO: 157756 - protein, 59 aa, Glycine max
  Clone ID: PAT_MRT3847_113473C.1.pep
LSSYYYSIFIRFNMNNLGNMYYLWSYMYRILLTASQELKYLVNGIKFVNNLYNFFHNYP

SEQ ID NO: 157757 - protein, 77 aa, Glycine max
  Clone ID: PAT_MRT3847_113474C.1.pep
PRGRRCVYDLHHSILGLLFVVLITRAFTDAIRNAVGWPRPDFFWHCMRILPHDQNTGAFFIVVVQKVSPLSDSFSYD

SEQ ID NO: 157758 - protein, 317 aa, Glycine max
  Clone ID: PAT_MRT3847_113475C.1.pep
IRHQISEYSIYSKLIYSFASLGEVDVAEELVREAKGKTTIKDPEVYLKLVHMYIEEGLLEKTLEVVKEMEDADVKVSDCILCTVVNGFSKKRGFSAAVKVFEELISKGNEPGQVTYASVINAYWRLGQYSKAEEVFLEMEQKGFDKCVYAYSTMIVMYGRTERVRSAMKLVAKMKERGCKPNVWIYNSLIDMHGRDKNLKQLEKLWKEMKRRRVAPDKVSYTSIIGAYSKAGEFETCVKLFNEYRMNGGLIDRALAGIMVGVFSKVGQVDELVKLLQDMKAEGTRLDQRLYQSAWNAFKDAGLQLQARWMKESFLVT

SEQ ID NO: 157759 - protein, 85 aa, Glycine max
  Clone ID: PAT_MRT3847_113476C.1.pep
RARPLRTTELHRERTRCSRKEETEHVAGARGRRKASRPEKNMATRSVGDLNAAYLKGNKDFVRNNAKAASRTNRTSPTTPKIRPP

SEQ ID NO: 157760 - protein, 200 aa, Glycine max
  unsure (1)..(200): unsure at all Xaa locations
  Clone ID: PAT_MRT3847_113477C.1.pep
TFVGSRALLQFQDPPPPSTAPFSSHVPLAPALFVIGDSSVDCGTNNFLGTFARXPDHLPYGKDFDTHQPAGRFSNGRIPVDYLAQRLGLPFVPSYLVQTGVVEDMIKGVNYASAGAGIILSSGSXIGTAYLPQQIQQFTDTLQQFIFKMGEDAATNLISNFVFYISIGINVYIIYYXYLPWNFNHFLPSSLKREIKLNAL

SEQ ID NO: 157761 - protein, 133 aa, Glycine max
  unsure (1)..(133): unsure at all Xaa locations
  Clone ID: PAT_MRT3847_113478C.1.pep
TVICNSIFNGMLIRYSYXKYWARLKLXSMVLQSFKNFGSLGGDGEENLIRGHGYVKAYLNGSXNGKASYLAYHTLTDCLDKLVPLFNFXKLAECDFLRRNFKXQMSNVFVGGLLRTRASLWSQLHYVSGNNLE

SEQ ID NO: 157762 - protein, 131 aa, Glycine max
  Clone ID: PAT_MRT3847_113479C.1.pep
MGVMSRRVVPVCGNLCVFCPSLRARSRQPVKRYKKFIADIFPRNQVAEPNDRKIGKLCEYASKNPLRIPKITDNLEQRCYKDLRNENFGSVKVVLCIYRKLLSTCKEQMPLFANSLLGIIRTLLEQTRADE

SEQ ID NO: 157763 - protein, 44 aa, Glycine max
  Clone ID: PAT_MRT3847_11347C.1.pep
HYIFYILIVRNRGKHNIRRDKQATKDRNENCALTVEVRGTADVL

SEQ ID NO: 157764 - protein, 77 aa, Glycine max
  Clone ID: PAT_MRT3847_113480C.1.pep
PITIAVHPLVDCKSSTEWSSKQHSGNTNVYADSNYDLQRKLVQSALDVDTSGRVQSSFSPVSPTSTVFKVILCSTVF

SEQ ID NO: 157765 - protein, 121 aa, Glycine max
  unsure (1)..(121): unsure at all Xaa locations
  Clone ID: PAT_MRT3847_113481C.1.pep
MERVEWAQLGERLKMGGAQMGRMVSGKVKEMLQAPTPESKMVDEATLETMEEPNWGMNLRICSLINIDQFNGSEVVKAIKRKINHKSSVVQALSLDLLEACAMNCDRVFFXFVSEKVLDEM

SEQ ID NO: 157766 - protein, 84 aa, Glycine max
  unsure (1)..(84): unsure at all Xaa locations
  Clone ID: PAT_MRT3847_113482C.1.pep
EDKISISVPIKLXYKPXLPVXQKXPLHNNKXQXGXXHAMXXXPXFTSPXYXPSNKLQGXXXFSXWXXXWXXXXXXXLXXLXXCX

SEQ ID NO: 157767 - protein, 37 aa, Glycine max
  Clone ID: PAT_MRT3847_113483C.1.pep
VGLKPGKSCSSLKMPSPSINGSPPRVCKLIYRTKNAL

SEQ ID NO: 157768 - protein, 49 aa, Glycine max
  Clone ID: PAT_MRT3847_113484C.1.pep
LMHSWRQTSDRGYYTYNDLCKGQAHNCSVHNFSSWLRFREDDHQYIYCI

SEQ ID NO: 157769 - protein, 124 aa, Glycine max
  Clone ID: PAT_MRT3847_113485C.1.pep
MDTTHTNSEYEDWKSIDIADSILSYGSELGDMEENEWQMVQTKGNQFVVNDQPFYVNGFNTYWLMVFAADESTRGKVTEVFKHASSVGMSVCRTWAFNDGQWRALQKSASVYDEDVFRGNPRTI

SEQ ID NO: 157770 - protein, 57 aa, Glycine max
  Clone ID: PAT_MRT3847_113486C.1.pep
SVGGRPIIGPPQMGLRGQKELIIGGTRGVIWGAGGSPGGGAKISTKGFFDWGITSIP

SEQ ID NO: 157771 - protein, 793 aa, Glycine max
  Clone ID: PAT_MRT3847_113487C.1.pep
MATKKVKAIGIDLGTTYSCVAVWQHNRVEVISNDQGNRTTPSYVAFSDTQRLLGDSAMNQRSMNPKNTVFDAKRLIGRRFSDQTVQQDMKMWPFKVVPGNKDKPMIAVTYKGEEKLLAPEEISSMVLFKMKEVAEGYLGHFIKDAVITVPAYFSNAQRQATKDAGKIAGMNVLRIINEPTAAAIAYGLDKKGLRVGEQNVLVFDLGGGTFDVSLVTIYEGMFKVKASVGDTHLGGVDFDNRLVNHLVNVFREKHKKDISGNAKALARLRSECEKAKRILSSTSQTTIELDCLYEGLDLYAPVTRALFNELNKDLFMKCMDTVEKCLLEARIDKIQVHEIILVGGSTRIPKVQQLLKDMFSVNGNTKELCKGINPDEAVAYGAAVQAAILSGEGDKKVEELLLLDVMPLSLGFEGAGGVMSVLIPKNTMIPTKKERICSTFYDNQKSFNVKVFEGERVKTKDNFFLGKFVLKGFDPLPKGVPQINVIFDVDADGIVEVTAEDKATGIEKKITINNKHGRLNPEEIRRMVRDSKKYKAEDELAKKKVKAKNALENYAYEMRERAKKIEEAVEETIEWLECNQLAEIGEFDYKKQELGRYLRDDPNYSNTSNSGVKVPIWCTWRCPPNGWVCLNTDGSVFENHRNGCSGSACGGLVRDSSGCYLGGFTVNLGNTSVTLAELWGVVHGLKLAWDLGCKKVKVDIDSGNALGLVRHGPVANDPAFALVSEINELVRKEWLVEFSHVFRESNRAADKLAHLGHSHSLESGAKRFSDPPSALVAILQDDLAGLAKQRGVN

SEQ ID NO: 157772 - protein, 102 aa, Glycine max
  unsure (1)..(102): unsure at all Xaa locations
  Clone ID: PAT_MRT3847_113488C.1.pep
PTRSTQLGXDXXEGQVYVRRTPVEEXPAGETKAAPRLIDTFQIKDQLLSDFKIQGHFPNQLNENEISRFKSLLSYMVIVPFTAMFIYFTLSSVIWFKLYAGL

SEQ ID NO: 157773 - protein, 67 aa, Glycine max
  Clone ID: PAT_MRT3847_113489C.1.pep
SHKLKYRTENSTIHLCSVISKFKQKYRTYFDSHNFVISPCVFLSVAKHTFMGWIVGCILSNHINLII

SEQ ID NO: 157774 - protein, 82 aa, Glycine max
  Clone ID: PAT_MRT3847_11348C.1.pep
PHKGSAGQKITLCEKEPKTAQGGAPICSGERKNLTFHAFLAETKGARRRTPPKKGPDCWGKTFNEGVAHEKRGNTRPKETPA

SEQ ID NO: 157775 - protein, 44 aa, Glycine max
  Clone ID: PAT_MRT3847_113490C.1.pep
YGCFIVCNCCRCLMCNVHALHLKWRTRELDQAESKSKQTCVNKR

SEQ ID NO: 157776 - protein, 83 aa, Glycine max
  Clone ID: PAT_MRT3847_113491C.1.pep
IWGFTHRLKDPGKRQGYNLRCVWCLVSFTHIHTFFILIQQSFEQTLSCSHHRLYFFTATYLTLNGVHFLKLSLAHTQHLILPN

SEQ ID NO: 157777 - protein, 52 aa, Glycine max
  Clone ID: PAT_MRT3847_113492C.1.pep
PHTSEAITKIFGAVSISGSYMRSVELQRTLLLTSPPYMDTLLSTSSYMPDTD

SEQ ID NO: 157778 - protein, 54 aa, Glycine max
  unsure (1)..(54): unsure at all Xaa locations
  Clone ID: PAT_MRT3847_113493C.1.pep
WXTVXXLXXVIATARRXXTTXRXRVSVRGXGRAPXTQTASPRALAXSXAXCXLR

SEQ ID NO: 157779 - protein, 40 aa, Glycine max
  Clone ID: PAT_MRT3847_113494C.1.pep
LKSLISLFLAGVDMFATRKGSARVIEVEVAGRVESRPLYR

SEQ ID NO: 157780 - protein, 54 aa, Glycine max
  Clone ID: PAT_MRT3847_113495C.1.pep
KLVCVSLGGALSRKSLFLAFTIGGKKGYYVSRPVTQSYMKVHNNDLLSFCLVLV

SEQ ID NO: 157781 - protein, 92 aa, Glycine max
  unsure (1)..(92): unsure at all Xaa locations
  Clone ID: PAT_MRT3847_113496C.1.pep
PTGPRNKTQEPNPQKTRSNPEARPESPTKAQGNRQPKRPRPXXAPQEDTPKGPNGXQXXPEPPHPSXPPPTETEANENPPKDPKGTPRKNPP

SEQ ID NO: 157782 - protein, 77 aa, Glycine max
  unsure (1)..(77): unsure at all Xaa locations
  Clone ID: PAT_MRT3847_113497C.1.pep
HLETGLTTVKSLIIXVXLXCYKLXSPLASVXNVYAFXIXSIXLKMQXTLXTRCXRGWKVEVSNXXQASKVFHLELVP

SEQ ID NO: 157783 - protein, 43 aa, Glycine max
  Clone ID: PAT_MRT3847_113498C.1.pep
NSAPVKLDLEFVSPCELQWSLSSKYVKLYTFFFVGAGNYLFDF

SEQ ID NO: 157784 - protein, 61 aa, Glycine max
  Clone ID: PAT_MRT3847_113499C.1.pep
VVILILALSNHYIFSAINTDKIILHNKIKDEFLNDYLLIYIEKQIIKKFRVDLIKYDFLDV

SEQ ID NO: 157785 - protein, 84 aa, Glycine max
  unsure (1)..(84): unsure at all Xaa locations
  Clone ID: PAT_MRT3847_11349C.1.pep
TLSFVSYSPILARLKARSDGKDADSTLKQKGAGAGMKQSRKAAKDPKQPKMITSALFXFMSELREQFRKEHHNNGSVDVVGKAG

SEQ ID NO: 157786 - protein, 251 aa, Glycine max
  Clone ID: PAT_MRT3847_1134C.1.pep
MLGIFKEKLVKAPKELNSPASLNSCTKPKLSHEILQDFMSCNSSNAFSMCFGNEALLAYSPSNKPSIHQRLFSGLDNIYCVFLGGLHNLSMLNKQYGLSKGTNEAMFITEAYRTLRDRGPYPADQVLKELEGSFGFVIYDNKDGTVFVASGSNGQIGLYWGVAADGSIVISENLELIKASCAKSFAPFPNGCMFHSEHGLMSIEHPTKKMKAMPRIDSEGFMCGANFNVDSQTKIQVMPRVGSEANWATWS

SEQ ID NO: 157787 - protein, 132 aa, Glycine max
  Clone ID: PAT_MRT3847_113500C.1.pep
QPQPGQCPGLGRGRGPGGRAGGVAGRAVAGWQRRGSHLPGHFQGRAQAHGHYRWQDLVEDRRQLEAAQAAGQAKADGISQGPDRFMLKAAVRCRLFSWPVLASSRVNPLLQELRHSQGQRCSCGSGYTREEA

SEQ ID NO: 157788 - protein, 89 aa, Glycine max
  unsure (1)..(89): unsure at all Xaa locations
  Clone ID: PAT_MRT3847_113501C.1.pep
RANRLEIVILNGTTILALENNDDRDTXRLESGDALRVTSGTAXYVVNADNNENLRLITLGIPVNKPGRFESFFLSSTEAQQSYLQGFSR

SEQ ID NO: 157789 - protein, 39 aa, Glycine max
  Clone ID: PAT_MRT3847_113502C.1.pep
KLLLRRTLSLFGIGFPLSGWASYPMQVTFNILSSDHLNP

SEQ ID NO: 157790 - protein, 58 aa, Glycine max
  Clone ID: PAT_MRT3847_113503C.1.pep
KQFRPIKGSWVRKISKTENSLGLRIYREPLKVSRKHWNIFYNFSTTTTSSNQVSFHLQ

SEQ ID NO: 157791 - protein, 71 aa, Glycine max
  Clone ID: PAT_MRT3847_113504C.1.pep
AKENRVGAFFPLFKERGSKSVRLKFQFSTGGFINPVPKMLLVVCAKPFLISPTSGVPKKFIYIQQAPQTFS

SEQ ID NO: 157792 - protein, 210 aa, Glycine max
  unsure (1)..(210): unsure at all Xaa locations
  Clone ID: PAT_MRT3847_113505C.1.pep
TLGPGRGKRVPLYMRTGSCQEGAXCRLNHPDPTVVAGGGGNPPLWHSTDGXYSITEEESRNSLNDVAGLSPINSKGLXPFVXTMLLPTQGDYTQSHDWNGDEAVCLLTCQXAFITSSHCVMNNPAVGTNGYLHHQKQMPXQMRVAYRTRETECKCLLKTGDRKKKSKWKFHHTMTRPTRAPTCNLRDKGLPLRPGQRVCSHYTRYGIFKR

SEQ ID NO: 157793 - protein, 59 aa, Glycine max
  Clone ID: PAT_MRT3847_113506C.1.pep
SCGWKSRAAYEKLVVCWVCLKGSYEHIEVNIINDMDLYNARTLGPSRNGFVRRERVVFF

SEQ ID NO: 157794 - protein, 68 aa, Glycine max
  Clone ID: PAT_MRT3847_113507C.1.pep
PYAMSPIDYRGRILPSIMPFMWIFNGTGSIRNLNLKIYLKSITLKTWVLLNSLTTKQHICLPNRTPKL

SEQ ID NO: 157795 - protein, 179 aa, Glycine max
  Clone ID: PAT_MRT3847_113508C.1.pep
MPTAMTESGPSVSLKLLALVAILVVFSLVILLLIFFLCFRGSRSCKKRNLATKHSSGSIPLVSKEITMVRASDLTPATTAIAVDVDGDDPKKKESEIKVEIGGGGHQRSNQVSVEDPDIGWGRWYSIREVELATRGFSEGNVIGEGGYGVVYRGVLHDASVVAVKNLLNNKGQAEKEFK

SEQ ID NO: 157796 - protein, 43 aa, Glycine max
  Clone ID: PAT_MRT3847_113509C.1.pep
VANFPLVNCESCRFSNHLVKDLPLVQLQAEPLRGVVWVCLVSS

SEQ ID NO: 157797 - protein, 53 aa, Glycine max
  unsure (1)..(53): unsure at all Xaa locations
  Clone ID: PAT_MRT3847_11350C.1.pep
TLHLVLRLXRGGMQMFVKTLTGNXITLEVESSDTIDNFXAKIQDKEGIPPDQQ

SEQ ID NO: 157798 - protein, 183 aa, Glycine max
  unsure (1)..(183): unsure at all Xaa locations
  Clone ID: PAT_MRT3847_113510C.1.pep
MLLLHAPPLPFLRTLLHFPLNSIHHSSRAFSSLSHFTKPFSVSNRFSSHSRRSSLQMNGEGLAAADDSSPDHVTKDWYSVPELRLRDHRFKVPLDHSLGPHSSPKITVFAREVVAVGNLTVSLLSQLYLHDELADXLKYFRADNRWNDAEFIRVRLVPDAGPWTILGQSYGGSCACTYLTADA

SEQ ID NO: 157799 - protein, 71 aa, Glycine max
  unsure (1)..(71): unsure at all Xaa locations
  Clone ID: PAT_MRT3847_113511C.1.pep
VRVNCNQMTSNLSFSQFDFNNSSMKQHHKGKKVTHXKNQRKFPKIIVIFLVASDQFQNFDFCXXHIVRANR

SEQ ID NO: 157800 - protein, 232 aa, Glycine max
  Clone ID: PAT_MRT3847_113512C.1.pep
MEATASAMSFALPSTKAQAQAQLLTRPTNPFTIPSRSPAHRPPPRLPTIRAAIPRTKKEATVETVREQLENCYLLAGINYKGFTVKQFQELRKTLPETTKLIVAKNTLVYKAVEGTPWETLKPCMKGMNVWLFVHTEEIPSAIKPYRNFQKEKKLEDNDFTGAVFEGKFYGPDEVKNLESLPTRAEIYATLLGALKSPASALVGTLQSPARELVTVLKAHIKNLEEQQGVAQ

SEQ ID NO: 157801 - protein, 148 aa, Glycine max
  unsure (1)..(148): unsure at all Xaa locations
  Clone ID: PAT_MRT3847_113513C.1.pep
HILFLSGSRLLGTIPQSISQPTVRNQMATVSTPSAFCSXSQPSFRQSSIDLLGGGILVATTGDWITLIQNSPISNLLRVAAWKKGCLMAKIAMPGXAAPQRSDWASLAQVFLTHSNSTEHFDACKWXTTSEPHFWELTFPIEVCGPNN

SEQ ID NO: 157802 - protein, 61 aa, Glycine max
  Clone ID: PAT_MRT3847_113514C.1.pep
TPSKLISTILSLKDAVFMKPDEIISIPQLQRQKLRELKSLELFCVQIINAAAEGASATLSS

SEQ ID NO: 157803 - protein, 94 aa, Glycine max
  unsure (1)..(94): unsure at all Xaa locations
  Clone ID: PAT_MRT3847_113515C.1.pep
FSRILEPIKVNFNAKYDDHRKNWGGGIMGPXFQPKARAKQKLLAKKAAHRMSYLSLVFALLSLPFFYLLYGSIFKMKCEVLLHFGSSVTPKDPF

SEQ ID NO: 157804 - protein, 59 aa, Glycine max
  Clone ID: PAT_MRT3847_113516C.1.pep
VLSRTLESPKKRRGFSHQTNIWGPNKPKVKAKAGSLLNDYCEQMPRKPLWDKFCYQPLC

SEQ ID NO: 157805 - protein, 461 aa, Glycine max
  Clone ID: PAT_MRT3847_113517C.1.pep
MAKPGVLESDPGVMVKKAKELKRELQRLVKSIVHDEDCSTETIDQAKETLCVLKELKLRNRSSLSLKLHNKSVASSCPDEFKCPLSKELMRDPVIVASGQTYDRPFIQKWLNAGNRTCPRTHQVLSHTVLTPNHLIREMIEQWSKNQGIELSNTVQYIDEEGLNEADREHFLCLLKKMSSTLSDQKTAAKELRLLTKKYPCFRVLFCDSADAIPQLLKPICGSDSFGSVHPDLQEDVITTLLNISIHDNNKKLVAETPMVIPLLMRALRSGTIETRSNAAAALFTLSALDSNKELIGKSGVLKPLIDLLEEGHPLAMKDVASAIFNICVMHENKARAEKDGAVRVILAKINKQIHVAELLAILALLSSHQRAVHDMGDLGAVPSLLRIIRESSCERNKENCVAILQTICLYDRSKLKEIREEENSHKTISELAKHGTSRAQRKASGILERLNRAVNITHTA

SEQ ID NO: 157806 - protein, 86 aa, Glycine max
  unsure (1)..(86): unsure at all Xaa locations
  Clone ID: PAT_MRT3847_113518C.1.pep
MAEHIGKAFLKQPQVFLSTPNTGNGQRSGKGGNRFXNSNGHGFITPIEVIYRIYIDKSCPFTGNVSIRGRNLAGTCHTAKMNRTII

SEQ ID NO: 157807 - protein, 91 aa, Glycine max
  unsure (1)..(91): unsure at all Xaa locations
  Clone ID: PAT_MRT3847_113519C.1.pep
TMSVLTTTLSICPAVSLHMLHIYAAENAVMGDVERHPPDLPKTAFCTIEETLCCNEKTSDLRSPPWFCKRACKISYSTCFLLKLSLXVTYL

SEQ ID NO: 157808 - protein, 86 aa, Glycine max
  unsure (1)..(86): unsure at all Xaa locations
  Clone ID: PAT_MRT3847_11351C.1.pep
XXRXTGXRWWXPLGEXERVXRXRMXXRRSYEIXLGGVSLXGXXLLLXLRIHLSPCCXFGLGXGXXLXNKNNQSRVRPRLXXXKKIK

SEQ ID NO: 157809 - protein, 240 aa, Glycine max
  Clone ID: PAT_MRT3847_113520C.1.pep
MALDHFEETVHQKGNWKSSSEIIADSDRNASGDFDCNICLECVQDPVVTLCGHLYCWPCIYKWLHFQSTSLDDEEQQRPQCPVCKSEVSQSSLVPLYGRGQTTLPSKGKPRQVGTVIPQRPHGPRTLNTRSVSQPISQSYHPYSNPYHPQQHFNSIPSGYTSPMIRTTGSIDNTFGIFGEMIYARVFGNHVSNIHTYANSYNLSGTSNPRMRRHLMQVDKSLSRISCFLLCCLVLCLLLF

SEQ ID NO: 157810 - protein, 54 aa, Glycine max
  Clone ID: PAT_MRT3847_113521C.1.pep
HKSTNNNSITQLHKYQAIFGAFFFYAKWVLKSGLGRHVYPKKAGSNRAKCMPVQ

SEQ ID NO: 157811 - protein, 120 aa, Glycine max
  unsure (1)..(120): unsure at all Xaa locations
  Clone ID: PAT_MRT3847_113522C.1.pep
TFVIKQCISALLQPVLLTILLNHGIKEFGRSICTIWCIAVPLIVYVKAVIPINTGRCPASKVHNYINSIPVSVPIIASLVILRRVFMWNKAWVWIERPIPKLRACARVLXXXCSYLISLP

SEQ ID NO: 157812 - protein, 71 aa, Glycine max
  Clone ID: PAT_MRT3847_113523C.1.pep
GGHNSKHKYVVPTCGLHYTGGTIPEETCERGGPYQPDQGSLISHSQRKKCLDFLSNTTRIQKEEASVGPIL

SEQ ID NO: 157813 - protein, 93 aa, Glycine max
  Clone ID: PAT_MRT3847_113524C.1.pep
TRPEIYGEAGIWGFWKGVLPTLIMVSNPSIQFMLYEAMLAKLRKRRAWSKKGSNGVTALEIFLIGALAKLGATVVTYPILVVKVYHTSLISWF

SEQ ID NO: 157814 - protein, 75 aa, Glycine max
  Clone ID: PAT_MRT3847_113525C.1.pep
SFFFIVFYPLFLVTITFSVPSPAKLFVLHSLLPWLPNKGYPKTHPLTKKKGPKKKDLSEEKNPLKIPKKKTNLAC

SEQ ID NO: 157815 - protein, 135 aa, Glycine max
  Clone ID: PAT_MRT3847_113526C.1.pep
ELPDGQVITIGNERFRCPEALFQPSFLGMESAGIHETTYNSIMKCDVDIRKDLYGNVVLSVGTTMFPGIADRVQKELTALAPSTMKIKIIAPPERKYSVWIGGSILASLSTFQQMWISKEEYDESGPSIVHRKCF

SEQ ID NO: 157816 - protein, 149 aa, Glycine max
  Clone ID: PAT_MRT3847_113527C.1.pep
MEANGIAHDSSSLGAGRRDKREVGDKMVEDLSKYAHSPAHLAVARRDHASLRRIVSALPRLAKAGEVHTEAESIAAELQADEVSTFIDRRDVPGRETPLHLAVRLRDPVSAEILMAAGADWSLQNEHGWSALQEAVCTREEAIAMIIAR

SEQ ID NO: 157817 - protein, 128 aa, Glycine max
  Clone ID: PAT_MRT3847_113528C.1.pep
KATLVSQIKINPLFFHIRGNVCFFTFQRKLPQSKIQMSIIFLFLTGHQHCINSVLGIQYLSYFKQYQQIVCPAVKNGLHEIEDEISTSTTILRPQISPAFQALIGPKTIQKRQDIQACRVYLKDAIMQ

SEQ ID NO: 157818 - protein, 66 aa, Glycine max
  Clone ID: PAT_MRT3847_113529C.1.pep
HNKASGSDQANSDRLLTAQEQLQGTVRKKLSVAFDKLDHPDILMIMRLFTPVGVNDEDLHVYVRYL

SEQ ID NO: 157819 - protein, 147 aa, Glycine max
  unsure (1)..(147): unsure at all Xaa locations
  Clone ID: PAT_MRT3847_11352C.1.pep
WETSKVVNNWVIGKWDKPSFLTLDCGSLAPXXTXDXKQPSFQVTITMQNENKDGXQVYPYVYIRVTDXNAWRLEIHEPIIWAIMDLYNNLQLDRLPKSSTVTEVDPEIRFDLIDVSEVRLKFAXETAPGQRPHGILGIWSXILSDSN

SEQ ID NO: 157820 - protein, 62 aa, Glycine max
  Clone ID: PAT_MRT3847_113530C.1.pep
QPSPAGPVLKNSLFHMQTSTASLFHHLQPLWTDFHNWVRVRVRFTLTELSMYLSRSFRRDSK

SEQ ID NO: 157821 - protein, 141 aa, Glycine max
  Clone ID: PAT_MRT3847_113531C.1.pep
ENALELDFGAIDFSTPRMVLSSSIGNGLNFTTKILTSRLSESSQNINPLLDYLLSLNYQGENLMIKDTLNTMPKLQQALKVAEAYVSALHKDTPYQKFEDRFKEWGFDKGWGNTAGRVKETMKLLSEVLESADPVKLESLF

SEQ ID NO: 157822 - protein, 56 aa, Glycine max
  Clone ID: PAT_MRT3847_113532C.1.pep
MASAWEKSRRSSMAKGSPVFWSEWRFSGGQNCSAPPGAKRTVLMEGMRIPLLWFAV

SEQ ID NO: 157823 - protein, 70 aa, Glycine max
  Clone ID: PAT_MRT3847_113533C.1.pep
FFCFFLLLKINPFVFVFSAFHGEVYDWFLLCVWFCCVKSLSFLLGHVFHQKKNISFFPISFYLKVKSDNQ

SEQ ID NO: 157824 - protein, 83 aa, Glycine max
  unsure (1)..(83): unsure at all Xaa locations
  Clone ID: PAT_MRT3847_113534C.1.pep
NSSLAREETRASEEPYNKPPSEQPTEHXTSAKPEAEAAQPAPKSDSDKEDKAKGXDAAGEPXDAAGKHGKXDDKQGRGQHDDK

SEQ ID NO: 157825 - protein, 74 aa, Glycine max
  Clone ID: PAT_MRT3847_113535C.1.pep
KGEGKTPFIKENPGAPKSYRGKMRGNYPINIAKKLGPKLGVMAPGRERENLLKRAPKINDPGGCLNNGSGENPG

SEQ ID NO: 157826 - protein, 129 aa, Glycine max
  Clone ID: PAT_MRT3847_113536C.1.pep
MTFKRRNGGRNKHGRGHVKFIRCSNCGKCCPKDKAIKRFLVRNIVEQAAVRDVQEACVYEQYTLPKLYVKMQYCVSCAIHSHVVRVRSRTDRRKREPPQRFIRRRDDAQRPGQPGQAPRPAGTGAPVRT

SEQ ID NO: 157827 - protein, 129 aa, Glycine max
  Clone ID: PAT_MRT3847_113537C.1.pep
MTFKRRNGGRNKHGRGHVKFIRCSNCGKCCPKDKAIKRFLVRNIVEQAAVRDVQEACVYEQYTLPKLYVKMQYCVSCAIHSHVVRVRSRTDRRKREPPQRFIRRRDDAPRPGQPGQAPRPAGVGAPART

SEQ ID NO: 157828 - protein, 53 aa, Glycine max
  Clone ID: PAT_MRT3847_113538C.1.pep
VSSGRISNKHPILFAAGLVLVGSEIRIGIGIIIAGGAFEIAQGRILPSSRLVE

SEQ ID NO: 157829 - protein, 129 aa, Glycine max
  Clone ID: PAT_MRT3847_113539C.1.pep
MTFKRRNGGRNKHGRGHVKFIRCSNCGKCCPKDKAIKRFLVRNIVEQAAVRDVQEACVYEQYTLPKLYVKMQYCVSCAIHSHVVRVRSRTDRRKREPPQRFIRRRDDAPRPGQPGQAPRPAGVGAPARA

SEQ ID NO: 157830 - protein, 403 aa, Glycine max
  Clone ID: PAT_MRT3847_11353C.1.pep
MGIPIRSGNIKRQNEAMRLTLATFVGVVFGFSLGVSFPTLALTRMNLPSSLLPSIDLTYVDDNYSKISTKSLWDAWASFRRDRSMYKKVHKLTDVRIWVPTNPRGAERLPPKIVKSESDFYLHRLWGMPYQDLSIKPKYLVTFTVGSDQKDNIDAAVKKFSENFTIVLFHYDGRASDWEKFEWSKRAIHISARKQTKWWYAKRFLHPDIVAPYDYIFIWDEDLGVEHFDAEEYLKMVRKHGLEISQPGIDPSSSFTWQMTRKRDSGEVHKKAEERSGWCSDPHLPPCAAFVEIMAPVFSRDAWRCVWHMIQNDLVHGWGLDFVLRKCVEPPHEKIGVVDTQWVVHQSVPSLGNQGQAERGRAPWEGVRERCNKEWTIFQERMAEAERDYFQTREAIPLNSTGQ

SEQ ID NO: 157831 - protein, 138 aa, Glycine max
  unsure (1)..(138): unsure at all Xaa locations
  Clone ID: PAT_MRT3847_113540C.1.pep
MTFKRRNGGRNKHGRGHVKFIRCSNCGKCCPKDKAIKRFLVRNIVEQAAVRDVQEACVYEQYTLPKLYVKMQYCVSCAIHSHVVRVRSRTDRRKRDPPQRFIRRRLTIDIGDDAQRPGQPGXSGQAPRPAGIGAPVRT

SEQ ID NO: 157832 - protein, 148 aa, Glycine max
  unsure (1)..(148): unsure at all Xaa locations
  Clone ID: PAT_MRT3847_113541C.1.pep
MNNSVETRRVNCLLMDEKLKYKRQSSKSMGGLGPIDNTSLRGDPNILPDIEKNLHRHLPYLKMGGFFXSEPKTVSRTDPAHSMCETQFRFNKNIAIIIDMTIESFNSGDIVNYTDIYFYSIVPLKGRHCRESDNSSTSIITCTNDTYD

SEQ ID NO: 157833 - protein, 48 aa, Glycine max
  Clone ID: PAT_MRT3847_113542C.1.pep
TNQSQYTNSTNLTQYTFNSSKKKIPLSLLLSQPFNSLPSTLNLFYNIT

SEQ ID NO: 157834 - protein, 130 aa, Glycine max
  Clone ID: PAT_MRT3847_113543C.1.pep
MTFKRRNGGRNKHGRGHVKFIRCSNCGKCCPKDKAIKRFLVRNIVEQAAVRDVQEACVYEQYTLPKLYVKMQYCVSCAIHSHVVRVRSRTDRRKREPPQRFIRRRDDAPRPGQPGGQGPRPAGTAAPVRT

SEQ ID NO: 157835 - protein, 106 aa, Glycine max
  unsure (1)..(106): unsure at all Xaa locations
  Clone ID: PAT_MRT3847_113544C.1.pep
MAHETFLFTSESVNEGHPDKLCDQISDAEGNACQXNDPDSKVACATCTKTNMVMVFGEVYDHATEEYERSVRDTCRDIGTIPDDVAPDADKCKVLVNIEQQSPDIA

SEQ ID NO: 157836 - protein, 425 aa, Glycine max
  Clone ID: PAT_MRT3847_113545C.1.pep
MFLTKNLLMALSLGQHFPQLEHRMNLTWPRPCLLRPPFLRLNVMVCGSHTSWQFSSLITKKFFQQKQAMDFFFKGMNRDGSECPFDVKDIQRCPFLRNINEPTNFSFSSTKISIPVHGSKGPIFEDGPSFGMAFKLFHGKDGVIPLSEKSDFHNGSTEADSLPVFNPLAGRAASISLSGPGGPFSFWNFSEKWKKQKNSESSNKKEYSPQNGDVSKHEALGNEWLAKGTCPIAKSYRAVSNVLPLVATAFRPPSGVKLRCPHAIVAARAALARTTFVKNMRPQPLPAKMLVIAALGMAVNVPFGMWKEHTKKFSLSWFVAVHAAVPFIAMLRKSVVMPKSAMALTIAASILGQVIGSRAERIRLKTIAVEMGKVKTETVCSMESYNSPMQLGDIRANHCGAEGMVLKSSLPVKDTGSTSTAGVCY

SEQ ID NO: 157837 - protein, 449 aa, Glycine max
  unsure (1)..(449): unsure at all Xaa locations
  Clone ID: PAT_MRT3847_113546C.1.pep
PARANYRRVKEQAAVDYLELRSVAQGVSRQREFDLCGKERENFVPCYNVSASLLAGFKDGEEFDRHCELLVEAERCLVRPPKEYKIPLQWPTARDVIWSGNVKITKNQFLSSGSMTKRLMLLEENQIAFHSEDGLIYDGMKDYSRQLAEMIGLGSDYELPQAGVHTILDINCGFGSFAAHLAPLKIMTVCIAPYEATGSQVQLALERGLPAVIGNFVARQLSYPSLSYDMVHCAQCGIIWDGKDGRFLIEVDRVLKPGGYFVLTSPTSRSQGSSSQMKRRNMLMPMEQLTQKLCWTPLAQQDETFIWQKTADVNCYESRKKHAIPLCKEDDDAQSYYRPLQPCISGTSSKRWIAIQNRSSGYELSSAELKMNGVQPEDFFEDLQFWRSALKNYWSLLTPLIFSDHPKRPGDEDPLPPFNMMRNVMDMSTKYXGLNTALLEENKSVWVMN

SEQ ID NO: 157838 - protein, 42 aa, Glycine max
  Clone ID: PAT_MRT3847_113547C.1.pep
EKEVRNPLFDSDSPHSVVAFLLYSSKVAASALAPRIFDIPFY

SEQ ID NO: 157839 - protein, 53 aa, Glycine max
  Clone ID: PAT_MRT3847_113548C.1.pep
IFKTVCIHHPETYSTTQLIQRATLDALAPSHVLIHCAFKQSTQSLASLFITTI

SEQ ID NO: 157840 - protein, 149 aa, Glycine max
  Clone ID: PAT_MRT3847_113549C.1.pep
MGSIGIESSGPEVVTVDVHATKDLIQTSHVYLDVRTVEEFQKGHVDAEKIINVAYMFNTPEGRVKNPEFLKEVSYACKKEDHIIVGCQSGVRSLYATADLLTEGFKDVSNMGGGYLDWVKNELPVKAPLDSVKIELQVKKEPLDLVKNE

SEQ ID NO: 157841 - protein, 106 aa, Glycine max
  Clone ID: PAT_MRT3847_11354C.1.pep
VTDYSGMDWSTGRQALLSSLSLSEAAPPRRKPEPLRNRNPKPPPPPPGSSPSRSWRFLIIGGGGGEERSKSLNFERTLMSLSAVSGGSWRNMRRVLRRRRRRTTGP

SEQ ID NO: 157842 - protein, 47 aa, Glycine max
  Clone ID: PAT_MRT3847_113550C.1.pep
FYFMDVLRTLSLYILILVLCFTFTFDRQNVSVFIFIVTKFKLTATAL

SEQ ID NO: 157843 - protein, 170 aa, Glycine max
  unsure (1)..(170): unsure at all Xaa locations
  Clone ID: PAT_MRT3847_113551C.1.pep
KGDPELISNYFCRIQLMNPNFFYVMDLNDDGQLRNVFWIDSRSRAAYSYFGDVVAFDSTCLSNNYEIPLVAFVGVNHHGKSVLLGCGLLADETFETYIWLFRAWLTCMTGRPPQTIITNXCKAMQSAIAEVFPRAHHRICLSQIMQSILGCXVQFQEYEAFQMALTKVIY

SEQ ID NO: 157844 - protein, 90 aa, Glycine max
  Clone ID: PAT_MRT3847_113552C.1.pep
STSIGGTSLISSIGDLLPVSCIQFAVWLPIRELTRQKPLLLVFLADENLMRLFTHTPSHFPNTQRTTTIRSVVNHTGNEGIPEHRFARSS

SEQ ID NO: 157845 - protein, 208 aa, Glycine max
  Clone ID: PAT_MRT3847_113553C.1.pep
MCGIFAYLNYNLNRERQYILQVLFNGLRRLEYRGYDSAGIAIDDSSSSQFSLSPPPLVFRQEGNIESLVKSVYQEVGETELNLGECFGTHAGIAHTRWATHGEPAPRNSHPQSSGHGNEFLVVHNGVITNYEVLKETLLRHGFTFESETDTEVIPKLAKFVHDKANEASGGQVVTFSQVGLEGMRHLEGAYALIFKGPHYPNELIACK

SEQ ID NO: 157846 - protein, 85 aa, Glycine max
  unsure (1)..(85): unsure at all Xaa locations
  Clone ID: PAT_MRT3847_113554C.1.pep
QRRSYEQLQQCSTESAPATVSVKQPHRXHPASVTLREIRPYHTSTELMIRKLPFQTLVPDITQDFKTDLHFQIHTVLALHEPADA

SEQ ID NO: 157847 - protein, 80 aa, Glycine max
  Clone ID: PAT_MRT3847_113555C.1.pep
QLMSQRLRRPMARHMYLLENPYYQHSIPTTVYLRMEPESMPASESIKHKYAMRRTMNLRFSGVVCTRPCHHEPEEWITWT

SEQ ID NO: 157848 - protein, 70 aa, Glycine max
  Clone ID: PAT_MRT3847_113556C.1.pep
HLGTIPVTGTGINPAKSFGPPVIFNNDKAWGDPWIFWVGPFVGNAGGAIYPPNLFKGFANKGLGSLRSHA

SEQ ID NO: 157849 - protein, 111 aa, Glycine max
  Clone ID: PAT_MRT3847_113557C.1.pep
CRRQEGLGITKGAELGLRCCLIWIPLAGIIGSDRSNKIIYSTPPIMNGEDLVSKLVGLATLSFAAFLLILFLSTASYKGISSQTFFFSSSFFSFLSVISTYKLAFQLLGTF

SEQ ID NO: 157850 - protein, 59 aa, Glycine max
  unsure (1)..(59): unsure at all Xaa locations
  Clone ID: PAT_MRT3847_113558C.1.pep
REVGLNVTFGVRRXIAGVGIESQLPVYSPDIKYIEVLVKTRVRRAELADLRQGMDPLKD

SEQ ID NO: 157851 - protein, 113 aa, Glycine max
  Clone ID: PAT_MRT3847_113559C.1.pep
GGSKIQEAYLIFQDLSERYQSTRLLLNGKAGCCMHMGNFDEAETLLVEALNKACFACVYIIHFYGFDDTIDIASCLQFVQDLKLLSDLIEFKMISIVFPFCNYSWDQCFFKNI

SEQ ID NO: 157852 - protein, 56 aa, Glycine max
  Clone ID: PAT_MRT3847_11355C.1.pep
HFSFRHSLREENSCVNWQAKSEAMQDQHLLISDTCSFNLQTKLIVDTIGVCFTKHN

SEQ ID NO: 157853 - protein, 90 aa, Glycine max
  unsure (1)..(90): unsure at all Xaa locations
  Clone ID: PAT_MRT3847_113560C.1.pep
MAWIPLLLPLLILCTVSVVSYELRHSSSVAVSXEQTATITCSGDVLAKKYARWFQQKPGQAPVLLIYKDSERPSRIPERFSSSSSRTTVT

SEQ ID NO: 157854 - protein, 44 aa, Glycine max
  unsure (1)..(44): unsure at all Xaa locations
  Clone ID: PAT_MRT3847_113561C.1.pep
LRICTNGKCRDXXAXLGVWXCAXRQXVNIMKXPXKFMXTXXEVT

SEQ ID NO: 157855 - protein, 42 aa, Glycine max
  Clone ID: PAT_MRT3847_113562C.1.pep
IDGAYKNPKPGILVLLCHLKPSLLCFFFNPNLAFPMPEFHEF

SEQ ID NO: 157856 - protein, 98 aa, Glycine max
  Clone ID: PAT_MRT3847_113564C.1.pep
KKNFGFSGGAFGERDLFLVESTKSQKDVLCVFTPPAPLWVFSEGVVPQKIFSPVFFRSPLLVILGKFSPACPNCKFLPPPGQNPSNFFKRKKVPPFFC

SEQ ID NO: 157857 - protein, 49 aa, Glycine max
  Clone ID: PAT_MRT3847_113565C.1.pep
RIKRNFIPHDESLLISNFQPKPHINLHQLLNSLTNPTIINLIPHLIPRL

SEQ ID NO: 157858 - protein, 135 aa, Glycine max
  Clone ID: PAT_MRT3847_113566C.1.pep
ACNGSGPPSFFVTGRGNGSLTGSLLPNSSSSFQLGKKSPLMEKVLVIARGQRQIMHQLDPLSNFLHEYFGKRSRLGRPAHTGKMRETESVPVPLVLTLAIGAVGVLLFKGLTSPKKWAYILFFVKMSFPFRKEAS

SEQ ID NO: 157859 - protein, 83 aa, Glycine max
  unsure (1)..(83): unsure at all Xaa locations
  Clone ID: PAT_MRT3847_113567C.1.pep
TSPSLRNPLHFYSTFHYPLVGPFRMLAGCYISYSSSGFKKSYTYSPSLIFKSVLTFSTFFFLRASHTEPSSYADLCITFTXDP

SEQ ID NO: 157860 - protein, 307 aa, Glycine max
  Clone ID: PAT_MRT3847_113568C.1.pep
MATVESRSKSVVLALSKYLSLDPSVVPADTSDSDIKSLYLNIIAVSGHGVNHSDEVLKWVAFAEAFPVALDACFENLNRLNDELSGKAVLLGNGLNPSEADVIVYSVVHSSLINLSDTSKEKLPHVLRWMDYIQHKQEFVGLFEKILLQKPGFEPPVTQPVGAVEADLKSNKTEQSVKNVNKSEVDSSKDKNKAEGKATGGKSTGDKEPTKAKAKPADKEVAEKENEVSVSLLNIQVGLIRKAWKHPSADSLLVEEIDVGEDKVRQVVSGLAKYCNPDELTNRRVVLITNVKPGKLRDVMSQGLVLC

SEQ ID NO: 157861 - protein, 299 aa, Glycine max
  Clone ID: PAT_MRT3847_113569C.1.pep
MKKALPTNGKIAKDAKETVQECLSEFLRSTFQTHVLRWMDYIQHKQEFVGLFEKILLQKPGFEPPVTHPAGVVEADLKSNNTEQSVKNVWVSEVNSSKDKNKAEGKATGGKSTGDKEPTKAKAKPADKEVAEKENEVSVSLLNIQVGLIRKAWKHPSADSLLVEEIDVGEDKVRQVVSGLAKYCNPDELTNRRVVLITNVKPGKLRDVMSQGLVLCASDEGPTIVEPLLPPEGSQIGERISFSGIDGKPEDVLNPKKKQLDKITPHLFTDDKGVATYKGIPFMTSGGPCTSSIPRATIK

SEQ ID NO: 157862 - protein, 73 aa, Glycine max
  Clone ID: PAT_MRT3847_11356C.1.pep
VVILATGAKELQERLGVLSDDCASCGLAPAICWIKGWISAGFCCTALRKAAICGLFIIASIASLGMPPPAPAP

SEQ ID NO: 157863 - protein, 90 aa, Glycine max
  Clone ID: PAT_MRT3847_113570C.1.pep
MATIESRRKSVALALSKYFSLDPSVVPADSSDSDIKSLYLNIMAVSGHRVNHSDEVLKWVAFAEAFPVALDACFENLNRLNDELSEKSVL

SEQ ID NO: 157864 - protein, 124 aa, Glycine max
  unsure (1)..(124): unsure at all Xaa locations
  Clone ID: PAT_MRT3847_113571C.1.pep
MARTKQTARKSTAGTAPKKQLASXAARKSAPATAGVKKPHRYGSXTSATRETMKYQNSTELLITKLALQRLVREYCHYFKTDLRXQSHAELALQEADEAXPYELXEDTNSCAIHAKRVTIMPKD

SEQ ID NO: 157865 - protein, 44 aa, Glycine max
  Clone ID: PAT_MRT3847_113572C.1.pep
CPWFIKMSLCLVLQPPLYFKSHRAKRQGCQCQLQDQPCFSSSRI

SEQ ID NO: 157866 - protein, 86 aa, Glycine max
  Clone ID: PAT_MRT3847_113573C.1.pep
TNVCVCVRCVRVGQILLRIEIRVRTHYSPLFFSNGHILLCSGNSISKKQRKKTLPLRFIVSFFSLSVATVSGGGTYKNARNGAFWF

SEQ ID NO: 157867 - protein, 64 aa, Glycine max
  Clone ID: PAT_MRT3847_113574C.1.pep
MKIFMLLYCAAGISGGPINPAMTFGLFLSSMVSFIRTILFILAHCLDADLGVGLFYAFQKSYFN

SEQ ID NO: 157868 - protein, 267 aa, Glycine max
  Clone ID: PAT_MRT3847_113575C.1.pep
MGSSEDPNNKVDFPYESPASQPFLSKPSYPSSSSSAVEEESESNQQFHHITYNSGPRSFKDLPFLILFLLFVLSSFAFGIFAIIHRNNSYPSLSSFTYDPTTTSCVLNPSNSSSSSSVSTLSLVDTTSSVSPKSVKGLIWTLVITFVLTISLNWALLVLLTLGTKQINYAAIPLCIAILVFVFLVIGIIVWILVVNWHPVPLAYRILRVASLFLLRNIILFGVLPCLNLGELTVSIIGVASLALARFMALFGVLPWLPGGPGLWLVP

SEQ ID NO: 157869 - protein, 94 aa, Glycine max
  Clone ID: PAT_MRT3847_113576C.1.pep
KHGLSGVDDLQFTVFGKSLWVSRKLSSVRTIVTWELPSEIVWGFRSKWAKVLYVFWPVLWVFLDDGLRYHGYWIDAAPLHSRANALEVCRLTMC

SEQ ID NO: 157870 - protein, 76 aa, Glycine max
  unsure (1)..(76): unsure at all Xaa locations
  Clone ID: PAT_MRT3847_113577C.1.pep
MSSTQDMGGLAPEGSQLDARECDSKKSDSFXSDGQDWLTSYDEVYDXLDAMGLWENLLKGILQKLVGEGTCHLAEG

SEQ ID NO: 157871 - protein, 154 aa, Glycine max
  Clone ID: PAT_MRT3847_113578C.1.pep
MSDSTNTNPPPPPVAEPPPPLQSGSPENDVAMSPQNSSEDPDSSLPTQTTPEPAVPDSPDSATTRPDPNPPPRKRRRRKKFFTELTTGPSTRRNDVAKDCDVEALIAISVGFPVDSLTEEEIEANVVSTVGGSEQSNYIVVRNHILARWRSNVS

SEQ ID NO: 157872 - protein, 417 aa, Glycine max
  unsure (1)..(417): unsure at all Xaa locations
  Clone ID: PAT_MRT3847_113579C.1.pep
TINEPTHFTPSSSTGCWGKEFVPGSKLRIQPDINPNEXRENTPRETTRVQPPLLSGLPDDLAIACLIRVPRIEHRKLHLVCKRWHRLLSEDFFYSLRKSLGMAEEWLYVIKADRAGRISVHAFDPIYQLWQPLPPVPGDFPEAMWVGSAVLSGCHLYLFGGVDLEGSRSIRRVIFYNACTNKWHRAPDMLQKRNLFRSCVINNCLFVAGGELEGIQMTRSAEVYDPSQNRWSFISEMRTSMVPLFGFVHNGVRFFKGNEIGSGNSMCEAYSPETDTWTPVTNGMVNGRGNDCISLNGQLYALGCPDGCKLTVYDRATDSWKKLIDSKLHVDKFPSLVAVAPVSLNGKLCIIRHNMSISLVDVSSPNQQLESNPQDLWENIAGKAQHIRRSLVRKLWSTIARRDFSKSCIVCCQVLQA

SEQ ID NO: 157873 - protein, 56 aa, Glycine max
  Clone ID: PAT_MRT3847_11357C.1.pep
IEIKLPIPDLEAYNLIAAPKGKGCFGLNVRFGKNDIQLNPRSQFPNIKGPRLMQSQ

SEQ ID NO: 157874 - protein, 100 aa, Glycine max
  unsure (1)..(100): unsure at all Xaa locations
  Clone ID: PAT_MRT3847_113580C.1.pep
VLXXXTSXXXXEYXXXRSKPXXHQXXGCXXXXXMDTTVXXXXXVXXXXRXRAXSXWGXDXXXXLLWRXXWXRXXVVXFRXDAXXXCXXAXFRAYVRVXAT

SEQ ID NO: 157875 - protein, 47 aa, Glycine max
  Clone ID: PAT_MRT3847_113581C.1.pep
LFSFLWKKVKMAFFILHALKYTTHQPKPKYNVTPIKKGYYFSRTCAQ

SEQ ID NO: 157876 - protein, 67 aa, Glycine max
  Clone ID: PAT_MRT3847_113582C.1.pep
FKGISPPKKNFPKGGFSPRAPKTGGEVKTGAGGGPPPPPPKKSLGTWGGARPNLLRMGGPPPPRGLF

SEQ ID NO: 157877 - protein, 66 aa, Glycine max
  unsure (1)..(66): unsure at all Xaa locations
  Clone ID: PAT_MRT3847_113583C.1.pep
KRLVYTXXARXIVQGVLSNFLXNLKPTSYLTITAPICKEMLIPNYSNATIIMFPTLTPIAPFHSFL

SEQ ID NO: 157878 - protein, 37 aa, Glycine max
  Clone ID: PAT_MRT3847_113584C.1.pep
GSRGSVINQSPSCTCFLCWCYTSRWILMLNTHLFSKL

SEQ ID NO: 157879 - protein, 40 aa, Glycine max
  Clone ID: PAT_MRT3847_113585C.1.pep
LVGLPFRLMSRIFRNCQPKPNIHQFYFIYFLEFHFYNGNY

SEQ ID NO: 157880 - protein, 80 aa, Glycine max
  unsure (1)..(80): unsure at all Xaa locations
  Clone ID: PAT_MRT3847_113586C.1.pep
WSPPDMDLKGSRSLRQNVFVVYTLKKHPIPKPVMFCPKKKKPQKNKKKNTGRPPPSSVVAPVIXSGXXRLXXLIPFXXCP

SEQ ID NO: 157881 - protein, 82 aa, Glycine max
  Clone ID: PAT_MRT3847_113587C.1.pep
FAYHVLTHGSFRIFYYYALFLSFADPYSTVSIFFFQLFMLNKKLYPDLRPPRWPWSRPLKGRHVSYREVLTNGAVTTFNTKI

SEQ ID NO: 157882 - protein, 73 aa, Glycine max
  Clone ID: PAT_MRT3847_113588C.1.pep
MRQGTEQLDTSVLEELRLRDAVAEPRFKRHVAKLKRDRAKRLLYKADVVIHKAMSALMTAEAMKAFEGTPLVK

SEQ ID NO: 157883 - protein, 152 aa, Glycine max
  Clone ID: PAT_MRT3847_113589C.1.pep
MIRLYLSAGTVKDQFGSSSSRSSRFGSRELSGKPLKVAPDDQTLPLCWHGKRPFTSLREVRKYFKPVALGFTNGGRTKAQFEILPEAYLIISNLGNVCLGILNGSEVGLEELNLIGDISMQDKVMVFENEKQLIGWGPADCSRIPKSGDVSI

SEQ ID NO: 157884 - protein, 66 aa, Glycine max
  Clone ID: PAT_MRT3847_11358C.1.pep
ASLPVPLGLWSALRIVSLWVEQRMKVTPLAPQPVIQGTTVAQMVRQCHLIQTPRRMKEVLVITMGA

SEQ ID NO: 157885 - protein, 126 aa, Glycine max
  Clone ID: PAT_MRT3847_113590C.1.pep
EWLLVCTWVVPFSLLLVLCCVCGGSVQPLIPMDLHGNPHNSGMKKRKPEQDTLISDHGNSVSVGESSGSGDLCKSSTSGSLNSNNQNGSNSDISCHDDEDMIDDDADMIDDDGDEDADYAFDYNED

SEQ ID NO: 157886 - protein, 151 aa, Glycine max
  unsure (1)..(151): unsure at all Xaa locations
  Clone ID: PAT_MRT3847_113591C.1.pep
PRFPPLIFNFTGDXLPIPLNIPKQGTRVNVLNYGATVEIVFQGTNVIAGIDHPMHLHGFSFHVVGYGLGNFNQSKDPKNFNLVDPPYLNTVIVPVNGWAAVRFVATNPGVWFMHCHLERHQVWGMETVFIVKNGKASNETLPPPPPDMPLC

SEQ ID NO: 157887 - protein, 53 aa, Glycine max
  unsure (1)..(53): unsure at all Xaa locations
  Clone ID: PAT_MRT3847_113592C.1.pep
HXIKNVLFPXEISLILSRXFXYYXXFFSXIXETXFFHINXSCXKYXFFIVSKT

SEQ ID NO: 157888 - protein, 46 aa, Glycine max
  Clone ID: PAT_MRT3847_113593C.1.pep
DKPFNDGLCYCHCLISYMVIIRPYNVHMLDLMPVLFMQLSQSLNIC

SEQ ID NO: 157889 - protein, 60 aa, Glycine max
  Clone ID: PAT_MRT3847_113594C.1.pep
DAQMTKTYRLNICTCFYRITTLLPVQNDTIRRLPRTIIYLTYHRDRLRNTLSTEIGIEHQ

SEQ ID NO: 157890 - protein, 184 aa, Glycine max
  unsure (1)..(184): unsure at all Xaa locations
  Clone ID: PAT_MRT3847_113595C.1.pep
REESFRIEYFLYILNQSINSIETRFEQFLXYETIFCFLFDSKKIKALDEDELKKYCINLKKFLRFNEYSDIDDLDLFSKLKVLREVLRKEISTSIEVLSYIKTLDFFPNVYIAYIILLTIPVTIATAERSFSKLKLFKSYLKSTMLQDRLNELAILSIESEVLELLDYKTLINDLAAKKARRLI

SEQ ID NO: 157891 - protein, 127 aa, Glycine max
  unsure (1)..(127): unsure at all Xaa locations
  Clone ID: PAT_MRT3847_113596C.1.pep
SKWPLLHLQHTAAFSKDGNLHGWRWCRIGXLGACDRHDRLLPEKVTVEGDKTAMVACGXRHTILVASLGGXCTKGDCLYGQFVHXDFEDHFLPXRVQATDDKLISHSSTMWRHTLVLTFREPLLCLG

SEQ ID NO: 157892 - protein, 116 aa, Glycine max
  unsure (1)..(116): unsure at all Xaa locations
  Clone ID: PAT_MRT3847_113597C.1.pep
STNAYLYRESGLIIFCLCSPPPXXXXXXFPLSPLSPPFSFFPFFPFPPFFPPFPPPSPFPPFLFPPLFPLFPPLSSPPFPSPFFPPLFPXFSPLFLSPFLPFPLFAPFPFFFLPFS

SEQ ID NO: 157893 - protein, 68 aa, Glycine max
  unsure (1)..(68): unsure at all Xaa locations
  Clone ID: PAT_MRT3847_113598C.1.pep
LKSLXXYXXLKXKXXIYXXXXXXXXFLXXXKLFXXKXSXIXLSXXXIXXXKYXKXIXITXYXIPNKKX

SEQ ID NO: 157894 - protein, 52 aa, Glycine max
  Clone ID: PAT_MRT3847_113599C.1.pep
SGFPKWRRGNSAGPTGAHKCNNTYGPYLIRIIKNQITPPPLFPHYINKGFFF

SEQ ID NO: 157895 - protein, 63 aa, Glycine max
  Clone ID: PAT_MRT3847_11359C.1.pep
KLTLISGTLSEKFVFIRNTLKQVNKTVYAVRVEASKVTKTNFQQQIKAFSLVKTGKFHDKCLV

SEQ ID NO: 157896 - protein, 67 aa, Glycine max
  unsure (1)..(67): unsure at all Xaa locations
  Clone ID: PAT_MRT3847_1135C.1.pep
MTGGGSSCESKTAGYPAAVMTNGAATXRRKPXGKGKAAKEPNKRTRRLSAFFAFMEDFRTVFKIQHP

SEQ ID NO: 157897 - protein, 70 aa, Glycine max
  unsure (1)..(70): unsure at all Xaa locations
  Clone ID: PAT_MRT3847_113600C.1.pep
MAKDPVXXXSVTGAAGEIGXALVPMIXXXVMLXPDQPVXLHMLDIPPAAESLNGVXMEXVDXAFPLLKVL

SEQ ID NO: 157898 - protein, 105 aa, Glycine max
  Clone ID: PAT_MRT3847_113601C.1.pep
CNLSPILFQVDSHDFCLHLLFLSFFSIGLSIEGVTKIKDGYNPTTWMLEVLIFTTYTKILSRIDCVEYIFTIKFGMLQLVCNGTKILAGIKSLDPYHQIKWQTTI

SEQ ID NO: 157899 - protein, 93 aa, Glycine max
  Clone ID: PAT_MRT3847_113602C.1.pep
TQGTKGIPISQKPPCQKGNKGKRNLFQPAVTGSFNKTAPWIHPEIGDPDHQGPQLSQKGGVLKVGAIRGMARPWGKRVPAKNCTQKKNRKHKE

SEQ ID NO: 157900 - protein, 256 aa, Glycine max
  Clone ID: PAT_MRT3847_113603C.1.pep
MLNLKSSSSHLLLLFLFTLVTIASEAAAPIYSAHACTDDGPFYQPNTTYQTNLKLLLSSLVSNATLHQGFFLTNISLGNPDEVKGLFLCRGDVTPSVCHDCVAAAATNITDLCTNQTESVIWYDQCMLRYSNLSFLNNIVPGVNLNSEQNVSDSNNTGFINFLASTLNGLAQEAVNSLSGKKFATKEANFTSSMKVYTLAQCRPDLSTFDCNMCFTSAISNLGDGKRGARSLLPSCNVRYELYPFYNVSAVSSHPA

SEQ ID NO: 157901 - protein, 124 aa, Glycine max
  Clone ID: PAT_MRT3847_113604C.1.pep
MASKLLLQRRLFRFLQLSPPFFSSIHAAPTILSAKASEFMFLYNVNALLPPLSPSRNFCSRSFNLHESQGPLTIDYSSLLHYLEFHRLYSYTIHSLQEKLEDYGDSVEVDGFDIDYGNDVLTIK

SEQ ID NO: 157902 - protein, 66 aa, Glycine max
  Clone ID: PAT_MRT3847_113605C.1.pep
RGLTATMFSVQLLDSQHLVSLSNFGRVMDVCGKLKTRHEFPSEEFGEYLKLMQHMYGGKELWTSKD

SEQ ID NO: 157903 - protein, 119 aa, Glycine max
  Clone ID: PAT_MRT3847_113606C.1.pep
MASLKFACVVAVICMVVVITAPMTNAITCGEVARSLSPCINYLRSRRGGSPEAECCRGVTSLNRAASNTADRRTACNCLKSVAASISGLNANNAASLPGRCRVRVPYRISTSTNCNRIR

SEQ ID NO: 157904 - protein, 212 aa, Glycine max
  Clone ID: PAT_MRT3847_113607C.1.pep
MEGRMGLLFLVVLGAAWACDARELANSETSELSIKPDVCALCEEYITKALDYLHENKTETEIISILHNTCHQLPSFKQKCVALVDYYVPLFFSEVATIQPGEFCHKVNLCQDIAHISLKVQEDSCEFCKDTVSTLLEKLKESDTKLEIIETLLKVCNSVEKYANKCKRMVFEYGPLIFDHAEKILETTDICNIIHACKSSDVAGQQAFLSVS

SEQ ID NO: 157905 - protein, 52 aa, Glycine max
  Clone ID: PAT_MRT3847_113608C.1.pep
RETMPTVIAHTFLTHARKQTTHLGSPAVIELHTLYYRVLYSLFASSLTGCKA

SEQ ID NO: 157906 - protein, 212 aa, Glycine max
  Clone ID: PAT_MRT3847_113609C.1.pep
MEGRTGLLFLVVLGAAWACDSRELTNSGTSELSIKPDVCALCEEYITKALDYLYENKTETEIINILHNTCHQLPSFKQKCVALVDFYAPLFFSEVATIQPGEFCHKVNLCQKIAYIALKVQDDSCEFCQDTVSTLLEKLKESDTKLEIIETLLKVCNSVEKYANKCKRMVFEYGHLIFDHAEKILETTDICTMIHACRSSDVAGQQAFLSVF

SEQ ID NO: 157907 - protein, 44 aa, Glycine max
  Clone ID: PAT_MRT3847_11360C.1.pep
NPLSCKKKKSEKQNIGPLKVGLAKFICFFNWSMYNSYLACKLWI

SEQ ID NO: 157908 - protein, 239 aa, Glycine max
  unsure (1)..(239): unsure at all Xaa locations
  Clone ID: PAT_MRT3847_113610C.1.pep
MDRQENLLASSMPSQLLSIDKELWQMAEERAQEILWTIEPIVLSEVNRKDVIDYVQRLIRGYYGAEVLPFGSVPLKTYLPDGDIXLTALSHEDAEEDLAQAVCYVLQSGDDPEYQVKDIKYIRAQVRLVKCTVKNIAVDISFNQMAGICTLRFLEQVDQLVGKNHIFKRSIILIKAWCYYESRLLGGHHGLLSTYAVEILVLYIINRFHSSVRGPLEVLYIFLDYYGSFDWDHNYVSIW

SEQ ID NO: 157909 - protein, 1083 aa, Glycine max
  unsure (1)..(1083): unsure at all Xaa locations
  Clone ID: PAT_MRT3847_113611C.1.pep
MTVMTPAPIDQQQEDEEMLVPHTDLAENNHQPMEVVAQPDAANTVESQPVEDPSTSRFTWKIENFSRMNTKKLYSEIFVVGGYKWRVLIFPKGNNVDYLSMYLDVADSASLPYGWSRYAQFSLAVVNQIHNKYSVRKDTQHQFNARESDWGFTSFMPLGELYDPSRGYLVNDTLVVEAEVLVRRIVDYWTYDSKKETGYVGLKNQGATCYMNSLLQTLYHIPYFRKAVYHMPTTENDMPSGSIPLALQSLFYKLQYSDTSVATKELTKSFGWDTYDSFMQHDVQELNRVLCEKLEDKMKGTVVEGTIQKLFEGHHMNYIECINVDYKSTRKESFYDLQLDVKGCPDVYASFDKYVEVESLEGDNKYHAEQYGLQDAKKGVLFIDFPPVLQLQLKRFEYDFMRDTMVKINDRYEFPLQLDLDREDGKYLSPDADRSVRNLYTLHSVLVHSGGVHGGHYYAFIRPTLSEQWYKFDDERQMQNEDKWGGEEELPQKNPGSDSXLNQRSPXPINSFAGYLRIKVITKSQGGKSQQESNISNKPAGRWRYHMLSEGFLYGQSGKCPVSRRALIFRICAQSPGGSLFFXLVDRGKVRFSWRXDKAFHLRLCGEESTKEFGLAGQFQSFWHWAKRQHHTAQTRPXLNTQDKNTFMFCKVITIRRRIYFTMKXLDIPLPELQGLKTLKVALQHENNERELLLRDRLQKLFEWHRMTYMECINEDIKGVECPIDLQTFRTSQLEDGDIICFQKASSMDKENKARYPEVPSYFEYVHNRQVVHFRSLDRPKEDDFFLEMSRLFTYDDVVERAQQLGLDDPSKIXTPHNCYSQQPKPQPIKYRGVEHLSDMLVHYNQTSDILYYEVLDIPLPELQGLKTLKVAFHHATKDEVVIHTIRLPKQSIVGDVLDDLKTKVELSDPEAELRLLEVFYHKIYKVFPPNEKIESINDQYWTLRAEEIPEEEKNLGPHDRLIHVYHFNKDAAQNQMQIQNFGEPFFLVIHEGETLAEIKVRIQKKLQVPDDEFVKWKFAFFSLGRPEYLQDSDIVSSRFQRRDVYGAWEQYLGLEHTDNAPKRSYAVNQNRHTFEKPVKIYN

SEQ ID NO: 157910 - protein, 48 aa, Glycine max
  Clone ID: PAT_MRT3847_113612C.1.pep
CPRNWLCRWNTASIPMKFMDYTLLHARLKLVNSTGRLCVISGSPQSQC

SEQ ID NO: 157911 - protein, 123 aa, Glycine max
  Clone ID: PAT_MRT3847_113613C.1.pep
ENHLKLLHSYFMSSIMETQPECAVINIPNIKTEQHVSVSPKKKNGGGMRFLRVALFKMRGRSAKPTALQVDNNEDGERSKGTWGKFVGSMRPLHLQSTQSPRSSPDPPSEYKSDCGGYVSDFW

SEQ ID NO: 157912 - protein, 33 aa, Glycine max
  Clone ID: PAT_MRT3847_113614C.1.pep
TMNSFCDHSNIIRHIVLLSYTKKGFLYHFYISP

SEQ ID NO: 157913 - protein, 41 aa, Glycine max
  unsure (1)..(41): unsure at all Xaa locations
  Clone ID: PAT_MRT3847_113615C.1.pep
IDKIRSGXLLLPCLIGXENKKSXVEXMSXCGSFTPCXWNSC

SEQ ID NO: 157914 - protein, 138 aa, Glycine max
  Clone ID: PAT_MRT3847_113616C.1.pep
MARKRKPLWGLSTKKLGRLPHVFSRVLQLPFPADTDVSVQEAPHCFRFVAESPAAGQVEAHIVEIHPGVTKVVVRETGSTALNDLHLDVWRIRLPESTRPELATAVLAAGELVVTVPKTQDVWAAVPSFCSIATNLHC

SEQ ID NO: 157915 - protein, 77 aa, Glycine max
  Clone ID: PAT_MRT3847_113617C.1.pep
QFPIAIRLSTLYKHRSQSPILGHRIQEIKSNTKHQLCNIAKHTQAFKNQTPGPPPLNLLGINSERKPDGRNTRKPAP

SEQ ID NO: 157916 - protein, 113 aa, Glycine max
  Clone ID: PAT_MRT3847_113618C.1.pep
TMTVIPWGCVNAALNTALVIVLRPHLTVLAGRYVVCVFRKKNAQPGQELRVLTHVVAGKSRAKLYFNLIKTMFPDEIINFAVLELGFIPHDVAVLSCLALNYAKASSRHCGGY

SEQ ID NO: 157917 - protein, 112 aa, Glycine max
  Clone ID: PAT_MRT3847_113619C.1.pep
SFWFRILQSFQALNWFPCTEGWSIWTSFFLIGFYWRGLPLEYLITPHTSWFSCIQYHLASWVKFYRWPVPQNFYIKCNPLLISPFDDVCFLSAPINQFSTPHVSYLLDSFYK

SEQ ID NO: 157918 - protein, 66 aa, Glycine max
  Clone ID: PAT_MRT3847_11361C.1.pep
GLSRGSPKRVWPPYTCSRPQWAIEAPLSRVLQFMTSSLILAISLDRGFGTQVQFSPGLARCGLING

SEQ ID NO: 157919 - protein, 614 aa, Glycine max
  Clone ID: PAT_MRT3847_113620C.1.pep
MSYDKNPSPVPTSTTGDEEKKVTGGGYDVGVYSAHGRVDHNARAVDGHDLNDSYDPSKESLLTRLGLNIESFKRAPGTTRGLVAHGDIPPEYLQHDNPLLQQKMKPRHLQMIAVGGSIGTGLFVGSGASLGNGGPAAVLMAWIIMGVMLIMVTQALGEMAIIYPVSGGFYTLASRMLDPSFAFAMGWNYVLQWAVVLPLEITVAGTTVQYWTDKVPLGVWITIFFLLIIFFATLGTLGYAEEEFWSSCLKLAVVIMFIFIGIVCICGGGPASGDYGSYVGGRYWQNPGAFANGFKGVCAMFVTAAFSFAGTELVGLAATETPNPRKTLPSAVKNTFWRITIIYITSLTIIGLLIPYDDPDLFGGSGANVSPFVIVLDRANIGGLNHLVNATICISVLSIGLSCVYAGSRTLTALAETGYAPKMFTYVDKSGRPLYSVLAILAFGPIAYVNLANVGTDVFNWLLALSGLSTLFTWLAICVTHIRFRQAWKIQGHSVEELPFTAIAGVWGSWLGAILIVIVLIAQFYIGLFPLGGVESGNARAESFFLSYLAFPILLAFWVVGYAWKRTLPRKTTEIDLDTGRKSWLTVEEMRQYKAERRLAPWWKRIYRMLFTSS

SEQ ID NO: 157920 - protein, 39 aa, Glycine max
  Clone ID: PAT_MRT3847_113621C.1.pep
MNNREYLPMKMIHCSRGLRGLDPLPTIFYFFKVPFYRLK

SEQ ID NO: 157921 - protein, 83 aa, Glycine max
  unsure (1)..(83): unsure at all Xaa locations
  Clone ID: PAT_MRT3847_113622C.1.pep
MESKSRIATTTMSSIQNFMDGIVSTCWSKERVIVFTMNNNKKXSGLEPIRVGLGRVNTHIHFLMCDFSAFKILASNYLDMRIG

SEQ ID NO: 157922 - protein, 162 aa, Glycine max
  Clone ID: PAT_MRT3847_113623C.1.pep
MLWQYYQRSGGCKFGKSCKYNHTRGKISTAPAPLLELNFLGLPIRPGERECPYYMRTGSCKFGANCKFNHPDPTAVGGGGGNPPSGYGNGGSISLQGVSQTSVPSWSSPRTLNEASPFVPMMLSPTQGVSTQSSDWNGYQVNRVNANNHIWQGTIYYIISTR

SEQ ID NO: 157923 - protein, 84 aa, Glycine max
  Clone ID: PAT_MRT3847_113624C.1.pep
KPAGGKRGAGQGKFPGRKTRGPTNFAINRGLGGKKIFFSKIYGSLITIHQVFTSPGAQFFQLNLQKNLFFKRTIFLNKKTFLRK

SEQ ID NO: 157924 - protein, 51 aa, Glycine max
  Clone ID: PAT_MRT3847_113625C.1.pep
SKDRRSIWPLLFFFRYMQSSEKFYIITKQNWNYTRIHLSHSLNRNTNVPTF

SEQ ID NO: 157925 - protein, 61 aa, Glycine max
  unsure (1)..(61): unsure at all Xaa locations
  Clone ID: PAT_MRT3847_113626C.1.pep
IIHAYISYKNKVGXXKRMETELXQFQSLREKRYRDSTSXHVDFDHSFLQSFHWLRGSTVQP

SEQ ID NO: 157926 - protein, 47 aa, Glycine max
  Clone ID: PAT_MRT3847_113627C.1.pep
YFPFFFFLKGAKHPKAFLQMLLLSFDRKIKNVFITSSHILTNSLFFF

SEQ ID NO: 157927 - protein, 77 aa, Glycine max
  unsure (1)..(77): unsure at all Xaa locations
  Clone ID: PAT_MRT3847_113628C.1.pep
WGVPVRGLCTCGLSLVFGGGPRIAIGLGMRRGARLGPVCWRPLGGGLFSFLWLALFSPPCFFRFSPVFPFCGLLXDV

SEQ ID NO: 157928 - protein, 80 aa, Glycine max
  Clone ID: PAT_MRT3847_113629C.1.pep
NTSHPFQSQDSWADLGATTNDGSFRSALQEEAWRRHNKRMQEELEEEIERVERIRRMQLTEVQKAMLGKSWIFPRDWYWS

SEQ ID NO: 157929 - protein, 211 aa, Glycine max
  unsure (1)..(211): unsure at all Xaa locations
  Clone ID: PAT_MRT3847_11362C.1.pep
PTRSLGCPENAGAAGTLYDAVPRSLIVDNFNMTTDTETLLLEFPNQPLWTNVYVRNKARATVPLLWSRVQVQGQISILQGGVLSFGLRHYATSEFELLAEELLMSDSVMKVYGALRMSVKMFLMWNSKMLIDGGEDITVATSLLEASNXIVLRGASVIHSNANLGVHGQGLLNLSGPGEWIEAQRLAISLFYSIHVRHCFIFTTNLLCNFV

SEQ ID NO: 157930 - protein, 51 aa, Glycine max
  Clone ID: PAT_MRT3847_113630C.1.pep
IERWISLSVRSNVMCFYPAVGECISYALTSKKKKGPPPTSQLPTRNNSGPA

SEQ ID NO: 157931 - protein, 142 aa, Glycine max
  Clone ID: PAT_MRT3847_113631C.1.pep
SRPLSSTVLSSDPQLLAKQTNNQKMKKRKEKRRKKNVTTKAKPEPDLRFGIGRRRSRGIMEAVVFVEAVQVENGFDGGMTERRRRRRGKRRESASAAFRFAAERREVEKHVSVVEGREWLGEAQHVRNGRHGVQRHHRERES

SEQ ID NO: 157932 - protein, 255 aa, Glycine max
  unsure (1)..(255): unsure at all Xaa locations
  Clone ID: PAT_MRT3847_113632C.1.pep
MNLNSTEALLVLFAFVFLAWGNAQNTLVPAIITFGDSAVDVGNNDYLPTLFKANYPPYGRDFINHQPTGRFCNGKLATDITAETLGFKSYAPAYLSPQASGKNLLIGANFASAASGYDEKAAILNHAIPLSQQLKYYKEYRGKLAKVVGSKKAALIIKNALYILSAGSXKIAIFLIHTXLINLVNPPENLVLWRQTEGCCGTGPVETPSLVCNSKSXGTCSNATQYVFWDSVHPSQAANQVLADALILQGISLVT

SEQ ID NO: 157933 - protein, 73 aa, Glycine max
  Clone ID: PAT_MRT3847_113633C.1.pep
LTRMMSMDAQSVDLKLNSDGLMRTKSRIGGKWTDANEGYCIGGHNARSGESIADGSCMAGRETHDATAGTYDA

SEQ ID NO: 157934 - protein, 122 aa, Glycine max
  Clone ID: PAT_MRT3847_113634C.1.pep
VREKQKTSGLMADSEKYNKKPSSSSFFSSPRLFTNFTPKGFHETETMMSPTSTLDSKPFSGFKNPFWSETNSPRTPVSEHKRYWDKLDSKGIGLGLVDALVDEEKHGEVSSKSESRMGCVGI

SEQ ID NO: 157935 - protein, 274 aa, Glycine max
  Clone ID: PAT_MRT3847_113635C.1.pep
VREKQKTSGLMADSEKYNKKPSSSSFFSSPRLFTNFTPKGFHETETMMSPTSTLDSKPFSGFKNPFWSETNSPRTPGSEHKRYWDKLDSKGVGLGLVDALVDEDKHGEVSSKSESRMVVFGSQLKIQIPPLSPSESSKFVAEKGKSSSGVADANSQRVFMGCLSASEMELSEDYTRVISRGPNPRTTHIFDNCIIESSCFELGCSASSVKENGCFLDQTSYHSRSFLSVCFHCKKNLGQGKDIYMYRGERAFCSNECRYQGMLLEEEMSKLEAQ

SEQ ID NO: 157936 - protein, 136 aa, Glycine max
  Clone ID: PAT_MRT3847_113636C.1.pep
GKIHPSGHLIIVPNLRIEGQVEVKDVRPVMSLFTSRMSARNSSNSTGTENNITRLVNRRQVLPPYVPSPRRLSDIFSASESRSVLPSLPSPFYHLLTTMPFYHLLTTMPFYHLLTTMPFYHLLTTMQAHKSAQRFQ

SEQ ID NO: 157937 - protein, 100 aa, Glycine max
  Clone ID: PAT_MRT3847_113637C.1.pep
VSERNQKTMADSEKYNKKPSSSSFFSSPRLFTNFTPKGSHETETMMSPTSTLDSKPFSGFKNPFWSETNSPRTPGSEHKRYWDKLDSKGVGLGLVDALVD

SEQ ID NO: 157938 - protein, 100 aa, Glycine max
  Clone ID: PAT_MRT3847_113638C.1.pep
LTRCFLHKEHNILLTTFMFSRVRFHDSKRNLTKVTKLSLNNIMFITSVITLSKFPDSPCTVMIHILSFVHKLPLYHLKRMHLNCQGASPMVDKSKLFINK

SEQ ID NO: 157939 - protein, 111 aa, Glycine max
  Clone ID: PAT_MRT3847_113639C.1.pep
TNRGGLKPFFSTHKRAAQKRLYDNIQPKRKNENCLIKVPRAHKLGIKLKRGIPQQNGSLQLKSVELFFNQDIPPFWNFTLGMSCLTGATLVTYKNNLHGFATSSIRAINGG

SEQ ID NO: 157940 - protein, 111 aa, Glycine max
  Clone ID: PAT_MRT3847_11363C.1.pep
PGWGFFQGGNFLAPPNGAQNFCPPPWSRKGAPRKIRVSPFSRVSKKPLLGQKKIKNGGEALVFLKIMGFLKGSNKPPPLPKRFMYGGPTIFGENLGGGGPPVLFVLKLNPG

SEQ ID NO: 157941 - protein, 133 aa, Glycine max
  unsure (1)..(133): unsure at all Xaa locations
  Clone ID: PAT_MRT3847_113640C.1.pep
GMFSLTHQISIQGSSRAISTRFTTPPTNSLCRTIPIPNYQVPMWPQTPAFGRVXSLPQQGSITAPRMIHSSLHMESPTPTQFCPHXLLSPTNAKQVPSLNATHSTVALVSCERGIPVQSLPFTSKELCAADAW

SEQ ID NO: 157942 - protein, 69 aa, Glycine max
  Clone ID: PAT_MRT3847_113641C.1.pep
QMNHSIKSNEGFSKTMQAQLQWCNTAHNIGGVSFNQRTICITRGHSLITAHNIGMPKYMGEFLKDQILF

SEQ ID NO: 157943 - protein, 51 aa, Glycine max
  Clone ID: PAT_MRT3847_113642C.1.pep
FICSWSAPTLWEQDDGSWQFTKQSWLLLSCGFITRLTLTSEISVLYDDAYA

SEQ ID NO: 157944 - protein, 58 aa, Glycine max
  Clone ID: PAT_MRT3847_113643C.1.pep
NSPASHAYNIHYAIITALLFTPLITHTRTNFHDVFSLPHISTKCLLLFIDKADTFLYQ

SEQ ID NO: 157945 - protein, 78 aa, Glycine max
  Clone ID: PAT_MRT3847_113644C.1.pep
IGSFFLNLQEGHKRFWDLLKLGGWPYRIFFKPWNFLGFWRKSWCICVKFFLRIIRPLGFQFFKLFINFSQACPFVICQ

SEQ ID NO: 157946 - protein, 99 aa, Glycine max
  Clone ID: PAT_MRT3847_113645C.1.pep
ERPPPTRPLGGGFNFKPELTSETWAHEKALERRKSENSLADAQPPAPPVEERRRTGLRRRGTDHGRFWQRKNKKRRKTVRRPYSSRTQNALPTLKKKTR

SEQ ID NO: 157947 - protein, 93 aa, Glycine max
  unsure (1)..(93): unsure at all Xaa locations
  Clone ID: PAT_MRT3847_113646C.1.pep
SRFFHNVHAKRSMMLYAINYRVHISIHDGRQPVRKFMAFDRHMNLXLCDSEXFRXLSPAQGKNPVLGGYRDDQPTLRLVLLLGEVVISMTNEG

SEQ ID NO: 157948 - protein, 55 aa, Glycine max
  Clone ID: PAT_MRT3847_113647C.1.pep
TLIPKLQHQQKFVHFNTQLLKFFMSPPGKHPDVEPNVGPTRGVPLHNTTKGLTLI

SEQ ID NO: 157949 - protein, 155 aa, Glycine max
  Clone ID: PAT_MRT3847_113648C.1.pep
MDALNPSSSGASLFLANLPSRGLFSSTVVSSNPGGMRVYVCNHDTSPPEGQHIKTNQQNILIRSLTLKKQRGDSSSKDGSDGSRKRNAEKGLERASAKKTNNQINSRQEGSNSQTTTRDFHNLTVERLRALLKSKGLSTKGKKEELITRLKDATG

SEQ ID NO: 157950 - protein, 45 aa, Glycine max
  unsure (1)..(45): unsure at all Xaa locations
  Clone ID: PAT_MRT3847_113649C.1.pep
MEPXPAQGHRCXXLXREAQDXRTLXDCEXIIXNNQGNXPSNNPHM

SEQ ID NO: 157951 - protein, 64 aa, Glycine max
  unsure (1)..(64): unsure at all Xaa locations
  Clone ID: PAT_MRT3847_11364C.1.pep
YYFCNNTMESQLVXYVSGTXDSLPYLTVVISPLCDLWLRVYMLSRKLSVLKHNCLAMQFMQQMT

SEQ ID NO: 157952 - protein, 99 aa, Glycine max
  Clone ID: PAT_MRT3847_113650C.1.pep
PPNSPPGFKSQVGPQTLFPHFWGGFPQAPLKKSQGWFGFAPPPPKNFYLFSPNPLGSCPLETPKLSVKLNFFFQVYFLGRKCSWFFYPFTHSRLFCLNK

SEQ ID NO: 157953 - protein, 82 aa, Glycine max
  unsure (1)..(82): unsure at all Xaa locations
  Clone ID: PAT_MRT3847_113651C.1.pep
KSEPHSWDLMFPKEECGPNNGFKRWSSIEGKWSLIRVLRFVVVNXKSNQMVXFVSGISKEFEIAGNNFLRAFFVTQGLAGIF

SEQ ID NO: 157954 - protein, 156 aa, Glycine max
  Clone ID: PAT_MRT3847_113652C.1.pep
ITISKGSGTALDWNSIQKLKYTWAVAQETMRLYPTAPGAFREAITDITYEGFTIPKGWKIFWAFIGTNKNPKYFHEPESFDPSRFEGNAPVPYTWLPFGAGPRTCPGKDYVRFVVLNFIHILITKFKWEAILPDEKVSGSSIPIPAEGIPIRLHHY

SEQ ID NO: 157955 - protein, 76 aa, Glycine max
  Clone ID: PAT_MRT3847_113653C.1.pep
DGRHVAGSDGHPKRLNRSLDPDNKAIGFTANKFQSIECFLTALLPKLSSHQHRFRPTLSSSLIGPGGEIPLWLFVR

SEQ ID NO: 157956 - protein, 67 aa, Glycine max
  Clone ID: PAT_MRT3847_113654C.1.pep
SILNFKSITEEFSSQKRKSREEKAKSTHKNGLFLFTLVTEAPPKALNLPRQFLSHEKPLKIHVFILS

SEQ ID NO: 157957 - protein, 137 aa, Glycine max
  Clone ID: PAT_MRT3847_113655C.1.pep
ESISRLVLLSPKLARPTLLLWAVFFGNPFSYYGLVLLTTELNGHSKCMPDKLQTEKSQDVKYKSVFIASFAELPGLLLSAAAVDKLGAKLSMSTMFFMCWIFLLPLLFYLAESLTTSFLFLARICITTTFTIGYIYA

SEQ ID NO: 157958 - protein, 121 aa, Glycine max
  Clone ID: PAT_MRT3847_113656C.1.pep
MALTMMAAIGIGMKQEKKMPATPAPENELKKRNEELEKELRESKEREEQMKRELQSAWERLRVAEEAEERLCSQLGELEAEAVYHARDYHARIVSLMDQLSRAQSLLLKTSASSISLPSSS

SEQ ID NO: 157959 - protein, 87 aa, Glycine max
  unsure (1)..(87): unsure at all Xaa locations
  Clone ID: PAT_MRT3847_113657C.1.pep
XKSXEXXQXFXLXXXXDXXXXHXLIXXXXXLKRMXXIMXXDXPXHQTXMIISRIXIXXNXXXXVXXXPRGXDXLXXGXXRXXXXXLG

SEQ ID NO: 157960 - protein, 138 aa, Glycine max
  unsure (1)..(138): unsure at all Xaa locations
  Clone ID: PAT_MRT3847_113658C.1.pep
MADSDPPSLGRVKLTDLVPWNGLASDSYKISVSILSHSLAQFSAVIVQFPASDGAILRSGLESARMYFHQRETYPPADIINPGESREWCKTSXGYYADSHLWQETYDYRPGLTPSEPNNSIEFPPPSRVARHICLIWK

SEQ ID NO: 157961 - protein, 111 aa, Glycine max
  unsure (1)..(111): unsure at all Xaa locations
  Clone ID: PAT_MRT3847_113659C.1.pep
GFMADSDPPSLGRVKLTDLVPWNGLASDSYKISDSILSHSLAQLSAVIVQFPASDGAILRSGLESARMYFHQRETYPPADIIDPGESREWCKTXSGYYADSHLWQETYDYR

SEQ ID NO: 157962 - protein, 37 aa, Glycine max
  Clone ID: PAT_MRT3847_11365C.1.pep
APETEKGRNKREKNLILRFSQEFSVTMGAREQTLRQY

SEQ ID NO: 157963 - protein, 327 aa, Glycine max
  Clone ID: PAT_MRT3847_113660C.1.pep
MGDRVETLARLAQWKIDNFGLCSYKKSDPFKVGIWNWYFSIVRNRYLYIHLFPEPSQVLKDNPPFARFILRVSNAGSSRSFHISPVQEKLLRTHDDFVWPVDTTFVGRFIIDVEFLDLKICPPNGGETSPVWPSDGNSQSIAFQSSILRCLSRMLDEAIHADLTIMTADGSTLRAHKAVLSASSPVFQSMFHHNLKEKESSTIHIEDMPLESCTALLSYLYGAIKQEDFWKHRLALLGAANKYDIGSLKDICEESLLEDLSAGNVLEMLNEAWLYQLHKLKKGCLVFLFQFGKIHDIKDEINNFFQHADRELMLEMFQEVLSISNPI

SEQ ID NO: 157964 - protein, 44 aa, Glycine max
  Clone ID: PAT_MRT3847_113661C.1.pep
HEVMVHQLRHSLMSLFRHYMMHGTTKASLVKKEYPGCLSRKSKC

SEQ ID NO: 157965 - protein, 301 aa, Glycine max
  unsure (1)..(301): unsure at all Xaa locations
  Clone ID: PAT_MRT3847_113662C.1.pep
MGDRVETLARLAQWKIDNFGPCSYKKSDPFKLGIWNWXLKDNPPFSRFVLRVSXLHISPVQEKLLRTHDDFVWPVDTTFVGRLIIDVEFLDLKICPPNGGETSSVWPSDGNSQSIAFQNNTLGCLSRMLDEAIHACLPIMTADGSTLRAHKAVLSASSPVFQSMYHLNLKEKXSSTIHIEDMSLESCTALLSYLYGTIKQEDFWKHRLALLGAANKXDIGSLKDICEESLLEDLSTRNVLEKLNEAWLYQLHKLKKGCLVFLFQFGKIHDIKDEINNFFQHADKELMLEMFQEVPSISNPV

SEQ ID NO: 157966 - protein, 91 aa, Glycine max
  Clone ID: PAT_MRT3847_113663C.1.pep
GASSIDCYGPQDVFMGFVINVAVTRFAGIWKSRPWIALRKIYGVWYNLDSDLTAPQPFFYTDKVREFLDSTLAHGGEVFIFMNEKQFLKLF

SEQ ID NO: 157967 - protein, 147 aa, Glycine max
  unsure (1)..(147): unsure at all Xaa locations
  Clone ID: PAT_MRT3847_113664C.1.pep
CFLLSTCCWISIISLHLLIYLVFIFAYFFEMYPVPLFSISSVHIFITTXXXXXXXXXXXXXXXXXXXXXXXXXXXXXXXXXXXXXXXXXXXXXXXXXXXXXXXXXXXXXXXXXXXXXXXXXXXXXXXXXXXXXXXXXXXXXXXXXXX

SEQ ID NO: 157968 - protein, 39 aa, Glycine max
  Clone ID: PAT_MRT3847_113665C.1.pep
PTPGGSPPPPPPPPPPPPPPPPPPPPKKAVLLHMIAAAK

SEQ ID NO: 157969 - protein, 106 aa, Glycine max
  unsure (1)..(106): unsure at all Xaa locations
  Clone ID: PAT_MRT3847_113666C.1.pep
FLIFFLHKGAHDTAEEWFAXGEEEEPFAEVLTNALSNGAGGPDYTDRIXLAASEGLPHVLTXKNGEKGKRRFDTIYAAERTLIPESIAEQSYIKHGLDHRIEPTTL

SEQ ID NO: 157970 - protein, 181 aa, Glycine max
  Clone ID: PAT_MRT3847_113667C.1.pep
MGGNNSKEDSNWRQNSPVRSSSSASSWGSYPDPNSGYGQGGYTYEQQQPSYPTQQQYYGQYHVLVIVADGQVTRSIDTEHGRLSPQEQSTVDAIVEASKFPLSIILVGVGDGPWDMMKEFDDNIPARVFDNFQFVNFTEIMSKNIPPSRKEAAFALAALMEIPSQYKATIELNLLGGRNAN

SEQ ID NO: 157971 - protein, 66 aa, Glycine max
  unsure (1)..(66): unsure at all Xaa locations
  Clone ID: PAT_MRT3847_113668C.1.pep
WADCMCLFDLDSGVPRPDSTALRVGRKXKRNREPGALVEKRRRFVKKNTRSLSKCLLLRADREGQD

SEQ ID NO: 157972 - protein, 119 aa, Glycine max
  unsure (1)..(119): unsure at all Xaa locations
  Clone ID: PAT_MRT3847_113669C.1.pep
YEVFDVWGIDFMGPFSCXFDYVYILLTVDYVSKWVEAKPTRANDAKVVADFVRSNLFCRFGVPKAIVSDQGTHFCNRTMHALLKKYGVVHRVSTPYHPQTNGQAEISNREIKRILEKIV

SEQ ID NO: 157973 - protein, 85 aa, Glycine max
  unsure (1)..(85): unsure at all Xaa locations
  Clone ID: PAT_MRT3847_11366C.1.pep
VXXNCVQXSAVLGGYGKXRTSRGXDFIEKSSSXDIXXDXREXVCCRDGLXGICGSLSSEAMSSXIAXQLIPVEXNRDXKFLKVYX

SEQ ID NO: 157974 - protein, 160 aa, Glycine max
  Clone ID: PAT_MRT3847_113670C.1.pep
MGGNNSKEDNNNWRQNSSVRSSSSASSWGSYPDPQSGYGHGGYAYEPQQPSYPTQQPYYAQPPPPPPNYGNEPQPHASGRVAGHRNEKRLDRKYSRITDNYNSIDEVTEALARAGLESSNLILGIDFTKSNEWTGKHSFNRKSLHHIGNKGYCIILGLSI

SEQ ID NO: 157975 - protein, 60 aa, Glycine max
  Clone ID: PAT_MRT3847_113671C.1.pep
TPVEKLAHLYWNQTCKHLLHLISLSYGSHCRPEHPVRRQRRALGGSPRASLLRGAYYLCT

SEQ ID NO: 157976 - protein, 428 aa, Glycine max
  Clone ID: PAT_MRT3847_113672C.1.pep
MGGQNSKEESWRQSSSVRSSSSSWSAYLDPLSSYGFNEPQPSYSSYGYEAYGGDGMVRYDSTKLERRYSRISDHYSSIDQVSEALALAGLESSNLIVGVDFTKSNEWTGKNSFNRRSLHHIGRGLNPYEQAISIIGKSLAAFDEDNLIPCFGFGDASTHDQDVFSFYPSERFCDGFEDVLSRYREIVPHLRLAGPTSFAPIIEMAMSIVEQSGGQYHVLVIIADGQVTKNVDTKHGRPSPQEQKTVDAIVAASKFPLSIILVGVGDGPWDMMKEFDDNIPARAFDNFQFVNFTEIMSKSIPPSRKEAAFALAALMEIPSQYKAAIELKLLGSRQANAPQRHALPPPRYSSHAARFEPSIPPQHGNSHPFATAPSAPSSTSDNQLCPICLSNAKDMAFGCGHQTCCECGQDLQSCPMCRSPINTRIKLY

SEQ ID NO: 157977 - protein, 35 aa, Glycine max
  Clone ID: PAT_MRT3847_113673C.1.pep
VYLRMIYAGMKPVLHIDVKLLSRGRIYLEGSCHDT

SEQ ID NO: 157978 - protein, 84 aa, Glycine max
  Clone ID: PAT_MRT3847_113674C.1.pep
GNLIPKTLKGFSPWVRTLIHIWPFSSTGNFQLGSRNFPPPRVNREEKIQIFFWETVEKHLLALVGTLPQLQLLLLSWQLQLAPF

SEQ ID NO: 157979 - protein, 946 aa, Glycine max
  unsure (1)..(946): unsure at all Xaa locations
  Clone ID: PAT_MRT3847_113675C.1.pep
MGRNVSALIGKSVPQIPEKCKDPGTFSIPCIIGNSKFDNAMLDLGASVSVMPLSIFNSLTLGPLQSTDVVIHLANRSVAYPVGFIEDVLVRVGELIFPVDFYILNMEDGFSQGPVPIILGRPFMKTARTKIDVYASTLSMEFGDITVHFNILDAMKYPSEDLSVFRAEIIDHVVDEYMTDLYSNLHASHSSCIESEIVLDHMSEFDAESESESDIDCMPGGGVLPLEIDFIESDRTNHVSGSTHTSDFLYEVKAEKPSPSTTVQPTTPELKPLPSNLKYAYLDDSKSFPVIISASLADEQEEKLLSVLKKHKKAIGWTLADISGISPSTCMHRINLEDGAKPVRQPQRRLNPVILDVVKKEITKLLQAGIIYPISDSQWVSPVQVVPKKTGLTVIKNEKEELIPTRVQNSWRVCIDYRRLNQVTKKDHFALPFIDQMLERLAGFYRRFIRDFSKVALPLSNLLQKEVEFDFNDRCKEAFDCLKRALTTTPIIQAPDWTAPFELMCDASNYALGAVLAQKIDKLPRVIYYASRTLDAAQANYTTTEKELLAIVFALEKFRSYLLGTRIIVYTNHAALNDQVIRRCIPDHETDSVLQFCHSSAPGGHLGVQKTARKVLDCRFYWPTIFKDAWKICSTCEQCQRAGNTLTWRQQMPQQPMLFCEVFDVWGIDFMGPFPISFGYVYILLAVDYVSKWVEAKPTRTNDAKVVADFVRSNLFCRFGVPKAIVSDQGTHFCNRTMHSLLKKYGVVHRVSTPYHPQTNGQAEISNREIKRILEKIVQPSRKDWSTRLDDALWAHRTAYKAPIGMSPYRVVFGKACHLPVEIXHKAYWAVKTCNFSMDQVGEERKLQLSELDEIRLEAYENAKFYKEKTKKFHDSMIVKKDFMVGQKVLLYNSRLGLMSVEIKSDSTNKSFKVNGHRLKPFLTNPSLVDVVVEETSLLHPTLPPP

SEQ ID NO: 157980 - protein, 88 aa, Glycine max
  Clone ID: PAT_MRT3847_113676C.1.pep
MEHRNTESEAGDVSSATAVLLGALAPGVNGPTWITLKSSFLMLGLCLTVMLALAFSSSDSWLIFHVAFLVLICLTLFLLLSWYFHSSL

SEQ ID NO: 157981 - protein, 84 aa, Glycine max
  Clone ID: PAT_MRT3847_113677C.1.pep
IKMPEEESGGEKRKRSGRIRRRNAAHLCRYILSIPFPSTTTNNILILMSKTVCTPLMLYNRSMNPKSKEISPSRTGSIGKYQAN

SEQ ID NO: 157982 - protein, 253 aa, Glycine max
  Clone ID: PAT_MRT3847_113678C.1.pep
CTRGRTRGRTRGRTRGRTRGRTRGWELASTEQLPDFMKMCLRVLYEITNDFAEKIYKKHGFNPIETLKRSWVRLLNAFLEEAHWLNSGHLPRSGEYLNNGIVSTGVHVVLVHSFFLMDYSINNEIVAIVDNVPQIIHSVAKILRLSDDLEGAKSEDQNGLDGSYIDCYMNEHQDVSAEDAQRHVAHLISCEWKRLNREILTQNQLPSSFTNFCLNAARMVPLMYHYRSNPGLSTLQEHVKLLSNNAVAGAEHM

SEQ ID NO: 157983 - protein, 99 aa, Glycine max
  Clone ID: PAT_MRT3847_113679C.1.pep
MGSATTLIAAFKTPDGKVANTTVGASGLSADTALLLSHQGAHAAIADIHDHLGLYAAKETESAYYVHCDVTNEDDIDNCPNTPDSKCRKSYIMFNNAGV

SEQ ID NO: 157984 - protein, 48 aa, Glycine max
  Clone ID: PAT_MRT3847_11367C.1.pep
KTRRDPRVRQDQEGPIAGSTNKISYWYQMHSLCAKDLNKVHDKHTRSS

SEQ ID NO: 157985 - protein, 41 aa, Glycine max
  Clone ID: PAT_MRT3847_113680C.1.pep
SRGRRHAVRHHLQALWTHCDNRVSVCLWVVFFKTQLTVDSG

SEQ ID NO: 157986 - protein, 111 aa, Glycine max
  Clone ID: PAT_MRT3847_113681C.1.pep
GNSRPHTEVQGCPYGETRRNRDRDRDRERDRGRDRDRDRDRVRTKSRDRDRVRDSDKEREREEAERDKLKDRGHRSRERAKDSGHSEKSKRHSSHDRVSYSSREKDRHRHH

SEQ ID NO: 157987 - protein, 134 aa, Glycine max
  Clone ID: PAT_MRT3847_113682C.1.pep
CINPTFICGHPEMMSPLAKKHRDTKGLCERFECFVATKEVCNAYTELNDPIDQRKRFEHQAKDKEMGDDEAQMVDEGFCHALDYGLPPTGGWGMGVDRLAMFLTDSSNIKEVLLFPAMKPDDTLHSKGSSLPSE

SEQ ID NO: 157988 - protein, 101 aa, Glycine max
  Clone ID: PAT_MRT3847_113683C.1.pep
MYEKGMDKSEDVATNERVNVEASHNDKLNLLLRGNDFSLFHLRCCRNDACMKPNWVFLAKEKPQPSGERPSTRNTFEVVLESADEQGLVIIFDSPPREAIN

SEQ ID NO: 157989 - protein, 34 aa, Glycine max
  Clone ID: PAT_MRT3847_113684C.1.pep
IPIQRTPSYQVISSLLKQTCDQSPIEQRNGSNSM

SEQ ID NO: 157990 - protein, 74 aa, Glycine max
  Clone ID: PAT_MRT3847_113685C.1.pep
MFCSLADMAANPFHALFYLVFMLSACALFSKTWIEVSGSSARDVAKQLKVRTGIHFAYHFPIDDIYFLSKAAEY

SEQ ID NO: 157991 - protein, 545 aa, Glycine max
  Clone ID: PAT_MRT3847_113686C.1.pep
MQTSQNHKISYGSGGFYAEPVQNLESYCMPSSENIDNYSSSDNSSQTTYPSVQTLEQYCTLESASTGNSFPNQNSPPALSFSSNNSPLSKLESNSYVLRPQHSLEIASGSPEDDSYLTHDLDDLTHKIRELETAMLGPNADMLDIYGTVIPEPDSFLLEAEKWKKMMEISSRGDLKEMLYMCAKAMAVNDMETTDWLVSELRKMVSISGNPIQRLGAYILESFVARIGASGSTIYKSLKCSEPTGNELLSYMNVLYEICPYFKFGYMSANGAIAEALREESEVHIVDFQIGQGTQWVSLIQALARRPVGPPKIRISGVDDSYSAYARRGGLDIVGKRLSALAQSCHVPFEFNAVRVPATEVQLEDLELLPYEAVAVNFAISLHHVPDESVNSHNHRDQLLRLAKRLSPKVVTLVEQEFNTNNAPFLQRFDETMKYYLAVFESIDTVLPREHKERINVEQHCLAREVVNLIACEGEERVERHELLNKWRMRFTKAGFTPYPLSSVINSSIKDLLQSYHGHYTLEERDGALFLGWMNQVLIASCAWR

SEQ ID NO: 157992 - protein, 112 aa, Glycine max
  Clone ID: PAT_MRT3847_113687C.1.pep
MATMSLTFAFALPSIPSLSQCHGRALYVKPLHCTPIQQRHVGAEAGIVCEPCNGTGWLVCDFCNGQKTNVKAENNKRIYRRCPSCKAVGYVLCSKCKVFKCVTFPNFNDSEN

SEQ ID NO: 157993 - protein, 191 aa, Glycine max
  unsure (1)..(191): unsure at all Xaa locations
  Clone ID: PAT_MRT3847_113688C.1.pep
RPPFSRGPGLGTIPHSFXQQTAWNQMATLXTPLNFXSNXQXFRQXSTDLFXXRIXXDKGGDRXTLTQKXPTXNPXKVAARNKGRQKAKTEKPGNAPXKKTDCPSLVQPXXTNSNSTKHXQARKXTKXKPPTRQPTXPKQXSGPNKGXEMGPPSAQIKPQNIKTSPTPNQQNPTPPRQPPQKPKAGKTPKNK

SEQ ID NO: 157994 - protein, 69 aa, Glycine max
  Clone ID: PAT_MRT3847_113689C.1.pep
DSCKLGIPRTVSSYFCSLVSTPQPGLLGSLAGAKAQDTTSITCKSVDPLYLIELPEHPFARIVTLSLHP

SEQ ID NO: 157995 - protein, 53 aa, Glycine max
  Clone ID: PAT_MRT3847_11368C.1.pep
FRVAPRVRDAKRPQKVAKIFLRISLPTCTLYDTTLTRFLLFRTLVFRDTPSLK

SEQ ID NO: 157996 - protein, 243 aa, Glycine max
  Clone ID: PAT_MRT3847_113690C.1.pep
TAARRRQKGSLLLMELMTHLFYYNAFANSDLWKHLSPMDVFIIGYGVLNFMWLKFLLIWRFFRFWSLINGIETPENMPKCINNCHNLEGFWKNWHASFNKWLVRYIYIPLGGSKKKLLNVWVVFTFVAIWHDLEWKLLSWAWLTCLFFIPELVLKSAAKAFQAQSSFGECIFRELNAVAGAVTITCLMVANLVGFVVGPSGINWLLSSFLNKEGLPVLGGMLMTFYVGTKIMFHIDEAKQRSP

SEQ ID NO: 157997 - protein, 56 aa, Glycine max
  unsure (1)..(56): unsure at all Xaa locations
  Clone ID: PAT_MRT3847_113691C.1.pep
GITHTAQXLXXTFXCSLNXVKCAFGHXXXWAASXEGFPXXAIWVSSPXXXXXQCRL

SEQ ID NO: 157998 - protein, 69 aa, Glycine max
  Clone ID: PAT_MRT3847_113692C.1.pep
LSAVAGAVTITCLMVANLVGFVVGPTGINWLLSSFLNNNGLPVLGGMLMTFYVGTKIMFHIDEAKQRSP

SEQ ID NO: 157999 - protein, 71 aa, Glycine max
  Clone ID: PAT_MRT3847_113693C.1.pep
STPKRHIGQRVLVSLFYILREVNGGNFSVNTLFVTVSFVENQQSLLRTQAPFLGFIVFPIFLYPPLCNVFL

SEQ ID NO: 158000 - protein, 52 aa, Glycine max
  Clone ID: PAT_MRT3847_113694C.1.pep
VKPFLQLLDQALIDDTFFTRASTRVTQCISKLCKALSSAAELVWNTSPMTEP

SEQ ID NO: 158001 - protein, 113 aa, Glycine max
  unsure (1)..(113): unsure at all Xaa locations
  Clone ID: PAT_MRT3847_113695C.1.pep
TFMRIEPXRAWCVCLPVFIGLQAAILLLQHYLGSRWFIPRQILPEKYSYYRRFDQDTRHATDCVICMTAIDLSQRSNDCMVTPCDHFFHSGCLQRWMDIKMECPTCRRPLPPA

SEQ ID NO: 158002 - protein, 140 aa, Glycine max
  unsure (1)..(140): unsure at all Xaa locations
  Clone ID: PAT_MRT3847_113696C.1.pep
HASDLLVARFEKKEVRATMWDRGNAKSPGPDGLNFKFIKEFWDILKTDLLRFLDEFYANGVFLKRSNAFFLALIPKVHDPXSLNEYKPISLIGCIYKIVAKLLSGRHKKVLPTIIDERQTVFMEGRHTLHNVVIANEIME

SEQ ID NO: 158003 - protein, 545 aa, Glycine max
  Clone ID: PAT_MRT3847_113697C.1.pep
MATSLSVSPSLSLNTLFIAKALPLSRPSFLSLPLPKSLLSLSTRRRTFIVRAESQNGADPVPAHYDFDLFTIGAGSGGVRAARFAANYGASVAICELPFSTISSETTGGVGGTCVIRGCVPKKLLVYASKFSHEFEESNGFGWRYDSEPKHDWSSFIANKNAELQRLTGIYKNILNNAGVKLIEGHGKIIDPHTVDVNGKLYSAKHILVAVGGRPFIPDIPGKEYAIDSDAALDLPTKPVKIAIVGGGYIALEFAGIFNGLKSEVHVFIRQKKVLRGFDEEIRDFVEEQMSVRGIEFHTEESPQAITKSADGSFSLKTNKGTVDGFSHIMFATGRRPNTQNLGLESVGVKLAKDGAIEVDEYSQTSVSSIWAVGDVTNRINLTPVALMEGGALVKTLFQDNPTKPDYRAVPSAVFSQPPIGQVGLTEEQAVQQYGDIDIFTANFRPLKATLSGLPDRVFMKLVVCAKTNEVLGLHMCGEDAPEIVQGFAVALKARLTKADFDATVGIHPSAAEEFVTMRTPTRKIRKSESSEGKSGSQAKAAAGV

SEQ ID NO: 158004 - protein, 58 aa, Glycine max
  Clone ID: PAT_MRT3847_113698C.1.pep
EARLSLIIMVHSSSATVRGMHCTMRKFVSCHGLVTRMRRHIILGQRLSPRTHRMPPPL

SEQ ID NO: 158005 - protein, 241 aa, Glycine max
  unsure (1)..(241): unsure at all Xaa locations
  Clone ID: PAT_MRT3847_113699C.1.pep
MATSLSVSPSLSLNTLFFAKALPLSRPSLLSLPLPKSLLSLSTRRRTFAVRAESQNGADAVPAHYDFDLFTIGAGSGGVRAARFAANYGASVAICELPFSTISSETTGGVGGTCVIRGCVPKKLLVYASKFSHEFEESNGFGWRYDSEPKHDWSSLIANKNAELQRLTGIYKNILNNAGVKLIEGHGKNIDPHTVXDVNGKLYSAKHXXXTVXGGRPFIPDIPGNEYAIDSDAALDLPTKP

SEQ ID NO: 158006 - protein, 34 aa, Glycine max
  Clone ID: PAT_MRT3847_11369C.1.pep
WIGIVLECYLTGRYFFNFVWKLAYVSSSQKCEPR

SEQ ID NO: 158007 - protein, 45 aa, Glycine max
  unsure (1)..(45): unsure at all Xaa locations
  Clone ID: PAT_MRT3847_1136C.1.pep
RFPFQLFTQPKTECLVLHNHPFCLFPRKLXYYTKLSDFFEMLAHS

SEQ ID NO: 158008 - protein, 104 aa, Glycine max
  Clone ID: PAT_MRT3847_113700C.1.pep
ANFRPLKATLSGLPDRVFMKLVVCAKTNEVLGLHMCGDDAPEIVQGFAVALKARLTKADFDATVGIHPSAAEEFVTMRTPTRKIRKSESSEGKSGSEAKTAAGV

SEQ ID NO: 158009 - protein, 100 aa, Glycine max
  Clone ID: PAT_MRT3847_113701C.1.pep
MFQLLQYFRKGDPWIENSVPLDSSVKKPSEFSPEELEEELFRLFLKTRFQPSYAMGMSENSWMALMDRLLTLNNCTNENEKGRVKENMLKWIDIYYEALD

SEQ ID NO: 158010 - protein, 121 aa, Glycine max
  Clone ID: PAT_MRT3847_113702C.1.pep
MAMAYVARSSESSQVLTFHSTAKWNAHFDALKQTNKLMVVDFTASWCGPCKLMDPVIQEFATKYRDVEFVKIDVDELMEVSQHYQVQGMPTFMLLKKGKVADKVVGVRKEELQRLIEQHRK

SEQ ID NO: 158011 - protein, 52 aa, Glycine max
  Clone ID: PAT_MRT3847_113703C.1.pep
SLLEAKAPRTILQSFRTYDDLREHGEEISISAHEYVQPDFSGSKLTSFLAGH

SEQ ID NO: 158012 - protein, 47 aa, Glycine max
  Clone ID: PAT_MRT3847_113704C.1.pep
PNFLRGDHLNDTFRGGGESNPSQILRTILFSPMNWAGGTVPKCLNLP

SEQ ID NO: 158013 - protein, 40 aa, Glycine max
  Clone ID: PAT_MRT3847_113705C.1.pep
KETGRVAGLVPIGLEVRGKPPSSSAMNGNRECLVLTTELD

SEQ ID NO: 158014 - protein, 28 aa, Glycine max
  Clone ID: PAT_MRT3847_113706C.1.pep
LYAYRLGHGLTCPCIQSYWDEAQLLSVT

SEQ ID NO: 158015 - protein, 194 aa, Glycine max
  unsure (1)..(194): unsure at all Xaa locations
  Clone ID: PAT_MRT3847_113707C.1.pep
AYGGGGFAISYPLAVALERMQDKCLQRYPALFGSDDRIQACMAELGVPLTKEIGFHQFDVYGNVFGLLAAHPITPLVSMHHLDVVEPIFPNVDRVEALKRLIGPMKLDSYGLMQQSICYDKARHWTISVSWGYAVQIFRGIFLARDMEIPARTFLNWYRRGDYTSFPFNTRPFSRNSCQKPFVFYLSNATFXGW

SEQ ID NO: 158016 - protein, 47 aa, Glycine max
  Clone ID: PAT_MRT3847_113708C.1.pep
KRVAHFNTTPSRFGWNEIITLPLLVVPFIQLRCALFYFIKGWFFCKK

SEQ ID NO: 158017 - protein, 457 aa, Glycine max
  unsure (1)..(457): unsure at all Xaa locations
  Clone ID: PAT_MRT3847_113709C.1.pep
GVDPRVREKQKKPITLMEDGKGSVFVRGLEEESVYSLNEIYTLLERGASKRRTAETLLNKRSSRSHSVFTITVYVKETVIGDEELIKCGKLNLVDLAGSENILRSGAREGRAREAGEINKSLLTLGRVINALVEHSPHVPYRDSKLTRILRDSLXGKTKTCIIATISPSAYCMEETLSTLDYASRAKSIKNKPEANQKVSKAVLLKDLYMEIDRMKEDIRAAREKNGVYISHERFAKEEAEKKARNEKIEQLENDLSLSEKQVDSFRELYLTEQEQKLELESELKDCKVNLEKTSNNLHDLQENYKLLVSTLKEKERTISKLLKSENALIVRAKEMCTDLQNASDDINLLSSKLDHKERLEAENQKTILKFGSLLNESLKDLHTTIXXSVSQQHKELRSMEDHVSSYLASKNDAAQTLESRINKMTGIYTSRVETLXELANTLHMKAASDMETDSSK

SEQ ID NO: 158018 - protein, 117 aa, Glycine max
  Clone ID: PAT_MRT3847_11370C.1.pep
PVHCQYGSSGNATHSIFDRYNDSYLRRIGTNVLSYVNMVCASLRHSIPKSIVYCQVREAKRGLLDQFFTELGKIEPKRLSSFLNEDPAIMERRSALSKRLELYRSAQAEIDAVAWSK

SEQ ID NO: 158019 - protein, 72 aa, Glycine max
  Clone ID: PAT_MRT3847_113710C.1.pep
LLSAEVLGLIFLSNKQVQGIYKTYFLKRTSRGLYNQRHPNHFVHSNSEIKEIKILKAKKREWGTRQGNRIRK

SEQ ID NO: 158020 - protein, 70 aa, Glycine max
  Clone ID: PAT_MRT3847_113711C.1.pep
PPVEKPPVFKPPVEKPPVFKPPVGEPPFFKPPVEKPPVFKPPYGKPPYPRGPPTDGPPFLRMSRGVLGFC

SEQ ID NO: 158021 - protein, 39 aa, Glycine max
  unsure (1)..(39): unsure at all Xaa locations
  Clone ID: PAT_MRT3847_113712C.1.pep
XRSXAIXLLGKXSXXFXTSTNWXXSWRRGNXVCKXRNTT

SEQ ID NO: 158022 - protein, 57 aa, Glycine max
  Clone ID: PAT_MRT3847_113713C.1.pep
TMIIILVITSRFFKFLQPQRNYEHQSYLFCLEFFIILINVTKREPQSHSILKTLIIG

SEQ ID NO: 158023 - protein, 255 aa, Glycine max
  Clone ID: PAT_MRT3847_113714C.1.pep
QVIGRREMKSIVLKFLRENNSLPSYARSTDICNDTIYRSCRSCLDSLLSLFKQAAEPDKPSEDRDPIAKCIALEADNLSWLLEILVDKQAADEFALMWANQQELALLHTKLPTMLRYHVSCLSGRLYVGIYGCEKTTEGGRGELLPSKDVRRLLLQTWLQPLMNDYNWLQHGCRSFDRKLVEEGIGRTILTLPLEDQQSILLSWLGSFLKTGDSCPNLQRAFEVWWRRTFIRPYVENQGNVAVSDSSSMLPKQRE

SEQ ID NO: 158024 - protein, 150 aa, Glycine max
  Clone ID: PAT_MRT3847_113715C.1.pep
MVGARKKTQTSQFSVTQTFSPNSSCGRNLRKNQLGGIIFGCKNATMKECLSKQLFGLPAHHFCYVKNIDPGLPLFLFNYTDRKLHGIFEAASSGRMFIDPYGWTTDGSERTQYPAHVQICVRLKCHPLPEDKFKEVIADNYYTHNRFYFE

SEQ ID NO: 158025 - protein, 41 aa, Glycine max
  Clone ID: PAT_MRT3847_113716C.1.pep
YIINSLFSLNFNIHIGLSLLYHFPFINQMYSHNPNTVFYIY

SEQ ID NO: 158026 - protein, 146 aa, Glycine max
  Clone ID: PAT_MRT3847_113717C.1.pep
RTGKTPETYGDHTALERLELSYNKLEGPVPSNGMLVTINPNDLIGNEGLCGGILPPCSPSLAVTSHRRSSHIRHVIIGFVTGVSVILALGAVYFGGRCLYKRWHLYNNFFHDWFQSNEDWPWRLVAFQKISITSSDILACIKESNV

SEQ ID NO: 158027 - protein, 79 aa, Glycine max
  Clone ID: PAT_MRT3847_113718C.1.pep
SPFYRPFICQRHKALASKFDQFSAALHHTILRPHRIFIRFVYPILSSASYMTTSKVSLKICDNVSYSEARLLNSNTKLL

SEQ ID NO: 158028 - protein, 231 aa, Glycine max
  Clone ID: PAT_MRT3847_113719C.1.pep
MAGACRAPICHLPPQKPKTRIQNSHSRRAQLPNRRLFLFSLPLSSFLLLPVPSFGDGNNAIIIDKLQSGPSSFAATMYDPVSAAEREASALVSERVSQAVELLEKGRELQTQGDFSGALDYFSKVIESYKDLAFSEYARVGRALALYEVGDREEAIAEMEDVSISLKGYPEIHAALAAALYADKHATLLAENQFAIATLLDPHFTDLSYVRDTKHWPPSLISSLQHFITLS

SEQ ID NO: 158029 - protein, 173 aa, Glycine max
  Clone ID: PAT_MRT3847_11371C.1.pep
GVRLREDDRRALLHISDAAATFKELLTRRKSTVAEFLSKNYEWFFAEYNTKLLESSNYITRRQAVKLLGDMLLDRSNSAVMTRYVSSRDNLRILMNLLRESSKSIQIEAFHVFKLFAANQKKPADIISIFVANRSKLLRLLGDLKTDKEDEQFEADKAQVIKEIAALEPRDLA

SEQ ID NO: 158030 - protein, 40 aa, Glycine max
  unsure (1)..(40): unsure at all Xaa locations
  Clone ID: PAT_MRT3847_113720C.1.pep
FKYFFXXKGSNVLGGSYLRSRALSILALAILTLNFPGPRR

SEQ ID NO: 158031 - protein, 123 aa, Glycine max
  Clone ID: PAT_MRT3847_113721C.1.pep
MVVKIRLARLGCRNHPFYRVVVTDSKTTRDGKQLEVLGFYNPVAGKDDEKRMSLKLERVKYWLSVGAKPSEPVEHLLFRAGLGQSHQFPVAALNGHFLNQDQPTNADHNGVSPEAIFSIGLQV

SEQ ID NO: 158032 - protein, 124 aa, Glycine max
  Clone ID: PAT_MRT3847_113722C.1.pep
MVVKIRLARLGCRNHPFYRVVVTDSKTTRDGKQLEVLGFYNPVAGKDDDKRMSLKLERIKYWLSVGAKPSEPVEHLLFRAGLGQSHQFPVAALNGHILNQDQPTIAADHNGISPEAIFSIALQV

SEQ ID NO: 158033 - protein, 42 aa, Glycine max
  Clone ID: PAT_MRT3847_113723C.1.pep
KLFSFCFCRPLGPQANKLGANNMLEVTKKLNELAYRVHNLRL

SEQ ID NO: 158034 - protein, 97 aa, Glycine max
  unsure (1)..(97): unsure at all Xaa locations
  Clone ID: PAT_MRT3847_113724C.1.pep
MWCAVRDSGGHYCPKKTDDLCGDVCGQESSQVSGMSRVRCILRGVDVKTCIFLFAVVPMCIFGIYLHGQKISYFLRPLWEKPPXPFHVIPHYYNDLA

SEQ ID NO: 158035 - protein, 99 aa, Glycine max
  Clone ID: PAT_MRT3847_113725C.1.pep
MSGKKETVLALPKFVAKGVPVKLPGGTQVPGPFKGFGPLFTLVLEEAGGFLRGPDGPPKTPGQARNFGLIVCRGTPVMLGSPPDGPNGIPPPFFQPDGF

SEQ ID NO: 158036 - protein, 52 aa, Glycine max
  Clone ID: PAT_MRT3847_113726C.1.pep
YTAHFWGNWYAPGTLPGLNSRSTNSLTGGPPFFFFFLFFDLKLNTLSLRKVH

SEQ ID NO: 158037 - protein, 57 aa, Glycine max
  Clone ID: PAT_MRT3847_113727C.1.pep
VLSLRFVTEIFFHAKICVDVAYVLQASYSITCLQKLQRSFVRLQNRYSRNFNQWHAY

SEQ ID NO: 158038 - protein, 81 aa, Glycine max
  Clone ID: PAT_MRT3847_113728C.1.pep
VLPNTWHLHFHTYSLMATGAVRASAVSATLALPSCQRWNSMHRFDVLSRLQYPCCSLVSSLSRSRCSACVPMFGFGMSLFS

SEQ ID NO: 158039 - protein, 230 aa, Glycine max
  Clone ID: PAT_MRT3847_113729C.1.pep
MRHLLIYTMPPYLYNFIILISSITPPPHPLLHSSRDSDDDIRKIEAVAFLSAVSAFTPFPYPQSPPLALASSLPLVATMSTPARKRLMRDFKRLQQDPPAGISGAPQDNNIMLWNAVIFGPDDTPWDGGTFKLTLQFTEDYPNKPPTVRFVSRMFHPNIYADGSICLDILQNQWSPIYDVAAILTSIQSLLCDPNPNSPANSEAARMFSENKREYNRRVREIVEQSWTAD

SEQ ID NO: 158040 - protein, 194 aa, Glycine max
  Clone ID: PAT_MRT3847_11372C.1.pep
MAAMAALQSSMVGLSLSSNSFLGQRLSPITLPSLLPGKSTEKQCPIVMRLKRWERKECKPNSLPILHKMHVKLGDTVQVISGRERGKVGEITKIFKHNSTVIVKDLNLKTKHVKSREEGEPGQIIKIEGPIHSSNVMLYSKDQKVASRVGHKVLDNGKKVRYLIKTGEIIDSAENWKKLKEATKQTEEATAAAA

SEQ ID NO: 158041 - protein, 67 aa, Glycine max
  Clone ID: PAT_MRT3847_113730C.1.pep
APGKPTASIPSKWPDPNQCFHNPSCPILLPSPKNYSIGGGFFSPAPPPPPPPPPPPPPPPPPPPKQE

SEQ ID NO: 158042 - protein, 152 aa, Glycine max
  Clone ID: PAT_MRT3847_113731C.1.pep
MSTPARKRLMRDFKRLQQDPPAGISGAPQDNNIMLWNAVIFGPDDTPWDGGTFKLTLQFTEDYPNKPPTVRFVSRMFHPNIYADGSICLDILQNQWSPIYDVAAILTSIQSLLCDPNPNSPANSEAARMFSENKREYNRRVREIVEQSWTAD

SEQ ID NO: 158043 - protein, 191 aa, Glycine max
  Clone ID: PAT_MRT3847_113732C.1.pep
MSTPARKRLMRDFKRLQQDPPAGISGAPQDNNIMLWNGVRSTPARKRLMRDSFRLQQDPPAGISGAPQDNNIMLWNAVIFGPDDTPWDGGTFKLTLQFTEDYPNKPPTVRFVSRMFHPNIYADGSICLDILQNQWSPIYDVAAILTSIQSLLCDPNPNSPANSEAARMFSENKREYNRRVREIVEQSWTAD

SEQ ID NO: 158044 - protein, 448 aa, Glycine max
  unsure (1)..(448): unsure at all Xaa locations
  Clone ID: PAT_MRT3847_113733C.1.pep
MVVNLSPSTPLHSSSIIRLANSKSPISEPWLRLKTHFPKPLLSPSFASPSVNFTCKKQFLHGNNRNVLDFRTWSIAGFDFGNFERPQSVLESAAVLTAIIVVHESGHFLAASLQGIHVSKFAVGFGPILAKFNAKNVEYSIMAFPLGGFVGFPDYDPXSDIPVDDENLLNSRPILXRGIVGSAGAVGSGAFAHVFWNYACYNSGVIPYGSFPGVVVPDVRAFSAASSEXRVSSGLQKKYFMILIFNAVAHQCLSRWYICTRGGKIIFNDRXRRGEQNFDIRVTPDENFDGTGKIGVQLAPNVKIAKVRPKNLVQAVEFTGQEFWGLASNVLDGLKQTFLNFSQSASKVSGPVAIIAVGAEVARSNIDGLFQFAAILNINLAVINLLPLPALDGGTLALILIEAARGGRKLPLEVEQTIMSSGIMLVIILGLFLIVRDTLNLDFIKDLL

SEQ ID NO: 158045 - protein, 167 aa, Glycine max
  unsure (1)..(167): unsure at all Xaa locations
  Clone ID: PAT_MRT3847_113734C.1.pep
TPSLTQKFWIGTGFARVGFFAFGVISKQIKTPXLMFQQKAKTKNLXKVEKVVLPNGLRVYEFKLGGGASPRPGKLVVIEILGKIXIVEKCFLTPFXGGKKPLALIMGSRPYNKGVFXGIKYVLXTIKAGGQKKVKVPPKIGFGKKGAYLSPGVQIPPPATLENLLKV

SEQ ID NO: 158046 - protein, 144 aa, Glycine max
  Clone ID: PAT_MRT3847_113735C.1.pep
MVVNLSPSPSPPLHSSSIIRLANSKSPISEPWLRLKTHFPKPLLSPTSVNFTCNKNQFLHGKNRNRLDFRTWSIAGFDYGNFEGPQSVLEAAAVLTAIIVVHESGHFLAASLQGIHVSKFAVGFGPVLAKFNAKNVEYSIRAFP

SEQ ID NO: 158047 - protein, 149 aa, Glycine max
  Clone ID: PAT_MRT3847_113736C.1.pep
MIFQQPSKTEKKEENKRKKTFPSELRKGKVSWMAKSSSLAITLICAATVLVAMSRWPTAVGGGEHHLGMGWVSSTCKGTIAECLGGEEYELDSEINRRILATNKYISYVALQRNTAPCSRRGASYYNCRPGAQANPYSRGCSAITRCRS

SEQ ID NO: 158048 - protein, 61 aa, Glycine max
  Clone ID: PAT_MRT3847_113737C.1.pep
SYLNMISKCTFNFLQLILYITIFPHNYNHSILLICIQYQPFIKLFHSLNIRWFISLPHIQY

SEQ ID NO: 158049 - protein, 81 aa, Glycine max
  Clone ID: PAT_MRT3847_113738C.1.pep
KKMIQKVCTQHRECLSCPVKIVLRDSIREFMYSHDRVRKVGVSGSHARHPVIPVCPNASRNAKTGAIRQFRNGTPVRAGVP

SEQ ID NO: 158050 - protein, 37 aa, Glycine max
  Clone ID: PAT_MRT3847_113739C.1.pep
FIPIAIATTYHTTTVVDAATAVAATTYQSLAYHNGYG

SEQ ID NO: 158051 - protein, 79 aa, Glycine max
  Clone ID: PAT_MRT3847_11373C.1.pep
GSRIKFGGMEWEALHRQASKLVGQSNKLRSTQVKPANSIMSLTTSRLFLSLCHGVLLSSFLFKKNQRKIVAGSIVLLVG

SEQ ID NO: 158052 - protein, 181 aa, Glycine max
  unsure (1)..(181): unsure at all Xaa locations
  Clone ID: PAT_MRT3847_113740C.1.pep
NHRAYWKFKLTDSYNNLYYIQGVDCWIWLEDSSLKFIVKSTYSALHFLHSGSEELDFFKSLWNIKIPPKETCFLWRLFHNRLPTKVNLNRRNIQVQEXLIMPFLXXVRRNTSHLFFSCKASHLIWKRWFNLFGLSSVLQQSPKDHFWRNAYALQDNIKFWWPVGCAALVWKIWQLRNAIAF

SEQ ID NO: 158053 - protein, 206 aa, Glycine max
  Clone ID: PAT_MRT3847_113741C.1.pep
MVHYKLSYFDIRGLGEMSRMVLHYAGEKFEDHRVTPDEWPNYKSKTPFGQMPVLEVDGKQLAQSFAIARYLARKYHLAGKDDWESAQLDSIADFQKDFNSEVAQYFRVIAGFAQGDKEQLYKDVFLPASERHFPKLEKLLKESGSGFFGKSGPSWVDFFIAEGVNTLSGFAPDFFKKYPDLLAFKERVHSLPQLKEYIKTRKQTPL

SEQ ID NO: 158054 - protein, 48 aa, Glycine max
  Clone ID: PAT_MRT3847_113742C.1.pep
LYESYYNANKSNLKLYVRRVFISDEFNELLPKYLNFLLVGIVVLCYCR

SEQ ID NO: 158055 - protein, 100 aa, Glycine max
  unsure (1)..(100): unsure at all Xaa locations
  Clone ID: PAT_MRT3847_113743C.1.pep
WHARTRVTMWVDTNNTTHNKPHDYANELGRGLLESYYLPRARTYSKRXTQSERHNDMDRLREWITQWITQSDRWEECQELYPGDAKRDALTISHALYEKY

SEQ ID NO: 158056 - protein, 83 aa, Glycine max
  Clone ID: PAT_MRT3847_113744C.1.pep
MCRLQMSQLLDKAKNLVSDNVNDKAKPEATVTEVDFKHVSKYHVEYLAKVTVRNPYSTSIHICEINHPFKSGSREISSWKIPD

SEQ ID NO: 158057 - protein, 143 aa, Glycine max
  Clone ID: PAT_MRT3847_113745C.1.pep
KLPSDKQKRFHFFNCFFFPKLVDLSTDNRSIACDGKAAFQRVSNWTRKVNLFEKDYIFIPINYSLHWSLIVICHPAEVMTCYRDEETKGSPKEACILHMDSRKGIHQDLHNVFQSYLCEEWKERHNNVRDDASSKFLDLPFVP

SEQ ID NO: 158058 - protein, 127 aa, Glycine max
  Clone ID: PAT_MRT3847_113746C.1.pep
ISGVEKTTEGGRTWDRLACGYNAGNDMENAVQAMKKAVSTNLAGRRPDPFTLVACVKYLKEKGDLDLALEILKLCIENSHISVTSYDGLVSYVRSETETPDTEPLDLIKGDYQMFENENTQLLGGEN

SEQ ID NO: 158059 - protein, 42 aa, Glycine max
  Clone ID: PAT_MRT3847_113747C.1.pep
EQEAIAQGRALECRTLLINITCTCSHIIPYFVQQQIYVADMR

SEQ ID NO: 158060 - protein, 56 aa, Glycine max
  Clone ID: PAT_MRT3847_113748C.1.pep
WDGDWFDERSSDREVQHGKHELLDQIFKVRILSQWAFASEACCPSYNKCEEYKLKM

SEQ ID NO: 158061 - protein, 56 aa, Glycine max
  Clone ID: PAT_MRT3847_113749C.1.pep
IFVNCLRHGQCTGLMFDAKQLKLLEQFWFMTLTLKDWLYINYFQSSGIKTKCMPHL

SEQ ID NO: 158062 - protein, 160 aa, Glycine max
  Clone ID: PAT_MRT3847_11374C.1.pep
METMRASDTGNSSFCSQSCGSWPSVIVPEMDKTDDGEDRQDKGCKNKRKLTHPSILPASFPSSLIEFPRYQLPVPQSGLNGFSPSELWAELFREDEPELYMHELVDWNDPIASQLEELLLSNLQAIFSGALKRVVELSCDARLGEMSLSRKALYIEEGDP

SEQ ID NO: 158063 - protein, 37 aa, Glycine max
  Clone ID: PAT_MRT3847_113750C.1.pep
SECDILSTISAREDGGDNGSQIFRVQSQRKVGFIFSS

SEQ ID NO: 158064 - protein, 201 aa, Glycine max
  unsure (1)..(201): unsure at all Xaa locations
  Clone ID: PAT_MRT3847_113751C.1.pep
VAEDNVGEEGDTGEEEVEDVHDELEGEEEHEHEHEHPDFADVEEEEHREVVKERRKRKEFEVFVGGLDKDATESDLRKVFGEVGVVTEVRLMMNPQTKKNKGFAFLRFETVEQAKRAVAELKNPVINGKQCGVTPSQDSDTLYLGNICKTWTKEALKEXVXXAXNGVTNVEDLTLVEDTNDEGKNRGFAXLEFPSRSEAMD

SEQ ID NO: 158065 - protein, 132 aa, Glycine max
  Clone ID: PAT_MRT3847_113752C.1.pep
AFDGSVYVLIGKANQPRIADRGRFKKAKRGGGPRLNTVERRKGTKDKKKTQEKHNTLRAQEHLLQVGLRGVLGLSIVVRFLISENHAVPTVVEGLVNIFANCLIGVGNVIEGLPLLRNMVLIAKPAWNKSAS

SEQ ID NO: 158066 - protein, 78 aa, Glycine max
  Clone ID: PAT_MRT3847_113753C.1.pep
LYVGVDFIDDGVGVDQLHHWHVGVVILGCLDRVPCFFFFFVVFVSFFFVFCTSLLFCLALFFLRSILINGVCTNVLSF

SEQ ID NO: 158067 - protein, 82 aa, Glycine max
  unsure (1)..(82): unsure at all Xaa locations
  Clone ID: PAT_MRT3847_113754C.1.pep
CXXXFXWFSQGXSAXDSFLKXSXNPPXHDFWTFGVFLSXXVSFGLSFNKREIXGMDPSWLSMALPYFXNFPHPLFNCSXMNV

SEQ ID NO: 158068 - protein, 131 aa, Glycine max
  Clone ID: PAT_MRT3847_113755C.1.pep
MSLSDSETPYGGGTEYKPFRHISRDRLLIEMLRSAKSPDSKAWKVLIMDKVTVKVMSHSCKMADITDQEISLVEDLFRRRQPLPSLDAVYFMQPSKENVVMFLSDMSWREPLYKTAYVFFSSPIPKEPVTT

SEQ ID NO: 158069 - protein, 68 aa, Glycine max
  Clone ID: PAT_MRT3847_113756C.1.pep
KIGGGLYPLRNGSNKKGDFAWSFLDLFKKRGGNKINFGLSYVYRDDPKPKKYPKLFSKWYKWFFKGSF

SEQ ID NO: 158070 - protein, 42 aa, Glycine max
  Clone ID: PAT_MRT3847_113757C.1.pep
IRVKHSHSPCGWVKPIFIINARYDTEALAHRLDSSHVGDRPI

SEQ ID NO: 158071 - protein, 150 aa, Glycine max
  unsure (1)..(150): unsure at all Xaa locations
  Clone ID: PAT_MRT3847_113758C.1.pep
NNEDQAEMVTNXTQLTPDDDETPKGAMTDLKNPQSKSAPPKNTGGGTTQRSDLLANLLTEGNLRARVDLQRTHRNKGMIKXVATAGIPENTGISLACAMNSPYRGRASSEINTIWSQDXEPRNPACTKATTMPFNPNPSSDAWSLESLNR

SEQ ID NO: 158072 - protein, 147 aa, Glycine max
  Clone ID: PAT_MRT3847_113759C.1.pep
MGTQRQNSMYSLTLDEVQNQLGDLGKPLTSMNLDELLKNVWTAEASQTIGMDNEGTSQASQAALQHQASLSLTGALSKMTVDEVWRDIQENKIIAEKKFEDRHPTLGEMTLEDFLVKAGVVADASSNRTNTGTIAGVDSNVAVPQFP

SEQ ID NO: 158073 - protein, 78 aa, Glycine max
  unsure (1)..(78): unsure at all Xaa locations
  Clone ID: PAT_MRT3847_11375C.1.pep
GAANRIVPRVSQSGFAFVLHHIIHHKKRPIWAGVTTPEKRVPPPFNKPGTSGYAFPXXRLCFPIRFRRRCXXXXRDRF

SEQ ID NO: 158074 - protein, 43 aa, Glycine max
  Clone ID: PAT_MRT3847_113760C.1.pep
VIFYYSRQLLNDPQTWEPERINAIRIQWARCFPKVKNEALSSV

SEQ ID NO: 158075 - protein, 323 aa, Glycine max
  Clone ID: PAT_MRT3847_113761C.1.pep
MGTQTMGTHGGGGDSNGKQSPLQPLVRQNSMYSLTLDEVQNQLGDLGKPLTSMNIDELLKNVWTAEASQTIGMDNEGTAQASQASLQRQASLSLTGALSKKTVDEVWRDIQQNKIVGEKKFQDRHPTLGEMTLEDFLVKAGVVAGASSNRTNTSTIAGVDSNVAVPQFPSQAQWIQYPQAQYQHPPQSLMGMYMPSQGMVQPLHLGAGASLDVLFADNQMAMPSSLMGTMSDTQTPGRKKSTSEDMIEKTVERRQKRMIKNRESAARSRARKQAYTNELENKVSRLEKENERLRKRKELEQMLSCAPPPEPKYQLRRIASAPF

SEQ ID NO: 158076 - protein, 213 aa, Glycine max
  Clone ID: PAT_MRT3847_113762C.1.pep
MDKGKIEEVIEKQVLTVAQAVEDKIDDEIAALERLDADDIEALRERRLQQMKKMAEKRSRWISLGHSEYSEIPSEKDFFPVVKASERVVCHFYRENWPCKVMDKHLNILAKQHIETRFVKLNAEKSPFLAEKLKIVVLPTLALIKNAKVDDYVVGYDELGGTDEFSTEELEERLAKAQVIFYEGESSFNHARSSAKTTRSVRQSSRADSSDSE

SEQ ID NO: 158077 - protein, 115 aa, Glycine max
  Clone ID: PAT_MRT3847_113763C.1.pep
MDKGKIQEVIENQVLTVAQAVEDKIDDEIAALERLDADDIEALRERRLQQMKKMAEKRSRWISLGHSEYSEIPSEKDFFSVVKASERVVCHFFRENWPCKVMDKHLNILAKQHIE

SEQ ID NO: 158078 - protein, 58 aa, Glycine max
  Clone ID: PAT_MRT3847_113764C.1.pep
SYRPSGNFRTEVRRNRYKVAGDADQGWRPREDTMVEIRKNRKEESLQKKKGEGIQPLE

SEQ ID NO: 158079 - protein, 56 aa, Glycine max
  Clone ID: PAT_MRT3847_113765C.1.pep
KLTEFYKKKNPTYFWKLYKNKAPYVNLPHFFPNNSTLKRGKRHPEIKKGDFPIWKV

SEQ ID NO: 158080 - protein, 86 aa, Glycine max
  Clone ID: PAT_MRT3847_113766C.1.pep
NFLLPAGEISVALPHLHHHSCSVTGLTYFGPVFNFMHAYSTSPAAESHSISQSAIQIGTPTLIPTIRLWFTGAWWFLHALAPKGYV

SEQ ID NO: 158081 - protein, 87 aa, Glycine max
  unsure (1)..(87): unsure at all Xaa locations
  Clone ID: PAT_MRT3847_113767C.1.pep
QXXAAXKSXSASCTERWRKATLSRXRHGXGIXXAXHDDTLQVSLCAXRNPGSGSGQGPCRGACADLXTEPXXXVRAHGSHVPLRRRR

SEQ ID NO: 158082 - protein, 110 aa, Glycine max
  Clone ID: PAT_MRT3847_113768C.1.pep
PRVRRRQGGIQQLLAAEQEAQQIVNAARNAKTARLKQAKEEAEKEIAEYRAKMEAEFQRKVDESSGDSGANVKRLEHETDAKIEHLKTEASIISHDVVHMLLKHVTTVKN

SEQ ID NO: 158083 - protein, 74 aa, Glycine max
  Clone ID: PAT_MRT3847_113769C.1.pep
CFFLFKVFCQLVSLIHHTLGWSRFPFYSSSKLGPSIFHSGCHGGFCQWPVFNISHRVLIRVAIGTPVKLPSVCV

SEQ ID NO: 158084 - protein, 544 aa, Glycine max
  unsure (1)..(544): unsure at all Xaa locations
  Clone ID: PAT_MRT3847_11376C.1.pep
SVGLKCLLLPLFEKVLRATVAGLIGRPVXPKPXPDAHFPLISQSEGVALRMQDVKGIEWTFEXRFWPYNKSRMYTLEGVTYVTSRAKEERGQIIKIEGSIHSSNAMLYSKCLKVASRVGHKVLDNGKKVRYLIKTGEIIDSSENWKKLKEATKKTEEAAAATTYNDGSKTYMXLHFNSNETHLELTYQEAQYLFRPSPVVKPQIITTEDQVFEEYEVTTVFVKRTIFSACSSGGKEQWAQCDDCSKWRKLPVDALLPPKWTCSENVWDSSRCSCSVPEELSSKELENLLKTNKDFKKRRIAESSKSIQEHEASGLDALASAAVLGENLVDTAESSAGATTKHPRHRPGCSCIVCIQPPSGKGRHKPTCTCNVCMTVKRRFKTLMLRKKKRQSEREADTAQKDQTLLKDEPDTNGAPRDDTSRLEKEVGLNKSQHQVGESSAGQIDLNSHPNREDMQVETTGLNMSSHLEPATNHTVGEFMNQNGLRNFNNEVQTGQNSSLHTPKSNGEGQRYFSDGRCFASIMWNQERKDEVHSQTNQSQNNLS

SEQ ID NO: 158085 - protein, 86 aa, Glycine max
  Clone ID: PAT_MRT3847_113770C.1.pep
MSRAFQDLLDKGYHPNVYTYNIIIYGHCKEGLLDEAYALQSKMEDSGCSPNAITFKIIICALLEKGETDKAEKLLCEMIARGLLKR

SEQ ID NO: 158086 - protein, 105 aa, Glycine max
  Clone ID: PAT_MRT3847_113771C.1.pep
SFFAVAVEPGQWSPEKRKCYNILDAVSRHTIQVFPKSWAAIMLTFDNAGMWNLRSEMAENRYLGQQLYVSVLSPNRSLRDEYNLPETQLVCGIVKDMPKPPPYSS

SEQ ID NO: 158087 - protein, 94 aa, Glycine max
  unsure (1)..(94): unsure at all Xaa locations
  Clone ID: PAT_MRT3847_113772C.1.pep
MAANRLRSSAISAFPSLLSFSKSKFAPTIPLSNFGVTNASSSRFSINAYWMXPGQPKPPYLDGXTPGHFILHLLPLGKTPENLXRSKESELIHC

SEQ ID NO: 158088 - protein, 59 aa, Glycine max
  Clone ID: PAT_MRT3847_113773C.1.pep
VPHHLILLAIRINVEQDLYPVSLTIQKQTEISRESQNTRYKQHSLSWNIISTPCGPERV

SEQ ID NO: 158089 - protein, 126 aa, Glycine max
  Clone ID: PAT_MRT3847_113774C.1.pep
RLFSNFSKMGQELWSIFQLERKRLFWLIGITVAIILAFQYLELPYGGVQPIVFSAENTPTSDSIRFQAADLPSESETFNNMTFFNKANSTDENAFEIGNETRTSEEKGTVSNTGLITAREGNQADL

SEQ ID NO: 158090 - protein, 64 aa, Glycine max
  Clone ID: PAT_MRT3847_113775C.1.pep
LGMSWVVKVYVLVIVIINKYRQHKIVLEELLSNTKFNQQILQWIMLLYSSQRSFNGFFQFQHIF

SEQ ID NO: 158091 - protein, 53 aa, Glycine max
  Clone ID: PAT_MRT3847_113776C.1.pep
LAFSHSGLKIFVHFKGKIWFSKVIFFPLVLGIFPLGTPQGGEHMWGVSPLEAP

SEQ ID NO: 158092 - protein, 139 aa, Glycine max
  Clone ID: PAT_MRT3847_113777C.1.pep
MVTSFMNKLEGASLVADRQDSLVWKLALTECYFVRDPYLFLIENTNPVYVLFYRSIWMLAIPHNVAIFEWKLSKDKLPTRKNLQCRNILLEEQHQLCPFCSGKEEDSSHLIFTCSFSYQIWQNCYKWIGVQIAQHRDPK

SEQ ID NO: 158093 - protein, 94 aa, Glycine max
  unsure (1)..(94): unsure at all Xaa locations
  Clone ID: PAT_MRT3847_113778C.1.pep
KKITRLGYKGIIIRGSSDMCVTLKESEDCTRFLTYKIVDECRRCKGNNQVVGDLQEFENNFTFLAIKEGGIIVVENKMRXGLDFYIRWLEGKQI

SEQ ID NO: 158094 - protein, 44 aa, Glycine max
  unsure (1)..(44): unsure at all Xaa locations
  Clone ID: PAT_MRT3847_113779C.1.pep
XVAKXCXFXXGXXPFRGSXSHXPQXXLLXSXVTISEIGXAKMSP

SEQ ID NO: 158095 - protein, 44 aa, Glycine max
  Clone ID: PAT_MRT3847_11377C.1.pep
SNIFSNINVLKSGFSLTQPKKLACEVRIVQALSSSTSNIYNDVP

SEQ ID NO: 158096 - protein, 56 aa, Glycine max
  Clone ID: PAT_MRT3847_113780C.1.pep
SLGTRRNSRSQSHRVDIQMNPSGIDQPRLDPQFQVQPSSSGSQFPSSFLNITTILM

SEQ ID NO: 158097 - protein, 110 aa, Glycine max
  Clone ID: PAT_MRT3847_113781C.1.pep
LMSCMLALPSALSGTITENFELASLPRCLHKIGLFMVRRVRAGFVYFVAHNKLVYSAPIVLGLNFLSCWLLGPKLSGAHQGDLVASHSVGGAWRITADDSNSYGWSAKSI

SEQ ID NO: 158098 - protein, 695 aa, Glycine max
  unsure (1)..(695): unsure at all Xaa locations
  Clone ID: PAT_MRT3847_113782C.1.pep
MWVFYLISLPLTTGMVLFTLRYFAGPDVPRYVLFTVGYTWFCSLSIIILVPADIWAEIAVVMWLRSVDCFLKPQALPEKQCLVGRVNTMSSNQENGAISFFWSWSYWSTFLLTWKGSLLGFAMACSNTFGLVTGAFLLGFGLSEIPKSIWRNADWTIRQKVLTHKIAQMAVRLDDAHQELSNAIVVAQATSNQMSRRDSLRSYMDVIDDMLTQMFREDPSFKPQGGRLGENDIDYDTDEKSMATLRRHLRGAREEYYRYKSEYMTYVLEALELEDTIKNYERRNSTGWEYNSSIRPARTGKFGSLCDTLEFLWKCILRKQVEKGLAVILGIMSVAILLAEATLLPSIDLSLFSILIKSVGTQEVLVQVFAFVPLMYMCICTYYSLFKIGMLMFYSLTPRQTSSVNLLMICSMVARYAPPVSYNFLNLIRLGKNKTTIFEQRMGNIDNAVPFFGDEFNKIYPLIMVIYTILVASNFFDKVFDFLGSWKRYIFKTEAEDMDGFDPSGLIILQKERSWLEQGCKVGEQVVPLARNFNNIDIESSNNFMERNGAEMKPTSNLITDEINGRLSKTSKEDTSRSREAITKKYAVVREQGRPASKLKSEEKNAAXGCEKTTEGNTNSCNSSGGSSSGLTSTWQSMKTGFQSFKVNIGAKKFLPLRQIQENTGSSHSSSESLDDIFQKLKRPTLNQSIYNDDD

SEQ ID NO: 158099 - protein, 84 aa, Glycine max
  Clone ID: PAT_MRT3847_113783C.1.pep
CPLSLCCVVCLFQRIQIRASNTTITIVHVRSSLTLTLFSLNFLSFDCFPEYTTSLQLQSLVFTLQRRLSVSAFWDPLSISLERK

SEQ ID NO: 158100 - protein, 68 aa, Glycine max
  Clone ID: PAT_MRT3847_113784C.1.pep
LVIESPRPKPLLSAFLADDGDFPSCGGTLCQFSFSLLTYRLTLTFLFALALQSPTGFPRLKQRHLPSS

SEQ ID NO: 158101 - protein, 65 aa, Glycine max
  Clone ID: PAT_MRT3847_113785C.1.pep
PAIKNDPRINWLANPVPKHRKLGGITSAGKNNRGLRGRGHLYPKARPSPRATWKKNPPLFFPRSR

SEQ ID NO: 158102 - protein, 91 aa, Glycine max
  Clone ID: PAT_MRT3847_113786C.1.pep
WNKNERELLSSHGFTQNQLALWKYPSMLKKAELKGHTSRVLYMAQSPNGCTVASAAGDETLRFWNVFGTPQASKPAPKTNVEPFANVNCIR

SEQ ID NO: 158103 - protein, 89 aa, Glycine max
  unsure (1)..(89): unsure at all Xaa locations
  Clone ID: PAT_MRT3847_113787C.1.pep
VDIRKDLYGNVVLSGGAXMFPGIADRMQKELTALAPSTMKIKIIAPPERKYSVWIGGSILASLSTFLQMWISKEEYDESGPSIVLRKCF

SEQ ID NO: 158104 - protein, 97 aa, Glycine max
  unsure (1)..(97): unsure at all Xaa locations
  Clone ID: PAT_MRT3847_113788C.1.pep
SLERFKRLFMKSKRSFRGRRPPIQMGGRNDNKTMGFIGGIIGSRGEILSRGVNRLTLKXSRLITNGMKQARIXPLLPFLNKGRXFEKSESTARTPSS

SEQ ID NO: 158105 - protein, 54 aa, Glycine max
  Clone ID: PAT_MRT3847_113789C.1.pep
RIHISPGFHARLSVLFESHSQSPFQMASAVVAQETPTTVPEDETTQAIKTQETT

SEQ ID NO: 158106 - protein, 79 aa, Glycine max
  unsure (1)..(79): unsure at all Xaa locations
  Clone ID: PAT_MRT3847_11378C.1.pep
MGTSTTMPSDRSVQTRGCSPTTNTRTDEYAMTXKQSVSCREYNSNEDGLDPKTGSSHNHHCLNPEYRQTVTDRKSKRTC

SEQ ID NO: 158107 - protein, 65 aa, Glycine max
  Clone ID: PAT_MRT3847_113790C.1.pep
IFYSDIIGKDNKARSKSCSSEKIASKIRNITLPNKLENQLQDPYQLELNRDYCYCIGLTKICKKK

SEQ ID NO: 158108 - protein, 50 aa, Glycine max
  Clone ID: PAT_MRT3847_113791C.1.pep
CELGMFNVGLCMYFTSRWTLLKNTHPVWIDTSERISSMIFHQLSMQTYPP

SEQ ID NO: 158109 - protein, 93 aa, Glycine max
  unsure (1)..(93): unsure at all Xaa locations
  Clone ID: PAT_MRT3847_113792C.1.pep
KHKQGQXQKXQQXKXTXTQXQEQRTKDGPTGEXXRKENGQPPQKKKXQGSRGKTXXGNRGNKPGARAGPGTTGGXXTKSTREAGTTAQPXRKT

SEQ ID NO: 158110 - protein, 103 aa, Glycine max
  unsure (1)..(103): unsure at all Xaa locations
  Clone ID: PAT_MRT3847_113793C.1.pep
LTGVRVLKNCVARLMEIHRGDSSKAKLVTNXKVLDHTMCCSGITYYALFERKLYSLEWERLYDYCDLLQLHKLSSAHLIFLSRDYCKFKPMLMYDIVVKNMYA

SEQ ID NO: 158111 - protein, 41 aa, Glycine max
  Clone ID: PAT_MRT3847_113794C.1.pep
VVRVYVKHQRFSKAFLSSGRMNMAFDGAFQSIGAPTHMAGH

SEQ ID NO: 158112 - protein, 64 aa, Glycine max
  Clone ID: PAT_MRT3847_113795C.1.pep
HHNNPYIYDIKSYYQQFPTALNFSLISSFILLPILLFFYIYYRNLHIHINYTTQIIITSTFLHH

SEQ ID NO: 158113 - protein, 75 aa, Glycine max
  unsure (1)..(75): unsure at all Xaa locations
  Clone ID: PAT_MRT3847_113796C.1.pep
SWSDSQSARPQQTHPHSVLAHPTHYIEDPLSTRMCLAVNIRXXPXLASDRPDRFCSTRPPQSHIELTIGSSIRLA

SEQ ID NO: 158114 - protein, 332 aa, Glycine max
  Clone ID: PAT_MRT3847_113797C.1.pep
MTSQIQEKKLEAYQVLVSSLYRSIFMPLQQITDNFSEKSRNLESDEDSKLFNVCDQTITTSQIEEKKLEAYQETDDIAGCDKTESSYTRLTIKNLVQKEWSCALCQISTTSENCLRAHLKGRKHKDKENELRVEFSSTQKRIKGMGSLRNLNQIASILNPVSRSIRWCEWTKPEFGWTKLNTDGSIHSNTVSFGGLLRDYRGEPICAFVSKAPQGDVFLAELWAIWRGLVLSLGLGIKAIWVESDSMSVVRTVNRKQLCPKAVGYLNQIWKLLKKFDKYQISHSWRETNRAADHLAKMDLLANDVVLSPVDFPPSLSRIIEDDAKGTKYRRR

SEQ ID NO: 158115 - protein, 256 aa, Glycine max
  Clone ID: PAT_MRT3847_113798C.1.pep
MEEAGVDGVLIVQPIFHKFDHSYVTSALKKYPTKFVGCCLANPTDDGSGLKQFEDLVLKDGYRAVRFNPELWPAGEKMTNKVGKAIFQRAGELNVPVGFLCMKGIGLYMSEIEQLCTEFPSTVVLIDHLGFIKPPLNEEEGLVFSQLLNLSRFPKVYVKFSSLFQVSREKFPYLDLAPLLSQVVASFGANRVMWGSDFPYAAAECGYKAAKEAVLLIANQISLPPSDLEWIMGRTVAQLFPNQWTDAKQGFHRERE

SEQ ID NO: 158116 - protein, 95 aa, Glycine max
  Clone ID: PAT_MRT3847_113799C.1.pep
KTFQKVIHPIITTSQTCLIMEFLSDALSKSRCILLVYVVLIKSHKSSLVIHSHTYTASRSLSFRCDSIWLLQTTNSRTKLRQMKICLNTLYMLDI

SEQ ID NO: 158117 - protein, 53 aa, Glycine max
  Clone ID: PAT_MRT3847_11379C.1.pep
PCITLDPASHFCLPFNVISSCTGYLITGTVTYPSSTDSLFAPYSRTRDCGPYF

SEQ ID NO: 158118 - protein, 142 aa, Glycine max
  Clone ID: PAT_MRT3847_1137C.1.pep
MSRRSDETAVTEEAPPKQSLPNLFSLFPKINFQLPFLPPKPKPKPQEPNPQAQQEGPKPSRVQFPKTQVAVVASSPLQAEPDADHSPAAKTTNPLILWQIYAIGAIAISSWVWARWNERKGRGGGSPNDERGEGRHSDDGNQ

SEQ ID NO: 158119 - protein, 392 aa, Glycine max
  Clone ID: PAT_MRT3847_113800C.1.pep
VNNTSSTTVLIPHRESVKIQEIQLFSDHLVAYERENGLPKIIVYHLPPIGEPLRSLESGQAVSFVDPVYSAESSDSEFSSSILRFSYSSLRTPSSVYDYDMKAGISVLKKIDSVLGGFDATRYVTERQWAPSSDGTLIPISIVYRKDLVKLDGSDPLLLYGYGSYEICIDPSFKSARLSLLDRGFIYAIAHIRGGGEMGRQWYENGKLLKKKNTFTDFIACAEYLIEKKFCSKEKLCIEGRSAGGLLIGAVLNMRPDLFKAAVAGVPFVDVVTTMLDPTIPLTTSEWEEWGDPRKEEFYFYMKSYSPVDNVKAQNYPHILVTAGLNDPRVLYSEPAKFVAKLRDMKTDDNILLFKCELGAGHFSKSGRFEKLQEDAFTYAYIMKTLNMTSRL

SEQ ID NO: 158120 - protein, 57 aa, Glycine max
  Clone ID: PAT_MRT3847_113801C.1.pep
GPIMRNLGSICQYSLTLTNANYWLSGGRLACWKWEVCPSFLVIYLSRLSLFVRKMVS

SEQ ID NO: 158121 - protein, 79 aa, Glycine max
  Clone ID: PAT_MRT3847_113802C.1.pep
KTLLKNENFSFNFFTNTLFSRPGGVFLIDKRSGPQSILAQNRHKFLSCIRWPYLPTQIYSLFPTYIILLTCTIPKTLAP

SEQ ID NO: 158122 - protein, 134 aa, Glycine max
  unsure (1)..(134): unsure at all Xaa locations
  Clone ID: PAT_MRT3847_113803C.1.pep
PNPFGFIVGAKILAEGPFFGGLINPAPPFGPPVFSGDSQNTGVYGGGPLIGGGLGALIXGNFFICFAQAPFSSDFFFYSSQAPWKKSFLKKKRGKTGFAFFFFLNPPLFFSPPLKLFFFFFKIIWKGGTNRLIW

SEQ ID NO: 158123 - protein, 89 aa, Glycine max
  Clone ID: PAT_MRT3847_113804C.1.pep
ASTNMLHSNSLVRAMSISFLAHIPNTDSRLLLTNNMMDCTCTCPFYPPTTLAKATTRKLTFVCSSQRVLPIEKLLQLSVVDVGPSNAST

SEQ ID NO: 158124 - protein, 241 aa, Glycine max
  Clone ID: PAT_MRT3847_113805C.1.pep
PTRPVSDLHISERNHEYSINKQPESVIPLHRPGLFAAAPSSDFSKSWSHSASSWEMANSSLSQKLISIQTPPCINASGALRGSSQSHQSNGILEECWPLNINSKPNPGFRSDAPIQNGFYPGSSSGPKEPSMNISSISYDYLNHKNDCKIIPDHFINNVSSKSCKGSDSNCNDMKSGKDIDLNVLLPNGLSNNLVPRSGAGIMDGQQNNEERHAVLPWLREKTTCKNGVQNTAGESSLFHA

SEQ ID NO: 158125 - protein, 197 aa, Glycine max
  unsure (1)..(197): unsure at all Xaa locations
  Clone ID: PAT_MRT3847_113806C.1.pep
SCIVVEVRRGRTAAAAAAVVDPTPDQAKETTRFRGVRKRPWGRFAAEIRDPWKKQRVXRPKPISPPSPAPQRRTTTRRFPLYQAHGLSTKFEPVVQVNRPTSSGMSSTVESFSGPRVPSSSSRAKPLVVVVNPIIPLNDDEDDCHSDCDSSSSVVDDGQDCVLISSFRQPLPFDLNLPPSDADDDNDDDLPATALCL

SEQ ID NO: 158126 - protein, 244 aa, Glycine max
  Clone ID: PAT_MRT3847_113807C.1.pep
PRVRIDVDHTRSDIVLDHHQEEKENEENKGSHMVFEVDRGLDRKDEEVEKSCDCSVCDGVEILCDEICNLDLGVEKGKETIEEESLNVPKPKDNDGDDVVAAADDEDQACEKSTAQVDCTREITVETPSIHLEFFIHGDDCRLIPIELVDSPALENRKQSKYKVGGEGINSNEDFILDFDKSADAEAEPVVENWHISGDIVAEFSAQGNENVSKSNGGESVQLRTRRQSSELLQVEEENLEQNC

SEQ ID NO: 158127 - protein, 215 aa, Glycine max
  Clone ID: PAT_MRT3847_113808C.1.pep
MRRGRTAAAAAAVVDPTPDQAKETTRFRGVRKRPWGRFAAEIRDPWKKQRVWLGTFDSAEDAARAYDKAARSFRGPKAKTNFPPFPGPAEADHHSQIPLYQAHGLSTKFEPVVQVNRPTSSGMSSTVESFSGPRVPSSSSRAKPLVVVVNPIIPLNDDEDDCHSDCDSSSSVVDDGQDCVLISSFRQPLPFDLNLPPSDADDDNDDDLPATALCL

SEQ ID NO: 158128 - protein, 155 aa, Glycine max
  Clone ID: PAT_MRT3847_113809C.1.pep
FVHFTWGEKRVEQGQQLAPDQKSEGNSSSQGPAAGNLMPGNIIRPVQALATQKSIPNTMNNQIAMVAQLQAMQAWAHERNIDLSHTANANLMAQLIPLMQSRIVQQPKANDTNLGAMSSPVPVSNQHVTCPAVASERSAHANSSSDVSAQSGSAK

SEQ ID NO: 158129 - protein, 134 aa, Glycine max
  Clone ID: PAT_MRT3847_11380C.1.pep
ATIHFKKDFSLVCSDIQKTCNLGKPYIPEHKHLVLVNLITSLNGLAGFILIRVILSTWNKTLVSGRAIIVSSYEIPLEAGNIFERKLVFVLGVHHLFEFVDGCEYSVYIYGRRSCLGYFLPDSLVSFVLFCLHL

SEQ ID NO: 158130 - protein, 122 aa, Glycine max
  unsure (1)..(122): unsure at all Xaa locations
  Clone ID: PAT_MRT3847_113810C.1.pep
YPNMVIPKFKVPDFGKYKGTTRSKNHLKMYCRKMGAYAKDEKLLIHFSXESLTRTTVAWYTNLGTFXVHSWKDLMVAFIKQCQYNSDMAPDRMQLQKVCKKGARIFQRIRPKMERLGNSSST

SEQ ID NO: 158131 - protein, 73 aa, Glycine max
  Clone ID: PAT_MRT3847_113811C.1.pep
KIWQFPCFMTAQLFLPPPLGYFLLPSLWQVLVLAGGNKGPTFGGPEPFNIGAWHQRIFYLDLFILRRWGSLWF

SEQ ID NO: 158132 - protein, 65 aa, Glycine max
  Clone ID: PAT_MRT3847_113812C.1.pep
VNVSASLLYSCRFCKSIYIIVNYLTYCFKFIHNLLCVNNNRHMTETSMRAGNADACVDSSSHKPS

SEQ ID NO: 158133 - protein, 77 aa, Glycine max
  Clone ID: PAT_MRT3847_113813C.1.pep
CSNHPPATQPHPLKRHPMLPSCPPPTPHHAPALPPKPPPPPPPNPPPPKPSTNSFSFIFLHSATPITNTNVTASTEI

SEQ ID NO: 158134 - protein, 64 aa, Glycine max
  unsure (1)..(64): unsure at all Xaa locations
  Clone ID: PAT_MRT3847_113814C.1.pep
GLTGKTITIEVESSDAIDNGKAKIQEKEGIPPDQQRLIFAGIQVEDGRTLGDYNIQKESTXTLV

SEQ ID NO: 158135 - protein, 52 aa, Glycine max
  unsure (1)..(52): unsure at all Xaa locations
  Clone ID: PAT_MRT3847_113815C.1.pep
KGKITFSVTNTKPDTGEVICVFHSLQPSDTDLGAKAPKDVXSHVFWYAHLES

SEQ ID NO: 158136 - protein, 44 aa, Glycine max
  Clone ID: PAT_MRT3847_113816C.1.pep
LCPHTLAKWFCQEDNHHFVETTPTILLHCNVPLQFWSSSLLLGC

SEQ ID NO: 158137 - protein, 116 aa, Glycine max
  Clone ID: PAT_MRT3847_113817C.1.pep
HEQGAPPSDIIPLPPLAVDHHPVVTPLTILDWKLDSSVTPPRRLVLVQWMGLPPEDTSWELWDDLQQSYNLEDEVVFGGAGVDSNMQNREPHNSINGNNSRPKMVTRKPTYLNDFE

SEQ ID NO: 158138 - protein, 95 aa, Glycine max
  Clone ID: PAT_MRT3847_113818C.1.pep
HYPRPYVVGLTKGSNIGSAKTSRKWARQGLDLNAGPGGSNMEGRDDNSPLPSRQLSVASSQALAEEQARIQLAGSVCKRKEPDGGWDGYNQSSWQ

SEQ ID NO: 158139 - protein, 128 aa, Glycine max
  Clone ID: PAT_MRT3847_113819C.1.pep
TENKGHPDKLCDQKHDADRRAGTEQDPNSKVACETCTKTNLVMVFGEITTKANVDYKNIVRDTCRNIGVDSNNMRLDADNCRVLVNIEQQSPDIAQREHGHLTKRPEEIGAGDQSHVVGYATDDTADV

SEQ ID NO: 158140 - protein, 62 aa, Glycine max
  Clone ID: PAT_MRT3847_11381C.1.pep
SISQRSMLIQHYFSLSPFLFTYSYYLHPNSLYYFQRNPCIHSKLSYYNMVIKKTMLVTKYKL

SEQ ID NO: 158141 - protein, 108 aa, Glycine max
  unsure (1)..(108): unsure at all Xaa locations
  Clone ID: PAT_MRT3847_113820C.1.pep
XXXQXXXTXXPXTXXTXSLXXPXXKKXXTKXSXLXXPIXHDXXXXDGVXXRWCSXFIXXXMXSILXLIXTXFXSXHXXXSHIXFXLQSSXSXPKXRAXFRAYVRVXXX

SEQ ID NO: 158142 - protein, 55 aa, Glycine max
  Clone ID: PAT_MRT3847_113821C.1.pep
YRCISTKTLVIPRSPSMTRKLSIVIQSASFPSPPYLASVFAETPRSDHNRSSESL

SEQ ID NO: 158143 - protein, 148 aa, Glycine max
  unsure (1)..(148): unsure at all Xaa locations
  Clone ID: PAT_MRT3847_113822C.1.pep
ALSPFXLIFTTLNLPLPFSSTRQRPHIFRSLISLFPALPTLYLAFNNVKLATSLPLVPALSHRYTHTPVALLNPKAYTSLHAPALSVPCIFLFRASFATYTTILNGIYLAGLVCLCCSLFVCLSDSLALLCPIASDTCSPPPPPPPPS

SEQ ID NO: 158144 - protein, 75 aa, Glycine max
  Clone ID: PAT_MRT3847_113823C.1.pep
KPIPSQFGRNFIRASPRLCLYESSVSCIIVPCISHYMPLLFHHFFIFSLLFHKDIYPTQLGYFFNEYLKKKKKKK

SEQ ID NO: 158145 - protein, 54 aa, Glycine max
  Clone ID: PAT_MRT3847_113824C.1.pep
DCHSDILILPARLEVVAHVVSEIYLYTCVLRQLKNRIITRIGEIIQALQQSVCL

SEQ ID NO: 158146 - protein, 86 aa, Glycine max
  Clone ID: PAT_MRT3847_113825C.1.pep
SIDPMGILQSYMKHYVLIKGHTYFIMSSTSYKSLPILHFPDPMETTSLGASALAPEQRHKTRFAFRVPEIVATSNLATSMAKFVNV

SEQ ID NO: 158147 - protein, 61 aa, Glycine max
  Clone ID: PAT_MRT3847_113826C.1.pep
YEAFALYTVFSEVRLHDCFCEYSICHRSLDSRLFDHSVSQLEYEDSLKFVSQWQRCRIICR

SEQ ID NO: 158148 - protein, 145 aa, Glycine max
  unsure (1)..(145): unsure at all Xaa locations
  Clone ID: PAT_MRT3847_113827C.1.pep
TLYLPFPVKSSKTLCASQQRRRFLFRHLSLSRLFITKALPLSHPSFLSFPLPKSLLSLSTCHRTFTARSESQIDVDLVPAHXDFNLLTIDAGSGRVRAACFAANYDASVAICELPFSIISFETTGGVGETQCMLVQCTLRRQQDK

SEQ ID NO: 158149 - protein, 55 aa, Glycine max
  Clone ID: PAT_MRT3847_113828C.1.pep
DTCKGTPALDILFYIGGRSRNQQGTGSICYWVTLDTIINLGIYLSMTKIVYENMV

SEQ ID NO: 158150 - protein, 100 aa, Glycine max
  unsure (1)..(100): unsure at all Xaa locations
  Clone ID: PAT_MRT3847_113829C.1.pep
AVRNSGRPPSFSPTLPDDLALGCVLSTLKRVSASRLTPGLSCSRLLGTIPEPMLQETVCNLSASHRTPLIFDSSKQSXSLFTMDLVGGGNLXDKTGHWIT

SEQ ID NO: 158151 - protein, 118 aa, Glycine max
  Clone ID: PAT_MRT3847_11382C.1.pep
PLAICHLTVAKLNRGTGLSCPGSRNGLVDRVNSAAFPATTTAASHFLSISFFLATPFSSVFLTESQNSLFFPLFTNKSTNFSRVSSNLPKYPTNSFNSPTSSIILPPSSSTRIKISPC

SEQ ID NO: 158152 - protein, 29 aa, Glycine max
  Clone ID: PAT_MRT3847_113830C.1.pep
SHLMKKGYCYLFIWLIFVWTPYPHLEYLT

SEQ ID NO: 158153 - protein, 78 aa, Glycine max
  unsure (1)..(78): unsure at all Xaa locations
  Clone ID: PAT_MRT3847_113831C.1.pep
EIENPWNXQSRHMMDSRNRFVLMQNCLFHFQCCHHPEVQCRAGTCYFAIDNSDKRAMRIIEGLTDELRITRKPPAPKK

SEQ ID NO: 158154 - protein, 56 aa, Glycine max
  unsure (1)..(56): unsure at all Xaa locations
  Clone ID: PAT_MRT3847_113832C.1.pep
MGNKTTLLLLLFVLCHGVATTTMALHGDEGGDKKSPKSLFLMSNFTRXFKTDSWEM

SEQ ID NO: 158155 - protein, 87 aa, Glycine max
  Clone ID: PAT_MRT3847_113833C.1.pep
KGRTHKQIDKIDYIQLKNYIDPFTNMHSLPFVQLMCTSATSLLSVACPYFFAMPHHNSLSSPLSHFFLPVIFTSISHISSFWLIPCF

SEQ ID NO: 158156 - protein, 43 aa, Glycine max
  Clone ID: PAT_MRT3847_113834C.1.pep
YIYIYIYIYIYIYIYIYIYIKIVIKLIIYLIIMNSPIFNDILV

SEQ ID NO: 158157 - protein, 40 aa, Glycine max
  Clone ID: PAT_MRT3847_113835C.1.pep
REKLFSSLNIVLMRLCLLIKSITKFTVNTYNMIKCKKSMR

SEQ ID NO: 158158 - protein, 71 aa, Glycine max
  Clone ID: PAT_MRT3847_113836C.1.pep
GMTKLLGNSGLLNSGVRKQARYIQRGLDWLSSSFTLKRHLISILITHFFIPLSSFTLFPLPHPRSLHYKNN

SEQ ID NO: 158159 - protein, 223 aa, Glycine max
  Clone ID: PAT_MRT3847_113837C.1.pep
MSSADPEHREEEEAPAVGDDEDTGAHVAPIVKLEEVAVTTGEEDEDAILDLKSKLYRFDKDGNQWKERGAGTVKFLKHKATGKVRLLMRQSKTLKICANHLILPTMSVQEHAGNEKSCVWHARDFADGELKDELFCIRFPSIENCKSFMETFQEVAESQKAEDEKESADAAGLIEKLSVEEKADAEKKDEEKSEDKTVEKESASGKESKAVEDKKAEEPASSA

SEQ ID NO: 158160 - protein, 218 aa, Glycine max
  Clone ID: PAT_MRT3847_113838C.1.pep
MSSADPEHREEEEAPAVGDDEDTGAHVAPIVKLEEVAVTTGEEDEDAILDLKSKLYRFDKDGNQWKERGAGTVKFLKHKASGKVRLLMRQSKTLKICANHLILPTMSVQEHAGNEKSCVWHARDFADGELKDELFCIRFPSIENCKSFMETFQEVAETQKAEDEKESSDAAGLIEKLSVEEKADAEKKDEEKSEDKTVEKESASGKESKAVEEPASSA

SEQ ID NO: 158161 - protein, 132 aa, Glycine max
  unsure (1)..(132): unsure at all Xaa locations
  Clone ID: PAT_MRT3847_113839C.1.pep
HRNSRNDLRCPAELDRPKRNRKQRANVPGAAPEATARPWXQXHXXTSNKRETQEADPXKHEKGPREKQPHSPQEARHKRRKAPRPTERQQKADVXTTAQKEEPHATQTMMNAPDSNTNTDLLLSIDLPGLQG

SEQ ID NO: 158162 - protein, 54 aa, Glycine max
  Clone ID: PAT_MRT3847_11383C.1.pep
SVCYFKKKKRKKKKKKKKKKKKKKKKKKKKKKKKKKNKKKKKKGPPPTMDPTPP

SEQ ID NO: 158163 - protein, 53 aa, Glycine max
  Clone ID: PAT_MRT3847_113840C.1.pep
DALSLIVIDCFWFSSWFSYIKGMLDKPEKLYIECIMFEKILILSVDKCSKENL

SEQ ID NO: 158164 - protein, 70 aa, Glycine max
  Clone ID: PAT_MRT3847_113841C.1.pep
KNSNTQHILNKRSKACARLHKWNTLTISLPPKSITLLLSSSMDKTVRLWDLETKSCLKFFAHNDYVTCVQ

SEQ ID NO: 158165 - protein, 110 aa, Glycine max
  Clone ID: PAT_MRT3847_113842C.1.pep
GGLGSKDNPFPPGGPGLTAVGERGEPKCQPGLKQSGILRVLGPDMSGDERLELTQNSKGVLVVEGGLFVRVLNKGVFQLAFGIKRKNKAGETNIYWDGIYLWLTYLTKLD

SEQ ID NO: 158166 - protein, 107 aa, Glycine max
  unsure (1)..(107): unsure at all Xaa locations
  Clone ID: PAT_MRT3847_113843C.1.pep
MSETASLHAPTRTPISSLDAMAHHHPHYRSPFGDTTFTKLFVGGLAWETPTEEMRKYFEQFGDILEAVIITDKNTGKSKGYGFVTFXDQESARRAXVADPKPIIDWL

SEQ ID NO: 158167 - protein, 124 aa, Glycine max
  Clone ID: PAT_MRT3847_113844C.1.pep
MSRGSATAAKGKKKGATFTIDCAKPVEDKIMDIASLEKFLQERIKVGGKAGALADTITVTREKTKIIVTSDSNFSKRYLKYLTKKYLKKHNVRDWLRVIASNKDRSIYELRYFNIAENEGEEED

SEQ ID NO: 158168 - protein, 129 aa, Glycine max
  Clone ID: PAT_MRT3847_113845C.1.pep
KDKRKGIGRQDSFSSESPMQDIPLLLPQEADGLDTSNGDHTNLSENFPLLSQKLEHETLVSDTQMKGFQDEVVPLNLGAQPVANALDDWWETPEETNDDITLEYGEVGPRTTCHCQVIRSVSQWSAGTS

SEQ ID NO: 158169 - protein, 28 aa, Glycine max
  Clone ID: PAT_MRT3847_113846C.1.pep
FSQAVLSVIHPDSERVSTLFRLAVDLLV

SEQ ID NO: 158170 - protein, 79 aa, Glycine max
  Clone ID: PAT_MRT3847_113847C.1.pep
KTSIGCPKILPKKGCKWILSFQNHMQEDRFFVFFDEKICWGVSGSDYKKKALRQRKFSSKGVNFAYALHRGRGKTVQGP

SEQ ID NO: 158171 - protein, 128 aa, Glycine max
  unsure (1)..(128): unsure at all Xaa locations
  Clone ID: PAT_MRT3847_113848C.1.pep
GRASTDGSIVLRSLXRNIRLCSNTWIIMTGTGFPGLRSPITSIXLLMIINRLLILLIPTLCYISTLFTDKDSMTNTXFSGTMXHYICYYYLNLTPFYSHFSFSNNKFSPLPFISXLTENCKQERHLVS

SEQ ID NO: 158172 - protein, 55 aa, Glycine max
  Clone ID: PAT_MRT3847_113849C.1.pep
GVVEYNCCVCMVRHKGAAFIPCGHTFCRMCSREIWVSRGNCPLCTNLILEILDIF

SEQ ID NO: 158173 - protein, 62 aa, Glycine max
  Clone ID: PAT_MRT3847_11384C.1.pep
GCLPRAHSLVLCPNVCSNGVNLRNLSNQEIASFSIHSFCPFCLMSQPPNFEAQWFLWKQGCW

SEQ ID NO: 158174 - protein, 95 aa, Glycine max
  Clone ID: PAT_MRT3847_113850C.1.pep
LSLNWHWNSTLLFLCRRTSSFRKMLENLQAPPSTTESAPVVKRYAPPNQRNRSANRRKSSGQLTPYFLPIFLFTCPLLTFFCSFFKWVFNNVKEI

SEQ ID NO: 158175 - protein, 107 aa, Glycine max
  Clone ID: PAT_MRT3847_113851C.1.pep
MFLFQKGSHLHRLLLSKKYYYHFPLPRNAVTIADSVEHPSDATIAKLVLESDPRTVSEALTKPTIQWTPDLVNKVMKRLWNHGPKALQFFKHLDRHHPSYTHSPSSF

SEQ ID NO: 158176 - protein, 200 aa, Glycine max
  unsure (1)..(200): unsure at all Xaa locations
  Clone ID: PAT_MRT3847_113852C.1.pep
PRPAGFSKDGQTREHALLSXTLGDKHIISCCNKPDAPTPTYSKGRDAEIVKDVSSYWKXVRYSPDTITLDHICAFXGDTMMVRSTNLAWYKGPTLFDALDQISDPKTPSDEPVRLTLKDVYKIGGIETVPVIRGETGVLIPGMEETFAPTGLYTDVKSVEMHHESLTEAHPADNVGFNVNNDAVNDXKRGYADSNSKDDP

SEQ ID NO: 158177 - protein, 150 aa, Glycine max
  Clone ID: PAT_MRT3847_113853C.1.pep
WPRRETYGALDLGGSSLQVTFEGNSNKEPQHLFNSETSLYVRIGSVNHHLTAYSLAGYGLNEAFDKSVAHVFKEFGYGMEDVVKGNLEVKHPCLQIGYKERYSCSHCSSAVKKGGESLMVEGNGNVVGKKEGGSRTVVTLVGAPNWLKCS

SEQ ID NO: 158178 - protein, 52 aa, Glycine max
  Clone ID: PAT_MRT3847_113854C.1.pep
WMHPLVSILLCYQMQLSLCSMDHMCMTPHVDTSNTQAVIHYCFPDLKAKWFW

SEQ ID NO: 158179 - protein, 71 aa, Glycine max
  Clone ID: PAT_MRT3847_113855C.1.pep
MFPGIFAKMNKEILALAPPRIKIKVVAPPEKKNRVGGGGFILAFFSPLPQMWVAKAKYYEFGPPIGPKKGF

SEQ ID NO: 158180 - protein, 39 aa, Glycine max
  unsure (1)..(39): unsure at all Xaa locations
  Clone ID: PAT_MRT3847_113856C.1.pep
PCRPLRRCXSAXLXXPXPXRPCXREQXRDXPKPRXTXFL

SEQ ID NO: 158181 - protein, 65 aa, Glycine max
  Clone ID: PAT_MRT3847_113857C.1.pep
PFASKVRHSWCSPQREAPIRSSCLNPSHQMRVRSPPVILPCLHPSYTLMSPHRDSVVEHSHYNPK

SEQ ID NO: 158182 - protein, 92 aa, Glycine max
  unsure (1)..(92): unsure at all Xaa locations
  Clone ID: PAT_MRT3847_113858C.1.pep
FPPRPTPTLIHITFYNIIYQWHKNLAAAGQSDWAHEDYHXPPPAPFYDPAELRKWSFFRAHINHFVLTLLXPYVTILTVICYNHQTVTIGKP

SEQ ID NO: 158183 - protein, 104 aa, Glycine max
  unsure (1)..(104): unsure at all Xaa locations
  Clone ID: PAT_MRT3847_113859C.1.pep
MRPALCISVDMMSTHRDHKXVSDSERDPHHRNCTDLVKAYELTLDTNLLXKRCGEANIVGDMEKLSIYRFIRNTYLRHPLAYVSPVICRXGFPLLVXGMGARIV

SEQ ID NO: 158184 - protein, 46 aa, Glycine max
  unsure (1)..(46): unsure at all Xaa locations
  Clone ID: PAT_MRT3847_11385C.1.pep
IYLVGFKASADGSLISNRAVFHEPYFNDPXNYGLQVVEFIGVFNIT

SEQ ID NO: 158185 - protein, 33 aa, Glycine max
  Clone ID: PAT_MRT3847_113860C.1.pep
MITCLICLMWHYVTWWMCFLKNKITIIINQKGN

SEQ ID NO: 158186 - protein, 263 aa, Glycine max
  Clone ID: PAT_MRT3847_113861C.1.pep
MEAHSAFSIERSNANDMGMSEAFPSSLPVLPSPLEETYPKLSDSRPAFMEKELKTKPFTHSSHLTSSGAVGHMFSSSPGYSTDLHHSSFSSHEKQPRNTHFISQSLSNITSFPLSYSSNTGPPTSATPSHYSKESSVSWHTDSLPSFLDFPENGSIDNNRVESSACPIMASEEYSKQNDWQEWAERLISDDDTLTTNWNDLLADNIQDLEPKVPFQVSKPLSQIPGHQSQGHQQLPASYGENCIGAALSSSANFAPAKSRMRW

SEQ ID NO: 158187 - protein, 70 aa, Glycine max
  Clone ID: PAT_MRT3847_113862C.1.pep
QNTESIGIGKGLALVCHCTHIDETDASFRATLHPFRLLEQRSAYHAVEQDNELTNKRAQTYHDDFTKDCV

SEQ ID NO: 158188 - protein, 94 aa, Glycine max
  unsure (1)..(94): unsure at all Xaa locations
  Clone ID: PAT_MRT3847_113863C.1.pep
LNGPGDRILLLVLGDLHIPHRCKNITAXFKKLLVPXKIQHILCTGNLCTKESYDYLKTLAGDVHIVRGDFDENLNYPEQKVVTVGQFKIGLIHG

SEQ ID NO: 158189 - protein, 210 aa, Glycine max
  Clone ID: PAT_MRT3847_113864C.1.pep
TRPPTRPYGCEKTTEGEYVPMVDKAVDAAWKSQTSLQRSQTSKGTPPLPDTTNTPEGIQARIVVALTVFFMTLFTLFRSVACHVTKKLPAVSSNDDQGTSEPTLDATKTNYEDYRPPSPTPAYVEANLLSSMMKRLGELEVKVDTLQSKPSEMPYEKEELLNAAVCRVDALEAELIATKKALYEALMRQEELLAYIDSQEKARLRKKFCW

SEQ ID NO: 158190 - protein, 66 aa, Glycine max
  Clone ID: PAT_MRT3847_113865C.1.pep
KLGILDFLCYQFHSILSHLVFINHIKGHNHRISFLSHRCYLSWFYFQHALVHLLDVHLSFCGVAHR

SEQ ID NO: 158191 - protein, 50 aa, Glycine max
  Clone ID: PAT_MRT3847_113866C.1.pep
GHKRKTPLEKQMGPRAQMKIQRNFFLESRFSPNTGLIFLTIVYKNIITKN

SEQ ID NO: 158192 - protein, 67 aa, Glycine max
  Clone ID: PAT_MRT3847_113867C.1.pep
CIFQNLNCYNYITCIQVFYHIFFVEHFLFFYGEKKKNPAKGLNRLKQNSIKGGRTRRRVSNFNSDER

SEQ ID NO: 158193 - protein, 100 aa, Glycine max
  Clone ID: PAT_MRT3847_113868C.1.pep
DNIMLMFIQLLFFAYRILFYTYLIVIYILFQPLCGFHYLTATYPLYSIADFQLFVILRDQVMITLVCAHMHMEGMFGTRFIDTRRKKYTKRPLPLSSMSF

SEQ ID NO: 158194 - protein, 88 aa, Glycine max
  unsure (1)..(88): unsure at all Xaa locations
  Clone ID: PAT_MRT3847_113869C.1.pep
MNIENCMLQVKFTKTGVCHGFVLWINWVMDLQNSVVISTGPDCIXRYWKQGVKLLGTPRTVGPQRSINVQACSACMVLGTFRPPARAA

SEQ ID NO: 158195 - protein, 52 aa, Glycine max
  Clone ID: PAT_MRT3847_11386C.1.pep
NRPSIEPCMLGPPVTDSWLAKFFAGDPVALTQALHKFLYDTVLPVEEIYFFP

SEQ ID NO: 158196 - protein, 68 aa, Glycine max
  unsure (1)..(68): unsure at all Xaa locations
  Clone ID: PAT_MRT3847_113870C.1.pep
SFKKYVNLISHXLCDIQILPLNAMFKLEEGLYKFRYFKSYKTKFNTLKIQRSKPFNKLNLEWKLSINI

SEQ ID NO: 158197 - protein, 145 aa, Glycine max
  Clone ID: PAT_MRT3847_113871C.1.pep
LVFLLSTFYLFYSCAQFYADHSFFFFCLCYLTATKDGSINNEEETKEGLTRMNQSDNRTRSHSSSPSTQNRHRKLRKPATTTCARKLQKSISCRTLGELELDEVKGFMDLGFTFKKEYLSPRMMSVVPGLQRLGVVDARETGEGN

SEQ ID NO: 158198 - protein, 100 aa, Glycine max
  unsure (1)..(100): unsure at all Xaa locations
  Clone ID: PAT_MRT3847_113872C.1.pep
RVPRRLGASAHGAPTHILGQKPSPGFACPTPHFSHSXFSVPLSPSSYLLFLVQVLPKRCRVILDVSPFSSGGPPLICDRSTCQRNVSFLPGLPSPRAPPS

SEQ ID NO: 158199 - protein, 46 aa, Glycine max
  Clone ID: PAT_MRT3847_113873C.1.pep
ALTSEIGRFFGPRGIILNYPRTDAPYGNMAKANYTRFDNNKRPSRY

SEQ ID NO: 158200 - protein, 50 aa, Glycine max
  Clone ID: PAT_MRT3847_113874C.1.pep
LGTLFEFLNSGKYERGKSGSLRIVPNLIVFLKAVETIGASFILPFMKRRW

SEQ ID NO: 158201 - protein, 159 aa, Glycine max
  unsure (1)..(159): unsure at all Xaa locations
  Clone ID: PAT_MRT3847_113875C.1.pep
YRLIPMXKSEDKDXGLQALEQIMSXVMDSGKIVEXVDGHCEAMNXVIASNEGFCMWEGKFFRFNDLVLXELEQILQIKMYNLDEDSLLYGLMVHLDCXIRALLVLIERDQPLKLGIEANVGVVETMLVNDRENLELRMSFGCMDSEELISIRLVDLVAG

SEQ ID NO: 158202 - protein, 60 aa, Glycine max
  Clone ID: PAT_MRT3847_113876C.1.pep
FGWNRKGKAAPLRLVYIRDATTVECFVSGELNIQLQQTLLYLGFFHGQRDPQSYPLSLQL

SEQ ID NO: 158203 - protein, 88 aa, Glycine max
  unsure (1)..(88): unsure at all Xaa locations
  Clone ID: PAT_MRT3847_113877C.1.pep
WRKAEACNDVSVNLAPGLSYLMHGGYDSQSSCSREKNILASANTTFDKQTECKCLHEAANNYGIKDXYAHALPDRCNVSVPYKIRRST

SEQ ID NO: 158204 - protein, 114 aa, Glycine max
  unsure (1)..(114): unsure at all Xaa locations
  Clone ID: PAT_MRT3847_113878C.1.pep
XIMSGGAGLWSPTLGGHGGRIITEPTTRAFLKLLVVGRTPEGKKGFGSPKAFKRFWVRPTSNWEGSKPWQGREGLKGQNLRGNSLSLSNIGLSGHLLRKIGTISEVENLELSYT

SEQ ID NO: 158205 - protein, 540 aa, Glycine max
  Clone ID: PAT_MRT3847_113879C.1.pep
MDENGSSSNAPKNKRNLPVSVFFKDARHVFKMDSIAKEILGIAFPSALAVAADPIASLIDTAFIGHLGPVELAAAGVSIALFNQASRITIFPLVSITTSFVAEENTIEKINTEKKLSDKAKSKEQVMLDDHSLQDIEKVASKENNETENVEMNDCNTSICKSTSDTSSSSSNKSVPKDGRKKRHVASASTALLFGTILGLLQATTLIFAAKPLLAAMGLKPDSPMLNPAIKYLRLRSLGAPAVLLSLAMQGIFRGFKDTTTPLYVILSGYALNVILDPVLIFYCKLGIKGAAISHVLSQYLMALALMVILTRKVDLVPPSIKDLQIFRFLKNGGLLLARVIAVTFCQTLAASLAARFGPIPMAAFQTCLQVWLTSSLLADGLAVAVQAILACSFAEKDYEKVLVAATRTLQMSFVLGVGLSFAVGVGLYFGAGIFSKSVLVVHLIRIGLPFVAATQPINSLAFVFDGVNYGASDFAYSAYSLVTVSLASVASLFLLSKSKGFVGIWIALTIYMSLRMFAGVWRMGTGTGPWRFLRGRSMS

SEQ ID NO: 158206 - protein, 155 aa, Glycine max
  Clone ID: PAT_MRT3847_11387C.1.pep
MIIPKADRRTIYENLFKEGVLVAKKDFNAPKHQDLDVKNLFVIKACQSLTSKGFLTTHFSWQYYYYVLTPEGIDYLREYLHLPAEIVPATFKKQVRAPRPGQGARAEGGAYRAPRQGGDEGYRRRQGAGEGAKETGDDFKPRFAGVGRGGPRTEA

SEQ ID NO: 158207 - protein, 38 aa, Glycine max
  Clone ID: PAT_MRT3847_113880C.1.pep
KSSQANKGPFDKGGFSLLGPRNLLNGVPSEGFQCHPLF

SEQ ID NO: 158208 - protein, 341 aa, Glycine max
  unsure (1)..(341): unsure at all Xaa locations
  Clone ID: PAT_MRT3847_113881C.1.pep
MDENGSSSNAPKNKRNLPVSVFFKDARHVFKMDSIAKEILGIAFPSALAVAADPIASLIDTAFIGHLGPVELAAAGVSIALFNQASRITIFPLVSITTSFVAEESTIEKINTEKKLTDKTKSKEVMHDDHSLQDIEKGASKEKNETPTESSAVRGNTTCVPENVEMDDCNTSICKSTTETSSSSNKSVSKAGRKKRHIASASTALLFGTILGLLQATTLIFAAKPLLAAMGLKPDSPMLNPAIKYLRLRSLGAPAVLLSLAMQGIFRGFKDTTTPLYVILSGYALNVILDPVLIFYCKLXIKGAAISHVLSQYLMALALMVILTRKVDLVPPSIKDLQIFR

SEQ ID NO: 158209 - protein, 41 aa, Glycine max
  Clone ID: PAT_MRT3847_113882C.1.pep
LSLLIYVFARGSIWVPLLHRSFQLYKNCGVSRSSRLIPGRC

SEQ ID NO: 158210 - protein, 94 aa, Glycine max
  unsure (1)..(94): unsure at all Xaa locations
  Clone ID: PAT_MRT3847_113883C.1.pep
RIGLPFVAATQPINSLAFVFDGVNXASDFAYSAYSLVTVSLASVASLFLLSKSKGFVGIWIALTIYMSLRMFAGVWRMGTGTGPWRFLRGRSMS

SEQ ID NO: 158211 - protein, 81 aa, Glycine max
  unsure (1)..(81): unsure at all Xaa locations
  Clone ID: PAT_MRT3847_113884C.1.pep
RCVQTLPVSIGGGAGAKNAFCMSMPNAVLSMRRYYVGHFNSEGHKMTCCYIXSTIFFFICWDLTTDHTITCLAHCHYLART

SEQ ID NO: 158212 - protein, 391 aa, Glycine max
  Clone ID: PAT_MRT3847_113885C.1.pep
MKLGFVPNTLPSSFSLTSLIFKLPISFPFSHPKTTSSGRKSLVFRVQNIDHRIEPIPSHLMASENEFSELNRNLYPQIEPYSTGFLKVSDLHTIYWEQSGNPSGHPVVFIHGGPGGGTSPSNRKFFDPDFYRIVLFDQRSAGKSTPHACLEQNTTWDLIDDIEKLREHLEIPEWQVFGGSWGSTLALAYSQSHPDKVTGMILRGIFLLRKKEIDWFYEGGAAAIFPDAWEPFRDLIPESERGCFVDAYNKRLNSDDIKTQYAAARAWTKWEMMTAHLLPNEENIKKGDDDYFSLAFARIENHYFVNKGFFPSDSFLLDRIDKIRHINTTIVQGRYDVCCPMMSAWDLHKAWPEADFRVVPDAGHSANEPGITAELVAANEKLKNIIKNKGD

SEQ ID NO: 158213 - protein, 78 aa, Glycine max
  unsure (1)..(78): unsure at all Xaa locations
  Clone ID: PAT_MRT3847_113886C.1.pep
MRXIISIHIGQAGIQXGXSXWXLYCLEXXIQPDGMXPSXSSFGVAXDXFNTFFIXXGXGXHVXRAXIVDLEXXVXDXV

SEQ ID NO: 158214 - protein, 67 aa, Glycine max
  Clone ID: PAT_MRT3847_113887C.1.pep
NKKFKKKKKKKKKKKKKKKKIKKKKKKKKKKKKWGGLFKVPFLSNPGGRLFTFFFGALNLIFRTLFS

SEQ ID NO: 158215 - protein, 64 aa, Glycine max
  Clone ID: PAT_MRT3847_113888C.1.pep
LCKGGFQKSQKRKRVKKLVFGEKAYQNSNGGMSKVFVIQKKLEEQKIYYLTGEDPVGAPRLEHS

SEQ ID NO: 158216 - protein, 137 aa, Glycine max
  Clone ID: PAT_MRT3847_113889C.1.pep
RPGHSTTQACRLAAYSATPDTLMQGPLPSLPPPLLLPNPQCSTRIAYYTLRVAMLLMPNGLIGRYAIRYRQRIAFMPLLRRTSYIAYLRPLRLVIVRVRRSLLGASMPPHRYPAITEAGSLFKVPGPPYHVLLARAG

SEQ ID NO: 158217 - protein, 203 aa, Glycine max
  Clone ID: PAT_MRT3847_11388C.1.pep
MNLHCASLAATISSVCSINEATHKSRTLQKRVNSDAPIKLSTEFLSHDSLEPTTKPCFCGRRHFIEAATLGTTLFPIQPSRATNPPREYTALLKKFHPPRPDWYEEFYASVMNSATKDYEAEVAMYKSQIFGNLKGKGLRILEIGIGTGPNLSYYASGSGVEVVGIDPNPKMEKYARSSAASAGLPTSNFEFIQAVCMLFSLV

SEQ ID NO: 158218 - protein, 150 aa, Glycine max
  Clone ID: PAT_MRT3847_113890C.1.pep
NMGKEMQQLVCAFVLITLSFMMFSAEARNLHAFQQQAMEEPSAAGLQLQSLLFESTIGFGMLPRGAIPPSGPSTPTHSYCCCYYYSWSLNHASNCNYQLQSYLRSVSKFMYFYFKTLVVLELGFPISGKIGSDHEILFCRIGGLFQKMYF

SEQ ID NO: 158219 - protein, 46 aa, Glycine max
  Clone ID: PAT_MRT3847_113891C.1.pep
LFKDNIFPSKLFSAEVVLILKRIKFKCYSSIKLGFSWVMLSCNSNH

SEQ ID NO: 158220 - protein, 62 aa, Glycine max
  Clone ID: PAT_MRT3847_113892C.1.pep
LQILPSLQGPTNLIALGTNTQNNIMSSQGHRLPHPWNTRSKKTIPRDKTRSYPFANKRRFKD

SEQ ID NO: 158221 - protein, 96 aa, Glycine max
  Clone ID: PAT_MRT3847_113893C.1.pep
TIQVHGQLASETTKQIVKQVPRGGEIKKTSNLTTDGAQQNGGHRGGALFIGNKLASTTPSSETKKAKKGAHLALASWVRMSLAAETMLVRAGLTSV

SEQ ID NO: 158222 - protein, 220 aa, Glycine max
  unsure (1)..(220): unsure at all Xaa locations
  Clone ID: PAT_MRT3847_113894C.1.pep
MWKLKIAEGGKGLISVNDFIGRQHWIFDPNAGTPQERAEVERLRHQFTKNRFSIKQSADLLMRMQLTKENQCGPIPPAVKVRDTENITMEDMITTIRRGISFYSSIQAHDGHWPAESAGPLFFLQPLVMALYITGSLDVVLGPEHKKEIVRYLYNHQNEDGGWGFHIEGHSSMFGSALSYIALRILGEGSQDGEERAMDRARKWILDHGGXLVAIPSWGK

SEQ ID NO: 158223 - protein, 108 aa, Glycine max
  unsure (1)..(108): unsure at all Xaa locations
  Clone ID: PAT_MRT3847_113895C.1.pep
MQGLATELTQTVRCLTQLPYYAVHYGATTLSSGAPKVMGWVPSHTATRGXMYNSSEGKARNGTVXDRDPVTLAQYHAWIRWVEHVHYGETCAESLDSFTCRCCESSKH

SEQ ID NO: 158224 - protein, 257 aa, Glycine max
  Clone ID: PAT_MRT3847_113896C.1.pep
PRRNSHLIARPMEEGLVEAIERGKIGPKNNNKMVCEEFGWDKDLAKRIWCFGPDTIGPNMMVDACKGVQYLNEMKEAVLAGFQIASREGPLAEENLRGVCFDLCDVVLHADTIHRGGGQIIPTARRAFYAAILSAKPRLLEPVYVMEIQAHEKALGGINSVVNKKRGHVFEEIQRPGTPFYNVKAYIPVIESFKFSETLRTQIGEQAFPQMVFDHWDMVQSDPLEPGTPASACVADIRKKKGLNEQVMPLCVFEDML

SEQ ID NO: 158225 - protein, 77 aa, Glycine max
  Clone ID: PAT_MRT3847_113897C.1.pep
TRSCKRLHYVVFSFVALINYAPLFQKKKKKKKKKKKKKKKKKKKKKKKKKKKKTWGGGPAPISPFRDFYNPPSWAVF

SEQ ID NO: 158226 - protein, 306 aa, Glycine max
  Clone ID: PAT_MRT3847_113898C.1.pep
LKIAMKDQALLEKHAVIERLQTLVHEEHSHFLEIESTLQTLQKLYSKSQQEQGSLVMELKYGLQLLKDLQFPKQGFKEEMHENVEENRILNELTFSSTRSPGRRRQTEISKLKEIKEKLERELVVNSEENNALQQEAHQIKNNIQLLNNKYHAMLEQLQTLGLDPKCFAASVKDLQNENSNLKEVCKMERNEKEALHEKSKDMDELLIENAFMEFSLSRLNDELDGLRVTVRKSQESCHVLQEEKSTVVDEKLALLSQLQIVTESMQKLLEKNALLEKSLSDSKIELEGLKAKSTDLEELCKLLND

SEQ ID NO: 158227 - protein, 98 aa, Glycine max
  Clone ID: PAT_MRT3847_113899C.1.pep
SWIVARSGGPKTWYNEVGHDGMTNSLNIMDSMKITYSAHIQVLKNSKEELLKIRNIFIINDQNSYVIHPIIINLINELLTRINEQKQNVEAAQHRGMK

SEQ ID NO: 158228 - protein, 44 aa, Glycine max
  Clone ID: PAT_MRT3847_11389C.1.pep
FKPERLAFEIKIESHVFPYCFIRLYRKSEHMQMATRKVSKSSFF

SEQ ID NO: 158229 - protein, 59 aa, Glycine max
  Clone ID: PAT_MRT3847_1138C.1.pep
KENPGSYGVIWTVTSNTIHHEELTLETILKSGYCREWPTNTLVNQPAMCQTLEGVCNKQ

SEQ ID NO: 158230 - protein, 61 aa, Glycine max
  Clone ID: PAT_MRT3847_113900C.1.pep
FCYFFYPHPTKFQIIFVSSNFILTYNLKTIFIPITPVADPNIKRNKSPLTPLVLSGLFHSV

SEQ ID NO: 158231 - protein, 63 aa, Glycine max
  Clone ID: PAT_MRT3847_113901C.1.pep
KTGVFLFNPRFNEGMAGFIFVSNAGEVGYGFISNGMFRGCAPENGFMEVGIWEKLPFFPSGVV

SEQ ID NO: 158232 - protein, 100 aa, Glycine max
  unsure (1)..(100): unsure at all Xaa locations
  Clone ID: PAT_MRT3847_113902C.1.pep
MCGLPSCRRQILRVVVHMERCAGLQKALGLIAREQKAKLGHELDGNGKRCGQEQNGYHVIQKRIESIQTKKISFILSAFLSXVVTLLMQSSGCRVIQRGG

SEQ ID NO: 158233 - protein, 158 aa, Glycine max
  unsure (1)..(158): unsure at all Xaa locations
  Clone ID: PAT_MRT3847_113903C.1.pep
VLGADEKYYSSEMIKCKDESKSFSRDRLNDNFCDCPDGTDEPGTSACPNGKFYCRNLGSKPQFIVSSHVNDHFCDCCDGXSDEYDGIICCPNTCVMGGNAESTFSNCKSEASQNGVKSEESVHTGLKLVIILQVVLVIFLVFLWSFRCRTRSRRRHYR

SEQ ID NO: 158234 - protein, 188 aa, Glycine max
  Clone ID: PAT_MRT3847_113904C.1.pep
MDSHCLLRFRFACFVLFASVACCFSHPSLLGIHPLDEKYYNSEVIKCRDGSKSFSRDRLNDNFCDCPDGTDEPGTSACPNGKFYCRNLGSKPQFIVSSHVNDHFCDCCDGSDEYDGIICCPNTCVMGGNAESTFSNCKSEASQNGVKSEESVHTGLKLVIILQVVLVIFLVFLWSFRCRTRSRRRHYR

SEQ ID NO: 158235 - protein, 411 aa, Glycine max
  Clone ID: PAT_MRT3847_113905C.1.pep
MGVDLRQVVAGVLTLTMFVMLGNMIKRDHFDNSLQEKLPGGSEDANFETATFDATHVRKNIGLWKGDVDDLKPCWVKPSSDDVEQTQGFVTFALTNGPEYHISQIADAVIVARNLGATLVMPDIRGSQPGDKWNFEDIYDVDVFMKSMEGVVRVVKDLPTRISTRNIAAVKVPNRVTEDYIAEHVEPIYRTKGSIRLGTYFPSINMRKAGKKGDTDSVACLAMFGSLELQPEMHEVVDSMVERLRTLSRNSDGQFIAVDLRVEMLNKKGCQNSDIDGEKSCYNAQEIAVFLRQIGFDKDTTVYVTESRWDSSLDSLKDLFPKTYTKEAIMPADKKKKFLDSEFEKVIDFYVSAESDVFVPAISGLFYANVVGKRIGSGKTRILVPATSASASNFLSPYVSNKNHFAYSCYC

SEQ ID NO: 158236 - protein, 118 aa, Glycine max
  Clone ID: PAT_MRT3847_113906C.1.pep
LEDIGSLMGCCFAGSLGATGAGTWNVALRGSRSVGTSYGARGDNNVTTMEAHRRLTGFGDQGLTKISWALGNESSLRGIGWCKLPRLWRTLALETKGRPGCLEHSCSRRRSQCCPVYC

SEQ ID NO: 158237 - protein, 54 aa, Glycine max
  Clone ID: PAT_MRT3847_113907C.1.pep
TDITDDVCTVKCHSPNLIYFMYHILKEQSNMTYGDSITKHTAGTLKRDDDHYSR

SEQ ID NO: 158238 - protein, 84 aa, Glycine max
  Clone ID: PAT_MRT3847_113908C.1.pep
LSKSVYGVGACTHAFGAVLMGGGANAGLRAEGELDKKLLALSTDKLIQAREREYHNKWGAREAHLKSPTFIILLGTGWESKRPT

SEQ ID NO: 158239 - protein, 75 aa, Glycine max
  Clone ID: PAT_MRT3847_113909C.1.pep
HSYRELGMSIKESYMLLGAWLQLSSKSWISQKSIFLAISVLLGLNCQIPRMENVFFFFQNKTTTDARWMVFFALI

SEQ ID NO: 158240 - protein, 67 aa, Glycine max
  Clone ID: PAT_MRT3847_11390C.1.pep
YLFGSNPGKISICGAFTAIAGMSVYTYLNMRQQSNKPSPRQASVLPKSKLGKENGSTHDGHYGAESV

SEQ ID NO: 158241 - protein, 100 aa, Glycine max
  unsure (1)..(100): unsure at all Xaa locations
  Clone ID: PAT_MRT3847_113910C.1.pep
ICGMIKMVGTVGIPENARLAKACAVNRPDTGGANAVVNTKCSQHCXLWNRGGTSAMSLSFNPNPCADAXGLEFLKIPAYYRDIMSVTGWTDAPKHDVHVT

SEQ ID NO: 158242 - protein, 122 aa, Glycine max
  Clone ID: PAT_MRT3847_113911C.1.pep
LGCVSLPLLCGWACLPGCHMLWFGGWAVWVCLVSGFVLWAPGGRLAARGAASFVPWVFPGRWPVALLCLWFASPSDVVCVFGSCLCVRVCSGLLGWRLWCCFWCSCLAVRLGFFCPFVSLPP

SEQ ID NO: 158243 - protein, 91 aa, Glycine max
  unsure (1)..(91): unsure at all Xaa locations
  Clone ID: PAT_MRT3847_113912C.1.pep
AILVLXKESCRSQKQVREIQAQCIPPEXLPKXQSRSTLHRCVPITRPSXHCXCXXHHPPXPPPRLXXQHPHQSXLPIPYPAHXSXXLHAHG

SEQ ID NO: 158244 - protein, 53 aa, Glycine max
  Clone ID: PAT_MRT3847_113913C.1.pep
SCSCQHHYNTSSVSSKKANHCCCRCIPRYSPNAYNSPSMMHVKSISDHSSRSG

SEQ ID NO: 158245 - protein, 522 aa, Glycine max
  unsure (1)..(522): unsure at all Xaa locations
  Clone ID: PAT_MRT3847_113914C.1.pep
MPTNRSVFMFRYIPISALTTLLAPTTGPCPWTGPNFGYRNSNLGFPPIQNRVRLSPPVSVPVQVQSSEPEKKIMDHRLLELEKQLLEDNDEXGEADAASGITTSEWSESVPVRFSXPVLTPTSPTSSTTSSTSSSSSVASPASGCSKQTLMEAASAIVEGKHDVAAEILNRLNGVNRSDRLTDCMVSALKSRMNPVEYPPPVAELFRKEHADSTQMLLENSVLLLDNSVCFKVGFMAANYAILEAAFEEKTENNRFCVVDFEIGKGKQYLHLLNALSARDQNAVVKIAAVAEKGGEERVRAVGDMLRLLAERLRIRFEFKIVATQKIAELTRESLGCDADDVLMVNFAFKLNKIPDESVSPENPRDELLRRVKRLAPRVVTVVEQEINGNTAPFLARVAETLSYYGALLESIEATTVGKDNSINNSDRVRLEEGLSRKLHNSVACEGRDRVERCEVFGKWRARMSMAGFELKPLSQSMVESIKARLISANNRVNSGLTVKEENGGICFGWMGRTLTVASAWR

SEQ ID NO: 158246 - protein, 505 aa, Glycine max
  Clone ID: PAT_MRT3847_113915C.1.pep
MGHHITKTPILSLSLSFFDAFLQKHNLLTVIFFFFVCSLFSSPNPRMSSPGFPGGGSASEFFAGAGVFGGRSIPGATMNNPNAAASATINNLHPLYRTQQQQNLPAMFLDPSSQIAQRQTPTFIGKRTLTEFQAYNQTNNNPNHVLSNLLLRSVKPRTSLYHTSMDFPVPELQNQNLYSNQTQRFGVPLLHQLRPQPINLPNNGPVPMTGPNFGYRNSNLGFPPNQNRVRVSPPVSVPVQVQSSEPEKKIMDHRLLELEKQLLEDNDEEGEADAASVITTSEWSETYQNLISPGPVQKPVLTTTSPTSSTTSSTSSSSSVASPASGCSKQTLMEAASAIVEGKHDVAAEILNRLNGVNRSDRLTDCMVSALKSRMNPGEHPPPVAELFRKEHAESSQLLLENSVCFKVGFMAANLAILEAAFEEKTENNRFCVVDFEIGKGKQYLHLLNALSARGQNAVVKIAAVADNGGEERVRAVGDMLSLLAEKLRIRVRVQGSSRLRKSPS

SEQ ID NO: 158247 - protein, 58 aa, Glycine max
  Clone ID: PAT_MRT3847_113916C.1.pep
GVSSTARPTLRRINKSFYGSLDSLEVHFRTVEKAVHIRVYMYMDIELELLSYGVVGRR

SEQ ID NO: 158248 - protein, 117 aa, Glycine max
  unsure (1)..(117): unsure at all Xaa locations
  Clone ID: PAT_MRT3847_113917C.1.pep
MLHRLLESLPKNKPVTHTVHLNTYDLTQINCYTYXLDHIVYHSEVQVHGLDYXLDAHKHNSTKISHFQHIHCTCITYTNSIFIATSDLDNKDAXPFIEKLPLNYFINTYHLISNNFH

SEQ ID NO: 158249 - protein, 95 aa, Glycine max
  unsure (1)..(95): unsure at all Xaa locations
  Clone ID: PAT_MRT3847_113918C.1.pep
MALALGLGMRWGAPEAAGQDETQTDTQARTQTDTQSDTHSNRTSDCTGSDAWCGEXCCPNGRANGLTVGLINLRGQIETPIAPTYTRTYDLHEDR

SEQ ID NO: 158250 - protein, 82 aa, Glycine max
  Clone ID: PAT_MRT3847_113919C.1.pep
GRKQTRFIFFSPPSGLSSNRTPPSPLFIQPLTELSVARTRTPSYRIKPSHCTTGKVKFTSHVGQKPPPSPPPHTQSSSAGGG

SEQ ID NO: 158251 - protein, 142 aa, Glycine max
  unsure (1)..(142): unsure at all Xaa locations
  Clone ID: PAT_MRT3847_11391C.1.pep
ALVAYALFRLIFALGRELTVALTMGSLVLAILIAMSGPILSKRILNQWLLXGLRSSPTMYGPNAVIXDDFPGKRRKHVLPNSSTPFGVQVLKSPGVFTQSKYYWKGVDALTAYTIEFNTAYILYFTYLNPLVHHQAGKSQKS

SEQ ID NO: 158252 - protein, 59 aa, Glycine max
  Clone ID: PAT_MRT3847_113920C.1.pep
ISLAPVDYLYIIIYITGKGYKIRKNLYIYKNNISKVHIVNLGTHLMINFPSIFDPLISL

SEQ ID NO: 158253 - protein, 39 aa, Glycine max
  unsure (1)..(39): unsure at all Xaa locations
  Clone ID: PAT_MRT3847_113921C.1.pep
MIQSSYLMRIMSENERTVIETLSYIPSIFTSVXYSFQPS

SEQ ID NO: 158254 - protein, 49 aa, Glycine max
  Clone ID: PAT_MRT3847_113922C.1.pep
VCLFNSIFFLQEKKKKKKKKKKKNKKKKKKKKKKKKKKKKGTDNRKKKD

SEQ ID NO: 158255 - protein, 122 aa, Glycine max
  Clone ID: PAT_MRT3847_113923C.1.pep
SFFFFFFYFILYFFFPLGLFGFYYIQPLRFLLVFLFDPCNKNNPYSPFKRDKNGGPNWAHRITGAYAEKYCPKGGKQVKQPESPWSGKPAFCINKQAGQRFFIRDHSPYIKELFPNMLGFFT

SEQ ID NO: 158256 - protein, 68 aa, Glycine max
  Clone ID: PAT_MRT3847_113924C.1.pep
MPGLTCNACNTEFKDDTEQKLHFKSEWHRYNLKRKVAGVPGVTEALSLARQFVLAQEKKKLGENSMLY

SEQ ID NO: 158257 - protein, 68 aa, Glycine max
  unsure (1)..(68): unsure at all Xaa locations
  Clone ID: PAT_MRT3847_113925C.1.pep
NEYESDELSTGKMVSLAMKNPQDIRSLKENSRIFIESFRLFFTKRYKDIVNLGFDKXDDQYYVQFVTA

SEQ ID NO: 158258 - protein, 103 aa, Glycine max
  unsure (1)..(103): unsure at all Xaa locations
  Clone ID: PAT_MRT3847_113926C.1.pep
XXYXYXXLGXXXELCXFSXXXLXXXPFXXGDXDXXRNLQVXXYXCPXCXEXXHSXXPXEXIAXTXXXXRSVXSXXQXRVXVMNXXXMGRRGSXWFSTXKKXSA

SEQ ID NO: 158259 - protein, 135 aa, Glycine max
  Clone ID: PAT_MRT3847_113927C.1.pep
MEKNLKYYGIKYFRFVYCNDIVPRLPFDDDIMKFEHFGTCLYYDRFYRGKKVKEEPNKNYFSWPWKGMMIQKKVNAFRELVRSFTIVHKHGPEYQEGWLLRFIRVLGLLFLAGLPAHCPQDYVNVTRLGLPSHLD

SEQ ID NO: 158260 - protein, 62 aa, Glycine max
  Clone ID: PAT_MRT3847_113928C.1.pep
RGRSVLCHNSSRVFALPPCQFHSLRASQSELRSLILIDPPSVLTLVQSILMFQFRSAKGIRR

SEQ ID NO: 158261 - protein, 121 aa, Glycine max
  Clone ID: PAT_MRT3847_113929C.1.pep
IPPSNFKKRVPPPFTKSPKSPGTGQVPRKGPRSPGPEKKTPPEGTLMGQTSKQNPLLNNHFKGPWHQLPKNPSPGQKDLHGPKKTPPFPYPPQHTRERPPSWHTGGQIGGQCKKTPHPPGG

SEQ ID NO: 158262 - protein, 88 aa, Glycine max
  Clone ID: PAT_MRT3847_11392C.1.pep
RLRETTEGMHNRYQTPSNLKLCLSTKKKKKKKKKRGPPTIAPFPPGFIPGPDPGGVPFSPIGGRFNPWGNQGKTGSRGKIFSRPNFQK

SEQ ID NO: 158263 - protein, 335 aa, Glycine max
  unsure (1)..(335): unsure at all Xaa locations
  Clone ID: PAT_MRT3847_113930C.1.pep
MCQARESKIQILAWVNLDMSSLFLIFLILLVADGVLVRGSINITEISFDQNYEVTWGDNHVVSLNQGKEIQLTMDNSSGSGFGSKMSYGSGLFHLRIKVPDRNSAGVVTAYYYSXMYLMQLTSQGRSHDELDFEFLGNREGKPYRLQTNVFVDGQGNREQRILLGFDPTRXIEACEIFGGLTGKLKILIIIVKKIEKSLTNPIYELXRFYVDNIPIRVYKNKSDIGVGYPTKPMQIQASLWDGDSWATNGGKTKTDWSYAPFRASFQGFDVSGCQVPTSNISQNCSSDKYWWNTQKFWRLDSVRQRQYERVKHKYMTYGYCADRNRYPEIPLECL

SEQ ID NO: 158264 - protein, 53 aa, Glycine max
  Clone ID: PAT_MRT3847_113931C.1.pep
EEKVGAEVGPPWFQNLPRNNAHGASVWVKHQTFEFWCKDIAIRAAKCGVTRVG

SEQ ID NO: 158265 - protein, 85 aa, Glycine max
  Clone ID: PAT_MRT3847_113932C.1.pep
GGSDRALAGVAHTHWVDAHATALEAPLQCGSHVPITLRNSLYGGTGASFSEKSPACDMVMFTKEVKSGSTKAIPLNVFFSMVQSV

SEQ ID NO: 158266 - protein, 161 aa, Glycine max
  Clone ID: PAT_MRT3847_113933C.1.pep
GSSSSGTHHSGVLEGWFGVHWWTGRAFVLLFTTLAVFAPLVSFKRIDSLKFTSALFSGLAVVFLVIAVGISIFKIIIGGLEMPRLFPIITDVASVFELFTVVPVLVTAYICHYNVHSINNELEDSSQMHGVVRTSLALCASVYLLTSFFGFLLFGERTLDD

SEQ ID NO: 158267 - protein, 36 aa, Glycine max
  unsure (1)..(36): unsure at all Xaa locations
  Clone ID: PAT_MRT3847_113934C.1.pep
XLVMLXLXLFAGXXXXGVGCRGNIXVIKPXPVIQLT

SEQ ID NO: 158268 - protein, 79 aa, Glycine max
  Clone ID: PAT_MRT3847_113935C.1.pep
VKFWENELMKSVSRNPVRMKKQMRDLAAARIVSTAMASTTEAMWTFLSTELREDGSSIILNYKLKNEREIKVEEKRKEI

SEQ ID NO: 158269 - protein, 79 aa, Glycine max
  unsure (1)..(79): unsure at all Xaa locations
  Clone ID: PAT_MRT3847_113936C.1.pep
LCVCVCWXXXLLLXRXXXFXXFXXQXTXPLQFAPXAKGLXISLXFXXXAXFCXNXYSXFPRFLGXXGXKXVADSLXRLL

SEQ ID NO: 158270 - protein, 35 aa, Glycine max
  Clone ID: PAT_MRT3847_113937C.1.pep
PDSRLDPRVRLRFETPPFMAPSRILFCASGYIKEM

SEQ ID NO: 158271 - protein, 58 aa, Glycine max
  Clone ID: PAT_MRT3847_113938C.1.pep
NSVVIFYLTISIKKNPITKSQKQEKLILKSLIHHHVQNIKLPSPFKNSKQKATQTVNL

SEQ ID NO: 158272 - protein, 105 aa, Glycine max
  unsure (1)..(105): unsure at all Xaa locations
  Clone ID: PAT_MRT3847_113939C.1.pep
RRXGTGQETNXKKEGPIFHQLKNKKQHSTRPQXPTPRTQGDTQTKPRKGTQNPRREESNQTXPKEGKRNRREKEEXRXXKEKGTXPRKXAPAAPRPPARGRRRQD

SEQ ID NO: 158273 - protein, 176 aa, Glycine max
  unsure (1)..(176): unsure at all Xaa locations
  Clone ID: PAT_MRT3847_11393C.1.pep
SFKFRMGTVFSHLPISMATEPAADDSILSLLRVFWPILEKFFGSEHMENGNLSVAACRALSLAVRSSGQHFVTLLPKVLDWLSTNFVLFQSHECYIRTASIVIEEFGHLEEYGRLFVTSFERFTHAASVMALTSSYICDQEPDLVEAYTNXASTFIRSCNKDALSACGSLLEISIQ

SEQ ID NO: 158274 - protein, 126 aa, Glycine max
  unsure (1)..(126): unsure at all Xaa locations
  Clone ID: PAT_MRT3847_113940C.1.pep
QGVQVTIDWVISSXEWGPRTYWVLNPQNPFGPNRWMGKLXTFPQGTFRSGKRMPXSIGGGAGAKNGILMNMPNACLSMWRYFVGDLRFEGSKMTSSYIKWTVFFFIAFGNLADDTHQFWAFSHKLV

SEQ ID NO: 158275 - protein, 34 aa, Glycine max
  unsure (1)..(34): unsure at all Xaa locations
  Clone ID: PAT_MRT3847_113941C.1.pep
FYLICYYFILMXNYLKHVIYIFIIXYFKCFLFKV

SEQ ID NO: 158276 - protein, 114 aa, Glycine max
  unsure (1)..(114): unsure at all Xaa locations
  Clone ID: PAT_MRT3847_113942C.1.pep
APILTPTGREDMAKEYQQVIEELQKLVRQKSELXATAADKVEQITASLGTSSSDGIPSSEASHIISAGIMHLEKEKYDENAPLYGELAKGQIPKFMVLACSDSKTSPSHVLDFQ

SEQ ID NO: 158277 - protein, 109 aa, Glycine max
  Clone ID: PAT_MRT3847_113943C.1.pep
GLRVIFGPKIPWAKGEIPWGGGQIPGAPGKGDLRGPGGGVPPARCNGVGGLNKEAQTPPNCQGGCRGLKTPALSLVGFNLATPAAFPSKRGGNLPPKKSPPLDCNPVKP

SEQ ID NO: 158278 - protein, 138 aa, Glycine max
  Clone ID: PAT_MRT3847_113944C.1.pep
MTKKGKKQLMSSAPWRGEESEESFKEGKLKVTRQGDGTSTMHVPASKSKHHHHDLHDDLGIEIDPELRYSFQRNFQFLQRVFSIDTMVKPLPPVMAYNVSRNLNFFTRIFTQFFDPEGIANAQKSLGIGQEDKVRKVR

SEQ ID NO: 158279 - protein, 71 aa, Glycine max
  unsure (1)..(71): unsure at all Xaa locations
  Clone ID: PAT_MRT3847_113945C.1.pep
QSHGNHGRVYHCHXYSAARLDSFTSNLNYIRDMNAPQHAPQSQRSXASTFADITPQEFSMKYLQTPNDLSQ

SEQ ID NO: 158280 - protein, 179 aa, Glycine max
  Clone ID: PAT_MRT3847_113946C.1.pep
MGCASSKLEDLPAVALCRERCGFLDEAIHQRYALAAAHIAYINSLKSIGHSLHLFIQQDMDSPPSPSSSPSPPHKLAQHLPPSSPSPSDSLGSHLHFHSDSDDLPSLHHSPQSSSPIPIASYFTGPDHHPPHLHMNFMQNKASLFIFYEQMPLSSQTMYVGESSSSSFYPYQYPPYPYP

SEQ ID NO: 158281 - protein, 61 aa, Glycine max
  Clone ID: PAT_MRT3847_113947C.1.pep
GKKGNLVKNQKKKLWGGFRGPQPFKNVQLLPKKKSSSKIFWIWPTLIWIDHIFKHFGGLAN

SEQ ID NO: 158282 - protein, 60 aa, Glycine max
  Clone ID: PAT_MRT3847_113948C.1.pep
SERCLLSVLAVCLPLWAIHETGSNQQWVLLQRANRELIRRGWPSTPYRWGCDCVTPTRSV

SEQ ID NO: 158283 - protein, 96 aa, Glycine max
  Clone ID: PAT_MRT3847_113949C.1.pep
KKFLKGFLTNAKALIKKKGGEIHVTPKKGDPSHKWDLVKKPKKKGLVFQQIVPFFKDDYPGYANKKAHGKLFDAPFPVGEASTFKFKVPTSNPCKN

SEQ ID NO: 158284 - protein, 201 aa, Glycine max
  Clone ID: PAT_MRT3847_11394C.1.pep
PRVRGDVVLVNRQPTLHKPSIMAHIVRVLKGEKTVRMHYANCSTYNADFDGDEINVHFPQDEISRAEAYNIVNANNQYVKPTSGDPIRALIQDHIVSAALLTKKDTFLSYEEFNQLLYSSGVSMAGLGSFYGKHGQKVFISNSESEMFLFPPAIWKPEPLWTGKQVISALLYYITRGSPPFTAEKNAKIPSNFFRLRSGRE

SEQ ID NO: 158285 - protein, 248 aa, Glycine max
  Clone ID: PAT_MRT3847_113950C.1.pep
MARSLFLCSLLILAVTTFSSPTGALILTLVNNCNYTVWPGIQPNAGHPVLAGGGLTLRSLTHQSIPVPDAHWSGRVWARTGCSYSGTAFSCASGDCGGRLQCNGAGGAAPATLAQLEVHHGSNDYASYGVSLVDGFNVPMTFTPHEGKGVCPVVGCRNDLLATCPRVLQHRVPAGHGPVVACKSGCEAFHTDELCCRNHFNNPNTCKGSIYSSFFKHACPATFTFAHDTPSLMHQCSSPRELKVIFCH

SEQ ID NO: 158286 - protein, 70 aa, Glycine max
  Clone ID: PAT_MRT3847_113951C.1.pep
NQNPPKKGFFKRPFFWAMGTPRGNIPTQFKEKKRPNPLKGLNNREKKIFGSKKKKDFFLFQQNSYFKPQK

SEQ ID NO: 158287 - protein, 56 aa, Glycine max
  Clone ID: PAT_MRT3847_113952C.1.pep
KVQKAQLAQLNFKLVVGKEKVISGQVSVQVKDSPNHKVLGIEKPLEHFKDKTAAFE

SEQ ID NO: 158288 - protein, 207 aa, Glycine max
  unsure (1)..(207): unsure at all Xaa locations
  Clone ID: PAT_MRT3847_113953C.1.pep
MLNADSTSPYHPTAKPSKPTTTFFKKTNLYTLLAFLCIVSYLLGAYQGTTTKTTITTTTTTPCPQNPTLTTTTHLLDFSSHHNSTNLNPSTSTTLHFPPCHVSLSEYTPCEDHARSLQYSRRRMVYRERHCPRNNEVLKCRVPAPHGYRNPFPWPASRDVAWYANVPHRELTVEKAVQNWIRYDGDRFHFPXSGTMFPDGADKYIDD

SEQ ID NO: 158289 - protein, 44 aa, Glycine max
  Clone ID: PAT_MRT3847_113954C.1.pep
LNFIFSSNSYESRFMSNLAIRSICFRNMIDIRPHASFFDWCYIF

SEQ ID NO: 158290 - protein, 114 aa, Glycine max
  Clone ID: PAT_MRT3847_113955C.1.pep
MASKRNTVVFEDYFPAMMEKLGTEGFMKELTNGFQLLMDREKKVITFESLKKNSALLGLEGMSDDELRCMLREGDLDGDDTLDEMEFCTLMFRLSPALMNNSKELLEEAIYPFH

SEQ ID NO: 158291 - protein, 108 aa, Glycine max
  unsure (1)..(108): unsure at all Xaa locations
  Clone ID: PAT_MRT3847_113956C.1.pep
KKQALSYNYHFYCLHEKKDTKKKINDAQGNKNKKKKKSXXGGAPFKKKQFSHPGGGVFYFFFGAQKKILLAGCLTTVGGKNPGEPQFIGVQKPPFFRGGGKKKKAPPP

SEQ ID NO: 158292 - protein, 114 aa, Glycine max
  Clone ID: PAT_MRT3847_113957C.1.pep
MASKKNTVVFEDYFPAMMEKLGTEGFMKELTNGFQLLMDREKKVITFESLKKNSALLGLEGMNDDELRCMLREGDLDGDGALDEMEFCTLMFRLSPALMNNSKELLEEAIYPFH

SEQ ID NO: 158293 - protein, 76 aa, Glycine max
  Clone ID: PAT_MRT3847_113958C.1.pep
ENHLGLQHHMHLDQQQLLPELRKHPDRMLAELSLRTERIISPFQGQKSQSTVAHVVDPKCGKAPPLHPPLLRTPNS

SEQ ID NO: 158294 - protein, 39 aa, Glycine max
  Clone ID: PAT_MRT3847_113959C.1.pep
INLLIWFLGIVFLNNIHTRLLNRDKSHDTQVRGRIRQNC

SEQ ID NO: 158295 - protein, 93 aa, Glycine max
  unsure (1)..(93): unsure at all Xaa locations
  Clone ID: PAT_MRT3847_11395C.1.pep
DFDSPSSAQKAVTALXSSGVQAQXAKQQEQDPTNXYIXXLPLSMDEXELEXMLKPXGXVISTRILRXTXGASRGVGFARMESTEKCEAIIXHF

SEQ ID NO: 158296 - protein, 69 aa, Glycine max
  Clone ID: PAT_MRT3847_113960C.1.pep
LQNTRDWNECLIAYVTISSFKLLLGYVNTGVSGCTKNRTITTRLITYQFYGLISTTPRYKCCLCGSDAP

SEQ ID NO: 158297 - protein, 291 aa, Glycine max
  Clone ID: PAT_MRT3847_113961C.1.pep
MMVQERSLPKSVNSKPHARTAALASTKSLDFSAWVSDNLVRIVAVVLLVATVAAVFFLRNAGDTAALLCFENQARELERIAYPRVDWSAIAPIADRTSKFSSFRSEKWIVVSVSGYPSDALRRLVKMKGWQVVAVGGSNTPSDWTLKGAIFLSLEEQVNLGFRVVDYLPYDSFVRKSVGYLFAIQHGAKKIFDADDRGEVIDGDLGKHFDVELVGEAARQEVLLQYSHDNPNRTVVNPYVHFGQRSVWPRGLPLENVGEIGHEEFYTQVFGGKQFIQQGISNGLPDVDSVF

SEQ ID NO: 158298 - protein, 50 aa, Glycine max
  Clone ID: PAT_MRT3847_113962C.1.pep
KPYGPTLPTRTRLVFLHQRILVQTLQVPKWLKKLKALSKGGNPLKLFFFF

SEQ ID NO: 158299 - protein, 125 aa, Glycine max
  unsure (1)..(125): unsure at all Xaa locations
  Clone ID: PAT_MRT3847_113963C.1.pep
MMVQERSLPKSVNPKPHTRTAALASTKSLDFSAWVSDNLVRIVAVLLLVATVAALFFLRNVGDTAALLCFENQARELERIAYPRVDWSAIAPIADKTSKFSSXRSEKWIVVSVSGYPSEALXRLV

SEQ ID NO: 158300 - protein, 80 aa, Glycine max
  unsure (1)..(80): unsure at all Xaa locations
  Clone ID: PAT_MRT3847_113964C.1.pep
LELRLELSSQKGHNIKGTMVXVMRRTVYSMNSISSVGGIVVQGLGFIGSAVDAISFAGSKMCIQLISGTKADGGTGEIGK

SEQ ID NO: 158301 - protein, 76 aa, Glycine max
  Clone ID: PAT_MRT3847_113965C.1.pep
TYLHFFNSLYIQRSTPKSNTALLYYPKLHSIINKNTQHTVHYILQKVPNKTLIVLHSKINQYLPKKYTKHNHLSTI

SEQ ID NO: 158302 - protein, 56 aa, Glycine max
  unsure (1)..(56): unsure at all Xaa locations
  Clone ID: PAT_MRT3847_113966C.1.pep
KDNQIKKKKAPLRKESLKGCFXIYRIKGKKKFISERRSGTKNFNIHPRKEPPVVWI

SEQ ID NO: 158303 - protein, 54 aa, Glycine max
  Clone ID: PAT_MRT3847_113967C.1.pep
GFIIFHPYALIFLRISNNFIKKQCRKDRRNIPHQKKAKKHRKDNVAKAIRLSIH

SEQ ID NO: 158304 - protein, 74 aa, Glycine max
  Clone ID: PAT_MRT3847_113968C.1.pep
VERNVAYQPWIWTAGNHEIDFAPELGETKPFKPYSYRYPTPYKASGSTAPFWYSVKRASAYIIVLASYSSYGKY

SEQ ID NO: 158305 - protein, 222 aa, Glycine max
  Clone ID: PAT_MRT3847_113969C.1.pep
MASAREQIYFLAIVLLFSHSKLMLSNAAITGEPIPAEWPHQFHALMFMNQSGTLQKLDLWYDWPNGRNFNIIQNQLDHLVTYDLEWNNGTSFVYTLDPSEPTCQVLHVEVGILRPNWLHGATYLGQQHVGNFLCNVWEKVDFIVYYEDVLTRRPVKWVFYTGYTAHVMTFEVGAVLEDPNWQAPVYCFSENGKENNSPILRHAVPGGSLGSLMRGITVWETM

SEQ ID NO: 158306 - protein, 84 aa, Glycine max
  unsure (1)..(84): unsure at all Xaa locations
  Clone ID: PAT_MRT3847_11396C.1.pep
KKLFKREQEEALPQEEEEEEEEEEEEEESESKTDSNKNIXGMAIVKPVFVPKSQRNTIAEREPFEAXELAFEDKRKRELEEPRI

SEQ ID NO: 158307 - protein, 70 aa, Glycine max
  unsure (1)..(70): unsure at all Xaa locations
  Clone ID: PAT_MRT3847_113970C.1.pep
QKSPLILFKGEPNTIFIDLLXMEGNPSPLKSPPITYGGLAPTLAPLALRALLKPQGPDREHTPQFDRVKG

SEQ ID NO: 158308 - protein, 94 aa, Glycine max
  Clone ID: PAT_MRT3847_113971C.1.pep
LFSTRATSGGVLPPKGAPSSKQSKGNLAPAPIKSGKGEMEKALKANPLKSASHGVEPRRSHPGVPPPSRLLKGLQGFLFISKIPWVSHNGKIKS

SEQ ID NO: 158309 - protein, 56 aa, Glycine max
  Clone ID: PAT_MRT3847_113972C.1.pep
KLKTGGKVIYNWTKKVLKIKIPPPPRKDLNREKNIRGGWVFSSPHMWATKEKTNPR

SEQ ID NO: 158310 - protein, 161 aa, Glycine max
  Clone ID: PAT_MRT3847_113973C.1.pep
MAGRKPKLNATKQGHRTKEELEQSEYKENGLQKFEKINVDSVPDGLTENAAKEWLRIVPLLEQLPIADLDYSLIKKYCEVLDQNDTLYRSISQKDGIEGMVDPETNRKTGAFMAYMESLKELRSICGQLGMTIDSRMRLVVPTESEVKQSVYDEFGVDDDD

SEQ ID NO: 158311 - protein, 45 aa, Glycine max
  Clone ID: PAT_MRT3847_113974C.1.pep
KHCKNIYESTTTRKTCNQLGSPAASIETPNLVYKVTQKVLHAMTN

SEQ ID NO: 158312 - protein, 70 aa, Glycine max
  Clone ID: PAT_MRT3847_113975C.1.pep
VNCIIPQQNYVKLCIHSLLELDSFELTGYISLTHTLLSVSCCKVIQYKSLTFDPCHNVPFICSNKASCRS

SEQ ID NO: 158313 - protein, 161 aa, Glycine max
  Clone ID: PAT_MRT3847_113976C.1.pep
SKIAVFAWRLFRDRLPTKSNLRARQVQISDIYHAPFSERWRRMHPHLFIHCIKVQPLWWESMSWINLKGASPLTTKHHFMQYPFLQVEGIRKRRWQYWWLAITWSTWQLRNRILFSDAAFDGNKLFEDAIFLMWTWLHNLEKDFTLHFNQWSSNLRHHFLQ

SEQ ID NO: 158314 - protein, 135 aa, Glycine max
  Clone ID: PAT_MRT3847_113977C.1.pep
LGGMVASGGDAFMLFVGVVIGWMRMVVGASRPMIVGLVRAQMVLADSGLGGWADFVSVVSFGATVSEFVVMCVVVFGWILIYGSCPLTLCDLSASGRRGGCFLEHKVFEIHMCAGGSIGWQQRGARLFWGLGATW

SEQ ID NO: 158315 - protein, 63 aa, Glycine max
  Clone ID: PAT_MRT3847_113978C.1.pep
GGNNFFKTANFGPFLALPNGRREKKVNYGKLFQSGLKISCEQLKKNQSLECPDGLVGPGNPDP

SEQ ID NO: 158316 - protein, 38 aa, Glycine max
  unsure (1)..(38): unsure at all Xaa locations
  Clone ID: PAT_MRT3847_113979C.1.pep
WSLATVINLLGQKWHPRVLDPTQKSIYCLXSDHMGGGL

SEQ ID NO: 158317 - protein, 87 aa, Glycine max
  Clone ID: PAT_MRT3847_11397C.1.pep
TEAGCLLPSLPSDATFDSISGISFLCDLNDNIPAPWPSTSQLTSSSCNKSINIPALPAAASSQSCLYSHDILFSVLVALLFLLMTTM

SEQ ID NO: 158318 - protein, 84 aa, Glycine max
  unsure (1)..(84): unsure at all Xaa locations
  Clone ID: PAT_MRT3847_113980C.1.pep
MQIFXXXLTGKTITLXVXSSDTIDNVKAKXQDKEGIPPDQQRXSXAGXQXEXGRTLADXXIQKXXXLHLXLRXRGGIIEPSLMA

SEQ ID NO: 158319 - protein, 96 aa, Glycine max
  unsure (1)..(96): unsure at all Xaa locations
  Clone ID: PAT_MRT3847_113981C.1.pep
LGYCTITGQVRKNMRNCEVHLKLEEKRQHTLHEEEEARKREDAERKKKEEXNRLPKSEEIAAKQRQRERELDKKEKQRREALLGRDAAEPASTART

SEQ ID NO: 158320 - protein, 75 aa, Glycine max
  Clone ID: PAT_MRT3847_113982C.1.pep
RVYLTYVVLAEAVSGACFFFAFERSILGDKNKKARIRGWALYPLLVIFCGCSFMCELMCPIGSFWLLVGRSKCFF

SEQ ID NO: 158321 - protein, 83 aa, Glycine max
  Clone ID: PAT_MRT3847_113983C.1.pep
LGRKKRVSKMRPKDGFFIKGPYKGGFFLMHVASSSSKCKVAMSMTMVNDPLRRIGRCDQKKGAISGSEIGADNSPAAGAASSF

SEQ ID NO: 158322 - protein, 88 aa, Glycine max
  unsure (1)..(88): unsure at all Xaa locations
  Clone ID: PAT_MRT3847_113984C.1.pep
ISIMARRLSIATCKCSILAXSCHLEVIHNTPKLSFKHTTEIQSPKRSQNTPQEATIASLDIAPSQLRVTLPCLXVCTSTVHIRDPIHF

SEQ ID NO: 158323 - protein, 86 aa, Glycine max
  Clone ID: PAT_MRT3847_113985C.1.pep
SRRVTEREIIALLLLGPFMDADFKGVDLEHDDPMFMTVRTANCVVMNTLVHQWNRLIFFAGRPSNYLRFQKVKLDRMCFWRERIDT

SEQ ID NO: 158324 - protein, 74 aa, Glycine max
  Clone ID: PAT_MRT3847_113986C.1.pep
RPAVKTTPQPGDYYSPRPLTHDQHKRPGIPGVNHMSLTQDIATIDMYDLGSTYESPKPPGFSGWEGISKNNAGR

SEQ ID NO: 158325 - protein, 70 aa, Glycine max
  Clone ID: PAT_MRT3847_113987C.1.pep
FGTLGGDQFHTGRHLPPYSPQAYTALLGGKLFLPLETTTDKTGGLQPQRQGAPHLVVYALVLSTCLIPLW

SEQ ID NO: 158326 - protein, 135 aa, Glycine max
  Clone ID: PAT_MRT3847_113988C.1.pep
MKLNRHFTYDVTSKLKTKFLGNSVDVYPVGRTRVTLKRDGVVLDLVPPPTKVNNLIFGRTWIDSPGEMIMTNLTTGDKAVLYFQPCGWFGAGRYEVDGYIYNSSEEPKILMTGKWNESMSYQPCDSEGEPLPNTE

SEQ ID NO: 158327 - protein, 55 aa, Glycine max
  Clone ID: PAT_MRT3847_113989C.1.pep
NMYAQLLPLALPAPPMPGMGGGGYAPLTTPPMGGMGMPPMPPFGMPPMGGSSGSY

SEQ ID NO: 158328 - protein, 130 aa, Glycine max
  Clone ID: PAT_MRT3847_11398C.1.pep
QNDFFIYMKGCKPPVERMDIVGGSAAASPCSSYHPSPCASYNPSPGSSCLPSPRASPFPPNPNADGNSLIPWLKNLSSGSSSASSSMLPQLYIPNGSISAPVTPPISSPSSRKPRIRVDLEDQSSCPQTR

SEQ ID NO: 158329 - protein, 78 aa, Glycine max
  unsure (1)..(78): unsure at all Xaa locations
  Clone ID: PAT_MRT3847_113990C.1.pep
EKVKIWCXXSEMIFSAAFLLWRQLNHQRPRKTRGTDKVHVDLKWCWTMVVIFFQVCLFFFTNYVRLEPNSELTYACMR

SEQ ID NO: 158330 - protein, 297 aa, Glycine max
  unsure (1)..(297): unsure at all Xaa locations
  Clone ID: PAT_MRT3847_113991C.1.pep
MGSPSKKNESKGFFAAVSSMFTSAVNRSVNGLSVEVINPEGGKEDSEEEAQRGRWKQEERDGYWKMMQKYIGSDVTSMVTLPVIIFEPMTMIQKIAELMEYSYLLDQADESEDPYMQLVYAMMYFMXIITASWAISVYFAYQRTWKPFNPILGETYEMVNHGGITFLAEQVSHHPPMSAAHAENEHFTYDVTSKLKTKFLGNSVDVYPVGRTRVTLKRDGVVLDLVPPPTKVNNLIFGRTWIDSPGEMIMTNLTTGDKAVLYFQPCGWXFGAGRYEVDGYIYNFXEEPKXLMTGKWN

SEQ ID NO: 158331 - protein, 133 aa, Glycine max
  Clone ID: PAT_MRT3847_113992C.1.pep
QLGEVIREKGQQLDTPVLENGDNWSVGQRQLVALGRALLQQSRILVLDEATASVDTATDNLIQKIIRSEFKDCTVCTIAHRIPTVIDSDLVLVLSDGLVAEFDTPSRLLEDKSSVFLKLVTEYSSRSSGIPDF

SEQ ID NO: 158332 - protein, 51 aa, Glycine max
  Clone ID: PAT_MRT3847_113993C.1.pep
QRERECVAQDKHEKFRSNNAAIATVACTKASVSSITVGAGTAKICVTVTQL

SEQ ID NO: 158333 - protein, 90 aa, Glycine max
  Clone ID: PAT_MRT3847_113994C.1.pep
KKKKLLWAPFGPPREKKPEENSAPLLVPKLPGAHKSPILKVRGPKRAPPFFHPIFLKKKGKVAPLPLNFFFLFQSKKKLIEAGGAPFHFL

SEQ ID NO: 158334 - protein, 137 aa, Glycine max
  Clone ID: PAT_MRT3847_113995C.1.pep
WNYRVYPSIPYVYSVVKKKKKKKKKKKKKKKKKKKKKKKKKKMEEKKKKTKYMTTSYQKNKCNIKKKKWGGPLKGFKIGKPWDSPYLIFLRPIKIYFAWPLFQKGPKGNPLVSLFKIVWKNIPFSEAGYKKKSPPRF

SEQ ID NO: 158335 - protein, 108 aa, Glycine max
  Clone ID: PAT_MRT3847_113996C.1.pep
RIKSNQESMHMNMMMKKVCGFAIVMVAVQLLVEVSPKAEAVTCTPVELSPCLGAITSSQPPSTICCQKVREQRQCLCGYLKNPSLRPYANSPGSRRVASSCGVPFPTC

SEQ ID NO: 158336 - protein, 87 aa, Glycine max
  Clone ID: PAT_MRT3847_113997C.1.pep
ARVSIQIQPRLTTIVQPGPGLKNFGSCYSSLLTAHTHPTNKQNKLPCHKGKTVIPHSHPQPQQRNQTANQKPFFSSSPIPHSDPIKP

SEQ ID NO: 158337 - protein, 47 aa, Glycine max
  Clone ID: PAT_MRT3847_113998C.1.pep
SPVGQTNPQFNTSLPQKLYTVKENRTVSNYDTFLAQINALVHPVAHI

SEQ ID NO: 158338 - protein, 99 aa, Glycine max
  Clone ID: PAT_MRT3847_113999C.1.pep
AEDIFTSKREQNFGTEVKADMLRILHKKLVRHQPLTMRVDTGQYFKSKLSAIGSEVKPTDSMPEVRSVRRTDTGIQFLTFYINSCFTGFISSVGDFYLC

SEQ ID NO: 158339 - protein, 199 aa, Glycine max
  unsure (1)..(199): unsure at all Xaa locations
  Clone ID: PAT_MRT3847_11399C.1.pep
MTSGARQPTWKERENNKRRERRRRAIAAKIFSGLRMYGNYKLPKHCDNNEVLKALCNEAGWTVEADGTTYRKGCKPPVERMDIVGGSAAASPCSSYHPSPCASYNPSPGSSCLPSPRASPYPPNHNADGNSLIPWLKNLSSGSSSASSSKLPQLYIPNGSISAPVTPPISSPSSRKPRXNADWEDLSTRPAAWGGPAYT

SEQ ID NO: 158340 - protein, 195 aa, Glycine max
  Clone ID: PAT_MRT3847_1139C.1.pep
MVPRVRPCVRFPMAGPSWLVDKSRIATKIKSASGTCGKVIWKSNPSRACPSCHHVIDNSDVAQEWPGLPIGVKFDPSDQEIIWHLLAKVGAGNSKPHPFIDEFITTLEVDDGICYTHPQHLPGVKQDGSSSHFFHRVINAYNTDSRKRRTICGQDLGDVRCHKTGRTKPVILNAIQKGCKKIMALYISPVRGRKS

SEQ ID NO: 158341 - protein, 171 aa, Glycine max
  Clone ID: PAT_MRT3847_113C.1.pep
MGKKGGSWFSSVKKVFKSSSSKDSPLPEKKKENNKEEQWQHVAPEEVSVEHFPAESSPDLTNEGSVTSSTPVTEDTNPAVAFAAATAAAAEAAVAAAQAAARVVRLAGYGRQSKEERAAILIQSYYRGYLARRALRALKGLVRLQALVRGHNVRKQAQMTMRCMPALVRVQ

SEQ ID NO: 158342 - protein, 92 aa, Glycine max
  unsure (1)..(92): unsure at all Xaa locations
  Clone ID: PAT_MRT3847_114000C.1.pep
VGFPTSKTYNDITSIVSNGGRLQCMHVWPPLGKKKSETLFYLPYLYDAQSAXKYXYLLKKGWIPXWEFQLDHSLVYHDHYRLPRYYDGRYWT

SEQ ID NO: 158343 - protein, 120 aa, Glycine max
  Clone ID: PAT_MRT3847_114001C.1.pep
RTYWSSYIIVELLLRCTSYASGLLWTTFIYRKINLIDTLTWCQHQFFVSFFLCFSLIHGFTLSEEGGNILRACPPLDVPWQCTTVEQEHLDYFTTIHRRVRKVNRLAMTFPRLMFEFGAT

SEQ ID NO: 158344 - protein, 100 aa, Glycine max
  Clone ID: PAT_MRT3847_114002C.1.pep
PQTHITEKSHFTFTRDWPPSWIRINNKGMTQMDETRSGQSEEDEFLSHWQHDCIRDPCTELYYLNPLSATAEHHCKNIIKRSETKINRSLFSLHDLIAPI

SEQ ID NO: 158345 - protein, 53 aa, Glycine max
  Clone ID: PAT_MRT3847_114003C.1.pep
ILLIIVFYRDIIFDLEKTGYVQLMESLLYLSYVFVYLLLLSGAVITPLYPAWE

SEQ ID NO: 158346 - protein, 77 aa, Glycine max
  Clone ID: PAT_MRT3847_114004C.1.pep
KNKTTCTFCACALEGRDHLQGTDLHYMALMLYLGFFFFTVFNIPVLAMFSFPFLHFLCTNMYFITFLINDYSIKFYF

SEQ ID NO: 158347 - protein, 40 aa, Glycine max
  unsure (1)..(40): unsure at all Xaa locations
  Clone ID: PAT_MRT3847_114005C.1.pep
DCGIRIQNDKQTXFEGLLCFXSLCQSQCHLQILACXMTSS

SEQ ID NO: 158348 - protein, 96 aa, Glycine max
  Clone ID: PAT_MRT3847_114006C.1.pep
SNLYLAFDYAMNAQILVPSLFFLLLLLTLIIIPCPYPSGKGRKKESLYYYLYCNLSLYYNHDYKYCGYYNLNMDFSSLSNDSVVGFKDKETMVEPF

SEQ ID NO: 158349 - protein, 62 aa, Glycine max
  Clone ID: PAT_MRT3847_114007C.1.pep
FLSTQSLNSYHSNAIHPQFYKHSTLRIKVTSHLTFWEVKRKNRVFPTVFIRGNNQQMKSSKT

SEQ ID NO: 158350 - protein, 88 aa, Glycine max
  Clone ID: PAT_MRT3847_114008C.1.pep
FFFFFFFFFFFFFFFFFFLKKNHDIHGSLLIEGHPIQLIIFFFFAKGRGTSYSNYPHTEYAVLFLKHLISYFHITLSPAYTNNRDKGV

SEQ ID NO: 158351 - protein, 77 aa, Glycine max
  Clone ID: PAT_MRT3847_114009C.1.pep
AGERKCSHFLGYSGEQISSGDDGVGPVAQRIRARGYEPRCRGFESLLAHNRPKKGRIFPSGGRKIMIGLADPKLWNL

SEQ ID NO: 158352 - protein, 143 aa, Glycine max
  Clone ID: PAT_MRT3847_11400C.1.pep
MMHMTFYWSRKVNLLIDSWKTNDWTEYLITLLACLVVAAFYQFLENRRIRLKLIGAGNPFPAEIEAPLLRRKLAGNRAKVGVKVAGAFLFGLSSAIGYLLMLSVMSFNGGVFVAVVVGLAVGYFFFRNEGEDSLVVDTSCACA

SEQ ID NO: 158353 - protein, 57 aa, Glycine max
  Clone ID: PAT_MRT3847_114010C.1.pep
RFKSILFIICIFLDKIILRAPCNSFGFCDNCLSTTSADYSILNFLASHNRLKSKVLV

SEQ ID NO: 158354 - protein, 295 aa, Glycine max
  Clone ID: PAT_MRT3847_114011C.1.pep
MAVSMRDLDPAFQGAGQKAGLEIWRIENFNPVPVPKSSYGKFFTGDSYVILKTTASKSGALRHDIHYWLGKDTSQDEAGAAAIKTVELDAALGGRAVQYREVQGHETEKFLSYFKPCIIPQEGGVSSGFKHPEAEKHKTRLFVCRGKHVVHVKEVPFARASLNHDDIFVLDTESKIFQFNGSNSSIQERAKALEVVQYIKDTYHEGKCEVAAVEDGKLMADPETGEFWGFFGGFAPLPRKTASDDDKPTDSRPPKLLCVEKGQAEPVETDSLKRELLDTNKCYILDWGFEGFGWL

SEQ ID NO: 158355 - protein, 58 aa, Glycine max
  Clone ID: PAT_MRT3847_114012C.1.pep
PTRPLCCYMTIVLGDQTIRASSMHQTTDFGFGSLNILVYVKLLISLFIKYIVKLCSTN

SEQ ID NO: 158356 - protein, 62 aa, Glycine max
  Clone ID: PAT_MRT3847_114013C.1.pep
AYHLMGRYTKTRTLVTLLGSQPIPVLILFYTCNFISTVLMTIPKWPLLHIMTVIHSYPHSPL

SEQ ID NO: 158357 - protein, 38 aa, Glycine max
  Clone ID: PAT_MRT3847_114014C.1.pep
ARDFFIHLSYPYTKFLSPMGTIPGYHLCTTMIGYENRL

SEQ ID NO: 158358 - protein, 54 aa, Glycine max
  Clone ID: PAT_MRT3847_114015C.1.pep
FDACIMYLLLGCRFFGKYVYLYLVLDIWALNQVRNEFPVCWDNIYVRCSPFTQL

SEQ ID NO: 158359 - protein, 93 aa, Glycine max
  unsure (1)..(93): unsure at all Xaa locations
  Clone ID: PAT_MRT3847_114016C.1.pep
SQRCGARRRCYYAQSPVRNGWRRRLTQYEWCFACKRRLIHVISECRHALKHARLMSRFGKRHHSEEEMKERNEIFXHNLRFNRSHNKKAIALY

SEQ ID NO: 158360 - protein, 186 aa, Glycine max
  Clone ID: PAT_MRT3847_114017C.1.pep
MACRSMLRSSILVEPFQLQPLHFSNRPVRACPFRRGKGVTLRCSSNETPSFQDDQGPPQEAVLKAISEVSKAEGRVGQTTNMVIGGTVSDDSTNEWLTLDQKVNSYPTVRGFTAIGTGGEDFVQAMVVAVESVIQQPIPQGRVKQKLSARGKYVSVNIGPVQVVSSEQVQAVYNAMRRDDRMKYFL

SEQ ID NO: 158361 - protein, 61 aa, Glycine max
  Clone ID: PAT_MRT3847_114018C.1.pep
MVVAVESVIQQPIPQGRVKQKLSARGKYVSVNIGPVQVVSSEQVQAVYNAMRRDDRMKYFL

SEQ ID NO: 158362 - protein, 43 aa, Glycine max
  Clone ID: PAT_MRT3847_114019C.1.pep
KLFSTINTYSYYILLYFFFTCLIFLQLHNIPENAKLYRETNTS

SEQ ID NO: 158363 - protein, 335 aa, Glycine max
  unsure (1)..(335): unsure at all Xaa locations
  Clone ID: PAT_MRT3847_11401C.1.pep
MTSVARQPTWKERENNKRRERRRRAIAAKIFSGLRMYGNYKLPKHCDNNEVLKALCNEAGWTVEADGTTYRKGCKPPVERMDIVGGSAAASPCSSYHPSPCASYNPXSPGSSCLPSPRASPFPPNPNADGNSLIPWLKNLSSGSSSASSSKLPQLYIPNGSISAPVTPPISSPSSRKPRINADWEDLSTRPAAWGGPAYTFLPSSTPPSPGRQVAETDWFSKIRIPQVGLTPTSPTFSLVSSNPFGFKEDAMGGSGSRMWTTPGASGTCSPAVAAGSENTSDIPMAEAVSDEFAFGSSSSVLVNAWKGERIHEASFGTDDLELTLGSSKTRLLHK

SEQ ID NO: 158364 - protein, 66 aa, Glycine max
  Clone ID: PAT_MRT3847_114020C.1.pep
TNKIRCWGFRRIINCRGKGCLRGFFVQGFIRSSRLRIWGWGSNIVKKGNHTIHVVWTGATLSKQLF

SEQ ID NO: 158365 - protein, 224 aa, Glycine max
  Clone ID: PAT_MRT3847_114021C.1.pep
MQTHQNPPTLDSDPQLPQIKIHHPSSPRHHHPSSAATPTPTAGARRKIGVAVDLSDESAYAVRWAVQHYIRPGDAVILLHVSPTNVLFGADWGSIDLSINTDPNSDEDAVSAVNSNDHANAGNSKRKLEDDFDAFTASKAADLAKPLRESQIPFKIHIVKDHDMKERLCLEVERLGLSAVIMGSRGFGAVRRGSDGRLGSVSDYCVHHCVCPVVVVRYPDDKDV

SEQ ID NO: 158366 - protein, 255 aa, Glycine max
  Clone ID: PAT_MRT3847_114022C.1.pep
MQPHQNPPALDSDPQLPQIKIHHPASPRHHHPSSAGAATPTPTAGARRKIGVAVDLSDESAYAVRWAVQHYIRPGDAVILLHVSATNVLFGADWGSIDLSINTDPNSDEDAVSAVNNSNDHNSKRKLEDDFDAFTASKAADLAKPLRELQIPFKIHIVKDHDMKERLCLEVERLGLSAVIMGSRGFGAVRRGSDGKLGSVSDYCVHHCVCPVVVVRYPDDKDAVAAATTAEPVVAVKDGDEGEAVVQPVPHKKAD

SEQ ID NO: 158367 - protein, 65 aa, Glycine max
  unsure (1)..(65): unsure at all Xaa locations
  Clone ID: PAT_MRT3847_114023C.1.pep
PNXYSVIIATSSRKTDSTNLEKWERNEIQLKMNQSYKLQESRKWSYMSITQKHIHLPNLSHICCP

SEQ ID NO: 158368 - protein, 113 aa, Glycine max
  Clone ID: PAT_MRT3847_114024C.1.pep
TPKENILPLQATDSTCDSTTHIGTYVYHPCALVCHISPQRPYRKYHALTRTTLNTMAHSCLQLQRSLLEPSRSTPTCTQSPRPLSKSVLRHHQRPLYLHRRPTPVHLVTASKP

SEQ ID NO: 158369 - protein, 146 aa, Glycine max
  Clone ID: PAT_MRT3847_114025C.1.pep
EYRSNNAEACPDAAEDVLDRSSSQSWGSSKLEEQPKTAEQLPAEQIPLRKARVSVRARSEAPMISDGCQWRKYGQKMAKGNPCPRAYYRCTMAVGCPVRKQVQRCADDKAVLITTYEGHYNHPLAAGRTGMANTTSTAATMLLSGS

SEQ ID NO: 158370 - protein, 60 aa, Glycine max
  Clone ID: PAT_MRT3847_114026C.1.pep
MGGGERIKGLMQAGRAEDQTTESKMLTKALEEEQRKEEKDSMESRKFFFEYEEEPNRQRD

SEQ ID NO: 158371 - protein, 40 aa, Glycine max
  Clone ID: PAT_MRT3847_114027C.1.pep
LISQLFNLLRHYLHSNPSLSHNIYHTILIYTFYHQLNTPL

SEQ ID NO: 158372 - protein, 236 aa, Glycine max
  unsure (1)..(236): unsure at all Xaa locations
  Clone ID: PAT_MRT3847_114028C.1.pep
HEYGTALMKXTYVIPCQIYGTQKEKKDPHADEILYLMQNNEALRVAYVDEKTTGRDEKEYYSVLVKYDQQLQKEVEIYRVKLPGPLKLGEGKPENQNHAIIFTRGDAVQTIDMNQDNYFEEALKMRNLLEEYRSYYGIRKPTILGVREHIFTGSVSSLAWFMSAQETSFVTLGQRXVLANPLKVRMHYGHPDVFDRXFWFLTRGGISKASRVINISEDIFXGFNCTLRGGNGTHHE

SEQ ID NO: 158373 - protein, 46 aa, Glycine max
  Clone ID: PAT_MRT3847_114029C.1.pep
IRVRHDRGVLAARTLPKVNHKIIMEVQHWWRLRFYFRNANMAKGIP

SEQ ID NO: 158374 - protein, 256 aa, Glycine max
  Clone ID: PAT_MRT3847_11402C.1.pep
LGNQGCSRCGFPRESILILTDDMEERNPQKFPTKYNILKAMRWLIEGSQSGDSLVFQFSGHGCQELDTNGDFDELDERDEAICPVDWEKQGIILDDDINAAIVRPLPYGAKLHAIIDSCNSGTVLDLAYVWSQRDTWDYQYGGPDKDTSGGLAICISGCGDYQSSKEIPVLSGGGGGNAVTGVFTYSFIYTMLNEPAGLSYGGLLSSMRSTIRGMLNNPNASLFNTDFTLAPRQDLQKPQLSSSMEFDVYTARVEL

SEQ ID NO: 158375 - protein, 46 aa, Glycine max
  Clone ID: PAT_MRT3847_114030C.1.pep
WPIPSSLINALISTLIPSFIYRVSTAPLPFVTKTDNSIRPIHSSSS

SEQ ID NO: 158376 - protein, 41 aa, Glycine max
  Clone ID: PAT_MRT3847_114031C.1.pep
KIIPVQNGSISLVRQVAFTKWLKNALSIFLKRVNEWVRSHL

SEQ ID NO: 158377 - protein, 89 aa, Glycine max
  unsure (1)..(89): unsure at all Xaa locations
  Clone ID: PAT_MRT3847_114032C.1.pep
PKDXFAEXVLCKSDTATGQYDXEWAPINCRVHRQPIHITEGNYVRKQDVSIEYDACTIPNDWGSLVGAQGGNHKQIGGXHVGGSKGRLR

SEQ ID NO: 158378 - protein, 38 aa, Glycine max
  Clone ID: PAT_MRT3847_114033C.1.pep
MVEGETLRKTQSSFIKKILHKINIFSFYDSGGIGPSTI

SEQ ID NO: 158379 - protein, 69 aa, Glycine max
  Clone ID: PAT_MRT3847_114034C.1.pep
KSIVVSAKERKGSNNRNSKIVRFTQKASARVLEREREREITGCRRAVIGAGDGGESCDSATDGSYARAT

SEQ ID NO: 158380 - protein, 38 aa, Glycine max
  Clone ID: PAT_MRT3847_114035C.1.pep
LVMSFLDLSRDVLMRWSSQYERNRPKLYVSSGIARCTS

SEQ ID NO: 158381 - protein, 111 aa, Glycine max
  Clone ID: PAT_MRT3847_114036C.1.pep
KKNPPGGQNGKALFPRGLGDLFKQGAPPVFPPEKGEWGPPNLFWLGPPLGPPGFSLFAFGLFVVWDFWGVTFFPRDPLCPWLRPAFNRLPLRKTGTPAGPGPEFPGRPPGP

SEQ ID NO: 158382 - protein, 58 aa, Glycine max
  Clone ID: PAT_MRT3847_114037C.1.pep
AAQQWVVDFLRDRSCSSGKDIAEKFGLWRVRYRDNGQIAWICRRHMYARSAEIIEVPV

SEQ ID NO: 158383 - protein, 140 aa, Glycine max
  Clone ID: PAT_MRT3847_114038C.1.pep
ILDSLIMDSLQRQSWVEPIRNPPPATTPTPFSSVSRRARSVTIPTSATRLGHTDAWRNSRVILSRTQRTEAVAGEAVLITNEIPRLSPWLPGVPQRAAHRGEEEGTTAPRRRLPSLWGGAVFFFDHPGDPPFYFWKRGFK

SEQ ID NO: 158384 - protein, 56 aa, Glycine max
  Clone ID: PAT_MRT3847_114039C.1.pep
REPAETKNNRGALKLVNCSCLTYNIFLDNIFNSFSYCSKTIYPAPTLPPVPSCSAV

SEQ ID NO: 158385 - protein, 62 aa, Glycine max
  unsure (1)..(62): unsure at all Xaa locations
  Clone ID: PAT_MRT3847_11403C.1.pep
GRPARTFKETLYXILXVFNPFNNMGNEPILLPGININKFTFYLAGTNVETTTHGLYFLDQIY

SEQ ID NO: 158386 - protein, 48 aa, Glycine max
  Clone ID: PAT_MRT3847_114040C.1.pep
HTIQKKRNEWFCCISNPGNSISTLISKLSSTNEINTTKKNLETEETYQ

SEQ ID NO: 158387 - protein, 34 aa, Glycine max
  Clone ID: PAT_MRT3847_114041C.1.pep
GISKTVTGEPISLSEQEFVDCDTRYSEGCNGGTY

SEQ ID NO: 158388 - protein, 83 aa, Glycine max
  Clone ID: PAT_MRT3847_114042C.1.pep
QNGYVGSCISTFLLRRLILVGNLSLISLHTKKVTLLGTLTFHSSEKVPSHQTCTHSRLCIHPIHLPYKSTYLLDPGECWCLLN

SEQ ID NO: 158389 - protein, 113 aa, Glycine max
  unsure (1)..(113): unsure at all Xaa locations
  Clone ID: PAT_MRT3847_114043C.1.pep
EPRVLGNRQQPAQPLHVDAVGAHXKWSFLXGALNCLSSXCHFASSFYILLCSSVIRVXXHQTDHCLMRVVGVGXSWPLLGAFGWLESSCLSTALLGISGRSHLLSSDIWGCFW

SEQ ID NO: 158390 - protein, 82 aa, Glycine max
  unsure (1)..(82): unsure at all Xaa locations
  Clone ID: PAT_MRT3847_114044C.1.pep
DEKLATQIASRAQSLVEGSGSIRVWEYMPIADVGGLQELLXCDSNXARTMAWSERMSVGWMQRELMXILSYAMGITEDQIYT

SEQ ID NO: 158391 - protein, 37 aa, Glycine max
  Clone ID: PAT_MRT3847_114045C.1.pep
LPISISSSTTRKPCTSLLAVSMPSHDVLRSSSSTLEP

SEQ ID NO: 158392 - protein, 89 aa, Glycine max
  Clone ID: PAT_MRT3847_114046C.1.pep
VNPLAHLVDPQARREQKEYKLKFRSVSTVKKCCGSLMTHIGASSCPSQPSENRLRFQTVRTMYGVLGLRVRQFLVKERNISLHLKCSKF

SEQ ID NO: 158393 - protein, 73 aa, Glycine max
  Clone ID: PAT_MRT3847_114047C.1.pep
HKSQDTLYNQNKCRYKQPKYTKLIALFMSRKIKNKKEKLIALFFLCIYDWRIYKKFKNKIKRSWSEFFMDHFN

SEQ ID NO: 158394 - protein, 53 aa, Glycine max
  Clone ID: PAT_MRT3847_114048C.1.pep
MVGVQGSSTNMDFSQIDISGLQVPEPPPPKVKYRICPDPTAIICRLRRSRRRR

SEQ ID NO: 158395 - protein, 176 aa, Glycine max
  unsure (1)..(176): unsure at all Xaa locations
  Clone ID: PAT_MRT3847_114049C.1.pep
MNLNHYHHHVPPYEHMLKESINRFFAEHRRGATDFADFTSIFSRMIHATPEPPIPLLWFYAALEFRATRDPSRRARDLFHLLVSCSGARGSTKQIAALAPLLFVLHRLALLQKXELLKTELNGLVEGVVSYCSICCGSENCRDDDVAGLEFGDLIKGWMGDDHDHDGGGFKGFSLL

SEQ ID NO: 158396 - protein, 143 aa, Glycine max
  Clone ID: PAT_MRT3847_11404C.1.pep
MMHMTFYWSRKVNLLIDSWKTNDWTDYLLTLLACLVVAAFYQFLENRRIRLKLIGSGKPFPAEIEAPLLRRKLAGNRVKVGVKVAGAFLFGLSSAVGYLLMLSVMSFNGGVFVAIVVGLAVGYFFFRNEGEDSLVVDTSCACA

SEQ ID NO: 158397 - protein, 107 aa, Glycine max
  unsure (1)..(107): unsure at all Xaa locations
  Clone ID: PAT_MRT3847_114050C.1.pep
LFHCRIFXXXXXGASGWNSYSSLTGGARGPILPEDYHIVYKLAYFDTGTCAXRVVHAWXASAKGSYEDTHDISHLTCSDLLRAPGVQTPVSARSSTVIHDRRSPETL

SEQ ID NO: 158398 - protein, 92 aa, Glycine max
  Clone ID: PAT_MRT3847_114051C.1.pep
YCRSNVRWYSAAQPESHTLPCVWLHGAPRNCPVGVKHARDIIVDESVAGVCHTCAGEVSRHAHKSGAQGMLRSDHAWKGEKPRGTAAAPCLN

SEQ ID NO: 158399 - protein, 85 aa, Glycine max
  Clone ID: PAT_MRT3847_114052C.1.pep
LENQTCKLGQEIPSQDNLVLSKAKCCTLEISHCVRCRSYRGSILLNRSSFYSYPLNCHIFYWTRLQICNTTCTYYPMHLAFEELH

SEQ ID NO: 158400 - protein, 46 aa, Glycine max
  Clone ID: PAT_MRT3847_114053C.1.pep
LYSIFLSSVCSYHTIVKQSCFLIANYLILNISNFPYQSNTICNYFF

SEQ ID NO: 158401 - protein, 108 aa, Glycine max
  Clone ID: PAT_MRT3847_114054C.1.pep
CPCFLCFLFFFLGNTVSTRHKKRGGKPKGIFYFPPKTPDTLTPRVLLSPGHHKKTPPEYPQICRGKGFPPKPFFPSPPDKKNRVVKTPRAKRNQIFSAPKKIFPFVLK

SEQ ID NO: 158402 - protein, 69 aa, Glycine max
  Clone ID: PAT_MRT3847_114055C.1.pep
AVQGTRTVERQGDVVEQQTDSAYGNISKVFKDLDNVSGSANELKSEKVEADLSPTEVGNKQNSEDPHYM

SEQ ID NO: 158403 - protein, 28 aa, Glycine max
  Clone ID: PAT_MRT3847_114056C.1.pep
KKALPKLQDFKYRFSTTKLETGDARALY

SEQ ID NO: 158404 - protein, 140 aa, Glycine max
  Clone ID: PAT_MRT3847_114057C.1.pep
PNRSLIGERVENMSLSPEITDVDGTDFLKAQLLRMPPNYNKVVAVGNGGANSKPPWLDHHHHEGKTLLCDHDNIINTFKNLIICDHDVEPTDEDDDDGGIHTCPNVFETESDQRKKILMAIIRRRHLSAAAGIGNNKSKV

SEQ ID NO: 158405 - protein, 89 aa, Glycine max
  Clone ID: PAT_MRT3847_114058C.1.pep
KSPKNRPERNPRIVNATRNYAKLGRNIKRIRTKTRSFGGNTTKNDNLTTLKDRIETLTLNYKGYERGTIKGSNGRGKWELNETRTRLKN

SEQ ID NO: 158406 - protein, 54 aa, Glycine max
  unsure (1)..(54): unsure at all Xaa locations
  Clone ID: PAT_MRT3847_114059C.1.pep
DLERTPGKFHPLFKKPMFEPXRAPLQKFPPLPDEWALKNFSPRPGPIQFFGPGF

SEQ ID NO: 158407 - protein, 132 aa, Glycine max
  unsure (1)..(132): unsure at all Xaa locations
  Clone ID: PAT_MRT3847_11405C.1.pep
MEKQMFPTKFLLVLTTIWFALSNFAFKASADDVTQTPITCLNCSKCEYPCQQQPSPPLPYVAPPPPQSPTPYGYSIYXAPPPXKEKEKDPSKCPPAAGVQCCXPPDPCVFSPPNPYTPVPSGEGQRSASMLL

SEQ ID NO: 158408 - protein, 57 aa, Glycine max
  Clone ID: PAT_MRT3847_114060C.1.pep
GNKQMGLEPKPPLLIGSFHRLVFLGKIKTKKPFHRKRFYLSGFYLPLLFIPFANLLK

SEQ ID NO: 158409 - protein, 105 aa, Glycine max
  Clone ID: PAT_MRT3847_114061C.1.pep
SRNFSSYNSKDELTIEEEAERKVGWLLKTIFFVTAGVAGYHFFPYMGDNLMQQSVSLLRVKDPLFKRMGASRLARFAVDGKFCYLYLSVTNCLLLLFYDPYFFGA

SEQ ID NO: 158410 - protein, 45 aa, Glycine max
  Clone ID: PAT_MRT3847_114062C.1.pep
GYRATEGGKPTVPVPPSSPRFICHATVLLESHQQSQSTHPHCRCP

SEQ ID NO: 158411 - protein, 36 aa, Glycine max
  Clone ID: PAT_MRT3847_114063C.1.pep
VNYKIFLERKFDYLLKKKMRILKSHPFFKKCNILCD

SEQ ID NO: 158412 - protein, 59 aa, Glycine max
  Clone ID: PAT_MRT3847_114064C.1.pep
YHCGSVVFDLCTLDSPTSGIFFKLTYRHTFSDVHLLEILAHFLVVRTEAIFVVCFYFWK

SEQ ID NO: 158413 - protein, 300 aa, Glycine max
  Clone ID: PAT_MRT3847_114065C.1.pep
MASNHLLTLTRRLRRRLPSLRLFSTFPAATKSPSPPAPTPPDAMLYDRLAEATKAKLRRLDNPDPRFLKHGSPVPALADHTRVLGAPETRVTTLPNGLRVATESSLASQTATVGVWIDAGSRFETEDGRVGAHFLEHMIFKGTAKRTVRELEEEIENMGGHLNAYTSREQTTYYAKVTEKDVPKALDILADILQNSKFDEKRISRERDVILREMEEVEGQMEEVIFDHLHATAFQYTALGRTILGPAQNIMTITKDHLQNYIQTHYTAPRMVGAASGAGKHEEIGEQGKTLVTRGETDAT

SEQ ID NO: 158414 - protein, 51 aa, Glycine max
  Clone ID: PAT_MRT3847_114066C.1.pep
AALFFFFGNPNTMFIQLKRVDMGPNTGNYKIGETQISFHALHIQDANLIGG

SEQ ID NO: 158415 - protein, 128 aa, Glycine max
  Clone ID: PAT_MRT3847_114067C.1.pep
GSPPKTSPFLRREGPTKGQTITPLLYLEKSCLDQGILHKRMFPVGGSHFCFPFYIKRVFFSRFFLDIKKKFAFYIFENMFPFFPKAKLFPPFFLWGFVNRPPGISHKKGVEFSPFNTGQKNKMKKTYN

SEQ ID NO: 158416 - protein, 73 aa, Glycine max
  Clone ID: PAT_MRT3847_114068C.1.pep
AITCDMSDFRKDWLSLLLIVTSSRSSINIRHLEKATVSTGKEGLLSVGNAAYNWSRCVDELESVLSKHGSLRR

SEQ ID NO: 158417 - protein, 178 aa, Glycine max
  unsure (1)..(178): unsure at all Xaa locations
  Clone ID: PAT_MRT3847_114069C.1.pep
MDVKMKGITALHTLLQFLLFSAIFPLSFSAQPRNAKKLSSDNHHRLSSSAVFKVQGNVYPLAXYYTVSLAIGNPPKVYDLDIDTGSDLTWVQCDAPCQGCTIPRNRLYKPNGNLVKCGDPLCKAIQSAPNHHCAGPNEQCDYEVEYADQGSSLGVLLRDNIPLKFTNGSLARPILAFG

SEQ ID NO: 158418 - protein, 66 aa, Glycine max
  unsure (1)..(66): unsure at all Xaa locations
  Clone ID: PAT_MRT3847_11406C.1.pep
GKLCFKTTFTRKINLFTEESSTFKAIFLVFTENPSITFYHQRKVNVFCVFSXXXXXXKXXKKKKKK

SEQ ID NO: 158419 - protein, 73 aa, Glycine max
  Clone ID: PAT_MRT3847_114070C.1.pep
MGTPSLRPWSLLRDGNTEIQMCNSCGSSHKKKHCMTLVLPSPSAVATPREVLAAASYTFTFLFMLTNSNCSHV

SEQ ID NO: 158420 - protein, 58 aa, Glycine max
  Clone ID: PAT_MRT3847_114071C.1.pep
KPVRRKEADKRISGTGRENKVDNLRELVGGGKLCINNAKESTKDWLDPHCQESEFERR

SEQ ID NO: 158421 - protein, 137 aa, Glycine max
  unsure (1)..(137): unsure at all Xaa locations
  Clone ID: PAT_MRT3847_114072C.1.pep
MDPFHQIEQQEDEWDTDGFVIPSLGIEDSDQNKPHVHDVESSNSAAQAKKEENIYLGPHGAPPSLAKQQELNSSNRKQKFKQKLKEADKRISGTGRANKVDNLRELVGGGKXATTMQRNQPMDWLDPHCXESEFERR

SEQ ID NO: 158422 - protein, 60 aa, Glycine max
  Clone ID: PAT_MRT3847_114073C.1.pep
THGTISEDGHIVDAVLSNTARREHYRPPEPEMIIEAISGAGSQAMTSRHRVSLPRWSARE

SEQ ID NO: 158423 - protein, 39 aa, Glycine max
  unsure (1)..(39): unsure at all Xaa locations
  Clone ID: PAT_MRT3847_114074C.1.pep
RTXMXNGSVXMSLXHKFGLCXXQLXPINXSTLISHLRXX

SEQ ID NO: 158424 - protein, 160 aa, Glycine max
  Clone ID: PAT_MRT3847_114075C.1.pep
EKFLEEEMEEECRNSSTLPQNESIQRQLGQETSNSSILSQAAQNIIMHQFQSLMAQGISGSSHQPLVSCSAVPVTVQGLPSSSSQPNGNFGQESSSSRRPQNESLERPHFNVNERQFGQERSNSSILPQTQNIDMHPQFQSLMAQGSTGPSHQPLVSSIR

SEQ ID NO: 158425 - protein, 129 aa, Glycine max
  unsure (1)..(129): unsure at all Xaa locations
  Clone ID: PAT_MRT3847_114076C.1.pep
MTRVISNLLLLLGIVVALFCIIRASEEPPKIEEEENVIVLTKDNFEHVTKTYEFVLVEFYAPWCGHCKALAPEYAKAATQLKEEESDIKLGKVDATIHSDLASNFEVRXYPTLKLFKNGKPTEYRGGRD

SEQ ID NO: 158426 - protein, 158 aa, Glycine max
  unsure (1)..(158): unsure at all Xaa locations
  Clone ID: PAT_MRT3847_114077C.1.pep
NATIRANIAYGKKGNETEAEIITAAKLANAHGFISGLQQGYDTVVGERGIQLSGGQKQRVAIARAIINSPKILLLDEATSALDAESERLXKDALDKVMVSRTTVVVAHRLSTIKNADVIAXVVKNGVIVEKGRHETLINIKDGFYASLVQLHTSATTA

SEQ ID NO: 158427 - protein, 149 aa, Glycine max
  unsure (1)..(149): unsure at all Xaa locations
  Clone ID: PAT_MRT3847_114078C.1.pep
MASKRILKELKDLQRDPPTXCRSCPVVPCEYPFPAPLSLVQMTQPYAGGVFLVTIHFPPDYPFKPPKVAFRTKVFHPNINSNGNICLDILKEQWSPALTISKVLLSICSLLTDPNPDDPLVPEIAHLCKTDKFKYESTARSWTQKYAMG

SEQ ID NO: 158428 - protein, 50 aa, Glycine max
  unsure (1)..(50): unsure at all Xaa locations
  Clone ID: PAT_MRT3847_114079C.1.pep
XQXXPYXTXXSSHIQCHAIXXXEYRNQHIXSXLXCIXXIXXTAXSXCVXI

SEQ ID NO: 158429 - protein, 145 aa, Glycine max
  unsure (1)..(145): unsure at all Xaa locations
  Clone ID: PAT_MRT3847_11407C.1.pep
RILVYLKVSAASVGPTXCILSILALPSREAYHYVEVTVASQCIETCFDQFHGVDVDNERSLSLYNPSRNLKTGTPPDLSDVRYFKTLDLFGYFFGPLTVIVHYPDCDFHYYANSFPPSIIFSRPCPSIIFSRPCKHINQPKGSKP

SEQ ID NO: 158430 - protein, 61 aa, Glycine max
  Clone ID: PAT_MRT3847_114080C.1.pep
MAKPESQEHPWISNAVPLLVVLLIALHVFALVYWIYRLATDNKPQQQQQLQQQHQQRTKAH

SEQ ID NO: 158431 - protein, 67 aa, Glycine max
  unsure (1)..(67): unsure at all Xaa locations
  Clone ID: PAT_MRT3847_114081C.1.pep
TKESCTLSYSKEKKKFKVIINXKRVIINCMCCWYNTKTIKYTIQQSNDTLSVVSTGSKLPKKTYYIF

SEQ ID NO: 158432 - protein, 44 aa, Glycine max
  Clone ID: PAT_MRT3847_114082C.1.pep
CASEGPVLISSSHILLVKLPYACVDARGQVLSLFSALFMHLVGE

SEQ ID NO: 158433 - protein, 29 aa, Glycine max
  Clone ID: PAT_MRT3847_114083C.1.pep
LNPYKLCCHTYVICMSSRSWRDSFPPLQR

SEQ ID NO: 158434 - protein, 483 aa, Glycine max
  unsure (1)..(483): unsure at all Xaa locations
  Clone ID: PAT_MRT3847_114084C.1.pep
MYSATASNTFFLLSCFLLFCLLSAPSCVSMFSGIETGDLEKRDDLFPQILRDEAVARLYELGKVSDASGYLERTFLSPAFMXAIDLIRKWMEDAGLRTQEEXMGNVHGLVDGANGNAEAVXLGSHMDTVGNAGMFDGSLGIVSAISAWKAMHVNGKLQKLKRPVEVIAFSDEEGVRFQTTFLGSGAIAGILPGTTLEISDKREVMIKDFLKENSMDITEESLLKLKYDPKSIWGYVEVHIEQGPVLEQVGFPLGVVKGIAGQTRLKVTVRGSQGHAGTVPMSMRQDPMAAAAEQIVVLESLCKHPEEYLSYDGHCSDSTVKSLSSSLVCTVGEISTWPSASNVIPGQVTYTVDIRAIDDLGREAVIYDLSKQIYQICDKRSVSCIIEHKHDAGAVICDSDLSSQLKSAAYSALKKMEGDIQDEVPTLMSGAGHDAMAISHLTKVGMLFVRCRGGISHSPQEHVLDNDVWAAGLATLSFLENLS

SEQ ID NO: 158435 - protein, 101 aa, Glycine max
  Clone ID: PAT_MRT3847_114085C.1.pep
KPMLALSSLPIPTFPRVKLKYLNCGTVRRSTISSGARVSATAGSSYAVALSDMAAVNSTLYATTADIEKIDEIFSDAHVLDYFDNRTLSWDKKLKLIDEIA

SEQ ID NO: 158436 - protein, 41 aa, Glycine max
  unsure (1)..(41): unsure at all Xaa locations
  Clone ID: PAT_MRT3847_114086C.1.pep
SSPNVIIXTFXGICMYXLXXXXNXLLXEXYXVQXLDXRQLY

SEQ ID NO: 158437 - protein, 43 aa, Glycine max
  Clone ID: PAT_MRT3847_114087C.1.pep
VVALVHHQFHFGFWFTRPSQIDTHYRKTNKLRTQIREKGCYLC

SEQ ID NO: 158438 - protein, 51 aa, Glycine max
  Clone ID: PAT_MRT3847_114088C.1.pep
EKLNFLSVLTKSISYKSKILSYLLVPNQNSKINPNIRKLFERKKKDESMNE

SEQ ID NO: 158439 - protein, 126 aa, Glycine max
  Clone ID: PAT_MRT3847_114089C.1.pep
DTVMLLLIAGVVVGLSVVSFVVTKFRAPGFNVEGKHVFITGGSSGLGLALAKKYAQQGAKVSIVARSLDKLEESKKEIEDIRKNTDARVFIQSCDVTDFASVQKAVDAANEFHGRATDHVVCSAGF

SEQ ID NO: 158440 - protein, 73 aa, Glycine max
  unsure (1)..(73): unsure at all Xaa locations
  Clone ID: PAT_MRT3847_11408C.1.pep
LDTFSDDQQLFVLMVELPASCQIFTPLLPRINYXVFEPFPYDPVSGGPAXADQFLGITASLQTLGFICIPPPL

SEQ ID NO: 158441 - protein, 95 aa, Glycine max
  Clone ID: PAT_MRT3847_114090C.1.pep
MNMERSLDRSREPGPKKPRLIEELNARQLPQRPTAVTTLPSTRFRAYGRDSEISDLGRGGGGGYQPQPPPHQELVTHYKTALAELTFNSKPIITN

SEQ ID NO: 158442 - protein, 114 aa, Glycine max
  unsure (1)..(114): unsure at all Xaa locations
  Clone ID: PAT_MRT3847_114091C.1.pep
RTTSLDFLDLSHCGFQGSIPPSFFNLIHLTFLDLSVNNLNGSIPSSLXNPSTLSFMNLEANHLSGQIPNVFPQSNNFHELDLRHNKIEGELPSTLSNLQHLIHLDLSHNKLEGP

SEQ ID NO: 158443 - protein, 181 aa, Glycine max
  unsure (1)..(181): unsure at all Xaa locations
  Clone ID: PAT_MRT3847_114092C.1.pep
LMGCDHRVMYLISEISGSESLRNEGRIDAMTVCTHVSALGNHVEYTDPADPTVECPYCAATGAITPDVPTKIVTALLRLAAPVYLCKLVAGTNRAHCSICGPVCIHHXTLACIPTGPGGSDRSLIWPLLIAAAHSTPSSSSSQVLNERAPAVDESAVSGRFGRMCQLLNESWRLTDDCDEI

SEQ ID NO: 158444 - protein, 52 aa, Glycine max
  Clone ID: PAT_MRT3847_114093C.1.pep
TPWGHCLTQIYLQSYPPFKLSINEVLFSLASRPNIYDHEPPYAQSKPASIFY

SEQ ID NO: 158445 - protein, 169 aa, Glycine max
  unsure (1)..(169): unsure at all Xaa locations
  Clone ID: PAT_MRT3847_114094C.1.pep
KHRGRSSEPGSRPSSPSINKRXPXPTTGGVFEKGPRTPPPTAPTEEQPGNTRENRRTDRQGEGQRSPPDTGKPTPKTGGAGGRTGPPAKPTKPTASPPTPTTPPATRAAPTTTGARPTKARPTEPTRAEPRQPPTTAATTATNRTTTPPGAKTSTTPKPPRTRNREQRN

SEQ ID NO: 158446 - protein, 63 aa, Glycine max
  Clone ID: PAT_MRT3847_114095C.1.pep
PLFTFSLPPKLRGNFTFETKPLKAFLNIIPLTKGEKGPAFFGPSQSFGHRPHNYFFGGVFLPF

SEQ ID NO: 158447 - protein, 90 aa, Glycine max
  Clone ID: PAT_MRT3847_114096C.1.pep
PCRGDQKKMIANWDRNIPRGGRRKRNLICLGKNFFDEKLKKGPWFQLPEKESGAVGGLLQTPKEEETLLRNYECCSGHDQPQGQNLGGPG

SEQ ID NO: 158448 - protein, 79 aa, Glycine max
  Clone ID: PAT_MRT3847_114097C.1.pep
KYDSFYFPFYIFVINQLLCHKQPSNNNDTTHHHKPSTTLFPLAPLLKFNDSSVVNGGGAQLQLQGARRRRRRRRRRGCC

SEQ ID NO: 158449 - protein, 123 aa, Glycine max
  Clone ID: PAT_MRT3847_114098C.1.pep
EGEANARRTAFHFLRLPPTQIAYNRRRGKLDSKVLLRPTCAHIKPRRISNLKRAKGTHASCHSQTQYADRGESETRPDTIDHKSSTQEKWKKRDHKRTGAKLLGKKELERACNGEDWENKTPG

SEQ ID NO: 158450 - protein, 61 aa, Glycine max
  Clone ID: PAT_MRT3847_114099C.1.pep
AIEKKNKKQMVKYEIWSMRIATAVFAFALMVPSDSADDVDVLSEDNFEKEAGQDRGALVEF

SEQ ID NO: 158451 - protein, 70 aa, Glycine max
  Clone ID: PAT_MRT3847_11409C.1.pep
AKFLEVACSSFELRDKYLVQGERRKLSLFSRENQVQPKEWSSRTEQETSRCYTFVQLNVQRLAYLHIGYS

SEQ ID NO: 158452 - protein, 169 aa, Glycine max
  Clone ID: PAT_MRT3847_1140C.1.pep
FGFKPCLDTEGNGLLWQVCIFAYGQTGSGKTYTMMGKPDAPDLKGLIPRSLEQIFQISQSLKDQGWKYTMHVSLYEIYNETIRDLLSLNRSSGNDHTRMENSAPTPSKQHTIKHESDLATLEVCSVDEISSLLQQAAQSKSVGRTQMNEQSSRSHFVFKLRLGGRNERT

SEQ ID NO: 158453 - protein, 210 aa, Glycine max
  Clone ID: PAT_MRT3847_114100C.1.pep
MASSKSKVRRACSFTNLLLSCLNFSIFILSASSFAPTILLKMPPTSFGMALLMVSGISLLSSFVGFYSQLTHFCFLTHISLLLASLIGQVLTILALFTKEKASMSLLKSPRDPKEAKVLVRLECGALMAMCMLQCVVLMLSCAVHSCWVKDYEELEAEKAASARKRSRRIAEVQEESMANATKMAEIKAKELDEKMKSKYGQWVKTDFEP

SEQ ID NO: 158454 - protein, 88 aa, Glycine max
  Clone ID: PAT_MRT3847_114101C.1.pep
YDPFGLSKKPEDFSKYQAFELIHARWAMLGAAGFIIPEAFNKYGANCGPEAVWFKVCKLYNNFHCVKFTNTLFFYDTQQMKFNRSYKC

SEQ ID NO: 158455 - protein, 100 aa, Glycine max
  unsure (1)..(100): unsure at all Xaa locations
  Clone ID: PAT_MRT3847_114102C.1.pep
WEKLILKDPXDLSITNAVSLKTAARENLIRXGYNIVGIIGDQWSDFLGGQKGERRTFKLPNXPCNKLSSSFTFQXFRLFXIYLYVIRWVQIGALVSIYVV

SEQ ID NO: 158456 - protein, 72 aa, Glycine max
  Clone ID: PAT_MRT3847_114103C.1.pep
RAESARGDQPRDLITNLCIHPSPPTRCRHSSSPCQSVTKSRQPAVQIPSSLSKWIIQLAGKLRHRQGASREP

SEQ ID NO: 158457 - protein, 73 aa, Glycine max
  Clone ID: PAT_MRT3847_114104C.1.pep
GWLFLGFNFKLGNLGPPPPFFGSAGGKRFECAHLCILVLRVWPTPLYKLHAYFCPRWAFVIVSQLRFGFDYKA

SEQ ID NO: 158458 - protein, 38 aa, Glycine max
  Clone ID: PAT_MRT3847_114105C.1.pep
FPSCGIKKNSTFQQNFVVPACFITLCNLAFIFVRGPYN

SEQ ID NO: 158459 - protein, 271 aa, Glycine max
  Clone ID: PAT_MRT3847_114106C.1.pep
MNQWGCKLRTKFWDQIETCRQNLEAIHHLKGPANVAHYTKIQEKLNLLIAKEESYWRQRSKVFWLREGDINSKFFHSSTKARKTVNKISSLSRDDGVMVHSHKDMSDVVVSYFSNFFQANDNCIDILPIINNFPHSVSFYNNDILLSPFTLEEFRVALFHMNSQKSLDPSGLKTTFYKIFWHLCGPEVFYSSITWLETGSFPPEGFNMGLSSLIKYHERRGDIHGVKASGQLINFQKSETEKYLGLPSIIGRRKKAIFGFRKDRLWNDINL

SEQ ID NO: 158460 - protein, 72 aa, Glycine max
  Clone ID: PAT_MRT3847_114107C.1.pep
RPRLISQLQTLSDLDRQVCQTQHQAHATTIPLPLYLSAPVSYLQIHHCSLLKKRVTPFTYFTFQTVCLWMYI

SEQ ID NO: 158461 - protein, 67 aa, Glycine max
  unsure (1)..(67): unsure at all Xaa locations
  Clone ID: PAT_MRT3847_114108C.1.pep
MSKGPGLYSDIGKKARDLLFKDYHSDQKFTITTYSPTGVAITSXGTKKGDXXVADVNTQLKNRNITT

SEQ ID NO: 158462 - protein, 320 aa, Glycine max
  Clone ID: PAT_MRT3847_114109C.1.pep
MVLLYLPRFPLYLVTLSHSLPRRTYSKTTLLRPPKSTLTTSQPLTVNPSPTELSLEKLFVPPETTVSLESSRVLNGSNILLSNYANDAQVLQAEFVKSSVKTEDCPSDGIPEFALVGRSNVGKSSLLNSLVRRKKLALTSKKPGKTQCINHFRINNSWYLVDLPGYGYASAPHELRMDWEKFTKDYFLNRSTLVSVFLLIDASIPAKQIDLDYASWLGQNQIPMTLIYAKSHKRKKKKNGGRRLGQNQIPMTLIFTKCDKRKKKKNGGKRPEDNVNDFQDLIRGFFQSVPPWIMTSSVTNQGRDEILLHMAQLRNYWLKH

SEQ ID NO: 158463 - protein, 60 aa, Glycine max
  unsure (1)..(60): unsure at all Xaa locations
  Clone ID: PAT_MRT3847_11410C.1.pep
XAXVRXLGXRLXFVXIVLXMPLVXLXXXXXXXFTIKTIXXXVSFSEKPNXXSXFSXXXYK

SEQ ID NO: 158464 - protein, 277 aa, Glycine max
  Clone ID: PAT_MRT3847_114110C.1.pep
SPSLTLEAYSKTTFLRPPKSTLTASEPVSVNPSPTELSLEKLFVPPETTVSLESSRVLNGSNILLSNYANDALVLQAEFVKSSVKTEDCPSDGLAEFALVGRSNVGKSSLLNSLVRRKKLALTSKKPGKTQCINHFRINNSWYLVDLPGYGYASAPHELRMDWEKFTKDYFLNRSTLVSVFLLIDASIPAKQIDLDYASWLGQNQIPMTLIFTKCDKRKKKKNGGKRPEDNVNDFQDLIRGFFQSVPPWIMTSSVTNQGRDEILLHMAQLRNYWLKH

SEQ ID NO: 158465 - protein, 120 aa, Glycine max
  Clone ID: PAT_MRT3847_114111C.1.pep
MAISSSSEIGWSWRVLCQRVNPAIPNTPLFLQIPKSTRFTGSSSVVARAWDPKTASSQEEDLVYVGKLVAGSFAGGAAIKYGSALFPEITTPNLVLALLLILTPVLVVVFLLIKESRTNP

SEQ ID NO: 158466 - protein, 68 aa, Glycine max
  Clone ID: PAT_MRT3847_114112C.1.pep
RRGSQMEFMQSHIPINSITSVVFENPGYVCSCSESTRWKTTTLWIPNRSSTLSPQSQSQSQSNNPKFI

SEQ ID NO: 158467 - protein, 37 aa, Glycine max
  Clone ID: PAT_MRT3847_114113C.1.pep
KLNLLLSSQVAISTIKFAQSPNWGKELCFDLMPSTFQ

SEQ ID NO: 158468 - protein, 80 aa, Glycine max
  Clone ID: PAT_MRT3847_114114C.1.pep
CPYFPGHYIPQLAELIFDRDKDRNKYPSINLKGFIVSKSSQTKEKKEEKKKIIQMQVFLALFSNQKSEFYTFTSVTYADL

SEQ ID NO: 158469 - protein, 53 aa, Glycine max
  Clone ID: PAT_MRT3847_114115C.1.pep
PPVLTLHGIFNVKNECRKPGLSLTQNCSIKTRHCHCGLQRTKNGGRAFDDYDP

SEQ ID NO: 158470 - protein, 159 aa, Glycine max
  unsure (1)..(159): unsure at all Xaa locations
  Clone ID: PAT_MRT3847_114116C.1.pep
ATSAIQQSAFTGQTALKQLNEFVRKTGGAGKSRTNMHHTVKSAPQNIWYGPDHPKYLSPFSKQIPSYLTKEFPSNYKXNTTKLSSNPETFTXNQKLKVIHSRXTILNTLNYTFPEMLKKNNIKFNETHXFKTNTHIFSEXNLNYLINPNXIHTQNILTI

SEQ ID NO: 158471 - protein, 81 aa, Glycine max
  Clone ID: PAT_MRT3847_114117C.1.pep
RLKKLRSSLAKTFVIGGTCSYLVRHAWSCLRSSTPRPDVVVDANQLRQWVQANKVCCHTWLSVICNDLFDVYYSYKESKEI

SEQ ID NO: 158472 - protein, 124 aa, Glycine max
  Clone ID: PAT_MRT3847_114118C.1.pep
MTWCNDSDEERGIDQLVALTITPTSTNNTTVLTDHHTKASEIRTLTCPSCGHNIEFQDQTGINDLPGLPAGVKFDPNDQEILEHLEAKVFSDVPKLHPLIDEFIPTLEGENGICYTHPEKLPGV

SEQ ID NO: 158473 - protein, 128 aa, Glycine max
  unsure (1)..(128): unsure at all Xaa locations
  Clone ID: PAT_MRT3847_114119C.1.pep
RGPREGQHPNAKKATQGESGRNRPGGPKEAKKDPGRVKGVKKXKERRREAGPKGNXQLEGPKKKDKNTXTXKQGWAXPRRVDLKGEERRXPPPDSKPRGPNSGHKRPTTKPGKATYVGTKIQRGGTLF

SEQ ID NO: 158474 - protein, 63 aa, Glycine max
  Clone ID: PAT_MRT3847_11411C.1.pep
SCPHHVCTQKVQRIMLNQESKTNCSLTIKMDTTYTGSMKHLSFLSQVFVIQANQVHSSMYQHT

SEQ ID NO: 158475 - protein, 60 aa, Glycine max
  Clone ID: PAT_MRT3847_114120C.1.pep
KVNTLMRGVNIESKWIFGYSAGGQRYRLHNDALKERLIPMHLSIVYTERNGVALVVSGFI

SEQ ID NO: 158476 - protein, 134 aa, Glycine max
  Clone ID: PAT_MRT3847_114121C.1.pep
TPRTGTGWRRGQDQLQGGTPAPGPAAALADLGCHSPQKQRANALGVPRYPPRPGGGGPLPWGPPAARKGPRVPTGPPGKPLASPTLRARAHTPRRPRGGRAPQGPPGPAPPARAPPRWPREPPPSGPAQPPGGG

SEQ ID NO: 158477 - protein, 44 aa, Glycine max
  Clone ID: PAT_MRT3847_114122C.1.pep
VYVVILMIDSQHSFHSEMISESQLAIPFSPVVHLGTGVLHSSGQ

SEQ ID NO: 158478 - protein, 83 aa, Glycine max
  Clone ID: PAT_MRT3847_114123C.1.pep
ELQRRRDNKKIHMITMNPHWIHYLPEINRILHKPTKILLMPNHEGDRALNLTKCHRCLASDETNAHQLCVLNDRFFLLMTRTY

SEQ ID NO: 158479 - protein, 38 aa, Glycine max
  Clone ID: PAT_MRT3847_114124C.1.pep
IPASYFCAWENHVTQIPIMAQEESLASSASDLQYCNGE

SEQ ID NO: 158480 - protein, 62 aa, Glycine max
  unsure (1)..(62): unsure at all Xaa locations
  Clone ID: PAT_MRT3847_114125C.1.pep
FSPIKVSRHQISFYFNCLLHYSANPAXFVRQQLTLLNMYPKLMQPNTKVICRTEAEDDDDNA

SEQ ID NO: 158481 - protein, 70 aa, Glycine max
  unsure (1)..(70): unsure at all Xaa locations
  Clone ID: PAT_MRT3847_114126C.1.pep
INSWGKGLQAVSDSLLLYNTTRVLRSNXSGXFLSLCXAFIEAXYPHCATCXGRCXLGGATLIMRMWISRY

SEQ ID NO: 158482 - protein, 94 aa, Glycine max
  Clone ID: PAT_MRT3847_114127C.1.pep
TEFICSPNSNPSPSPATMNEPLLSTCQKLLQCTGINDLETRTRLRNKQDFENCFWSKFPSPSMQEADPIKSANKASLSLNHPTKVHTWSAKIYN

SEQ ID NO: 158483 - protein, 58 aa, Glycine max
  Clone ID: PAT_MRT3847_114128C.1.pep
GKGTGSFGKRRNKTHTLWVRCGRRTFHLQKKWWRRLCLPPPPPLGNNTGGVRAIRKKT

SEQ ID NO: 158484 - protein, 82 aa, Glycine max
  Clone ID: PAT_MRT3847_114129C.1.pep
MGKLVEILDQGFRIAARFYSNCPQTSRKYYHPSSLSDNHDHHYHCGATTSGGGGVKEAVAAWSVDIKSRYRCVDFRCMTKNN

SEQ ID NO: 158485 - protein, 173 aa, Glycine max
  unsure (1)..(173): unsure at all Xaa locations
  Clone ID: PAT_MRT3847_11412C.1.pep
KARATFSWGWGFFFFCFFFFFFLGKNPFFKPISPNFFLAPPPGQILFGQKSLCAGAQLPFFPLSGGTPPPNFQKFIFRGPCPPKKITPPPPGPGGPPGFFGPVPGGVPAFPFGGPFKAGGKQGQRGSPGKNVFPSXPPNFPPGSLKGKPGGAQGGGPPPFFGGAPPPPFRGGN

SEQ ID NO: 158486 - protein, 111 aa, Glycine max
  Clone ID: PAT_MRT3847_114130C.1.pep
PLWPIFILKKRVHPVFSGVVIEPGGQNIVANLNKGGFYTKGIPVGVGFGNFFNFQIKGFWIGIFFGTFIQTGGRAVIPSKTDWGAQVTKAGNRIKKGAKVEFVLPPITTKD

SEQ ID NO: 158487 - protein, 73 aa, Glycine max
  Clone ID: PAT_MRT3847_114131C.1.pep
PPRQPLGKKAYLHGTKKQWIFYPLLFFGFTKGRVSSTQLNKYEGGNLTTYSKAPFILWLGTMEGCSENAAHKN

SEQ ID NO: 158488 - protein, 60 aa, Glycine max
  unsure (1)..(60): unsure at all Xaa locations
  Clone ID: PAT_MRT3847_114132C.1.pep
MFAMGGGFKGVAGLTPTQYNKSRVPKNRITVYRAYGGVLSGSAVXERIILAFLGEEQKFV

SEQ ID NO: 158489 - protein, 733 aa, Glycine max
  Clone ID: PAT_MRT3847_114133C.1.pep
GNGNKDGLFSVLLRDYRAHAAASCMNRLAKLSARWIGNHGFSIGIDDVQPKEILINKKDETISEGYRECDKHIEAFNKGKLELLAGCDAAQTLETRITGVLNGLRDTAGKVCMQTLHWRNSPLIMSQCGSKGSSINISQMVACVGQQSVGGRRTPNGFIDRSLPHFPRKSKTPAAKGFVANSFYSGLSATEFFFHTMGGREGLVDTAVKTADTGYMSRQLMKSLEDLFLHYDYTVRNAGGSIVQFCYGDDGMDPAGMEGKNGKPLNFERLFLKSKAICPNDEDDEILSSSDVSKVVHEKLSEFDMSRLAEKGVFEVGFSADFVESLQSFIKDNAKLTEEGFTDEHSQNLKKFGQRISGITRKQLDVFLNICLSRYHSKKMEAGAPVGATGAHSIGEPGTQMTLKTFHFAGVASMNVTLGVPRVKEIMNGNKKISTPIITAILERDDNANTARIVKGRIEKTNLGQVAKSIKVVMTSRSASVVITLDMKRIQDAHLNIDANIVKESILRTKKTKLKPEHIKILDIKKLEVVPQDVDRSKIHFQLHYLKNLLPTVVVKGIKTVDRVVISKDTKAEKFRLLVEGTGFREVMGVEGIDGRKTVSNHIHEVRDTLGIEAARESIVKEIKYTMVDTHGMNIDIRHMMLLADMMTATGHILGINRFGISKMGKSVLMLASFERTADILFQASVRGRDDSIGGVSESIIMGIPIQIGTGMIKVKQRLDPPELPHGTSPILS

SEQ ID NO: 158490 - protein, 40 aa, Glycine max
  unsure (1)..(40): unsure at all Xaa locations
  Clone ID: PAT_MRT3847_114134C.1.pep
VLFFNGVLLGAPSKIYKWLKCPWLFFCHKKPFFSGGXXKK

SEQ ID NO: 158491 - protein, 62 aa, Glycine max
  Clone ID: PAT_MRT3847_114135C.1.pep
SSFIGENCELREANNILKAIHVVLEPGLYTRLHCLLCECCPGLTDGAVPDGSKDAPYAAVQS

SEQ ID NO: 158492 - protein, 255 aa, Glycine max
  unsure (1)..(255): unsure at all Xaa locations
  Clone ID: PAT_MRT3847_114136C.1.pep
MDSSNSNGASQRLLDLAQRLRLYKPPPFPEDILDQIMEEKGDKVVSEVSYTKSATPIAQNTAKIGYKRAAVLICIFEGDAGDLRVILTKRSSKLSTYSGQVALPGGKAEEGDKDDGDTAKREAMEEIGLDPELVDVVTVLEPFFSXYLMRVVPVIGILHDKKAFKPVLNPAEVEAVFDAPLEMFLKDEKRSQKKMQCMGENYLIHLFDYEIEHKKFLIWGLTAGILIRAASVVYQRPPAFMEQNPKFKLPRDLTM

SEQ ID NO: 158493 - protein, 37 aa, Glycine max
  Clone ID: PAT_MRT3847_114137C.1.pep
DIYLSQSQLGTGVGVIRSWICDKYAIRTYASRLKISG

SEQ ID NO: 158494 - protein, 139 aa, Glycine max
  Clone ID: PAT_MRT3847_114138C.1.pep
LEGTAKNCVFKLGDRVKYSSSSGGLYQLQTISSKGPANGSRGKVVLLFDDNPLSKIGVRFDKPIPDGVDLGGLCEGGQGFFCNVTDLRLENSGIEELDRLLINTLFEVVVSESRNAPFILFMKDAEKSIVGNGDPFSFK

SEQ ID NO: 158495 - protein, 135 aa, Glycine max
  Clone ID: PAT_MRT3847_114139C.1.pep
MHLLHGFESQPKLEADNVPSTSGTAKNCVFKLGDRVKYSSSSGGLYQLQTISSSNRIFRGPANGSRGKVVLLFDDNPLSKIGVRFDKPIPDGVDLGGLCEPGQGFFCNVTDLRLETVALKNLTNTYNTLLRLWLV

SEQ ID NO: 158496 - protein, 149 aa, Glycine max
  Clone ID: PAT_MRT3847_11413C.1.pep
ATTGQRARYDSGDLVIHDPIYGRPAPEAGASSDMVMSPSFDKDIATYKYPLLKPTLLLLTRPALDNLGWESNCGYDGVPIEHILSIIYKCLSGRSCSRAQDLTNVDIQVDYWPVAILEDSGLSSGTAVLLETHGMQVSSGWYTRDRIAR

SEQ ID NO: 158497 - protein, 264 aa, Glycine max
  unsure (1)..(264): unsure at all Xaa locations
  Clone ID: PAT_MRT3847_114140C.1.pep
PAAAASTAPPSPTSSPEKNSGCDFEFSARFVSSGFTGSGSMSSADELFLNGQIRPMKLSTHLERPQVLAPLLDLEEEGEENEEVEASVRGRDLRLRDKSLRRRTRSLSPLRNTAXEWTENEKKTEKKENVDPSVSSGSGRSSKRWVFLRDFLRSKSEGRSNNKFWSTISFSPAAKDKKPQNQGNGPQKPKKVAGKPTNGIGKKRVPAASPHELHYKANRAQAEELRRKTFLPYRQGLLGCLGFSSKGYGAMSGFARALNPVSSR

SEQ ID NO: 158498 - protein, 90 aa, Glycine max
  unsure (1)..(90): unsure at all Xaa locations
  Clone ID: PAT_MRT3847_114141C.1.pep
PLRRFLANLNYRAHVNSPIGMRLKVKVLVLLPGPCLGHQNXEGFTYPYGEVLPRGKGSHHXNSRXLMAHQTLHITVDRGLGSFFSPIHKP

SEQ ID NO: 158499 - protein, 43 aa, Glycine max
  Clone ID: PAT_MRT3847_114142C.1.pep
VPGVHYPGRFWADKQVIFVAFLNLSEPREKIKKKPRSLEMNGE

SEQ ID NO: 158500 - protein, 80 aa, Glycine max
  unsure (1)..(80): unsure at all Xaa locations
  Clone ID: PAT_MRT3847_114143C.1.pep
AAQSKRRRSHSIASRTQHRYRPWAGLDGERSDQRSSNHEQSETRMWPEXDYNHXLVVMEFPYGPAHTREQRSDTYVDTCA

SEQ ID NO: 158501 - protein, 92 aa, Glycine max
  Clone ID: PAT_MRT3847_114144C.1.pep
GAVLTRRHIDTVAGTQANVTNAGLHTWEPVIIKDPHVITAKALSYRSAVRENLMRPGYRIVGIIADQWRHLIGHHTRRSRTFQLANTLYYIE

SEQ ID NO: 158502 - protein, 102 aa, Glycine max
  Clone ID: PAT_MRT3847_114145C.1.pep
SVSRDPPLCLGSLLHRGPLGNQLIMRTRICGDMVGSAIRAVQACASVLRKGLLVPLREDLGPGINGIRCISNVCLVGRLKNFWTRPPTVAIIADSPEKGRNG

SEQ ID NO: 158503 - protein, 103 aa, Glycine max
  Clone ID: PAT_MRT3847_114146C.1.pep
SFTAPMALLNVLGDMAYFGCKTFFQFGLDQAIKSSNFGPSNLVEYFFYQPTKLDSPDLVEYALKKCVSPRLLEEHWRDNNYDKSVYSVISPNCLWISLNVEKN

SEQ ID NO: 158504 - protein, 71 aa, Glycine max
  Clone ID: PAT_MRT3847_114147C.1.pep
YGRLPKLPVMGAWFQRIYTAAGPFVTLFAHRADPGHGSISPACPPDFQGSVHQSDYRLFWMRGAFIYACRN

SEQ ID NO: 158505 - protein, 53 aa, Glycine max
  Clone ID: PAT_MRT3847_114148C.1.pep
KSFLPLGVFNMYGMLRTLTASTCPFLNSSTVLPNDLGLKERRKIPKKIPLNEF

SEQ ID NO: 158506 - protein, 55 aa, Glycine max
  Clone ID: PAT_MRT3847_114149C.1.pep
NAQKKEASKLKRGKKKKKDNLSFLSQYNNSFCSVSAAKVLIWLHIFLGLPSLSLS

SEQ ID NO: 158507 - protein, 68 aa, Glycine max
  Clone ID: PAT_MRT3847_11414C.1.pep
ALSPYNPFKSKFFEPFPSPFPKRGLFPKFLFLGGGSPLAYFSSPVSGAFFPIKKGPHLPPKLGPRGKI

SEQ ID NO: 158508 - protein, 106 aa, Glycine max
  Clone ID: PAT_MRT3847_114150C.1.pep
LLQSFQHWWTCQPMSLAAATVLGTRENLISNSFAFPSKFQRLSSSLSLNIESPHFMTYLISHHDLAPGFAPRKCCCSGEVYVVSSDGNFSSPFNFNCMIMGLWVYV

SEQ ID NO: 158509 - protein, 271 aa, Glycine max
  Clone ID: PAT_MRT3847_114151C.1.pep
MSRICVKNLPKDVAEDELREFFSGKGGIITDAKLMRTKDGKSRQFAFIGYRTEDEAQEAIRYFNKNFLRTSRIICEVARKHGDENLPRPWSRHSKKKDDKVTAPDVEKPARANKGQGENSKGSVGDDVDDPQLQDFLQVMQPRVKSKMWANDTSIATNVDNRQAMPNKDNDGASVASDQSGSLEDGFLEDSEPKNKSHEPERDKVISDMDYFKSRVTTEWSDSESSDGEDDDDDNDSSCIDSDRDDHSNAGKDEDNCDSRNGAREVDVDLE

SEQ ID NO: 158510 - protein, 68 aa, Glycine max
  Clone ID: PAT_MRT3847_114152C.1.pep
YHSIQPVPSNHQDSYLYKYMFHVSYTLSTSLCYINTAFISAVKAHIISFPYKILSLCYENHRIKYYTF

SEQ ID NO: 158511 - protein, 65 aa, Glycine max
  unsure (1)..(65): unsure at all Xaa locations
  Clone ID: PAT_MRT3847_114153C.1.pep
FNLGINFRDFLSICCRDAFFNLIPFAILSGISSYLPFKSSKRSLFFSSFKLLCFVILNIVXSSVA

SEQ ID NO: 158512 - protein, 85 aa, Glycine max
  Clone ID: PAT_MRT3847_114154C.1.pep
WEEVRQKLSKMRIPCFSERNEALPPPPRPTCGAKHEAREMDSVSEEENPRLEESVEEIEVELKNMTSSSRCRCFLLLFFAPPTIF

SEQ ID NO: 158513 - protein, 60 aa, Glycine max
  Clone ID: PAT_MRT3847_114155C.1.pep
ADVWCVDMAANCSCNSALRLLLQTVMNLSYADSCLNHLIKKSSARLTLTPLYLVQTLYVR

SEQ ID NO: 158514 - protein, 268 aa, Glycine max
  unsure (1)..(268): unsure at all Xaa locations
  Clone ID: PAT_MRT3847_114156C.1.pep
MASPSSNRNSCHRAPTSPIMEDLLLTLLRICLLILQLIKHHSLTARALLDNKGMQPPIAHQLPINHLLLMLHNPILLFLNHPRTSYETKSTVWADTLSRGLVNLNISGPKTNPLADIGVDFEAXINRKEKRMEKPXLTTAVTSTVNYGXNAMESGSGMGRSGAGSLWSPQNPMMGSGMGTQSAVCKANGPSVGMGMGGYGGGMNASMGMGMGGMGGMGMGQGYQMQPPTGLPPGSNMPGNYNNSMMGSGSYGQQPYGSYGQQPYGGYR

SEQ ID NO: 158515 - protein, 172 aa, Glycine max
  Clone ID: PAT_MRT3847_114157C.1.pep
RELVSSFFFFFFFFFLYMRCRNVNCKSLLPVDDCDCKICSGNKGFCSSCMCPVCMSFDCASNTCSWVGCDVCSHWCHAACAIQRNLIKPGPSLKGPSGTSEVQFHCIGCGHASEMYGFVKDVFVCCGKDWGLEALAKELDCVRRIFQGSEDRKGKGLHIKTGNMLLKLSAKL

SEQ ID NO: 158516 - protein, 221 aa, Glycine max
  unsure (1)..(221): unsure at all Xaa locations
  Clone ID: PAT_MRT3847_114158C.1.pep
SNKVDEIMDISLDVFHSNSLKDSMQKFFQPEVLDGNNKYKCDSCKKLVAAKKQMSILQAPNILVIQLKXFEGILGGKIDKAVAFEEVLVLSSFMCKASQDPQPEYKLFGTIVHSGYSPESGHYYAYIKDAMGRWYCCDDSCVTVATLQEVLSEKVYILFFSRTNQRPVSSSNSLASNGVKPHSNGSQTSECPKVGVPPKAVHAKSNSELSSWKDIPRVSKT

SEQ ID NO: 158517 - protein, 59 aa, Glycine max
  Clone ID: PAT_MRT3847_114159C.1.pep
VILGPPGGAPNSGDKGFIFFFLFSLGPPGAPLGARVFRLYSVYLGLEGPPLRLFKVPPG

SEQ ID NO: 158518 - protein, 74 aa, Glycine max
  Clone ID: PAT_MRT3847_11415C.1.pep
SKFDMHMYVLLTIYFPNRGSKITYLSKIRGMFGFPICSVPNSNLDNKLSFCVMFDYFQTYVRTLVYILSKIKFS

SEQ ID NO: 158519 - protein, 78 aa, Glycine max
  Clone ID: PAT_MRT3847_114160C.1.pep
MSPPSAIHNGGAEDKPTFTTHEPGLSEAVANMKLVIPKPPTFDDPHEERKYLKQRLAAAFRIFGKYGYDEGVAGHITV

SEQ ID NO: 158520 - protein, 523 aa, Glycine max
  Clone ID: PAT_MRT3847_114161C.1.pep
RVPGRKRVELQKALGNHLAWKDRYPVFFDDIAARLLPVIPLIIYRLIENDAMDTAERLLAMYSPLLAYYPLRFTFVRDILAYFYGHLPGKLIVRILNVLDISKIPFSESFPQQISLTNPVMCPPLDYFTTLLLGIVNNVIPPLHNNSKSGSMGDASSNTLRTAQSKPPAVSQSGSANASEGQKAFYQIQDPGTYTQLVLETAVIEILSPPISASQIVQSLVQIVVNIQPTLIQSSNALHGGSNSVGQGSVLPTSPSGGSTDSLGASRSTPSVSGINTSNFASRSGYTCQQLSCLLIQACGLLLAQLPSDFHSQLYLETTRIIKENWWLKDGTRSLGEIDSAVGYALLDPTWAAQDNTSTAIGNVVALLHSFFSNLPQEWLEGTNVIIKQLRPVTSVAMLRIAFRVMGPLLPKLANAHALFNKTLSSLLTILVDVFGKNSQTSIAVDASDIADIIDFLHHVVHYEGQGGPVQASSKPRPEVLALIGRASESLRPDIQHLLSHLNPDVNSSVYAAFHPKLAQNPT

SEQ ID NO: 158521 - protein, 50 aa, Glycine max
  unsure (1)..(50): unsure at all Xaa locations
  Clone ID: PAT_MRT3847_114162C.1.pep
KLEXXDXXLCLXXSVSERXLYXXXXSQXXIXXXXERXXSSSRXXPTPXIN

SEQ ID NO: 158522 - protein, 566 aa, Glycine max
  Clone ID: PAT_MRT3847_114163C.1.pep
MHGYSRLGGAARSPPSSPRFRHGRSKSRGWGSSKESNSMEKLVFILMSAVFRRRGLLLFAPLLYISGMLLYMGSLSFDVVSIKNGVVLVHKRAPPGSVYRSPQLFQNLWPLMEADNGTTLNVLMKAWTKNELREWKPCANASLPETELPKSNGFLIIEANGGLNQQRLSICDAVAVAGLLNATLLIPIFHLNSVWRDSSNFGDIFDENFFIQSLGNRVHVVRELPDDILQRFDNNISNIVNLRVKGWSSSAHYLQKVLPQLLEMGAVRIAPFSNRLAQAVPSKIQGLRCFANFGALRFSEPIRTLAESMVDRMVKYSSHSGGKYVSVHLRFEEDMVAFSCCEYDGGKEEKLEMDIARERSWRGKFRRKHRIIKPGANRVDGRCPLTPLEVGMMLRGMGFDNTTSVYVAAGKIYKEQKYMAPLKQMFPRLQTKNTLATPEELAQFMGHSTRLAALDYTVCLHSEVFVTTQGGNFPHFLMGHRRYMYGGHAKTIKPDKRRLALLFDNPNIRWEVFKQQMTDMLRHSDQKGTEIKKAGGSLYTFPMPDCMCKQVEPKSENGNMTKYIKL

SEQ ID NO: 158523 - protein, 50 aa, Glycine max
  Clone ID: PAT_MRT3847_114164C.1.pep
LLNFVYQKNRIHNFSIISFFLNHSINLIFPRYKIIDTHDLKFQYKRTPLQ

SEQ ID NO: 158524 - protein, 118 aa, Glycine max
  Clone ID: PAT_MRT3847_114165C.1.pep
AINWGCFLNNRDCIILLGVRGRGEYIRQILKFAKVPFEEVSINIEDWPKYKEEMPLGQIPVLEVNGVNFSQSLAISRYLGETYGLSFNDPLERALLNMIADQNFRHSEQRVSSKNGPW

SEQ ID NO: 158525 - protein, 153 aa, Glycine max
  Clone ID: PAT_MRT3847_114166C.1.pep
MSLIPSFFGGRRSNVLDPFSLDVWDPFKDFPFPTSLSAENSAFVSTRVDWKETPEAHVFKADIPGLKKEEVKLEIQDDRILQISGERNVEKEDKNDTWHRVERSSGKFMRSFRLPENAKVDQVKASMENGVLTVTVPKEEIKKPDVKAIEISG

SEQ ID NO: 158526 - protein, 55 aa, Glycine max
  Clone ID: PAT_MRT3847_114167C.1.pep
SMDKIFSLFYMCVLMFVYHEEVLSGPRLNHFILPTIEGNNDMLIYIFFYIFKLTF

SEQ ID NO: 158527 - protein, 66 aa, Glycine max
  unsure (1)..(66): unsure at all Xaa locations
  Clone ID: PAT_MRT3847_114168C.1.pep
XFSXSFLIXLFDHGRRGAAXLQQFDKNGDGKISVTELKDCSRPSDPKRXXGLKADGGVDQKARFXR

SEQ ID NO: 158528 - protein, 86 aa, Glycine max
  Clone ID: PAT_MRT3847_114169C.1.pep
HASVRLREDDRRESAFPHPVCSHLQSHHASLFPSPIVVQANSDSSLTKAPWIPDALAPATSLHIIIVIHEQKKKKKKKKKSGRSRG

SEQ ID NO: 158529 - protein, 51 aa, Glycine max
  Clone ID: PAT_MRT3847_11416C.1.pep
AFTQYILSLPDQARIYPLKTASLSLLHMATVSNSCSSHVSLSQVSLIRRVN

SEQ ID NO: 158530 - protein, 127 aa, Glycine max
  Clone ID: PAT_MRT3847_114170C.1.pep
LILRVSKTKQINAFHLTANYLLNCMTRLSKNKTFSCHQVIHLLGTLESGYRCLQKNFEQKGLEPSGKGCAGSILLPPTGEQLSRACRVLQLQRWQHRAPCGIGLVLGSGFSHPRNQRCSESWVLEPN

SEQ ID NO: 158531 - protein, 50 aa, Glycine max
  Clone ID: PAT_MRT3847_114171C.1.pep
YETPATCPFYYNICSKNCLSLPTKFKTKQNLLRITYGIFFHYLEVKCSCL

SEQ ID NO: 158532 - protein, 112 aa, Glycine max
  Clone ID: PAT_MRT3847_114172C.1.pep
MVHDIFVKVKLEVTRTLSQHALLRASEARLTSALSKGGKMRGVATNEGISTSHVDKSGAFAPTYPPLERKSDLRSSFFKGEELATQLAQVSKVASSRSNSLLEEESGRPKWV

SEQ ID NO: 158533 - protein, 38 aa, Glycine max
  Clone ID: PAT_MRT3847_114173C.1.pep
MVRKTKSIYSSYALPQAHQQVPEEEDPLDMMTEGFNTI

SEQ ID NO: 158534 - protein, 42 aa, Glycine max
  Clone ID: PAT_MRT3847_114174C.1.pep
GGNPRQPRRRRFEALIARARGQAHTQNNRRRRRNDNDEQCTP

SEQ ID NO: 158535 - protein, 75 aa, Glycine max
  Clone ID: PAT_MRT3847_114175C.1.pep
TGNAPLSPGLAWRPPGLPAGRPTGTVGNPGVKANAQQPKLFVGTNLTPICAEALALTGLMVGNTLSSRAGQSRAD

SEQ ID NO: 158536 - protein, 116 aa, Glycine max
  Clone ID: PAT_MRT3847_114176C.1.pep
MPSPVQPSHSPSSAEGEKHARKQLDREIRDMVSAITDRVTDFHKPGSTNHMENDGEHGLSMVTLVGNNNGATMKSEFDEKSGNPSHGDEPEALSTYVNSNFQAINNSVMLGGSYQT

SEQ ID NO: 158537 - protein, 80 aa, Glycine max
  unsure (1)..(80): unsure at all Xaa locations
  Clone ID: PAT_MRT3847_114177C.1.pep
TCLRFIRLFTGLFVXEEGLQLYAGYLKNVIAMRSRMEFEQLAEMMDHQNVNSAGCSTNLSKDIATTIDQNSEILPGLCGE

SEQ ID NO: 158538 - protein, 51 aa, Glycine max
  Clone ID: PAT_MRT3847_114178C.1.pep
QLTCQNIVQSGEAHSSRHKLSLLAHVNGHVCQWTKRTRSDSDLNNAVIANP

SEQ ID NO: 158539 - protein, 72 aa, Glycine max
  Clone ID: PAT_MRT3847_114179C.1.pep
IKLSLLLISGAVQRIGKPLYQYSIALFHDDGRPVEGKGVWRKLLDRMHETYDSKLNGKGMGYEGDRNLVTLG

SEQ ID NO: 158540 - protein, 134 aa, Glycine max
  Clone ID: PAT_MRT3847_11417C.1.pep
MDGEWLVIWLAEDDQIHCSCKEFESSGILCRHALRVLVIKNYFQLPDKYFLGRWRRECSLLVDDDQNNLGIGEEWFQEYQSLAETLFQESSITKERSDYVRKELTKELTRLLNEVRNLPEADGVCMNTSVSPAN

SEQ ID NO: 158541 - protein, 34 aa, Glycine max
  Clone ID: PAT_MRT3847_114180C.1.pep
VLINHRKCMRKNVFLASNYNFELLKDVASFEFTL

SEQ ID NO: 158542 - protein, 66 aa, Glycine max
  Clone ID: PAT_MRT3847_114181C.1.pep
STSIVVCCRRQNMPMAKGIRKLSSWIEVAPAPIIYPKKPSNTPTLETITEEEEAAAEGFENGDGQL

SEQ ID NO: 158543 - protein, 55 aa, Glycine max
  Clone ID: PAT_MRT3847_114182C.1.pep
CSRIVFPFYFPHTLITRETENLRLLCSQHCLVFSGFSIFLQYYYFLMDENDIILG

SEQ ID NO: 158544 - protein, 95 aa, Glycine max
  unsure (1)..(95): unsure at all Xaa locations
  Clone ID: PAT_MRT3847_114183C.1.pep
FQITITHHIVLWPPLNNRSVNLLEWNRSDQHHFMQVMLHLXDHDDTIKLXTECFGMRLLNKRHIPEEIYASACLGYGDAQSNVDVVMLSGYGGLI

SEQ ID NO: 158545 - protein, 59 aa, Glycine max
  Clone ID: PAT_MRT3847_114184C.1.pep
FYAFNSAAEFEVLGLERFKSLLQSRGLKCVGTLMERAVRLFLLKPTPLNELPKKLISKK

SEQ ID NO: 158546 - protein, 191 aa, Glycine max
  Clone ID: PAT_MRT3847_114185C.1.pep
MSFWLAGAPYDTLEEVLGKRDSGGLGSLQDFGVKYREVPLAEDGGLDWNALMSSVKPKTKCALIQRSCGYSWRQSLSVNDIGRAIKIIKKQNPSCSVMVDNCYGEFVESIEPPMVGADLIAGSLIKNPGGTIAPCGGYIAGKQKCVEAAAARLSAPGLGVDCGSTPGDIMRAFFQGLFLSPQMVGRSNQGN

SEQ ID NO: 158547 - protein, 49 aa, Glycine max
  Clone ID: PAT_MRT3847_114186C.1.pep
HACAADDWPLRVAKTNKDLVSHAQELMHDVGLYIHRGRGAHIASEVLFA

SEQ ID NO: 158548 - protein, 76 aa, Glycine max
  Clone ID: PAT_MRT3847_114187C.1.pep
PLFPTVQPASGRLLRAFFILMLPLSLGQKKKNDALLTVSQLIISVALAAYPLSASHCALVNSFELPAFLVCPLLIH

SEQ ID NO: 158549 - protein, 52 aa, Glycine max
  Clone ID: PAT_MRT3847_114188C.1.pep
DGHLYKQGENAPYSFLKTNSITHPVSPSPRVPIILHSFLVTVDPPSNTESNF

SEQ ID NO: 158550 - protein, 159 aa, Glycine max
  unsure (1)..(159): unsure at all Xaa locations
  Clone ID: PAT_MRT3847_11418C.1.pep
MIVIPLQVLANVASVVIGETXGPFIKDWVTWNQVFLLVDIICCCAIIFPIVWSIRSLRETSKTDGKAARNLAKLTLFRQFYIVVIGYLYFTRIVVFALKTIAAYKYQWVSNLAEEAASLAFYVVMFYMFRPVEKNEYFVLDEEEEEAAEIALRDEEFEL

SEQ ID NO: 158551 - protein, 127 aa, Glycine max
  unsure (1)..(127): unsure at all Xaa locations
  Clone ID: PAT_MRT3847_114190C.1.pep
MDLPLPKPSFNPNKHLKEEFVSNLTGSSMLEIATLTVSIPILVLIRHSISITGASLKKKNDDAPSGNRNLKSYLATLSLDFLVIXVPMLLFFTVLANWTYFLASLFTILTLLYMGCYQLTGLLSDCE

SEQ ID NO: 158552 - protein, 78 aa, Glycine max
  unsure (1)..(78): unsure at all Xaa locations
  Clone ID: PAT_MRT3847_114191C.1.pep
GQASFPNVAYYPXPPPTPLVGNTKYVPPFSTALPHQSPPPHQPSLKVPKRCGHNVERGRPPYPSFLWLLWIAYLVQLL

SEQ ID NO: 158553 - protein, 44 aa, Glycine max
  Clone ID: PAT_MRT3847_114192C.1.pep
YPTYYPHSLHNSLYLPKFNYSHLLQLPYLKNPTLPNLIPSSHSL

SEQ ID NO: 158554 - protein, 254 aa, Glycine max
  unsure (1)..(254): unsure at all Xaa locations
  Clone ID: PAT_MRT3847_114193C.1.pep
MSATVTLTLNLCRSSIVASCPHYNHKPNPNFNALFSFSLSLSLSHHRRIAICKKPFSSRRTWLHGHMKRDRDYELENGLALFGSDEELATQIPTQAQSLVEGSGSIRVAEFKPVPDVDYLHELLAIQQQGXELLGYCDTRNMGFMLQELIEILSCAMILTKNHIXPELLNVILPQSLRKQPPESQELLSKVKNVIEKPHNDHLPLIEASRLCNMDIISHVQQVICFAFHDSRLLMETCQEAKNLRKIVTLFYLD

SEQ ID NO: 158555 - protein, 274 aa, Glycine max
  Clone ID: PAT_MRT3847_114194C.1.pep
MSATVTLTLNLCRSSIVASCPHYSHKPNPNFNAFFSFSLSLSLSHHRRIVIYKKPFPSRRTWLYGYMNRDRDYELENGLALFGSDEELATQIPTQAQSLVEGSGSIRIAEFKPVPDVDYLQELLAIQQQGPRAIGFFGTRNMGFMHQELIEILSYAMVITKNHIYTSGASGTNAAVIRGALRAEKPELLTVILPQSLSKQPPESQELLSKVKNVIEKPHNDHLPLIEASRLCNMDIISHVQQVICFAFHDSRLLMETCQEAKNLRKIVTLFYLD

SEQ ID NO: 158556 - protein, 339 aa, Glycine max
  Clone ID: PAT_MRT3847_114195C.1.pep
MIPWGGLSCCLSAAALYLLGRSSGRDAEILKSVTRVNQLKELAQLLDAEILPLIVTISGRVSSETPINCEFSGLRGVIVEETAEQHFLKHNDAGSWIQDSALMLSMSKEVPWYLDDGTDRVHVVGARGASGFALPVGIEAFEESGRSLVRGTLDYLQGLKMLGVKRIERVLPVGTSLTVVGEAAKDDVGAIRIQRPHKGPFYVSPKTIDQLIANLGKWARWYKYASVGLTVFGAYLIAKHAIRYILERRRRSELQRRVLAAAAKKSGQNNDVEKADSLSDGAKKDRLMPDLCVICLEQEYNAVFVPCGHMCCCTACSSHLTNCPLCRRQIEKVVKTFRH

SEQ ID NO: 158557 - protein, 80 aa, Glycine max
  Clone ID: PAT_MRT3847_114196C.1.pep
VRDEACLYLLYIHFDNEAYLSEKHDYLSYIREHATHSDQHATQRALSACGTTLHACKFQRLDSKAEGSDSKTDGSQSRLL

SEQ ID NO: 158558 - protein, 122 aa, Glycine max
  Clone ID: PAT_MRT3847_114197C.1.pep
SFYSLFLYSLLSALFQSLLFEGCGRTVNPVNGAVGLLWSGNWHVCQAAVQTVLSGGVLRPLAETFTGDSDDTRYHLRPLTLMHDVREMNDNSSLMNRVNRPQESEKKSYDGHKKNQILNLFM

SEQ ID NO: 158559 - protein, 40 aa, Glycine max
  Clone ID: PAT_MRT3847_114198C.1.pep
LTRPTAARRGRIVRLLDDYIPVRVLEDYRRGDLMSGGATR

SEQ ID NO: 158560 - protein, 146 aa, Glycine max
  Clone ID: PAT_MRT3847_114199C.1.pep
IETVVAHNVIERLMIQCALQPGLAQIWEDILGFENAEFYIKRWPELDGLFFKDVLISFPDAIPCGVKVAADGGMIIINPDDSYVLRDGDEVLVIAEDDDTYAPGPLPEVHKGLCSRIHDPPKYPDKILFCGWRRDIDDMIMLRSGW

SEQ ID NO: 158561 - protein, 48 aa, Glycine max
  Clone ID: PAT_MRT3847_11419C.1.pep
SVGDGCENFLKVTFSSLIMTRHCFSNAPEDINSGGCIRCSGRLHTSRR

SEQ ID NO: 158562 - protein, 156 aa, Glycine max
  Clone ID: PAT_MRT3847_1141C.1.pep
IGASEAEAVVSSSLACLTRKQSGDKCSAPASAFAQCQLLNISYCPPAEDNIPEAKSLVVVVYNPLGWNRTDIVKIPVNDANLVVKDSSGNNLEVQYVDVDDVTTNLRKFYVKAYLGVSPKQAPKYWLLFQVSVPPLGWSTYFISKATRKGTRRKDL

SEQ ID NO: 158563 - protein, 61 aa, Glycine max
  Clone ID: PAT_MRT3847_114200C.1.pep
AMPLTSDPFTLSQLKPPLRAIGLLSYASGEPCQRTWLHDLYEKECPSSCHDNLCGPVPDLL

SEQ ID NO: 158564 - protein, 96 aa, Glycine max
  unsure (1)..(96): unsure at all Xaa locations
  Clone ID: PAT_MRT3847_114201C.1.pep
TRTFYLRQTLQIIDASRMFLSSPALEAHAVRLSQGVPSVFLTRKIAMAKASRPNGPSSSQXIGDXRLSYVAPVYYDRPAYLSGEFHAKCQYDTATQ

SEQ ID NO: 158565 - protein, 75 aa, Glycine max
  Clone ID: PAT_MRT3847_114202C.1.pep
HASGEMYMYGETNFKNARDYLNKRIELYNLVHPGAEIRPLTLTYSGLEKAYEEGTLEICYPKGWFDPLEEPSLIE

SEQ ID NO: 158566 - protein, 81 aa, Glycine max
  unsure (1)..(81): unsure at all Xaa locations
  Clone ID: PAT_MRT3847_114203C.1.pep
VAKXCNXLKPXXRIDXXGGXXXTWNXNNXPFXCAGVALSRFTLNRNALRRPSXXSVPTXXXIQXGKGIXGMIXPGXPSXFX

SEQ ID NO: 158567 - protein, 165 aa, Glycine max
  unsure (1)..(165): unsure at all Xaa locations
  Clone ID: PAT_MRT3847_114204C.1.pep
IILPGERDGKIWMWHXCLRCPRINGFPPATQRIVMSDAAWGLSFGKFLELSFSNHAAASRVASCGHSLHRDCLRFYGFGRMVACFRYASIDVHSVYLPPHTLIFDYGNQDWIQQESDEVVNRAELLFSEVLNGSSQIVEKRSNAVQVSNGHKSPELRRQVAELEG

SEQ ID NO: 158568 - protein, 120 aa, Glycine max
  unsure (1)..(120): unsure at all Xaa locations
  Clone ID: PAT_MRT3847_114205C.1.pep
RXXXSXXXXSXSXXXSYAXGPQNPNLCXSFRENIXEXXNLXXXXPAXXVKXXXIGQAXXKLXTXSXVQXXNGXNSXXXXTLRXAXVPFXRXRXPKEXEXXNXXVFPXQXXHXTXXDXWGX

SEQ ID NO: 158569 - protein, 443 aa, Glycine max
  unsure (1)..(443): unsure at all Xaa locations
  Clone ID: PAT_MRT3847_114206C.1.pep
MALQNIGAGNSDDAFYRYKMPKMITKIEGRGNGIKTNIVNMVDIAKALARPPSYTTKYFGCELGAQSKFDEKVGTSHVNGAHDTAKLAALLEIFIKKYVQCYGCGNPETEILITKNQMIQLKCAACGFVSDVDMRDKLTSFIIKNPPETKKGSKDKKAMRRAEKERLKEGAAADEEQKKMKKETKKKSSSTSKDETTKLTSTKKKASGSDEDHRSPAHSQVDEKEEAPDEDDDDGEVQWLTDTSLEAAQQRIQEQLSAVTADMVMLSTDEPEKKEKASSKTSDGSENGNAMHYRKLVGXVKAILNKGVVASELQSHMEAIPAPAQEKISALIEALFEGIEKGFAKEVVKKKRYLAAAVSMEEGSHLLLLHAIEAFCLKSTSNALKEIPIVLKALYDSDLLEEEHIVQWYQEGLNGDNKDSQIWKKAKPLIEWLQSAESETEEE

SEQ ID NO: 158570 - protein, 78 aa, Glycine max
  unsure (1)..(78): unsure at all Xaa locations
  Clone ID: PAT_MRT3847_114207C.1.pep
DVYENFIHPRPGGSLINGQKPNXFPFLGGEAXEFQAQAKKHLMKGSFGRCIXKYTTPEQTKKRKRAISYSYSHKIILI

SEQ ID NO: 158571 - protein, 125 aa, Glycine max
  Clone ID: PAT_MRT3847_114208C.1.pep
DAWGQKGDRTQGTAQRSAASTSQLSLRSHSQVLLKLPVLAWYPCKCCCSRFQGERFTLNFLSCLNGLLSIWEQLSCLESVFLLLEKRTGPCLQDPPVCTAWNTPTFVVVLDNLRYICFPSQRRLL

SEQ ID NO: 158572 - protein, 196 aa, Glycine max
  Clone ID: PAT_MRT3847_114209C.1.pep
ARQRIQEQLSAVTADMVMLSTDEPEKKETASSKKSDGSENGNTMHYKKLVGEVKAILNKGVVASELQSQMEAIPSPAQEKISALIEALFEGIEKGFAKEVVKKKRYFDAAVSMGEGSHLLLLRAIEAFCLKSTSNALKEIAIVLKALYDADLLEEEHIVQWYQEGLKGDNKHSQIWKNTKPLIEWLQSAESETEEE

SEQ ID NO: 158573 - protein, 131 aa, Glycine max
  unsure (1)..(131): unsure at all Xaa locations
  Clone ID: PAT_MRT3847_11420C.1.pep
MVNELTTGVDFEKFSWKIEDFSKKNLMKLRSKPFKIRGCTWRLLVYPLRRDVNHFSVYLMVADSLPPYGWSRNTFFMLALINQVDRNKSIAKETQHKFNGGYRCWGSXFLDLTDFXPKHGYXVRDTCIIEA

SEQ ID NO: 158574 - protein, 56 aa, Glycine max
  Clone ID: PAT_MRT3847_114210C.1.pep
ELSSQHLHQEDRFLVEQNRMARPVGESQRGKTFIYDHHCNGINTMKKKTTIEKTNE

SEQ ID NO: 158575 - protein, 60 aa, Glycine max
  Clone ID: PAT_MRT3847_114211C.1.pep
RAERAEVVISSNHLRVTYTRSSTLGSQLVGQVALSGPRSGVSARIKPWCQWVRWLWCLRL

SEQ ID NO: 158576 - protein, 102 aa, Glycine max
  Clone ID: PAT_MRT3847_114212C.1.pep
NHNHNHHQLDSHHPHRWFPINTFMSMGGTYHCFRSNKVTPHFFVKSEPSSSKLPALILHYLLRRGILHTTMHHHHPQQQRGGSPTSSSGEVDAIKAKIVAHP

SEQ ID NO: 158577 - protein, 88 aa, Glycine max
  Clone ID: PAT_MRT3847_114213C.1.pep
IKALLCLQRESDTINYEDAVTDKGNMETLIHNGRYDLTLPSLPIIQVALASEADYIERVREAQTAIELTHAICVDANGLHLMADHLHL

SEQ ID NO: 158578 - protein, 83 aa, Glycine max
  unsure (1)..(83): unsure at all Xaa locations
  Clone ID: PAT_MRT3847_114214C.1.pep
PPSVLSFFFFSLFFSFFTHSKHTDSHAITLCKGQATYIQQLVLVSCNDCCMLQKRRYTTSKXXSFKRDTLDDDTDTLGFQMVC

SEQ ID NO: 158579 - protein, 87 aa, Glycine max
  Clone ID: PAT_MRT3847_114215C.1.pep
WKEDPCCDYFIDGPDCRHPKNVPCMSTTWGSLPCEKGHDPYRPVIFYQAVRTSRTNRGILDRTLRADQFSLSRVISKLAHLMSLAGC

SEQ ID NO: 158580 - protein, 124 aa, Glycine max
  unsure (1)..(124): unsure at all Xaa locations
  Clone ID: PAT_MRT3847_114216C.1.pep
CTLFYHSESLSEATCLENGGASALTDIVYKTVEKIERPQSDRHIAVKTNCGKPTGIHSRAMRKFQGCTSLPDIGDGSDNKTRHYLPNGXFKKFVDHNANDLELLMMYNMADCAEIALHISACKR

SEQ ID NO: 158581 - protein, 79 aa, Glycine max
  unsure (1)..(79): unsure at all Xaa locations
  Clone ID: PAT_MRT3847_114217C.1.pep
IVNRWIXXKLXYVCCVKTSRGGTKPIILTPRVVTLGAIRKSISLLLILXFSMDYGVLLPTLCGLTSNVLLLGITYFLAF

SEQ ID NO: 158582 - protein, 66 aa, Glycine max
  unsure (1)..(66): unsure at all Xaa locations
  Clone ID: PAT_MRT3847_114218C.1.pep
IXXXXTQXKYESXXXEVQDXGXXDXLGXXKDXEDKXHXQEXXIATXFQKVTVSXQXENKHSLXEKF

SEQ ID NO: 158583 - protein, 39 aa, Glycine max
  Clone ID: PAT_MRT3847_114219C.1.pep
GKSLDKDHCQIATIAYALRVITVFKYSEVCPGSDFFSLF

SEQ ID NO: 158584 - protein, 96 aa, Glycine max
  Clone ID: PAT_MRT3847_11421C.1.pep
MLFLYFKKTCAPSHSASFFISFCREYHLPRALFFSLLSCELLLVLLPRKAAVGALPLAISSSSIFLRVSLLIQRAPFFSFFIEVRFLLPLLPLLIA

SEQ ID NO: 158585 - protein, 104 aa, Glycine max
  unsure (1)..(104): unsure at all Xaa locations
  Clone ID: PAT_MRT3847_114220C.1.pep
SKAEQKEAAKKEFIEAVILLQKQLGDETYFXADNIGYVDRALVPLSTWSKVXRTVASFVIDNRSPRFAAWAKRCLQKQSVAKSHPDQPKVYQFVVEITKKLVIQ

SEQ ID NO: 158586 - protein, 45 aa, Glycine max
  Clone ID: PAT_MRT3847_114221C.1.pep
NTWFNGKRKLCLLDIAHHCQTSYLNGTHQSLTLPTLKMLYDNIIA

SEQ ID NO: 158587 - protein, 140 aa, Glycine max
  unsure (1)..(140): unsure at all Xaa locations
  Clone ID: PAT_MRT3847_114222C.1.pep
MANIGQLSDMRIGSVRVTNLSITYVHCSIKLPYKADVILLNYRCMPNKTYEALENGPNAPIPEPSPPFTVNAANEWDHDFSCADSATCCCMLESGNACFEWGHYALEGASCCDDHYSCXPADCTMWNTYAFTCAMSKNNP

SEQ ID NO: 158588 - protein, 36 aa, Glycine max
  Clone ID: PAT_MRT3847_114223C.1.pep
KQKVDTEAIISWRNETNEVECLSLFMCLSNGESEKG

SEQ ID NO: 158589 - protein, 97 aa, Glycine max
  unsure (1)..(97): unsure at all Xaa locations
  Clone ID: PAT_MRT3847_114224C.1.pep
FSLLTTIMLLFTSAFAKTSSPSFLYPSPSPFHSPYFINLTELLKAPXTFYTFLLYLEYTIEIDTFHIQAINTEXXITIFVPNDSSFNAIPITTLFNL

SEQ ID NO: 158590 - protein, 100 aa, Glycine max
  unsure (1)..(100): unsure at all Xaa locations
  Clone ID: PAT_MRT3847_114225C.1.pep
FTSCSIYRAWFAQCGANCLMLYITDLTAIGVFSTNDNCSAVAIHGIAGAFNGMISSHYYCTDXISCRHIDPAETLVLITARNVTLTTSITFIRIQCLLAI

SEQ ID NO: 158591 - protein, 51 aa, Glycine max
  Clone ID: PAT_MRT3847_114226C.1.pep
LFEIKLIGNLICGLMTFKENVCIHYTHPKASKRLTRHCLHSLKLKTYKSWC

SEQ ID NO: 158592 - protein, 49 aa, Glycine max
  Clone ID: PAT_MRT3847_114227C.1.pep
TLSNDGGREPRNHAGSQRGIFSLPGFFVSFFLFFFFFCKIRCVTLRTRG

SEQ ID NO: 158593 - protein, 92 aa, Glycine max
  Clone ID: PAT_MRT3847_114228C.1.pep
SKPNRFEFRFEFEFHFQLPCDALHGRRTLIGNMARGEFRKRAASGHTSSSQSLISFSMEPLFIPAGDHQSSRGGRPPPNRRSRRRSSFSFLR

SEQ ID NO: 158594 - protein, 152 aa, Glycine max
  Clone ID: PAT_MRT3847_114229C.1.pep
GEYVCQMCSELIQATESPIASGATLIICPAPILPQWHDEIIRHTHQGSLKTCIYEGVRDTSFSNTSLMDIGDLASADIVLTTYDVLKEDLSHDSDRHEGDRHFLRFQKRFAPKSAIFLLCQYIFISYVGYFTYTFLDEFEIHRSFHSSSFHF

SEQ ID NO: 158595 - protein, 51 aa, Glycine max
  Clone ID: PAT_MRT3847_11422C.1.pep
RNSGGSCLTISQKAGSWTSACDGAGHSLLFGGLGTIRFLRHASFAGLLFAM

SEQ ID NO: 158596 - protein, 30 aa, Glycine max
  Clone ID: PAT_MRT3847_114230C.1.pep
PQKKVFSALFPSRSTSHGAKLLVLAYNLSF

SEQ ID NO: 158597 - protein, 66 aa, Glycine max
  Clone ID: PAT_MRT3847_114231C.1.pep
IAIFVRHNDHLLWSNIDAVLLNVSSIRQLNSAKTFMVFHPCRHLINYEPISHKSSETSSDVRSSAC

SEQ ID NO: 158598 - protein, 92 aa, Glycine max
  Clone ID: PAT_MRT3847_114232C.1.pep
GTTPDKNQIQWGKRNPAHANKTFLQIKEHLIFKHYYDPDLALAHCSNTLEKPKCIIPRSPKLANELNMQPSAKRVFACTKERKVEQNSTGKS

SEQ ID NO: 158599 - protein, 134 aa, Glycine max
  Clone ID: PAT_MRT3847_114233C.1.pep
LDEFYRAKVKHFLHGTKVNLGRQIISVFNTFLFRVPSVFEVLKFKGGITIIPQQSVFPLQTVQTLFNFTLNFSIYEIQSNFDELTRLLLPALLVPPLPLRDVCLPHAEGPTLDLLIVDLSIERDLPGILKNMLI

SEQ ID NO: 158600 - protein, 123 aa, Glycine max
  Clone ID: PAT_MRT3847_114234C.1.pep
NERVLRRVVVEIPPPNRLTGLYVPDGLEVITFRYPGPVKSREMTPRLLHLLTPILRSVGILPRPPVPFLQVFRRLWCRILHGFRCRARLLLSSAPYLFQSTPGRGPLLSSSHTMQAQNQPKGS

SEQ ID NO: 158601 - protein, 66 aa, Glycine max
  unsure (1)..(66): unsure at all Xaa locations
  Clone ID: PAT_MRT3847_114235C.1.pep
LRTPMQDVQVTIDRVLSLXECVTWTXGVLNAQNSFVKNQRMGKLNFPHGTDPNVKKMPFSIGGGAG

SEQ ID NO: 158602 - protein, 59 aa, Glycine max
  Clone ID: PAT_MRT3847_114236C.1.pep
DLDPDKSSIYSALMSSHLSPHAHFRNGAQRPLALLGSFRFDGLLCQGIGGGRECFMGPV

SEQ ID NO: 158603 - protein, 117 aa, Glycine max
  unsure (1)..(117): unsure at all Xaa locations
  Clone ID: PAT_MRT3847_114237C.1.pep
MKTILSNQTVDIPENVDITLKGRTVXIVKGPRGTLRRDFNHINVELSLLGKKKKRLRVDKWWGNRKELATVRTICSHVQNMIKGVTLGFRYKMRSVYAHFPISVVIQENGSLLESIE

SEQ ID NO: 158604 - protein, 54 aa, Glycine max
  Clone ID: PAT_MRT3847_114238C.1.pep
GAPLLTLRKGPVFWKAFSHVDGRRGVEFIVHLGLGRCFTLLVCLNDRWLGRFLS

SEQ ID NO: 158605 - protein, 103 aa, Glycine max
  Clone ID: PAT_MRT3847_114239C.1.pep
WRSSYPARLTNFAIPRAFSSHTFFAMADPPRFYHPSFLIFNHSITLTRFTFLSLLFTPKESNKKKNSIFTHKVHCFDSIYRSSSLTSIGSASILIGCHSLVIF

SEQ ID NO: 158606 - protein, 65 aa, Glycine max
  Clone ID: PAT_MRT3847_11423C.1.pep
ICLLDMNTLALQEWSHVGVLNVMDINTKNTTFKCNCCMYITETSHLDLFEHFKDTFNHVEYILDM

SEQ ID NO: 158607 - protein, 105 aa, Glycine max
  Clone ID: PAT_MRT3847_114240C.1.pep
GGVCGEPPGAPPLLGKKNNPGGGLKKHLPLGGGGMFLSPMAHGVSLVETALKGRNLLKGGGLQLKPPGVRIISMRLVFWGDLWAKDIFPQGSLFLIRPPMFIFPP

SEQ ID NO: 158608 - protein, 84 aa, Glycine max
  unsure (1)..(84): unsure at all Xaa locations
  Clone ID: PAT_MRT3847_114241C.1.pep
EERLGFFAFAMSTTFXTTADAHPVFLQERYIFMMETAYNAYRRLSYLDSHALDALPPLSVLSPAFSELTFWAVGLYRGISGFLF

SEQ ID NO: 158609 - protein, 99 aa, Glycine max
  Clone ID: PAT_MRT3847_114242C.1.pep
TESQSRTSNVSNSVKKGSKLKGSTASDKNWQPSTIKECKLLKHKYGIGCEPCHIFCSGLSLSLRSDTLRADFENCTCKKVHKNMKLIIYEGQYQFGFRT

SEQ ID NO: 158610 - protein, 60 aa, Glycine max
  Clone ID: PAT_MRT3847_114243C.1.pep
IKDLRAQIMLNLLSLMEEPDCRTSIMQPHLHGTMINIQEGRNPYHRSNLHFHFSLLHMYS

SEQ ID NO: 158611 - protein, 77 aa, Glycine max
  unsure (1)..(77): unsure at all Xaa locations
  Clone ID: PAT_MRT3847_114244C.1.pep
QXGGISAPTPQSREKHAGLIEAQPLNTSVQRMGVLQNVELTEIALDSEVSGGVENIVPTHSADSERGDFDTRGDTKR

SEQ ID NO: 158612 - protein, 66 aa, Glycine max
  Clone ID: PAT_MRT3847_114245C.1.pep
SDVPSTFYGHHEANDSGFTFYTGSSSYPPTYIDTVGYWMFLGYEPSLMSFICGPLKDASGMTIHGE

SEQ ID NO: 158613 - protein, 220 aa, Glycine max
  Clone ID: PAT_MRT3847_114246C.1.pep
TRPALPIVALSLLLGAIIAFLFFSTYYRKRQSEIQSIADPNPKPLSSKAPPKKPLSKPHSSDKDQNKRHHPLDLNTLKGHGDAVTGICFSPDGRNLATACADGVVRVFKLDDASSKSFKFLRINLPAGGHPTAVAFSDDASSIVVASYTLSGCSLYMYGEEKPKTSEDKPQTKLPLPEIKWEHHKVHDKKSIITNVWSPPALYGTADGKYNWLPSCSERD

SEQ ID NO: 158614 - protein, 88 aa, Glycine max
  Clone ID: PAT_MRT3847_114247C.1.pep
MSQKKLRKRSNPKILQGRPQLHDHITMSRNMRHVPSAVPSFLDGSEAQAIHVVGDATGWIIAPGGAALYTTYASNTIFTVGDTLVSHI

SEQ ID NO: 158615 - protein, 260 aa, Glycine max
  Clone ID: PAT_MRT3847_114248C.1.pep
SIRLRGENRVDISSVQQQDQAVEDEMKVKFVSTSKKEKSQGTSFLQRSRNAIMGAADAVRRVATKGAGAFVEDTKRTEALVQTGDGMIWSGCTNGLLVQWDGTGTRVQDFNRHPCAVQCFCTFGTRLYVGYVSGIIQVLDLEGNLIAAWVAHNGPVIKLAVGCDYVFSLATHGGLRGWIIASPRPVDNMIRSELAAKELIYTRLHNVRILIGTWNVGQGRASQDSLSSWLGSIASDVGIIVVGLQEVEMGAGFLAMSAQK

SEQ ID NO: 158616 - protein, 56 aa, Glycine max
  Clone ID: PAT_MRT3847_114249C.1.pep
FDRPHSPRTTLTAHPRPPPSSRDPHNPRPPTHPSEPHPLLGTLSLPFPPPPSPPPP

SEQ ID NO: 158617 - protein, 68 aa, Glycine max
  unsure (1)..(68): unsure at all Xaa locations
  Clone ID: PAT_MRT3847_11424C.1.pep
DKSIGPLEIKIVEXGXFDKLMDYAISLGASINQYKTPRCVKFAPVLELLNSRVVEKYFSXKCSKWVPG

SEQ ID NO: 158618 - protein, 115 aa, Glycine max
  Clone ID: PAT_MRT3847_114250C.1.pep
APVDSLAKPCLNTNNTGKNIDIFPSQDSKLTNLRHTVPSPISPAKRKRSTDSKQNKKAKVKAKSEPSGSKQATITRFFSKVIPEMPGGTQSDNSEPKLDQSSKVEDLLPTDDGQM

SEQ ID NO: 158619 - protein, 80 aa, Glycine max
  unsure (1)..(80): unsure at all Xaa locations
  Clone ID: PAT_MRT3847_114251C.1.pep
MIGTESPKDEKRAFLKTIXRPNTRCITILPRESNLVAPQKPSTPARPTMKKRDTPSRQGGINPYSTEWTGTANRSLSKGN

SEQ ID NO: 158620 - protein, 77 aa, Glycine max
  Clone ID: PAT_MRT3847_114252C.1.pep
TQGGLPFQQSTQRPPSFQFPHLIFNPVFLRNLGKVALLLLLPPKSAKVRGVNFWLSVPPLGRASFSFSQKAGSWALL

SEQ ID NO: 158621 - protein, 106 aa, Glycine max
  Clone ID: PAT_MRT3847_114253C.1.pep
ILATCFLHWHECSISTINLHTRESRVFHCDHNWGTLLSLFHPPIGKIKAWSHFHTDSHFHTKTTHYKFTSTHSIYIHIHTNKDSRHQLYRSFSVKKTKDSDLNPPP

SEQ ID NO: 158622 - protein, 67 aa, Glycine max
  Clone ID: PAT_MRT3847_114254C.1.pep
LLHISKWDVFPFCHKQRFNLEQQSSYIFISFKCLWVFSFSFLVEEGFGKRQEDAIQTGHSDAHCSTK

SEQ ID NO: 158623 - protein, 56 aa, Glycine max
  unsure (1)..(56): unsure at all Xaa locations
  Clone ID: PAT_MRT3847_114255C.1.pep
MFVTAVFQLRGGGRFAPHFFSSKKKKMKQKXKKKKQKKNKKPKKKKKKKKNKKKNK

SEQ ID NO: 158624 - protein, 63 aa, Glycine max
  Clone ID: PAT_MRT3847_114256C.1.pep
WSHVYVIFNISANGNLLVCLEMLIEKFERVIFFSFLLYHFSSTRPTSCLLNKNEGKKNSQRKC

SEQ ID NO: 158625 - protein, 158 aa, Glycine max
  unsure (1)..(158): unsure at all Xaa locations
  Clone ID: PAT_MRT3847_114257C.1.pep
RYIRNVQLIFXADSGTGGRGGYLDHDGIMRDIMQNPLLRILALSAVDTLESSYAYAMENETVKGLRRMXTHATRCYSMGQVMSRHXRRTWPAYVGDRTVPSGSLSPTCAASDLFIDTAIRDDVPVLMDAVXALHDIRAEIQVQLKHVPRQLYNRNYGS

SEQ ID NO: 158626 - protein, 47 aa, Glycine max
  unsure (1)..(47): unsure at all Xaa locations
  Clone ID: PAT_MRT3847_114258C.1.pep
XXSNISHXXQXQPMIFXPTGVHDXMXXIEWGXSIGFXIXRTTNDXXA

SEQ ID NO: 158627 - protein, 114 aa, Glycine max
  unsure (1)..(114): unsure at all Xaa locations
  Clone ID: PAT_MRT3847_114259C.1.pep
GKTLKYDIIGAASHSSQDFAAPEDHYKPHMIGARLRQRIYPQYNDVHAHIETNXIKLSLDDRXTPKGCMWDLKIPQSKIALSKNTVGGTILRYDLLANILTDGNFRASADSQRT

SEQ ID NO: 158628 - protein, 105 aa, Glycine max
  Clone ID: PAT_MRT3847_11425C.1.pep
HPSSKIRNELLQSPRPKGPKSAGKQQKYANRSRTDARHRETKEPADILFKNKKSKERKRVSSYRQCRWKLRTRDRHGQGRRRRERSRNQGGKGGGRPDPWREAGT

SEQ ID NO: 158629 - protein, 349 aa, Glycine max
  Clone ID: PAT_MRT3847_114260C.1.pep
MEGDQHGSNYSFPPGFRFHPSDEELIVHYLENKVSSRPLPACIIAEIDLYKYNPWELPNKSLFGEEEWYFFSPRDRKYPNGLRPNRAAASGYWKATGTDKPILSSCGSRRIGVKKALVFYSGRPPKGAKTDWIMNEYRLVDTTIKSSRLKGSMRLDDWVLCRVRYKGYSQKNSCENQESPSELNLSAKLLRSEENPTKMNCRADMIPDYQYKDYQIIASILVGGPIPPIESMPNLSFKGCKGNNVVSDYEDGFTKGNSQTTIPSLESYFNPLTRKSNEDEQYGNLISFNRKFNTDNRMDGSTSKVLNSRELNCYNQNHSQDDIFNGNPPDPTINFQELNELDFSGRYHQ

SEQ ID NO: 158630 - protein, 383 aa, Glycine max
  unsure (1)..(383): unsure at all Xaa locations
  Clone ID: PAT_MRT3847_114261C.1.pep
IPLSTWFVMDLASTIPYEAIGFXFTGKRKVGLPYFLLGLLRFWRIRRVKQYFTRLEKDIRFSYFWVRCARLLSVTLFSIHCAGCLYYMLADRYPHQGKTWIGAVNPNFRETSLRIRYISAMYWSITTMTTVGYGDLYAVNTIEMIFIIFYMLFIIGLTAYLIGNMTNLVVEGTRRTMEWRNSIEAASNFVCRNRLPPRLKEQILAYMCLRFKAENLNQHQLIEQLPKSICKSICQHLFFATVEKVYLFKDVSKEILLSLVAKMKAEYIPPREDVIMQNEAPDDIYIIVSGEVEIIHTEMERERILGTLHTGDMFGEVGALISRPQSFTYRTKTLTQLLRLKTNTLMEAMQIKREDRQILKNFLQHIKQLKDLSIKDLMVENVE

SEQ ID NO: 158631 - protein, 53 aa, Glycine max
  Clone ID: PAT_MRT3847_114262C.1.pep
DKYKLIQYVKHCLYKAHQFVPPTNMSHHINDCVTLILRSSSRGLRAQTHRRGP

SEQ ID NO: 158632 - protein, 66 aa, Glycine max
  Clone ID: PAT_MRT3847_114263C.1.pep
RSRWKMKNRALLQGEIGKKAGAGAEDGISGRSGIPPIALRLGARRYAEQRCITRVFINKKKNSGRI

SEQ ID NO: 158633 - protein, 87 aa, Glycine max
  Clone ID: PAT_MRT3847_114264C.1.pep
RPLEPAWPDSPSRLIDSTGLVAELEPEEAVSRLEPALAAMRGAVRQFGGIVSKELGDGLAAVFGAPIADDNHAPLACHAAIELVRRV

SEQ ID NO: 158634 - protein, 160 aa, Glycine max
  Clone ID: PAT_MRT3847_114265C.1.pep
METSTKNSLHIRCNSLPSAPHPLVSQFDEHLQRLKDSEATITSLSSSSITQKLIGLQDLHDYADKLLQLPTTQQAFGHKCSDKWVDVLLEGSLGLLDICSTAQDCLLQSKESVHMVQSVIRRKCPDTEFAVEGGKYLASRKKMKKAIHKALGNVKGMRNE

SEQ ID NO: 158635 - protein, 113 aa, Glycine max
  unsure (1)..(113): unsure at all Xaa locations
  Clone ID: PAT_MRT3847_114266C.1.pep
SRPLXISYFTMENXKIRDEACGGVFGNMRQCPTPKSLWIVRVLKDNACVSRTQRVYCLQASEQDRLSFPLTQRLFGIKIGSISVMLTEGTLSXAQLLGQSIYNHICEVIVADS

SEQ ID NO: 158636 - protein, 132 aa, Glycine max
  unsure (1)..(132): unsure at all Xaa locations
  Clone ID: PAT_MRT3847_114267C.1.pep
MSQNGPIHCLTTTNDCPKTFNSFHINCGGERELSSEGIVYDPDLDPSGAATSKIMGSNWAFSNTGHFLDAQKPVSETYMQQQNKTGLSKLYQTRRVFPIFLTYYGFCXGNGDYTVLLHFAEIMFTVDTHIAT

SEQ ID NO: 158637 - protein, 82 aa, Glycine max
  Clone ID: PAT_MRT3847_114268C.1.pep
HASVEMKTVEMVIKKGDVYEPEVGHLIALTDKRAACINDLNKHGNFYLIALIRRVRKKNDDKNVYEVQFFFLSTKLIQYQGY

SEQ ID NO: 158638 - protein, 43 aa, Glycine max
  Clone ID: PAT_MRT3847_11426C.1.pep
RVSEIKPERLRPTLASYLIRHLSINQQKQLGETSSGHPKPKCI

SEQ ID NO: 158639 - protein, 65 aa, Glycine max
  Clone ID: PAT_MRT3847_114270C.1.pep
LFSMIDSLENSTQAIKSSPTNLQFFRINPFNVLHFSTTSPTPFGVTCQQLWMSTSSTSTTPLRDY

SEQ ID NO: 158640 - protein, 109 aa, Glycine max
  unsure (1)..(109): unsure at all Xaa locations
  Clone ID: PAT_MRT3847_114271C.1.pep
MTTHLLTPTRDSGVMSSAYFSSMGLXEPTSIAIANMSCHRMTQIEASAISTVVTDNDELGARRSGXGKTLALLATAVECVYHVQTTPRYGTEVSLICPKGSLDSTHGLE

SEQ ID NO: 158641 - protein, 84 aa, Glycine max
  Clone ID: PAT_MRT3847_114272C.1.pep
KGDQKDSAKKPPKKSRLKAFIKLVNYQPFRPPQYTLNVDLKKRVTPTVLQAKNNKVSALKKPKKRLKERFKLGKKRWFFPKPRF

SEQ ID NO: 158642 - protein, 46 aa, Glycine max
  Clone ID: PAT_MRT3847_114273C.1.pep
MIYLATLNQMTTPNFTTLSLRKPLHSPTKSTSRTFPFSQFALLPKS

SEQ ID NO: 158643 - protein, 81 aa, Glycine max
  unsure (1)..(81): unsure at all Xaa locations
  Clone ID: PAT_MRT3847_114274C.1.pep
HAARFMGRVAVIKNWEKHKGSFVSIQXQVSTGHEYVISMGKVFIIGKGTKPCISLPKGKGIKLSFFEKARKRSAGQLAPAA

SEQ ID NO: 158644 - protein, 156 aa, Glycine max
  Clone ID: PAT_MRT3847_114275C.1.pep
SERQRVGAGQLSPALGQLNFDADALLLLRVDQTQLALQRQIDVQRANTFDAAGSKRSDQFHFLNLCHPCRHGAELELGTQPMTSSRWSHFWRRLCPHASLDVCHHWRCAQNAQRHASRRRNFGLLLAHVMHNCHVQMLLLCPVAKHNGGPVRLHLL

SEQ ID NO: 158645 - protein, 53 aa, Glycine max
  Clone ID: PAT_MRT3847_114276C.1.pep
DFWINRNHRWPTLKPGTKAIGHWIPRITQYLPHSWGPIPKGKRKHSLGWPQTP

SEQ ID NO: 158646 - protein, 293 aa, Glycine max
  Clone ID: PAT_MRT3847_114277C.1.pep
MKIQCNVCEAAEAKVLCCADEAALCWECDEKVHAANKLASKHQRVPLSTSSSHMPKCDICQEALGYFFCLEDRALLCRKCDVAIHTANAYVSGHQRFLLTGVRVGLEAIDPGASLTSLKSDSGEKVSDTKSSSVSRKVSTVPQPSNYNEVLPIEVGGVGEFPPAKVSFGGGSTDGNISQWTIDEFIGLNEFSQHYDYMEGSSRADGGKLGDSDSPVLKSGEEDMEEEDDYLERVPDSSWTVPQIPSPPTASGLCWPKDPQYSSDSVLFVPDISFSLIQQSQISSICLRRWRQL

SEQ ID NO: 158647 - protein, 210 aa, Glycine max
  Clone ID: PAT_MRT3847_114278C.1.pep
MKIQCNVCEAAEAKVLCCADEAGLCWECDEKVHAANKLASKHQRVPLSTSSSHMPKCDICQEALGYFFCLEDRALLCRKCDVAIHTANAYVSGHQRFLLTGVRVGLEATDPGASSTSLKSDSGEKVSDSSVSRKVSTAPQPSNYNEVLPAEVGGVGEFPSAKVSFGGGSTAGNISQWTIDEFIGLNEFSQNYDYMEGSSRYCRVQIHLLS

SEQ ID NO: 158648 - protein, 321 aa, Glycine max
  unsure (1)..(321): unsure at all Xaa locations
  Clone ID: PAT_MRT3847_114279C.1.pep
MKIQCNVCEAAEAKVLCCADEAGLCWECDEKVHAANKLASKHQRVPLSTSSSHMPKCDICQEALGYFFCLEDRALLCRKCDVAIHTANAYVSGHQRFLLTGVRVGLEATDPGASSTSLKSDSGEKVSDSSVSRKVSTAPQPSNYNEVLPAEVGGVGEFPSAKVSFGGGSTAGNISQWTIDEFIGLNEFSQNYDYMEGSSRVCSXCLVCMVVWFCNFFFHPSFPDESVQADGGKLGDSDSPVLRSGEEEMEEEDDYLERVPDSSWTVPQIPSPPTSSGLCWPKDHTNLYGSSDSVLFVPDISFSLIQQSQISSICLRRWRQL

SEQ ID NO: 158649 - protein, 196 aa, Glycine max
  unsure (1)..(196): unsure at all Xaa locations
  Clone ID: PAT_MRT3847_11427C.1.pep
GWLVPSYWLYEESFPTRTFSSNNYHEAIQRLQSFKASLTRHDSIASASSSLSTFSSPSSAPSPSLSLQGVNNPRVYRVTSYGADPTGNSDSTEALLAAIEDAAKGPSEGYLMEGIXNLGGAQINLEGGNYLISRSLKLPVAGVGNLMIHGGTIRASDNFPEDGYIIXLSPSSNGRNSLPSYIFEFITLKELLLDFN

SEQ ID NO: 158650 - protein, 31 aa, Glycine max
  Clone ID: PAT_MRT3847_114280C.1.pep
MKIQCNVCEAAEAKVLCCADEAALCWECDEK

SEQ ID NO: 158651 - protein, 67 aa, Glycine max
  unsure (1)..(67): unsure at all Xaa locations
  Clone ID: PAT_MRT3847_114281C.1.pep
MSCCSGRLRCRSACTCCNSCRSCXMYPDLSDTESSTTETLIIGVAPANAEFESADIGVPAENDCCKC

SEQ ID NO: 158652 - protein, 155 aa, Glycine max
  Clone ID: PAT_MRT3847_114282C.1.pep
MALRIHVISPFFSISTTSPAALSSRRISCTAAGDGGISDAALASELAARAARMNAHAAKAEEAMRKSRKLLFGELCEYMGLDEDQAQHKWSNMDDDQKCVLVKGFLKEWGSHFHPLSARSTKEMLEEYLRQGNSPPKPTNSSFFFEGLNRIIGFP

SEQ ID NO: 158653 - protein, 741 aa, Glycine max
  Clone ID: PAT_MRT3847_114283C.1.pep
MDAVVQTRGLLCLPANPVNRISLFNPSQGLKHRFFSPKPKNLSGSSLSSNGFPKLSPRPNNVFAQRDQNKNLFLCRAEAAAASFGEPESESRDSNIFPPICTHPHLPTLSLSLSLSQSFFTRERDMDAVVQTRGLLSLPTNPKTRVSHHLHPSHGLKHRFLSLKPKPLSAPSLSAAAAKFHPFGPKPQNLFICRAEAAAAADGPAQPAFGEAEVAEKPKLLGIEITTLKKIIPLGLMFFCILFNYTILRDTKDVLVITARGSSAEIIPFLKTWVNLPMAVGFMLLYTKLSNVLSKQALFYTVILPFIAFFGAFGFVLYPLSNYIHPEAFADKLLNILGPRFLGPLAIMRIWSFCLFYVMAELWGSVVISVLFWGFANQITTIEEAKRFYPLFGLGANVALIFSGRTVKYFSNLRQNLGPGVDGWAISLKAMMSIVVGMGFAICFLYWWVNNYVPLPTRSKKKKEKPKMGTMESLKFLVSSKYIRDLATLVVAYGISINLVEVTWKSKLKAQFPSPNEYSSFMGDFSTATGIATFTMMLVSQFIFDKYGWGVAATITPTVLLLTGVGFFSLILFGGPLAPGLASLGMTPLLAAVYVGALQNIFSKSAKYSLFDPCKEMAYIPLDEDTKVKGKAAIDVVCNPLGKSGGALIQQFMILTFGSLANSTPYLGGVLLVIVLVWLSAAKSLDTQFTALRREEELEKEMERAAAVKIPVVAKDEDENGSLKSVPLLNPTAGDSSSILN

SEQ ID NO: 158654 - protein, 307 aa, Glycine max
  Clone ID: PAT_MRT3847_114284C.1.pep
RRERFAARDVVRSPLNLIIKKKEKPKMGTMESLKFLVSSKYIRDLATLVVAYGISINLVEVTWKSKLKAQFPSPNEYSSFMGDFSTATGIATFTMMLVSQFIFDKYGWGVAATITPTVLLLTGVGFFSLILFGGPLAPGLASLGMTPLLAAVYVGALQNIFSKSAKYSLFDPCKEMAYIPLDEDTKVKGKAAIDVVCNPLGKSGGALIQQFMILTFGSLANSTPYLGGVLLLIVSAWLAAAKSLDTQFTALRKEEELEKEMERAAAVKIPVVAETESGNGSLATGSPLNPSSGDSSSSPSEASTPRN

SEQ ID NO: 158655 - protein, 120 aa, Glycine max
  unsure (1)..(120): unsure at all Xaa locations
  Clone ID: PAT_MRT3847_114285C.1.pep
MDQCHRAKAERHRSHQDKYQLAEEDEETATQDRNGASKSARRTAEHEAEYDNRIRLKSCNGTDLTADNHLCLKGMTGHKVQQTLPTRLDTTDEWEPRKDGGRAKHKHRXGKNLRAKGGKT

SEQ ID NO: 158656 - protein, 45 aa, Glycine max
  Clone ID: PAT_MRT3847_114286C.1.pep
YTSLFFTVPTSPCGGIDLLLPIPSLIAYCNSSTHKKPIPIPFLFS

SEQ ID NO: 158657 - protein, 48 aa, Glycine max
  Clone ID: PAT_MRT3847_114287C.1.pep
AIYTMATLAHIKYWTPLTITSFPLYHTRKFLPFNAPLFQRPLPHPYVT

SEQ ID NO: 158658 - protein, 154 aa, Glycine max
  unsure (1)..(154): unsure at all Xaa locations
  Clone ID: PAT_MRT3847_114288C.1.pep
SGMQIFVKTLTRQTITLEVESCDAIDNRKAXNQDQGGIPPKQQKLIFRRQQLQGRPTLASSTIKKXGNSQLGVRLRGGMQIFVKTXYGKTITLEVESSDTIDNVKAKIQDKEGIPPDQQRLIFAGKQLEDGKTLADYNIQKESTLHLGVRLRGG

SEQ ID NO: 158659 - protein, 39 aa, Glycine max
  Clone ID: PAT_MRT3847_114289C.1.pep
TFHNFSSTSNHFIVSKINNFEIFFIDFWPWPDHQQHQFH

SEQ ID NO: 158660 - protein, 42 aa, Glycine max
  unsure (1)..(42): unsure at all Xaa locations
  Clone ID: PAT_MRT3847_11428C.1.pep
SLLFELXWEEQARKAQRRVELITIPPTTRDSVLPHQKQELVP

SEQ ID NO: 158661 - protein, 50 aa, Glycine max
  Clone ID: PAT_MRT3847_114290C.1.pep
SSREHLLKVDGDDDTCIIMGKVVVTKNSCLYPLDITIPDAIYPEELHENG

SEQ ID NO: 158662 - protein, 611 aa, Glycine max
  Clone ID: PAT_MRT3847_114291C.1.pep
GFFFHFCNIYVRFGNTLLSLSFLLFLPLLGLLITTTVVTILFLAVKNLEISSFTMDWCQNQNGSFKSTDALCIAAEADEEELDFTKVDKPRPIERCKSCEVRSLSELSKVSENSSYSIDHLDKAASLQPKSGMNTPGSLVLDPQSHPIVSEGWEALMRSLVYFRGQRVGTIAAMDSSDEKINYDQVFVRDFVPSALAFLMKGEPEIVRNFILKTLRLQSWEKMIDKFHLAEGVMPASFKVLHDPVRNHETLIADFGESAIGRVAPIDSGFWWIILLRAYTKSTGDNSLAELPECQKGMRLILNLCLSEGFDTFPTLLCADGCCMIDRRMGVYGYPIEIQALFFMALRCALILLKEDAEGEEFRERITKRLHALSYHLRSYFWLDLKQLNNVYRFKTEEYSHTAVNKFNVIPDSLPDWIFDFMPLKGGYFIGNVSPARMDFRWFCLGNCIAILSSLATPEQSIAIMDLIESRWQELIGEMPLKVCYPALENHEWRIITGCDPKNTRWSYHNGGSWPVLLWLLAAASIKTGRPQIAKRALEIVETRLFKDNWPEYYDGKLGRYIGKQARKCQTWSIAGYLVAKMLLDDPSHLGMVALEEDKHQKPVLRRSNSL

SEQ ID NO: 158663 - protein, 63 aa, Glycine max
  Clone ID: PAT_MRT3847_114292C.1.pep
ITLRIKMYNRLNKYQPIPSDDCQILISFGCNAFIIRVECFYHCQSNCGVWHRLQRRPRGDSGF

SEQ ID NO: 158664 - protein, 362 aa, Glycine max
  unsure (1)..(362): unsure at all Xaa locations
  Clone ID: PAT_MRT3847_114293C.1.pep
MDRAALTVGPGMDMPIMHDSDRYDLVRDIGSGNFGVARLMQDKQTKELVAVKYIXERGDKIDENVKREIINHRSLRHPNIVRFKEXILTPTHLAIVMEYASGGELFDKICNAXGRFTENDARFFFQQLISGVSYCYAMQVCHRDLKLENTLLDGXPAPRLKICXFGYSKSSVLHSQPKSTVGTPAYIAPEVLLKQEYDGKLADVWSCGVTLYVMLVGAYPFEDPNEPKDFRKTIQRVLSVQYSIPDGVQISPECRHLISRIFVFDPAERITMSEIWNHEWFLKNLPADLMDEKIMGNQFEEPDQPMQSIDTIMQIISEATVPAVGTYSFDQFMEEQIYDLESESDAESDLDIDSSGEIVYAI

SEQ ID NO: 158665 - protein, 50 aa, Glycine max
  Clone ID: PAT_MRT3847_114294C.1.pep
RYSYANALKLIMSPWDNTAYARSLSCQHRRWERELSSDSPEEARQLRERA

SEQ ID NO: 158666 - protein, 283 aa, Glycine max
  Clone ID: PAT_MRT3847_114295C.1.pep
MENHSDSIFSYHESCDELRQKLLATTLELKTMENVKRELLNLLKMAYQERDEAREELQKLEAREELQKLVTKLTPSILFEVPSMMMIHAQTKANSSITESNSTSHVSSSVDSLLEAFSPQEFSNMNNNNIVESHNLGGYYLKQPSVQNMNMSVLSQKRTCDAGDQVIEYMAKGKVLPQKGNLLKAVMDAGPVLQTLHVAGPLPTWRNPPPLQNIKIPPLNVQDFVASNNNNNVNTLRKPMLAPSHYFTQPSMLNNSFQMASNANCKNLAPSRIPQSNQHFLRN

SEQ ID NO: 158667 - protein, 57 aa, Glycine max
  Clone ID: PAT_MRT3847_114297C.1.pep
RTSGSGWICVLLIDYLQYMNRTPLYSRSEPPCIRSMRVQAKTPTGRRSRSEPYRSGH

SEQ ID NO: 158668 - protein, 50 aa, Glycine max
  Clone ID: PAT_MRT3847_114298C.1.pep
NAANCWSSCKGVCACTVFKLALVTVPTVRIDFRTTFYFYAKCCIWLVHLS

SEQ ID NO: 158669 - protein, 61 aa, Glycine max
  Clone ID: PAT_MRT3847_114299C.1.pep
IKKKKTLGFFLWLSMQPTKLNFQLIPPTFLLFKRPIPPDCGLEFKGIFEAIKIWRYYASLI

SEQ ID NO: 158670 - protein, 42 aa, Glycine max
  Clone ID: PAT_MRT3847_11429C.1.pep
SSLAARGVAQFGLDLRMMGKDKVHISIVVIVLVDSGIATTTR

SEQ ID NO: 158671 - protein, 30 aa, Glycine max
  Clone ID: PAT_MRT3847_1142C.1.pep
CIYSKDVLVVIENPTSMGIPSIQNTYCRFP

SEQ ID NO: 158672 - protein, 190 aa, Glycine max
  Clone ID: PAT_MRT3847_114300C.1.pep
PASAGGNRTNVQLSIFSNQTSVVVYSFLGECGVRCCRGSQLTWDLVDQGVLGLVDLVDLVGVLGLVGQAGVQAREDLVSLVLVGFSVDVQMAYATLYLHASTACAVVGCSEIVLVVDAAQAQACHLLSNNRHIFTVTVLLIWIRRVEDLRAAHDCQAIYVHCSFRGLGYLYSIPVFMLWLSRKSLFSYVM

SEQ ID NO: 158673 - protein, 55 aa, Glycine max
  Clone ID: PAT_MRT3847_114301C.1.pep
RAWKSVLLSEAYLSNNAEIHMISLAPYLAVWVAVFHKHERSRSRKLPFCCLLTAV

SEQ ID NO: 158674 - protein, 47 aa, Glycine max
  Clone ID: PAT_MRT3847_114302C.1.pep
LAKQVTYTRGKESKKARAPSSWYVRMMINIVFYKNSRTLNHHIKFSS

SEQ ID NO: 158675 - protein, 67 aa, Glycine max
  Clone ID: PAT_MRT3847_114303C.1.pep
RLREDDRRGPKNTTKPCKICRQKGRSRLKGSLRHSNKSNHIHPYKTFVMAIMNTDHACTQTHQECFL

SEQ ID NO: 158676 - protein, 97 aa, Glycine max
  Clone ID: PAT_MRT3847_114304C.1.pep
SGLTHGSPPPFGLRKPQNLFFFKLKLNGKKSALGGLKGSPPKLAQDFSWGFYQEGEKWGFPFGTRFMTFLAGLGPFMIFRARGRGGPPLAFSLAFPV

SEQ ID NO: 158677 - protein, 61 aa, Glycine max
  Clone ID: PAT_MRT3847_114305C.1.pep
TSQTLNKDELSEQHAGAKGALAVYLTRGAYTCSHPTQAVHKLSRLTTTTLTSTKHYTPHYT

SEQ ID NO: 158678 - protein, 74 aa, Glycine max
  Clone ID: PAT_MRT3847_114306C.1.pep
VPLKYDLYAIVVHTGLSSTSGHYFCFVRSAPDTWHKLDDSMVTEVSVETALSQEAYILFYARQGTPWFLRIMEE

SEQ ID NO: 158679 - protein, 605 aa, Glycine max
  unsure (1)..(605): unsure at all Xaa locations
  Clone ID: PAT_MRT3847_114307C.1.pep
MMKHYHVLYMFLFFLPISTLSLHHNDTHALTLFRRQSDLHGYLLSNWTGHDACNSAWRGVLCSPNGRVTALSLPSLNLRGPLDPLTPLTHLRLLNLHDNRLNGTVSTLFSNCTNLQLLYLSSNDFSGEIPPEISSLKSLLRLDLSDNNLRPRVRXISNLTQLITLRLQNNLLSGEIPDLSSSMKNLKELNMTNNEFYGRLPSPMLKKFSSTTFSGNEGLCGASLFPGCSFTTTPPNNNDSNNNNDNNSNEKEPSQTVSSNPSSFPETSIIARPGREQQRKGLSPGAIVAIVIANCVALLVVVSFAVAHCCARGRGSSLVGSGESYGKRXEFEQYMDVIGKLKHPNVVRLKAYYYAKEEKLLVYDYLSNGSLHALLHGNXRGPGRIPLXDWTTRISLVLGAARGLAKIHAEYSAAKVPHGNVKSSNVLLDKNGVACISDFGLSLLLNPVHAIARLGGYRAPEQEQNKRLSQQADVYSFGVLLLEVLTGRAPSSQYPSPARPRMEVEPEQAAVDLPKWVRSVVREEWTAEVFDQELLRYKNIEEELVSMLHVGLTCVVAQPEKRPTMEEVVKMIEEIRVEQSPLGEDYDVSCNSLSPSIPTTEDGLA

SEQ ID NO: 158680 - protein, 91 aa, Glycine max
  Clone ID: PAT_MRT3847_114308C.1.pep
VGARDGNWPEQGRIYLSPFCMVIIIGFYRIWELTRNHRRRQLKPPILHNAQRVSTTPATLFSKIRAVSIFPNIFNTITKKQIKISSRIGSI

SEQ ID NO: 158681 - protein, 42 aa, Glycine max
  Clone ID: PAT_MRT3847_114309C.1.pep
ELISAISYNKVLHPHNMRPTEKAPVTVTPPSNKRKYILKPYA

SEQ ID NO: 158682 - protein, 200 aa, Glycine max
  unsure (1)..(200): unsure at all Xaa locations
  Clone ID: PAT_MRT3847_11430C.1.pep
MSKTTTSSSEQTARNRLATLAAHLLPSDAASATAILRPHRLSAPAGSSPPVNLKGTVTVVDERTGKKYQIEVTPDGTVRASDFKKISTGKNDKGLKLYDPGYLNTAPVISRISYIDGDAGILRYRGYPIEDLAEKSSFMEVSYLXDMIQSMPHDAHPXGMLVNAMSALSVYHPEANPALKGLDIYNSKQVRNKQVARGIG

SEQ ID NO: 158683 - protein, 309 aa, Glycine max
  Clone ID: PAT_MRT3847_114310C.1.pep
MAPGSSVFKEVLESHLMSSDYETGKAKSEAKSNITSTKSSVGLSGKSGISSNNGVYELLGCPVCKNLMYPPIHQCPNGHTLCSHCKVEVHNICPSCHHDLGNIRCLALEKVAESLELPCRYQSLGCHDIFPYYTKLKHEQNCGFRPYNCPYAGSECSVMGDIPTLVAHLKDDHKVDMHDGCTFNHRYVKANPHEVENATWMLTVFNSFGRHFCLHFEAFQLGSAPVYMAFLRFMGDDNEAKKFSYSLEVGANGRKLIWQGIPRSIRDSHRKVRDSQDGLIIQRNLALYFSGGERQELKLRITGRIWREE

SEQ ID NO: 158684 - protein, 182 aa, Glycine max
  Clone ID: PAT_MRT3847_114311C.1.pep
VGALFGRGSGGGPFTLTTTLKKGIGSRRFKGVNQGFSRTPLFLKLGREIKFRGPKKKGKKAKAGGRKGGALKRRPPLCVSTSFFPCFFVPLQGCCSIFLSVLFICFLFFFFFFFFFFFFFFFFLFQLPTYMKILNLKRINSSLHGQQLVIFQQLIIHKVLNMKQIHPCDIQKQSFHCFLSFA

SEQ ID NO: 158685 - protein, 81 aa, Glycine max
  unsure (1)..(81): unsure at all Xaa locations
  Clone ID: PAT_MRT3847_114312C.1.pep
VGSGVGYRAGTGDIGLPXEFGPEPGFLAPRRSRHGLGLRRRRSVSVTVVRIGIAHFWNKLCVVVLEHSLMVLQIWRVELQQ

SEQ ID NO: 158686 - protein, 56 aa, Glycine max
  Clone ID: PAT_MRT3847_114313C.1.pep
LEHEKHDRLRNFREVLLEANIIYSKLYRKTVILCINLVLELHKQAKIQRSHSSSIA

SEQ ID NO: 158687 - protein, 104 aa, Glycine max
  Clone ID: PAT_MRT3847_114314C.1.pep
WTPLCFCFFCPGLLFREREWFSPVKTFSLPIWSLGLCCLLLIFLGDDIWVTNQKSPCNMKSSLPSRALFCFYKWPTPVGPLFPFFNVQKNVWLQNVAGSRIPPP

SEQ ID NO: 158688 - protein, 57 aa, Glycine max
  Clone ID: PAT_MRT3847_114315C.1.pep
DQDGFLMQERLSRLPLKMDVPEKILYQAHVQPGPVADFLHENGIFFIYASVDILCEN

SEQ ID NO: 158689 - protein, 110 aa, Glycine max
  Clone ID: PAT_MRT3847_114316C.1.pep
TCCPLWLRNLLPVSSKFPFLPLSGWLKGPINPGKCGIKLNGNMVRCFLFEGVKKTKNSFTRLVMSRVFEPKNANPTNGVFANVSLHQLWVQTGRISLRFRKECKIQLQSP

SEQ ID NO: 158690 - protein, 42 aa, Glycine max
  Clone ID: PAT_MRT3847_114317C.1.pep
ILYIVITNVHHLFVTCKQLVLSLSTQLDMFREYIGKLKGIVG

SEQ ID NO: 158691 - protein, 42 aa, Glycine max
  Clone ID: PAT_MRT3847_114318C.1.pep
DLLESSLKYISAYCELWNWYCLIVDMIIHSPDHVQKLPLMPA

SEQ ID NO: 158692 - protein, 363 aa, Glycine max
  Clone ID: PAT_MRT3847_114319C.1.pep
MSLMQLTSSPVGSLVRFIVIFALWYRTMALAKLPPNASSVPAVLAFGDSIVDPGNNNNIKTLIKCNFPPYGKDFQGGNPTGRFCNGKIPSDLIVEQLGIKEYLPAYLDPNLKSSDLVTGVCFASGASGYDPLTPKITSVLSLSTQLDMFREYIGKLKGIVGESRTNYILSNSLYLVVAGSDDIANTYFVAHARILQYDIPSYTDLMVNSASNFVKELYNLGARRVAVLGAPPIGCVPSQRTLAGGLTRKCSEKYNYAARLFNSKLSKELDSLGHNLSDTRIVYIDVYTPLLDIIENYQKYGYKVMDRGCCGTGKLEVAVLCNPLDATCSNASEYVFWDSYHPTEGVYRKLVNYVLEKYIDRLF

SEQ ID NO: 158693 - protein, 127 aa, Glycine max
  unsure (1)..(127): unsure at all Xaa locations
  Clone ID: PAT_MRT3847_11431C.1.pep
HADPGALTVLLQDHIGGLQVETKQGWIHVRPQPNALVINIGDFLQIISNETYKSAHHRVLANYSNEPRVSVAVFLNPSDRVRLFGPLPELTSXEKPALYRNFTFDEFMKRFFTKELDGKSLTNFFRQ

SEQ ID NO: 158694 - protein, 151 aa, Glycine max
  unsure (1)..(151): unsure at all Xaa locations
  Clone ID: PAT_MRT3847_114320C.1.pep
FVKELYNLGARRVAVLGAPPIGCVPSQRTLAGGLTRKCSEKYNYAXRLFNSKLSKELDSLGHNLSDTRIVYIDVYSPLLDIIDNYQKYGYKVMDRGCCGTGKLEVAVLCNPLDDTCSNASEYVFWDSYHPTEGVYRKIVNHVLEKYMDRLF

SEQ ID NO: 158695 - protein, 73 aa, Glycine max
  Clone ID: PAT_MRT3847_114321C.1.pep
LLLSIVDPLVYSIYYRFTSLFYHSGIVVKSWLTAMIQCMHSAQFRNYSSSPLISDCIFVVAQPVIISKLKYTN

SEQ ID NO: 158696 - protein, 55 aa, Glycine max
  Clone ID: PAT_MRT3847_114322C.1.pep
YFIAGPQKDAREIIQRDLYRPSIAALIRAALWLDSTVFTEIVYKSQIAANVVGDE

SEQ ID NO: 158697 - protein, 145 aa, Glycine max
  unsure (1)..(145): unsure at all Xaa locations
  Clone ID: PAT_MRT3847_114323C.1.pep
ATGCTVHCAAYAARAFKPSLLLXARLRFAAYNLKHVLMSIYVARVNPPPVPPVLSAQLFKLVVRIIPAASHVSPARTLYAIGCGLWAPQRYQLVVKLRAPLYLLWPPIRPSVMQPFPSWFTLVFFWLPLFTRSHPVTGPWTVRSR

SEQ ID NO: 158698 - protein, 81 aa, Glycine max
  Clone ID: PAT_MRT3847_114324C.1.pep
CCSCMIIIIIIICNRYIPFLKTSSKSVADFSACMRVCSLPRNSRQLLWDDYKERFATGHLQEEFALWFSNDMNIRHYGYLR

SEQ ID NO: 158699 - protein, 57 aa, Glycine max
  Clone ID: PAT_MRT3847_114325C.1.pep
PFNENLFLLYKMSLMFMYLCYHSIINHRMNYFKIIILKVNKLSYIMSCDWMIVYNFD

SEQ ID NO: 158700 - protein, 45 aa, Glycine max
  Clone ID: PAT_MRT3847_114326C.1.pep
EFFQSGKIGFVHFMILKMIGALLPLFLDFFGVIGKGKLDWNFGIP

SEQ ID NO: 158701 - protein, 56 aa, Glycine max
  Clone ID: PAT_MRT3847_114327C.1.pep
GVPRNAQKEKVWVPKAFKARSSFWKVGDKHPGYKASDSHSDQLKEDSKPSVIWFWA

SEQ ID NO: 158702 - protein, 59 aa, Glycine max
  Clone ID: PAT_MRT3847_114328C.1.pep
VKFKLGSLVYVLQKHINSYNSYIISVRDVNGQDEGGEYSLHPVTPSPSSIPIVGDLFSL

SEQ ID NO: 158703 - protein, 84 aa, Glycine max
  unsure (1)..(84): unsure at all Xaa locations
  Clone ID: PAT_MRT3847_114329C.1.pep
TLFGIPENTGIALACAMNSSFRGHASSVIYTICSQDCEXWNSACTKAMTMSFNPNPSFDAWRLEFSEXSTGLYCDIISVTGWTA

SEQ ID NO: 158704 - protein, 47 aa, Glycine max
  Clone ID: PAT_MRT3847_11432C.1.pep
TIHQLLLESLLIIQLILPDYDSFSRWKLYLTHAYFYFFFYWLHFSFN

SEQ ID NO: 158705 - protein, 91 aa, Glycine max
  Clone ID: PAT_MRT3847_114330C.1.pep
GPKLEVLSTLDLKAPLRDETHQQPQPQPQVYEQQYPQLQQWLWLAGIVTSCELRVGCGRGWNLDGDCYFPRNVEGFQRPPQIHVLTVTTLL

SEQ ID NO: 158706 - protein, 162 aa, Glycine max
  Clone ID: PAT_MRT3847_114331C.1.pep
IRLEANHGPEYSSALPLKRFNPKELEIATGFFSADSIIGSSSLSTVYKGQMEDGQVVAIKRLNLQQFSANTDKIFKREANTLSQMRHRNLVKVLGYAWESGKMKALVLEYMENGNLDSIIHGKGVDQSVTSRWTLSERVRVFISIASALDYLHSGYGFPIVH

SEQ ID NO: 158707 - protein, 117 aa, Glycine max
  Clone ID: PAT_MRT3847_114332C.1.pep
KVEDKLVSLQRRFLWGGDCEQKKIAWIKWETICLPKEDVGLGVKDINSFNLSLLGTWKWDLFQQQGELWARVLESKYGGWRALNEATRDNTGSIWWRDLKRVAQHLQHEAIMKNTTL

SEQ ID NO: 158708 - protein, 184 aa, Glycine max
  Clone ID: PAT_MRT3847_114333C.1.pep
QSTLLVKRRGKGQHCNSGIVHFPSDSHCRLKLIFFHEKNGFGRFKPVVKKEVDSNNKSSVSKKVTKFKKEEPEAVKKGPKVKKEENDDDIPLWRSTSNSKEVKKKKITIKKEEENKNNKKKKEKKVYDLPGQKRDPPEEKDPLRIFYETLFKQVPSSEMSQIWLMESGLLPKDLAKKVFEKKKK

SEQ ID NO: 158709 - protein, 55 aa, Glycine max
  Clone ID: PAT_MRT3847_114334C.1.pep
LDRPLKRKTFGERIHPSGDPAEINPGVRSRPARGPFFFFFFFFFSCPFCRLLAAV

SEQ ID NO: 158710 - protein, 53 aa, Glycine max
  Clone ID: PAT_MRT3847_114335C.1.pep
QAYLYADPRTLSNVMSPNYTSKQLNDFLRNFHKYAPIFQQVCQRLALITSFTI

SEQ ID NO: 158711 - protein, 74 aa, Glycine max
  Clone ID: PAT_MRT3847_114336C.1.pep
QTVVLKVGMSCEGCVGAPNTVLGKSDGVQSYHIDSNEQQVLLKGNVQPDTVLHTASKTANNTTSFEGDPPTSQT

SEQ ID NO: 158712 - protein, 149 aa, Glycine max
  unsure (1)..(149): unsure at all Xaa locations
  Clone ID: PAT_MRT3847_114337C.1.pep
PFRFLNYFLKPWKLGRALYQIVKFGIVQYMLTKDFTGILAAILEDYGVYCQGEFKARCGCPYMARALNSSHXWALYXLVQFYPDTKDVLAHIKPLTKFLTFKSIVFLTWSQGVPNDLVCTFAFVKTPMAQGLQVQSRVQDFIMCIEMGI

SEQ ID NO: 158713 - protein, 401 aa, Glycine max
  Clone ID: PAT_MRT3847_114338C.1.pep
MAAEKGVEMVALECLGKGFDLASDFRLRFAKGIREERLVVLDEQNKRDILIPGTGGVTIKGVSENIRCDKGDRIRFKSDVLEFNQMSELLNQKSAVQGKVPSGYFNALFDLSGDWFRDAADTKYLAFDGYFISLYYLHLTASPLILQEEVKKSVPARWDPASLSRFIQTYGTHIIVGMAVGGQDLICVKQKHSSKIPPGDLRRHLEDLGDFLFSDVPEVFNRVMQSNTMQFTSISETSSKDGLTIICSKRGGDMFKHSHSNWLQTVPSNPEAILFKFVPISSLLTGIPGSGYLSHAINLYLRYKPSPGDLQYFLEFQIPRQWAPMFCELPLRHQRRKTASPSLQFSFMGPKLHIISTQVLLTKLLLVGMRMYLEGRKCDRLALHINHLSSLPNKMILSSGT

SEQ ID NO: 158714 - protein, 468 aa, Glycine max
  Clone ID: PAT_MRT3847_114339C.1.pep
MAAEKGVEMVALECLGKGFDLASDFRLRFAKGIREERLVVLDEQNKRDILIPGTGGVTIKGVSENIRCDKGDRIRFKSDVLEFNQMSELLNQKSAVQGKVPSGYFNALFDLSGDWFRDAADTKYLAFDGYFISLYYLHLTASPLILQEEVKKSVPARWDPASLSRFIQTYGTHIIVGMAVGGQDLICVKQKHSSKIPPGDLRRHLEDLGDFLFSDVRSPSLLQRKTADGKQKVPEVFNRVMQSNTMQFTSISETSSKDGLTIICSKRGGDMFKHSHSNWLQTVPSNPEAILFKFVPISSLLTGIPGSGYLSHAINLYLRFSKPSLLEQPLFNFFTVEVHNTPLIHLLSADKPSPGDLQYFLEFQIPRQWAPMFCELPLRHQRRKTASPSLQFSFMGPKLHIISTQVVSEQKPVVGMRMYLEGRKCDRLALHINHLSSLPNKMILSSGTSTLSTPSMWRGSDDNESSDQ

SEQ ID NO: 158715 - protein, 398 aa, Glycine max
  Clone ID: PAT_MRT3847_11433C.1.pep
MHYLAFNPSSLWWQLNEFATPHTKTKPLKMSSPSPVATVVSAAALYDRAKAVKEFDETKVGVKGLIDSGIRTIPPFFVHPPETLADLKRGTKPGSAPEIPTVDLAAEESSRAAVVEQVRRAASTVGFFQVVNHGVPEELLLRTLAAVKAFHEQPAEERARVYRREMGKGVSYISNVDLFQSKAASWRDTIQIRMGPTAVDSSEIPEVCRKEVMEWDKEVVRVARVLYALLSEGLGLGAERLTEMGLVEGRVMVGHYYPFCPQPDLTVGLNSHADPGALTVLLQDHIGGLQVETEQGWIHVKPQPNALVINIGDFLQIISNETYKSAHHRVLANYSNEPRVSIAVFLNPSDREKHFGPLPELTSTEKPALYRNFTFHEFMTRFFTKELDGKSLTNFFRQ

SEQ ID NO: 158716 - protein, 56 aa, Glycine max
  Clone ID: PAT_MRT3847_114340C.1.pep
KIVTNRSKLPTITCHFKLFVTIFYLKKKIVTNRSKLPTITCHFKLFIINHPQANSS

SEQ ID NO: 158717 - protein, 58 aa, Glycine max
  Clone ID: PAT_MRT3847_114341C.1.pep
NVNLFGEAVGPFKNWKNPKSLVHVPNYKKMLFSRESFEKTKTPKRENVIVGWAPKVKA

SEQ ID NO: 158718 - protein, 121 aa, Glycine max
  Clone ID: PAT_MRT3847_114342C.1.pep
WTKGAPSTRRGATLRGTFSNPIGQKGPHMKARWQFQCTSANGAWVQGWALAMGQVKLACAGVGLSTSLTGGPLLAFGRQYDSRTIVQGIRGAQNVAHHRLLPSQIDMQEARNYLDIQYCIG

SEQ ID NO: 158719 - protein, 78 aa, Glycine max
  Clone ID: PAT_MRT3847_114343C.1.pep
KRFFFLCHNFFGILTASIGSHIMPVHKSSKKQPVQNWSVDEPAPAVTDGRAACARDACAPGSGQQSGHDSSSERVWRA

SEQ ID NO: 158720 - protein, 73 aa, Glycine max
  Clone ID: PAT_MRT3847_114344C.1.pep
SLQHNYFAIFALEWLITNHARLTSYPIDTATRRMMMTSGETVKYNNSLDTFTQILKNDGSKSLFKEANTNILQ

SEQ ID NO: 158721 - protein, 196 aa, Glycine max
  Clone ID: PAT_MRT3847_114345C.1.pep
TTISYIVFEEATVANPWWTGQGGLSGVDHPGTHSPGLGKRPSDLGISENSGGHNREEDEDNRDEPKEGAVEVGTRRPRGRPPGSKNKPKPPIFVTRDSPNTLRSHVMEVTGGADVAESVAQFARRRQRGVCVLSGSGSVANVTLRQPSAPGAVVALHGRFEILSLTGTFLPGPAPPGSTGLTVYLAGGQGQVVGGS

SEQ ID NO: 158722 - protein, 108 aa, Glycine max
  unsure (1)..(108): unsure at all Xaa locations
  Clone ID: PAT_MRT3847_114346C.1.pep
MRFNDPVFMAGVLTRKSKKEDNSSFSSGGKXHCMHVWPPFGKKKVETLSYLLDLDDAQLEREVDYLVMKGWIPCLEFYMEHGCVXHEHNRPRVYYNGRYXTMGKLPMF

SEQ ID NO: 158723 - protein, 60 aa, Glycine max
  Clone ID: PAT_MRT3847_114347C.1.pep
TYKGVEKKIIEGNKTSSPFLSRQYEKVVYVDVFMREPAVCEEHFYLRNGLKIRILVVLSP

SEQ ID NO: 158724 - protein, 53 aa, Glycine max
  unsure (1)..(53): unsure at all Xaa locations
  Clone ID: PAT_MRT3847_114348C.1.pep
RPKGQEKEGVLDSNGEVFAKGKGTFKCEPKTLMAFYXFQITVGQGFAPLFTPL

SEQ ID NO: 158725 - protein, 51 aa, Glycine max
  unsure (1)..(51): unsure at all Xaa locations
  Clone ID: PAT_MRT3847_114349C.1.pep
MSLLSDLINLNLSYTTEKVIAXYIWIGGSRMYLRSKARTLPXPLIDPSQLP

SEQ ID NO: 158726 - protein, 105 aa, Glycine max
  Clone ID: PAT_MRT3847_11434C.1.pep
LLRYLILCLMCLSRVPAGSYVPIAGVSLRKSFTGRVQRYTRKSVVQLDALNRDDQKNNTNGGQSVNATKDRFTRKPIATSSSRKSLPVLRRVSREDTSNTKENVR

SEQ ID NO: 158727 - protein, 65 aa, Glycine max
  unsure (1)..(65): unsure at all Xaa locations
  Clone ID: PAT_MRT3847_114350C.1.pep
GLEFPGXXRXTHASPRVGSYSHRRTCSLLSEIADSHLRSNISPLIITKVCVLTIVFVLCSTRSYL

SEQ ID NO: 158728 - protein, 62 aa, Glycine max
  Clone ID: PAT_MRT3847_114351C.1.pep
IGCSLHQPNPRSIHHHELFSSSHNNATHQVSDCERSTKIHTSGQATRLANTTTSNERCIHEG

SEQ ID NO: 158729 - protein, 62 aa, Glycine max
  Clone ID: PAT_MRT3847_114352C.1.pep
VPLIFFFGCLNPCFGGKNEAELILFIFCFRVYTDKRFFNGSRLCFLKKKKKKKKKKKIKKKK

SEQ ID NO: 158730 - protein, 150 aa, Glycine max
  Clone ID: PAT_MRT3847_114353C.1.pep
KKGKKRLIPPLYPKKKKGVKNTPGQNHDDPKGTTKKDQNPGNPGVNPENPDRAQRGPQLSLKGVTKKLGKNRGKNKFRGQRGIPTKSPTKNQPETKWGNPGGPKGGANSNKGAGPHRRENRGETGAAEIIKKTANPGGKGGPKWPPGGKF

SEQ ID NO: 158731 - protein, 65 aa, Glycine max
  Clone ID: PAT_MRT3847_114354C.1.pep
ILCLLPSYEEIEGKDMMSLLTMIIMEIVVIPEPDVHFVRILIAGNASLPCTPFWVESQSSNLLHL

SEQ ID NO: 158732 - protein, 129 aa, Glycine max
  Clone ID: PAT_MRT3847_114355C.1.pep
MMDHAAPPESTLTDHVMLPTLSLLPLTPNHHHDDDHHSQCSNITKDDEEEESVVGWPPVNYHWRKKLRVDEGVRNNNNNNHMVSVADHRHHSVYVKVKMEGVGIAREVDLSMHQSFHTLKQTLDGHVWM

SEQ ID NO: 158733 - protein, 45 aa, Glycine max
  Clone ID: PAT_MRT3847_114356C.1.pep
YMIELKHTFYIWNKKTYHFVENSVCSLRHLNHHFKTQAFYLAKLW

SEQ ID NO: 158734 - protein, 52 aa, Glycine max
  unsure (1)..(52): unsure at all Xaa locations
  Clone ID: PAT_MRT3847_114357C.1.pep
LCLXXIITXGYQFSFYASYLXXXXXXXYYCLFLSXRKISINRKTXTHITNXS

SEQ ID NO: 158735 - protein, 57 aa, Glycine max
  Clone ID: PAT_MRT3847_114358C.1.pep
ANGGLYIQVNVVFLDSRCLSPDQCQLLGKEMPPKSPQRAPPYYVWLIERRPLFLYGT

SEQ ID NO: 158736 - protein, 79 aa, Glycine max
  Clone ID: PAT_MRT3847_114359C.1.pep
GPVLFGRRPSPSGLSQSILGYGLANSPWAHYIKRPSLFFRPRLVIPGLSMLRASYPDPVDYNGSVWVKIPRIRVSGVFK

SEQ ID NO: 158737 - protein, 41 aa, Glycine max
  Clone ID: PAT_MRT3847_11435C.1.pep
LNQTILFNYRRDKIGWVYKEHEGHIPNKIGCDDKTSNWLTH

SEQ ID NO: 158738 - protein, 51 aa, Glycine max
  Clone ID: PAT_MRT3847_114360C.1.pep
LGQATACFQGGFALCRVIKKNVKASVSQGEHKGKRAGSSSINGSDTSVKFY

SEQ ID NO: 158739 - protein, 239 aa, Glycine max
  Clone ID: PAT_MRT3847_114361C.1.pep
MALSVSSPSCVRVPSCFWKPNGKSCKERTKVSCAAHNDNKNPLVGIGIGVVTSCVMGLTALDADATRIEYYATVAEPLCEYNYVKSGLGYCDIAEGFGDEAPLGELINVHYTARFADGIVFDSSYKRARPLTMRIGVGKVIKGLDQGILGGEGVPPMRIGGKRKLQIPPHLAYGPEPAGCFSGDCNIPANATLLYDINFVESNEMDILLENMDQLVWQNLLPDYNYLKLLFLVSGVVHD

SEQ ID NO: 158740 - protein, 202 aa, Glycine max
  unsure (1)..(202): unsure at all Xaa locations
  Clone ID: PAT_MRT3847_114362C.1.pep
IIARTPLQWLGLVFLAXTLTXYGFDYCDNENPEHNMCVPSCNSERDSYRNQACHARCNLLNVEKEECEESEIARPRPPPQHPEREPHQPGEKDEDEDDAPRSIPFPRPQPRQDEEHEQREEHDWPHEEETRGDNVCEDDDEDEDDEQDELQYPFPRPPHHKEXLKHDEHDDDEHHRXSDQSYDSDLRRHDNXNAFLFGSNTF

SEQ ID NO: 158741 - protein, 209 aa, Glycine max
  Clone ID: PAT_MRT3847_114363C.1.pep
MALSVSSPSCVRVPSCFWKPNGKSCKERTKVSCAAHNDNKNPLVGIGIGVVTSCVMGLTALDADATRIEYYATVAEPLCEYNYVKSGLGYCDIAEGFGDEAPLGELINVHYTARFADGIVFDSSYKRARPLTMRIGVGKVIKGLDQGILGGEGVPPMRIGGKRKLQIPPHLAYGPEPAGCFSGDCNIPANATLLYDINFVEVYSGNRSK

SEQ ID NO: 158742 - protein, 83 aa, Glycine max
  Clone ID: PAT_MRT3847_114364C.1.pep
SRQYLALYGINRPIGAAFPINQTHQQRLVVQQGPGTTGLSPSLAPHFRGLGPGLPLRMVIQNTIRTPRAPDFHGGLFTVSWLL

SEQ ID NO: 158743 - protein, 89 aa, Glycine max
  Clone ID: PAT_MRT3847_114365C.1.pep
GGRPLFFFFFLFFYLFFLFYFLHGLWFYIYFLFKQKNKNPIKTQNSLSQTNYMGPPQSTEQLKTKSPPFYFYAIFQQTLLPTWKVSPDL

SEQ ID NO: 158744 - protein, 113 aa, Glycine max
  Clone ID: PAT_MRT3847_114366C.1.pep
TRLPCSGHPMAVFSMLSRPWGTKDPCVICSSNKSKISSYTSSFRDSGTSIQLLCTIGIFSRATTPGYLWTFSLCGTDPLPVAGSMITTGLGKSKVLSQSSESCGLSTSLRRNL

SEQ ID NO: 158745 - protein, 56 aa, Glycine max
  Clone ID: PAT_MRT3847_114367C.1.pep
NFIRYLIKFQKKKKKKKKGRTKKKKKKKKKKKKKKKKKKKKIKKKKKGGAVLENQV

SEQ ID NO: 158746 - protein, 75 aa, Glycine max
  Clone ID: PAT_MRT3847_114368C.1.pep
LLFVLLEEHEWLVLVAGLFLGSRMHRVVSFSVNGVGVRCETLKMVFGTTTNTIHFYPPPETTNLDFHNAFSLEPN

SEQ ID NO: 158747 - protein, 172 aa, Glycine max
  Clone ID: PAT_MRT3847_114369C.1.pep
MRRQQLHFAAVVAAIVVTAWVAHMRGGVGQSEAKGWQFEAVPIDGAVGPESCSFDPRGEGPYTGVSDGRIIEWHQTQKRWLNVSAIASSSHWDEECGGPCDEHSKKEHVCGPPLSLCVSTLSNELYIADSYEGWVVGGPHGGTTRGLLSAMKGEVYAFTNCLDIDQPTGTGY

SEQ ID NO: 158748 - protein, 61 aa, Glycine max
  Clone ID: PAT_MRT3847_11436C.1.pep
QPSEEASRFSLLLLLYLSWPFSNFEHFSLNLMGELSYGCPYQRWTYANGIVFFSLIQRDTG

SEQ ID NO: 158749 - protein, 102 aa, Glycine max
  Clone ID: PAT_MRT3847_114370C.1.pep
LGFWSADGVKRVRARPFCQVISGSVGLWFFGGKMMCWVGQLKCSKKALFSRVLFKSPFSVVGDGEPQGCFNSKRCFTLLSSFFGKGAPPGCFVPTFQGDGLG

SEQ ID NO: 158750 - protein, 97 aa, Glycine max
  Clone ID: PAT_MRT3847_114371C.1.pep
FCSQKSSRDTTTNPMTSTTTSPGSGTVTGTGSEGAVVYTGADNGVVYNTVTGSGSSSVTGGETMLPDGSYLAGLAMGDSPRRTASTASFLLILFLLL

SEQ ID NO: 158751 - protein, 358 aa, Glycine max
  unsure (1)..(358): unsure at all Xaa locations
  Clone ID: PAT_MRT3847_114372C.1.pep
MLPVLVIIGNQLSLVALVTLFKEATLQGMNNHVFVAYTSAVAATLLFPITFFRRRSRVVPPLSFSIASKIMFIGMIGTSSQIMYYVGVSYSSPTLASSIANLGPAFTFILAIIFRMEKIAAKSRSSQAKVVGSIISITGAFVLTLYKGHSIIKAHSHDLSIPLQHPFSFLKSGDADWVIAGILLTAECLIGSLCYIVQADVLKVFPDEVTIVLFYNVTSTVMSTLVALFAVPNANAWKVGLNISLISIICTVRYLSKLTAAALXMGYILSTWALRLKGPVYLASFSPLQMFFSIAMGVIFLGDSLHVESIVGAAIVSFGFYAVLWGKATEEIEEEVDYSESPATENVPLLQSYGTENL

SEQ ID NO: 158752 - protein, 75 aa, Glycine max
  Clone ID: PAT_MRT3847_114373C.1.pep
YTLHSIKLCKADLLVKILIKNPNLVPITLINIKLLGLIVMGRKLIFSNSYQILSSIPFTIEMDNNQRVPSYFSIF

SEQ ID NO: 158753 - protein, 60 aa, Glycine max
  unsure (1)..(60): unsure at all Xaa locations
  Clone ID: PAT_MRT3847_114374C.1.pep
PKPKNVRSNSPFNLPLKDNNXLTSYPPFSVPNYMTPTLSAQAKTHTSSNPREKLNRTPTT

SEQ ID NO: 158754 - protein, 53 aa, Glycine max
  Clone ID: PAT_MRT3847_114375C.1.pep
MGLSFTKLFSRLFPKKEMRILMEGLDAAGTATILYKLKLGEIVTTIPTIGFNV

SEQ ID NO: 158755 - protein, 115 aa, Glycine max
  Clone ID: PAT_MRT3847_114376C.1.pep
MLFRLAGRAARAGLARDQQLDDGVRASYSTAGRPELSALRGKVIAVRREDQSVWERRAPLAPANVRRLTRMGVKVLLQPSNRRAYPMLAYHNAGAVIQEDISEASVIFGVKPVPI

SEQ ID NO: 158756 - protein, 84 aa, Glycine max
  Clone ID: PAT_MRT3847_114377C.1.pep
SFDSQSALVEGPPLMGITIQSEYINLLCHSKTFLFSHVPSEKGMKRARPYISTSQCRTSLEYSLINLGQEQHIGVSSRLNTTLF

SEQ ID NO: 158757 - protein, 201 aa, Glycine max
  Clone ID: PAT_MRT3847_114378C.1.pep
MFQPPTPTGINKHSLHTNPLSIQGASSALVPVDLNEGTVDAKESVQNGEMLQVQSIFRHSQKLEDDLRMLGTKIKQHENNLYHLNSEKNKLDDSILHLQVTIGKSESSSKATIGDMDNPNPTNDEEVNKQILQHEKSAAGILCQLKIRHGAQASHLTLTKDVVGIVATLGKVEDDNLSRLFSEYLSVETMLAIVCKTYGRV

SEQ ID NO: 158758 - protein, 192 aa, Glycine max
  Clone ID: PAT_MRT3847_114379C.1.pep
LNQGSESEWTRHLRSIKTTTFSSTRFTNALPRAQRNLLIPLPRFWTTTPHSPPTTIRRRPLRRGIPGTQSSDSSIVSDLIDVDSRRSFRHKSRLRNLNKNENSEEKPDSEEPRQVNASPEENNEGSTVTSAANDDAAGDSIDSAPRLGDSSSSLLELAAGLVISLLGFQMKLIFMFITSPFLFMFYSCMFFM

SEQ ID NO: 158759 - protein, 48 aa, Glycine max
  Clone ID: PAT_MRT3847_11437C.1.pep
IHTNNECNEYCNQPVIININIKEIYIIEHSIKSSLTITGIILAHFARV

SEQ ID NO: 158760 - protein, 80 aa, Glycine max
  Clone ID: PAT_MRT3847_114380C.1.pep
SPLLDSVLVVLMILLGMSQRFHLFTVRWLPCQIVFPLIIYVDQVQSLRLQVRLSPSRMKILTKMPHAWTMAILVRSNSRA

SEQ ID NO: 158761 - protein, 143 aa, Glycine max
  Clone ID: PAT_MRT3847_114381C.1.pep
HASDSVTDHFRSIINKGKKGAKAELKSSIEEYEEKLNKVHMERKEQEITARNAQVHQQKVGNLEGLLRTENFAKEQNNADNAEVGAGEIINPEAPESTLEENNPKSVENEEMNLISEEIEENSKESKLIEENQKPEENEENIK

SEQ ID NO: 158762 - protein, 41 aa, Glycine max
  Clone ID: PAT_MRT3847_114382C.1.pep
CRVVARIRSGKMAFRRVMEFRNLWLLLCLRAILLCNCMVGD

SEQ ID NO: 158763 - protein, 58 aa, Glycine max
  Clone ID: PAT_MRT3847_114383C.1.pep
PNGSHVCIKVSSWDNYSLRLIYIENKILCKNIIELVLHQQLLLKRGTIISYYWVSTCL

SEQ ID NO: 158764 - protein, 186 aa, Glycine max
  Clone ID: PAT_MRT3847_114384C.1.pep
MSFMRGDFLSRTRKLVKGLAKAQPAWLKAMEQAPPATFPRSAGKIPTITLPEDVYVKKFYKKYPESKSHDAIKFHAFDPPPSRVFALRVLELKEQGISEEQAMAIADMEYLTEKKTKKKAYTRLKEIARLQGKRLPQNPYPSAIKEIQAEERKYVRDRFFNPKMLEIVEKQKAEAAAERLSRGGDW

SEQ ID NO: 158765 - protein, 135 aa, Glycine max
  Clone ID: PAT_MRT3847_114385C.1.pep
QKRKHPKKKPRKESQKTKEKRDRREKNQPPRGKGTKKGGRAKTTTTRGQLIKNPQEGAPPYKKAERARKKEGPTREKKGEAQPAEKTRRSKGIPKKRTKKAQPKKVYEKRPTKKIRKAKKKKQRSGRKKREPRYE

SEQ ID NO: 158766 - protein, 82 aa, Glycine max
  unsure (1)..(82): unsure at all Xaa locations
  Clone ID: PAT_MRT3847_114386C.1.pep
IXIPXLTPLTTYFXYRLLFAFXXXXDFFPKIFXWCXANNLXXYPPLCLWLQDFYIXRLXLXIXXCFGRPIXXAPXAXFDVXQ

SEQ ID NO: 158767 - protein, 51 aa, Glycine max
  Clone ID: PAT_MRT3847_114387C.1.pep
SPRSVCHVYHYGYLFLSETSMSVELSMPVPHTAKSLPMVRCRVVSQRVSFT

SEQ ID NO: 158768 - protein, 66 aa, Glycine max
  Clone ID: PAT_MRT3847_114388C.1.pep
IGRDIIILCLHETEGCIWRCFWFVRFFRSVYFSGGFQSLGGGAFFFMRMFGLGSIRCGFVFCSFNV

SEQ ID NO: 158769 - protein, 190 aa, Glycine max
  Clone ID: PAT_MRT3847_114389C.1.pep
MGAHHLNKKRQNKKKQRGNKGGKKKRSTGKGNTLGGQGKRKKQLTQGGGGETPPPRHKTQKKKAGSRVHKKKKHPEEGGWGEREEKKKIKPQKEKPRKNSGGIKGGGFGKKDTGPGAPPRKPTPGPGGAPASHKERPKRGGQKRGQRWPPGKSDMRTKAPQHKPQKKKGKTPGRQKGAPTHKKRGAHKAR

SEQ ID NO: 158770 - protein, 157 aa, Glycine max
  Clone ID: PAT_MRT3847_11438C.1.pep
MSPYNYTLKHLALFLLFLITSTSAAAGGGRRKLRFDMSSGGAPLAGTPTGATGSGHGANWDYSWGWGSGPGTGYGYGSGSGRSPTGFARGYGYGFGSGTGSGSGYGYGSGGGAHAGGYGSGSGSGNSGGGGYDDKNGGGDDNNRLPSSSSRGKTNHG

SEQ ID NO: 158771 - protein, 96 aa, Glycine max
  unsure (1)..(96): unsure at all Xaa locations
  Clone ID: PAT_MRT3847_114390C.1.pep
SVSRTDSSTVGWGGPDGYVYHKAYLXMFCSKAKLDALEDKCMDATMVTYMDVNKDRNWEYNEGQTEANAVTWGEVTDKATIQPTIGDPVSINEWKD

SEQ ID NO: 158772 - protein, 74 aa, Glycine max
  unsure (1)..(74): unsure at all Xaa locations
  Clone ID: PAT_MRT3847_114391C.1.pep
MSGIIHKIEETLHVGGHKKEEHKGEHHGXHKGEHKGEHHGEHXGEHKXEQHXGEHKGGXXDXXXDKTLVMPHDX

SEQ ID NO: 158773 - protein, 79 aa, Glycine max
  Clone ID: PAT_MRT3847_114392C.1.pep
NKKVQFSSPRAPLPLTKITHFSSLPSFPLPFSLLLFRFLLYSLLTRYAVFFFFFYDGNIPVRTEITSVHSFVYNDRIKV

SEQ ID NO: 158774 - protein, 301 aa, Glycine max
  Clone ID: PAT_MRT3847_114393C.1.pep
ARVDLQQVSEIILESKGKLNEKSVSTALGGLSESSVQEARDGDRSKQLQEVGRGVNADEIVDVKVSSVAEVKAEATEKLSHIAVEVDVQSDNCTTEVSTGGGQTAAILVQSDSARGKDENVLHSSAYSVDKVPEDLTEREFEKADDVDAENHSSQSKKQRNECESDALTMPENRGLCSIVTGIAAEHVEENLETKEVHDQPAREELPKNSPSVLSQEMDKHLDSKGSKLIAMEAEEAEECTSTTADASSMSSAAVSDADAKVEFDLNEGLNADDGKSGEFNCSAPAGCLVSPVPFPASSMS

SEQ ID NO: 158775 - protein, 73 aa, Glycine max
  Clone ID: PAT_MRT3847_114394C.1.pep
RTLGRTRGFWELARNKCGGYVSLEDMIFGHALCICILPSSCFNLQIRSSKKKIKKKQFQLLQIRTVQKRKEKK

SEQ ID NO: 158776 - protein, 95 aa, Glycine max
  Clone ID: PAT_MRT3847_114395C.1.pep
PQFISQQTVWNQVASVRTPFNIDSSMPSFWQLYIDLLAGGILWDKTGDWITLIQNSSISNLLRVAAWKKGCTMVKIVMSGHATLKRSARARLHQV

SEQ ID NO: 158777 - protein, 50 aa, Glycine max
  Clone ID: PAT_MRT3847_114396C.1.pep
SQRFLLKKNSKTILNHKIWTKLNFPTNTICDSLPKFFKPLFLLSIFGYMN

SEQ ID NO: 158778 - protein, 342 aa, Glycine max
  Clone ID: PAT_MRT3847_114397C.1.pep
MAESVSVDMEMIFLGGKEHHIQTGCGSVSVIVCGDQEKPALITYPDIALNYMSCFQGLFFCPEATSLLLHNFCIYHISPPGHELGAAAICSDDPVPSAEDLADQIIEVLNYFRLGAVMCMGVSSGAYILSLFATKYRERVLGLILVSPLCKSPSWTEWFYNKVMSNLLYFYGVCGLLKECLLQRYFSKEVRGNAEFPESEIVQACRKLLDERKGINVFRFLQAINERPDITEGLKRLKCRTLIFVGDSSPFHSEALHMTSKLDRRYTALVEVQGCGSMVTEEQPHAMLVPMEYFLMGYGLYRPCHFSDSPRSPLSPSCISPELLSPESMGLKLKPIKTRVLL

SEQ ID NO: 158779 - protein, 76 aa, Glycine max
  Clone ID: PAT_MRT3847_114398C.1.pep
LFKMGSLPSTSEREKLDASCTPDNGAMKKRKNMSELTFGAGGEPPPHTTGTIFEILKRIKSNSRERDPECVTEGTV

SEQ ID NO: 158780 - protein, 30 aa, Glycine max
  Clone ID: PAT_MRT3847_114399C.1.pep
KKAPNANNAHIIPSITLLSLMHQNLISWNI

SEQ ID NO: 158781 - protein, 165 aa, Glycine max
  Clone ID: PAT_MRT3847_11439C.1.pep
GSRNFASLRKSMVFMLIMINIQIWLQKPKVWRFVCFFSSVVGLLCYAFSSSFNNLFGKWTWCKILLYIGFSFIICLTVLFANVWECSTSPRVEAHMAFFILMITSVYSFFFDKVVKGKPDAYSLVSCAAFAIMSLALSRMSHFGFEGDLLVFFSGLLILQLMKIS

SEQ ID NO: 158782 - protein, 116 aa, Glycine max
  Clone ID: PAT_MRT3847_1143C.1.pep
SVQMLFGSGNFAHRTRIRFSFSYANCSTGTSVALALEQNIPMQYVLPIVTFVYIGDVEIPVTHLIDISSVDQASSFMFCSGSVHSQDLSSMSIVSAKSPPLGARGLLPRYRACESK

SEQ ID NO: 158783 - protein, 69 aa, Glycine max
  Clone ID: PAT_MRT3847_114400C.1.pep
FPSLQLQLIQSPLKRSKGHTCTFIRLMISGIFSRYDILTHCYASYIRSNMTNVHQSPQLDQRRFSSWIY

SEQ ID NO: 158784 - protein, 52 aa, Glycine max
  Clone ID: PAT_MRT3847_114401C.1.pep
LVSFIAFISEPPSDFMTTFFHPEDSDYMRSVCNNLFILISYYPNLQPDLFSS

SEQ ID NO: 158785 - protein, 80 aa, Glycine max
  Clone ID: PAT_MRT3847_114402C.1.pep
HASGRFHAAYVRCSEYEVINKMAKVVAEKSSWWLDTVDHVEATTINELNKPVVNNEATGHAISGQARAASEGNQEILLTI

SEQ ID NO: 158786 - protein, 127 aa, Glycine max
  Clone ID: PAT_MRT3847_114403C.1.pep
VKNVMFGKPAVQRRDWASLVQGFLTNSTRSEHFYGGKGAKSGPHFWGLIFPKKGRGPKKGFEKGSFEGGNQNSWDLSFLIGNPKQFTGFEIFLGIFQDFENGGKNFKPAFFVPQGNARFFEKGESFA

SEQ ID NO: 158787 - protein, 53 aa, Glycine max
  Clone ID: PAT_MRT3847_114404C.1.pep
FRSIPCRVQFELILVYGMFLSITFYCSLPQLHHYIILKHCSYFDRPSFSIELL

SEQ ID NO: 158788 - protein, 107 aa, Glycine max
  unsure (1)..(107): unsure at all Xaa locations
  Clone ID: PAT_MRT3847_114405C.1.pep
REKRKXTIWEVRSYSACSCSLALSFFAFCGFCLLFSQPSLLLRRYSPFLFVFLGSPLPFCSFFGTVTFLWFFGTGTFLWFFGSGTFLWFFGSGTFLWFFGSGTFLWF

SEQ ID NO: 158789 - protein, 109 aa, Glycine max
  Clone ID: PAT_MRT3847_114406C.1.pep
GRPTRTANKFLMKQPKSRPKMSEVVESLGSIINEIVPHDEHIPQAAVVAIGEEKEEKLSVEDTQPEPAAKQGNYYLKKVFELKDIVSLRNKSIGRLDWKSWAPGLVRTW

SEQ ID NO: 158790 - protein, 43 aa, Glycine max
  Clone ID: PAT_MRT3847_114407C.1.pep
TFKQGCFVWHSKNAPLRMSLLKKGNTKSSFFPRSHCQCGLFFL

SEQ ID NO: 158791 - protein, 60 aa, Glycine max
  unsure (1)..(60): unsure at all Xaa locations
  Clone ID: PAT_MRT3847_114408C.1.pep
RSSQMXVXQXXXWTSRTRXVGRPLPFFFFLHSSFYPQSLAHLSGGLKNNPPTSPIPLFKT

SEQ ID NO: 158792 - protein, 115 aa, Glycine max
  unsure (1)..(115): unsure at all Xaa locations
  Clone ID: PAT_MRT3847_114409C.1.pep
FIQLLTVVFFLQNLLVGATGTTEVTTIWAMTELIKNPSIMKKVQEEIRGLSGKKDFLDEDDIQKFSYLRAVIKETLRLHLPAPLLIPRETNKKCMLDGYKNSSQDIIXVNAWAIS

SEQ ID NO: 158793 - protein, 46 aa, Glycine max
  Clone ID: PAT_MRT3847_11440C.1.pep
SLLVGRPFFICKGYKFSFYTGITTRGGAFIDIHEDITMPAQKHHVS

SEQ ID NO: 158794 - protein, 403 aa, Glycine max
  unsure (1)..(403): unsure at all Xaa locations
  Clone ID: PAT_MRT3847_114410C.1.pep
MEVLLVDQGFDYVRRKKKWILILCAVGLGGFSAXIRLEAPSVARKRKRLSKLLSAFVSVAESLSESADTIGIVSRDVKVFLESDSDQIPNSLKQISKIARSEHLSESLVSVTRAVTVGVLRGYESMNRTGGDQTGSSVVDRVLDKMLTPAGSGFASVVLGSFARNLVLAFYSDQQHNHSGGESNSINSNSETVLAWVDVVCGDRCGELIGNCVQLFVSTAVAVYLDKTMHINTYDDFFAGLTNPKHETNVRDMLVSVCNGAVETLVKTSHHVITSSDSYLSIGETLRNEDLVIGMPSIQSKVDVCDDENKSGWVSKVSSSLAVPSNRRLVLDVTGRVTFETVRSFMEFVLQTFCASVRRCAHIVHEAVLEIVRYVAAKSSVVVTICLSLCLHMMGGGWALVPA

SEQ ID NO: 158795 - protein, 105 aa, Glycine max
  Clone ID: PAT_MRT3847_114411C.1.pep
ITSSRVEEKEGFSLWCCFLEGLLSHLSILFFYSEQRRKQREREGETGDFFWMVSITWPLLSASNSGSVKSSSRGERNDCEKGQGYGYISNKRLRSGVFGNHCEST

SEQ ID NO: 158796 - protein, 153 aa, Glycine max
  Clone ID: PAT_MRT3847_114412C.1.pep
VHWHVKTNYKDYWRVKVAITNFNYRMNHSLWSLAVQHPNLNNLTQVFSFNYKPLLPYGSINDTGMFYGMKYFNDLLMEAGPTGNVQSELLLQKDKDAFTFKQGWAFPRKVYFNGDECMLPPPDTYPFLPNSAPASLLNFPAFMLLLFFLLAVW

SEQ ID NO: 158797 - protein, 547 aa, Glycine max
  Clone ID: PAT_MRT3847_114413C.1.pep
MTFLEFMVKLFSCCDLLKSFSLLMKLLQETVEFVWLLKMMTSQNRYLDILILTKSDAKCAHDKSVIEQLKQDIANANKQKLLISKALTKKEKSVGDVQNQIEQLNASIAMKKAEMGTELIDHLTPEEKKLLSDLNPEIKDLKEKLVACKTDRIETEARRAELDTNLTTNLRRRKQELEAVISSADADSLVADAESKWQELSDAKILVDDAIGQLRSVTESINDRTRQIKKIKDELNKLKSLEDEYERKLQEDAKELEQLQSKKNTYAAKEEEYAKKIRELGPLTSDAFEAYRRRNIKDLHKMLHRCNEQLQQFSHVNKKALDQYINFTEQREELQKRQAELDAGDEKIKELITVLDQRKDESIERTFKGVARHFREVFSELVLGGHGHLVMMKKKDGDHDDDEDEDGPREANPEGRVEKYIGVKVKVSFTGQGETQSMKQLSGGQKTVVALTLIFAIQRCDPAPFYLFDEIDAALDPQYRTAVGNMIRRLADIANTQFITTTFRPELVKVADKIYGVTHKNRVSRVNVVSKEDALEFIEHDQTHNAE

SEQ ID NO: 158798 - protein, 64 aa, Glycine max
  Clone ID: PAT_MRT3847_114414C.1.pep
GLSEQGWNNSGRRQTKRTNKNMKGGWNNFLVVILLNKTLGVIIHYMFDLQLQMLRCVFQCKSNR

SEQ ID NO: 158799 - protein, 80 aa, Glycine max
  unsure (1)..(80): unsure at all Xaa locations
  Clone ID: PAT_MRT3847_114415C.1.pep
GAITSAVIAIARILTRXITVYIACXPCLEKGLETIDRQLHPDYDPYDTAIRAPLNQTGVFVTVKAVREIDVPSFHVYDWY

SEQ ID NO: 158800 - protein, 62 aa, Glycine max
  Clone ID: PAT_MRT3847_114416C.1.pep
MAYPHYRSQFGDTTFTKVFVGGLAWETPTEEMRKYSEQISDILEAPIIPIESTGKKATPSFP

SEQ ID NO: 158801 - protein, 58 aa, Glycine max
  Clone ID: PAT_MRT3847_114417C.1.pep
EGLCHFQVRVKPLMLQILVTTIKVPNKPSKNELKNQQLRQETIKYLERHAKTLIIYPK

SEQ ID NO: 158802 - protein, 107 aa, Glycine max
  Clone ID: PAT_MRT3847_114418C.1.pep
WLSEASLPPAWDLFTRPYYHKDFYNLSMLLHCILLNNSCVPCTKCTTFLLQLSRNIVLTISYFHMINRPNKHISVIPLNASPMSLWVFERPALSCRRLPLNLQLGWP

SEQ ID NO: 158803 - protein, 155 aa, Glycine max
  Clone ID: PAT_MRT3847_114419C.1.pep
LSNSLHKLLHYFTNHYPLHPHSSPSNPRKLLNLPNPTHPLEKRSHLRARFPNGCNQCEWVVTLFFFLFFFFFFFYNGKVRGRTAATSAPVRGSAAECGVSVPLFSDSETCRRQMRTRTGCVGGSVSLRGVLDAPFYKPGRSEEPTWVVPDSKVGV

SEQ ID NO: 158804 - protein, 56 aa, Glycine max
  Clone ID: PAT_MRT3847_11441C.1.pep
YKRTILFRSQSSIDIPSTYEGLKSANGRREQNRIYPPLISRGAIAKSASSLTILRH

SEQ ID NO: 158805 - protein, 73 aa, Glycine max
  Clone ID: PAT_MRT3847_114420C.1.pep
KITAYRSSVFGYDLTKHTNSHFLHQQSVQIEQFCMPAFLYTLLDLKKNHFMLWIKFMIFIPNLFNTHVYIITY

SEQ ID NO: 158806 - protein, 68 aa, Glycine max
  Clone ID: PAT_MRT3847_114421C.1.pep
FPPDNAIAHLKYWISRHELWLGPYSLHLSMISIYQLCFRELTLFTWFMSLVPCASTTTMHVSLPIPYL

SEQ ID NO: 158807 - protein, 129 aa, Glycine max
  unsure (1)..(129): unsure at all Xaa locations
  Clone ID: PAT_MRT3847_114422C.1.pep
SSPGINVHISSDREPDNTYYRRLLNNRALLTLYAHMTNSAKGYXIPNQIEYEGTLAPTEECTERTDKYIIQPTTTELAKHYSAAIFANQRRANIVKYHVGQTPTXYYKTASNGQHWPPKTRSPIEGPYL

SEQ ID NO: 158808 - protein, 99 aa, Glycine max
  Clone ID: PAT_MRT3847_114423C.1.pep
LFFFFWFFFFIPSGKVRNWTPKNLSTKQNRGGKNKPQAITKQPAFNTPGGGHKTTTPRLALHHNRCSLRHPGNHAITISVPQKKTKPPQPSAPGETLLN

SEQ ID NO: 158809 - protein, 58 aa, Glycine max
  unsure (1)..(58): unsure at all Xaa locations
  Clone ID: PAT_MRT3847_114424C.1.pep
XXXXXGLLHGSATPLCIKLWFFFLTATCSGSYPQSAQEGSFLIIQQKSPSSFFLDICC

SEQ ID NO: 158810 - protein, 80 aa, Glycine max
  Clone ID: PAT_MRT3847_114425C.1.pep
FLGFRIKTNQGVRPSHAKTISNSKNGGEQSINLLNSINNGNFNGGLKLEGRNRTYGRTNLKSPHHPQFITNNRNAQKLSN

SEQ ID NO: 158811 - protein, 79 aa, Glycine max
  Clone ID: PAT_MRT3847_114426C.1.pep
RNRLYLSTLGLSILKGTLSISFCRLAGRNLGGESFPKGFKGAGFCPFFGWKFWECFPSVPLFGSRVCVKKRVPSPFVPI

SEQ ID NO: 158812 - protein, 108 aa, Glycine max
  unsure (1)..(108): unsure at all Xaa locations
  Clone ID: PAT_MRT3847_114427C.1.pep
FSPGLVRRPSLLPLPRVPPRGXLVRVGAPSPWASLLFPSXSLPRLRPGAXFSPLPRVCLLARPCALSLRPPSPAFRWPPLWLVSVRVCVCLLGPAPGAGXLPCSSAPP

SEQ ID NO: 158813 - protein, 186 aa, Glycine max
  unsure (1)..(186): unsure at all Xaa locations
  Clone ID: PAT_MRT3847_114428C.1.pep
ELVKARLAIELDPDSSGDHVLLSNVYAVAGKWKDVSSIRRTMTEHSMKKTPGWSMIEIDKVIYGFVAGEKPNEVTEEAHEKLREIMLRLRTEAGYAPQLRSVLHDIEEEEKEDSVSKHSEKLAAAFGIAKLPKGRILRIVKNLRVCGDCHTVMKLISXVYKVEVIVRDRSRFHSFKDGFCSCRDYW

SEQ ID NO: 158814 - protein, 93 aa, Glycine max
  unsure (1)..(93): unsure at all Xaa locations
  Clone ID: PAT_MRT3847_114429C.1.pep
XEKQLEQSRYLIPKLASKPVQHLLDALDLESVISLHQSGYQTLHPSDAPTPHLLDSPLFHLHNLYSFKGFFLNGDHHLSRPFCFKQHYHSNSS

SEQ ID NO: 158815 - protein, 186 aa, Glycine max
  Clone ID: PAT_MRT3847_11442C.1.pep
GGYHNVTTTRCSMQPQNDNLHSSIQFDNTAFPLQNQLMSASHHSQFPRNENGLTLGTRQPATPGFQNVSISNPNYRGLEDYFPEDEIRTRSHEMLENEDMQHLLRIFNMGGGQSHAPFNTQEDAYPYSSAYMPAASMSSNLDDEQNRSSGKAVVGWLKLKAALRWGIFIRKRAAERRAQLVELDDQ

SEQ ID NO: 158816 - protein, 78 aa, Glycine max
  Clone ID: PAT_MRT3847_114430C.1.pep
GIKYFSNPWSALGSLHLHKCEGSLREAIDCIVVLKLTWYYRLKLPCQFLSSFIQAHWGSPIYGALRWANMDVTKLNTK

SEQ ID NO: 158817 - protein, 49 aa, Glycine max
  Clone ID: PAT_MRT3847_114431C.1.pep
RTVIKEHMEAHVASIEHHIHDACILCTATADTITDRYTLCRLLGRQGIA

SEQ ID NO: 158818 - protein, 82 aa, Glycine max
  unsure (1)..(82): unsure at all Xaa locations
  Clone ID: PAT_MRT3847_114432C.1.pep
STSALPTPTTLFSALMGKVKIGINGFGRIGRLVDXDSLQRDDVELVDVNEPIITTDYMTYVFNXDSVHGHWXHHDVSVNDEK

SEQ ID NO: 158819 - protein, 148 aa, Glycine max
  unsure (1)..(148): unsure at all Xaa locations
  Clone ID: PAT_MRT3847_114433C.1.pep
GSGVISPKWQEQQXRDEDEXDXIMGRNRVPGHPPRRPSHGKGGQDEGXGXDEDKPRPSRPSQGKGGQDQDQDEGEDEDEDQPLKGRGWRSEKTQPRRPRQGEPRGRGCETRNGGEGNICTLEVHEDIGRPSRAGFYNPKGGRISTLNR

SEQ ID NO: 158820 - protein, 54 aa, Glycine max
  Clone ID: PAT_MRT3847_114434C.1.pep
QLSIQPKVTCIFRNQKSTSQSTDFFKVYTYSEVRSHKYNQPQQTQTPHRSKELT

SEQ ID NO: 158821 - protein, 99 aa, Glycine max
  Clone ID: PAT_MRT3847_114435C.1.pep
ILAPLGPSIPGLDQSPLPSLGFSNFLAGFSKTKKRGGGAKSIQLGPLKKVILFFQRGPPEGACGFFSKENKNGFAPPKGKGFLEENLVCPHQKKVFCFF

SEQ ID NO: 158822 - protein, 134 aa, Glycine max
  unsure (1)..(134): unsure at all Xaa locations
  Clone ID: PAT_MRT3847_114436C.1.pep
PEKSIKVIVVTDGEPIQGLGDLGXQGMGKPEGXMVLYTSLGRDRPSACLPITKGEATNKEKLLXNDEFYIGLRQKRASGHEYSELLNKQMTAVQQNYRKTVLVXKEKHANHIAIELLAQYGTTDVDINDDIEVT

SEQ ID NO: 158823 - protein, 160 aa, Glycine max
  Clone ID: PAT_MRT3847_114437C.1.pep
MGSVPAELSLDLRPTFIPKTITDFLRHLSDNNNPPATLHDFLARLEDELRKIHAFKRELPLSMLLLNDAISVLKAESQKCRVARDSAPVLEEFIPLKKERGDQSEEEEEEEENDDDDDNECRDKRNWMSSVQLWNNNTTTATTNNNNPSDRKQLIHKLQT

SEQ ID NO: 158824 - protein, 74 aa, Glycine max
  Clone ID: PAT_MRT3847_114438C.1.pep
KVGRRKNGQGDKEPNKVVVWLLTLRTPEPVLSDKPPPPPCGGLLLSVGEARRSEKKVVMKEVCAEGEVGQGVCK

SEQ ID NO: 158825 - protein, 84 aa, Glycine max
  unsure (1)..(84): unsure at all Xaa locations
  Clone ID: PAT_MRT3847_114439C.1.pep
XXIHNQLDDKQTFQTNNYQTGRGGSLHNSNRVLELIFVLLILGIERXXTCFTYKEVFNISNPKPLHSLICYSLLSPPLRVKHKN

SEQ ID NO: 158826 - protein, 137 aa, Glycine max
  Clone ID: PAT_MRT3847_11443C.1.pep
MKTLPQTPGKTIPDACDYKGHPAERSKTGGWTAAAMILGVEACERLTTMGVAVNLVTYLTGTMHLGSANSANTVTNFMGTSFMLCLFGGFVADTFIGRYLTIAIFATVQATGVTILTISTIIPSLHPPKCIRDATRR

SEQ ID NO: 158827 - protein, 106 aa, Glycine max
  unsure (1)..(106): unsure at all Xaa locations
  Clone ID: PAT_MRT3847_114440C.1.pep
TDNSSHYIVPSHSEICDFVFALRASFITADSWAAVSTLPVTPEESAVYYSHHTAANDFXMVYLNDMVKKLLACYLHSEVSVALHVDAASCVFDHMSLLDAPADCHE

SEQ ID NO: 158828 - protein, 296 aa, Glycine max
  Clone ID: PAT_MRT3847_114441C.1.pep
MKKFMFLQLVTWIWICGVAHSRRPGSVNIGAVFAFDTVIGRAAKTAMEMAISDVNEDPTVLKGTKLNLIMKDAMCNAFLGSIGAFQVLEKGVAAIIGPQSSAVAHTVSQIADALQVPLVSYAATDPTLSSLQFPFFIRTTQSDLAQMTAMADLIDFHGWKEVIVVFLDDDYGRNGLSALSDELEKRKLKISYKLPLSIKFDLDEITNLLNQSKVVGPRVYVVHANPDPRLRIFFIAHKLQMMAKDYVWLVTDWLSATLDSLSPVNQTSFSVLQGVVGLRQHIPDFSKKRAFVSRWI

SEQ ID NO: 158829 - protein, 407 aa, Glycine max
  Clone ID: PAT_MRT3847_114442C.1.pep
MQRFKALLPQQTRSSLRTFCSHRRAFSAQPNYAKHHDDDSQEQILVEGRAKSRAAILNRPSSLNSLNASMVARLKRLYDSWEENSDIGFVLMKGSGRAFCSGADVVRLYHSLNEGNTDEAEQFFKTLYSFVYLQGTYLKPHVAILDGITMGCGSGISLPGMFRVVTDKTVFSHPEAQIGFHPDAGASYVLSRLPGYLGEYLALTGDKLNGVEMIACRLATHYSLNARLSLLEERLGKLITDEPSVVESSLAQYGDLVYPDRSSVLHRIDTIDRCFSHETVEEIIEALEKEAAESNDEWYSTTLRRIREASPLSLKVTLQSIREGRFETLDKCLVREYRMSLRGISKHVSSDFFEGVRARMVDRDFAPKWDPPRLKDISEDMVEYYFSPLSEVQSELVLPTALREPYM

SEQ ID NO: 158830 - protein, 123 aa, Glycine max
  Clone ID: PAT_MRT3847_114443C.1.pep
MRQGKEATESCDEWCLNTLRRIREASPLSLKVTLQSIREGRFETLDKCLIREYRMSLRGISKLVSSDFFEGVRARMVDKDFAPKWDPPSLKDISEDMIEYYFSPLSEVQSELVLPTALREPYM

SEQ ID NO: 158831 - protein, 45 aa, Glycine max
  Clone ID: PAT_MRT3847_114444C.1.pep
QVSCMLQIQLILPYLPLQPHCLTESLRKKVSRRIFSWRCQSSKSP

SEQ ID NO: 158832 - protein, 41 aa, Glycine max
  Clone ID: PAT_MRT3847_114445C.1.pep
EYGGECYCKLCHSGPGAWIAQESWLSAKELKSSVSELSGRV

SEQ ID NO: 158833 - protein, 33 aa, Glycine max
  Clone ID: PAT_MRT3847_114446C.1.pep
KKQNDMCILTKIEVKLIILERLNMITVSYKLVR

SEQ ID NO: 158834 - protein, 129 aa, Glycine max
  Clone ID: PAT_MRT3847_114447C.1.pep
MSHLGMGMGAPSLPSIYNPMQLPKVPHDQAMSVPQMPNQNLMCQNQVLGAFNYQTQMQNPCLPEQYARYMGYHLMQNASQPMNVFRYGSQAVQHSQTMIAPGNNSSGPMSGTANIDDADSGKAGSSTFN

SEQ ID NO: 158835 - protein, 117 aa, Glycine max
  Clone ID: PAT_MRT3847_114448C.1.pep
PQNPPLNGVPPALLEKAPTRVQNKILKEFPPIMASGTMRVSEAAALATKRVMQRYGQYYCCVSELATFLHQKRCGSSVSELATFLHQKTICGSKTSYYHCNNCGVSYHWLLFEPGKT

SEQ ID NO: 158836 - protein, 32 aa, Glycine max
  Clone ID: PAT_MRT3847_114449C.1.pep
VSKLVRHSVLVVSGLIQFSKFRDDKENARCAI

SEQ ID NO: 158837 - protein, 148 aa, Glycine max
  Clone ID: PAT_MRT3847_11444C.1.pep
MSEFSQFTSLLAFATSLAADLLDRSSLSILGVPNIYLVADNHLSPAVLADILRYIPPVPFLVPDLCTLYPSSKLITMLLQTIGRATNNFGSNLIHDSQSGVISFRSPAPYPPSNATILSFIKKCDGAGKPLSTAVLRQIVLNFLLAGR

SEQ ID NO: 158838 - protein, 68 aa, Glycine max
  Clone ID: PAT_MRT3847_114450C.1.pep
WVGFFFFFDSLGGPCVSRLGASPIYIWGVTLPRGVVLHWLGTSFQLGFFVGGGFSLIISFLMDALGVT

SEQ ID NO: 158839 - protein, 117 aa, Glycine max
  Clone ID: PAT_MRT3847_114451C.1.pep
TNGDCDLKIRGRGSFKDPAREEMMRGKPSYEHINEPLPILVEAELHVEIVDARWMQARNILEDLLKPVDESQDFYKKQQLRELAMLNGTLREEGSPMSGSVSPFHNSLGMKRAKTRG

SEQ ID NO: 158840 - protein, 84 aa, Glycine max
  Clone ID: PAT_MRT3847_114452C.1.pep
MMSTSGAGRYMAFPPSPSAPPSPHLSGLRSTPLSDPDKYLAELLGERNKLSPFMAVLPHCFRLFNQETQLVTVLINTKLAESTR

SEQ ID NO: 158841 - protein, 128 aa, Glycine max
  Clone ID: PAT_MRT3847_114453C.1.pep
ATSNVRAGKNNGRAPSAPVKKAETFWTICNRCRTHYEYLRVYLNHTLLCPNCNEAFVAVERGPPPNVFKPPNWSSHQRHQNSQHHAGSNNTNFQWGSHSRMAGFGATDVDQHLCYLKLPFLCSRQVRE

SEQ ID NO: 158842 - protein, 76 aa, Glycine max
  Clone ID: PAT_MRT3847_114454C.1.pep
LAIKDPMTYTRFYHDYHSHMGLSNSMANSNISIGICHIEVTLAIRRVLGGVSIYSHVSNHAASRIYSTIVRTRKLS

SEQ ID NO: 158843 - protein, 291 aa, Glycine max
  unsure (1)..(291): unsure at all Xaa locations
  Clone ID: PAT_MRT3847_114455C.1.pep
MMSTSGAGRYMAFPPSPSAPPSPHLSGLRSTPLSDPDKYLAELLGERNKLSPFMAVLPHCFRLFNQEILRVTTLMGNASVLGQSGLEHASPLATGGIFSNGGADVNGWASRFQSERPSLLQSSSTQNWLSPQGSSSGIIVKKTVRVDIPVDAYPNFNFVGRLLGPRGNSLKRVEASTECRVLIRGRGSIKDPAREEMMRGKPGYEHLNDPLHILVEAEYPXEIVDARLMQAREILEDLLKPVDESQDFYKKQQLRELAMLNGTLREEGSPMSGSVSPFHNSLGMKRAKTRG

SEQ ID NO: 158844 - protein, 102 aa, Glycine max
  Clone ID: PAT_MRT3847_114456C.1.pep
VSDKGHLPNLHMKAVYRKAQESICRHINHVAPQVQVDGQENESIVVVHGLPATLAIHVLPHTQSVLKTDYDNSGAACAVSVSCGGSSLMPCCSVQSSESSNN

SEQ ID NO: 158845 - protein, 60 aa, Glycine max
  Clone ID: PAT_MRT3847_114457C.1.pep
CFIMSGHMRTLIFDKVSIRLDCSPSNRATLILCASCSGVVCSASYKCSAPLMLHPRPLYP

SEQ ID NO: 158846 - protein, 51 aa, Glycine max
  unsure (1)..(51): unsure at all Xaa locations
  Clone ID: PAT_MRT3847_114458C.1.pep
GPFIKSKRSFCRGLPPIQXGGPIDYKNMGXTSAFSSGQGKILSTRVNRLSF

SEQ ID NO: 158847 - protein, 67 aa, Glycine max
  unsure (1)..(67): unsure at all Xaa locations
  Clone ID: PAT_MRT3847_114459C.1.pep
XXXVXXFXARYXXLXSXXXXXXSXLMXXXGXXXXXDAXRVXXXXXXXTXHVXGXGCXCXXXXXSXXR

SEQ ID NO: 158848 - protein, 54 aa, Glycine max
  Clone ID: PAT_MRT3847_11445C.1.pep
GTSLEFTRDIVVQQRVNASSVTGSQRPSYPSSKQTRDWDKIEAQVKKEVCLLSL

SEQ ID NO: 158849 - protein, 105 aa, Glycine max
  Clone ID: PAT_MRT3847_114460C.1.pep
SLDKYAKCSIHNIPKVKTKIVTLNESYVPKLSSMLKAYVFECSKGLVLPKGCNALVIFSADSTTVIIESITVLCKYEHILINGVNCLLNLLHFDHPEYLLQMVDM

SEQ ID NO: 158850 - protein, 210 aa, Glycine max
  Clone ID: PAT_MRT3847_114461C.1.pep
VGYYYAPSGKPYPDNWIITDVVYEFEGSLISRSGNLVEGNPGAISGDETVPYLSLSWCKNWLGPKVNITKAPQSEHDGSDVQIKLNVEHHHEEDIVPNMTRSPRVKYITYYEDSESLPGKRTAVWELDKANHRNIVRSPVLMRELWLEMWHDIHPDAKSKFVKKAKRGPLRDEDCYWVGGPARCAWPVVCDYSGILTLKYSLVPALSFAT

SEQ ID NO: 158851 - protein, 239 aa, Glycine max
  Clone ID: PAT_MRT3847_114462C.1.pep
MGYTRSSLLSVALVLAFCSSIQGLDITKLLGEYPEYAQFNKYLTETKLADQINSRNAVTVLALDDAAMASLSGKSQDAVKAILSTHVLVNFYDEKKLMEAEGSRTKVETLFQSSGVAKPNQGYIYVALINEGEIAFGSAAAAPNAPFEVVLVRSVTSQPDTVSVLQVSKPIVAPGVESAAAAATSATVPLATTAADGAGDNIAQSPSALAPGPSSDASRVYMGLFGAASAIASLVMLAL

SEQ ID NO: 158852 - protein, 84 aa, Glycine max
  Clone ID: PAT_MRT3847_114463C.1.pep
MGRHSCCLKQKLRKGLWSPEEDEKLFNYITRFGVGCWSSVPKQAGLQRCGKSCRLRWINYLRPDLKRGIISPLFSLLIISLHEV

SEQ ID NO: 158853 - protein, 334 aa, Glycine max
  unsure (1)..(334): unsure at all Xaa locations
  Clone ID: PAT_MRT3847_114464C.1.pep
MGKEKTHINIVVIGHVDSGKSTTTGHLIYKCGGIDKRTIEKFEKEAAEMGKGSFKYAWVLDKLKAERERGITIDISLWKFETSKYYVTIIDAPGHRDFIKNMITGTSQADCAVLIVAAGVGEFEAGISKNGQTREHALLAYTLGVKQLIVGVNKMDSTEPPYSQKRYEEIVKEVSTYIKKIGYNPDTVAFVPISGWNGDNMLEPSANMPWFKGWKVTRKDGSASGTTLLEALDCILPPTRPTDKPLRLPLQDVYKIGGIGTVPVGRVETGVLKPGMVVTFAPVNVTTEVKSVEMHHEAXSEALPGDNVGFNVXNVSVKDVRRGNVAGDSXXHPS

SEQ ID NO: 158854 - protein, 60 aa, Glycine max
  Clone ID: PAT_MRT3847_114465C.1.pep
YIILNRTCRSFYLVMAVVPLAYMVTVAYHVWSRHKTGAEPFYTTIWIKAHARRSWVPCLS

SEQ ID NO: 158855 - protein, 118 aa, Glycine max
  Clone ID: PAT_MRT3847_114466C.1.pep
GGHILCIYRETYWTHCNSLTVLSILLEQCWYKRHAFRTIHSISFSIFNSFTSTMHDDKVLDDTLQNILMLFINGRYLFTNYTVVWKKIRLEHDDLVVPITLFLEISLLNEMHLIIIVW

SEQ ID NO: 158856 - protein, 56 aa, Glycine max
  Clone ID: PAT_MRT3847_114467C.1.pep
IPVCDPRVRIRAAAFFFFFFFLFLTEDLQVCFLNIDGFLTITNLVSKFGYFIGVYC

SEQ ID NO: 158857 - protein, 91 aa, Glycine max
  Clone ID: PAT_MRT3847_114468C.1.pep
NRNITAQRKLEVNGNHETPVPYKIISGNTCMVNRNPADLTIPETGNIYMIRGEDLKFEKSFPKNKPRFPIPYGSKQQKNLKGTKMKEHSKH

SEQ ID NO: 158858 - protein, 52 aa, Glycine max
  Clone ID: PAT_MRT3847_114469C.1.pep
QPLHHPQPDTAISHLHTHLFLPDLDHYSGLINSFQVTQTSQLSKLGIPVLST

SEQ ID NO: 158859 - protein, 103 aa, Glycine max
  Clone ID: PAT_MRT3847_11446C.1.pep
GARKGPFKKIRGFSQGNPPSPPGQSFGTPLGNRPLSSLNFNSFSQPLFASVWRRYLPQWGQNSFHPTQVFENFFFNKAFFIGGGNKAPHFFFGDLGTETPLVA

SEQ ID NO: 158860 - protein, 63 aa, Glycine max
  Clone ID: PAT_MRT3847_114470C.1.pep
VVVLVSVRGLATVAIVVEGLEVVAEGHIIPSIHLVHRTTPILVAIWPDPCTVLVECNNSGALI

SEQ ID NO: 158861 - protein, 46 aa, Glycine max
  Clone ID: PAT_MRT3847_114471C.1.pep
LVNKLLLRIKLMHTEKLSDYMHINNRRKGDPDYFCHLLTRTKANGQ

SEQ ID NO: 158862 - protein, 54 aa, Glycine max
  unsure (1)..(54): unsure at all Xaa locations
  Clone ID: PAT_MRT3847_114472C.1.pep
AAHAQMETNLFKWMLNYAETPKGCMLDLKGXHPRTLHIKLSDGGTILRSDLLAN

SEQ ID NO: 158863 - protein, 46 aa, Glycine max
  Clone ID: PAT_MRT3847_114473C.1.pep
SCNIGDYSRQAPPPTKGLISGIYKNTKIMTCASHFDVFHTTYVEEL

SEQ ID NO: 158864 - protein, 73 aa, Glycine max
  unsure (1)..(73): unsure at all Xaa locations
  Clone ID: PAT_MRT3847_114474C.1.pep
LXQXPEXVXAWGKQXHQGXXSRKRSEPSXSNXQLNXKLEXXXLPQAXXLPXXLLXFQLQQALLXEKSKRGGGX

SEQ ID NO: 158865 - protein, 128 aa, Glycine max
  Clone ID: PAT_MRT3847_114475C.1.pep
MLLKKGLPRVPISYSIGKDNGDRFFSSARQGSKQMVDTNDVAHKIALALTEASQRGGSSKIFGSPDKKFVPSLGLKSGKKHPKSEIAGANFCSSDLDDGSFELSLGSPEGNNEDYFRKTLHRSGRENL

SEQ ID NO: 158866 - protein, 209 aa, Glycine max
  unsure (1)..(209): unsure at all Xaa locations
  Clone ID: PAT_MRT3847_114476C.1.pep
MAIRNSLTGQFLRRSSVAGARLMSSSSSWFRSIEPAPKDPILGVTEAFLADQSPNKVNVGVXEYLPMGGSIKMIEESLKLAFGDNSEFIKDKRIAAVQALSGTGACRLFAAFQQRFHPNTQIYIPVPTWANHHNIWRDAGVPMKTFRYYHPESRGLDFSGLMDDIKNAPDGSFFLLHACAHKPTGVDPFEEQWRENSSQIKGKGHFPFF

SEQ ID NO: 158867 - protein, 427 aa, Glycine max
  Clone ID: PAT_MRT3847_114477C.1.pep
MAIRNSLTGQFLRRSSVAGARLMSSSSSWFRSIEPAPKDPILGVTEAFLADQSPNKVNVGVGAYRDDHGKPVVLECVREAERRVAGSQFMEYLPMGGSIKMIEESLKLAFGDNSEFIKDKRIAAVQALSGTGACRLFAAFQQRFHPNTQIYIPVPTWANHHNIWRDAGVPMKTFRYYHPESRGLDFSGLMDDIKNAPDGSFFLLHACAHNPTGVDPSEEQWREISSQIKAKGHFPFFDMAYQGFASGDPERDAKAIKIFLEDGHLIGLAQSYAKNMGLYGQRAGSLSVLCEDEKQAVAVKSQLQLIARPMYSNPPLHGALIVSTVLGDPDLKKLWLKEVKVMADRIIGMRTTLRENLEKKGSTLPWQHITNQIGMFCYSGLTPEQVDRMTNEFHIYMTRNGRISMAGLNTGNVGYVADAIHEVTKSF

SEQ ID NO: 158868 - protein, 123 aa, Glycine max
  unsure (1)..(123): unsure at all Xaa locations
  Clone ID: PAT_MRT3847_114478C.1.pep
APPHGARGPTTPPFFKAGVPPPFFWGAPFNKPDIRAPFFFPHGGRGPPPSKVLALAPALPGGSSLLLRAGLPLGESPPGGGETPPFFIIYPPGFFPPTFIFGLPAAVFPGWGFWDPTXLAPFW

SEQ ID NO: 158869 - protein, 254 aa, Glycine max
  Clone ID: PAT_MRT3847_114479C.1.pep
VQWASLIQALASNKTGPPGPHLRITALSRTGSGRRSIATVQETGRRLAAFAASLGQPFSFHHCRLEPDETFKPSSLKLVRGEALVFNCMLNLPHLSYRAPESVASFLSGAKALKPRLVTLVEEEVASIVGGFVARFMDSLHHYSAVFDSLEAGFPMQGRARALVERVFLGPRIVGSLARMGEEEERGSWGEWLGAAGFRGVPMSFANHCQAKLLIGLFNDGYRVEELGSNKLVLDWKSRRLLSASLWTSSSHSD

SEQ ID NO: 158870 - protein, 35 aa, Glycine max
  Clone ID: PAT_MRT3847_11447C.1.pep
AMLSDSTTNSLNSHSSNIFIVTSHSYSANLINSFS

SEQ ID NO: 158871 - protein, 46 aa, Glycine max
  Clone ID: PAT_MRT3847_114480C.1.pep
LRDCVAVRRGHIVSASRMGARGDKPHVPLVTIATRAGQWAEARESV

SEQ ID NO: 158872 - protein, 70 aa, Glycine max
  unsure (1)..(70): unsure at all Xaa locations
  Clone ID: PAT_MRT3847_114481C.1.pep
AQHHSEKLGLAYRVLSTHGASTDSTRQXTPPPPSPEKTQKKALKVDDRIYTNLHRHGDPEHKEAMNRRDW

SEQ ID NO: 158873 - protein, 95 aa, Glycine max
  Clone ID: PAT_MRT3847_114482C.1.pep
ARIPGEPGFFKPLALPEVFINRAIEMWRYFCLARSVFPQLPSLLSCGPNNQEKVHAFDSVCIIGVTLHLTQYLQGIFLPPSIESCSMYDGFKKVW

SEQ ID NO: 158874 - protein, 133 aa, Glycine max
  unsure (1)..(133): unsure at all Xaa locations
  Clone ID: PAT_MRT3847_114483C.1.pep
EGELINRDSMPALLLIGTKIWGLCRHYEIEDSMAVMKERMDCGLTANRHISTXLIDAYFKXGKDTVSAKLLHDMHDXHITITAVTSCALIAESCTMGIVPQAEAYFDHMTRNGXEPNIMIYTDMIDSLCKGDE

SEQ ID NO: 158875 - protein, 135 aa, Glycine max
  unsure (1)..(135): unsure at all Xaa locations
  Clone ID: PAT_MRT3847_114484C.1.pep
SRGLKNLTRTGYYWEINCVTGWTAPPMQDAHVTNDWLIHSQECGPTTYCVINAQKPYVNNRWMGKLTLPHGTFKRVKRMPIAITGGSGAKHAMLTNIPNAXVLSLWRYHXGELAFKVANMTKTLHSMDQMFAHSI

SEQ ID NO: 158876 - protein, 98 aa, Glycine max
  unsure (1)..(98): unsure at all Xaa locations
  Clone ID: PAT_MRT3847_114485C.1.pep
NGRKKEVVTLETSINLHIRLHGCAFKKTAHQAIKDISKCAQRDMHTCDVIVQGKLHKTVCSQRIRRVHSRIRVRIPRXRKEDKYANHQVNSSVTVLEI

SEQ ID NO: 158877 - protein, 79 aa, Glycine max
  unsure (1)..(79): unsure at all Xaa locations
  Clone ID: PAT_MRT3847_114486C.1.pep
SXLHLEXPXLYGCQPXLHSXIFFXLXFHKSXXFILKSTLQNFSIHFPLFFSIFFLKNPFFFHFPXLFTYFFFHILYIIH

SEQ ID NO: 158878 - protein, 112 aa, Glycine max
  Clone ID: PAT_MRT3847_114487C.1.pep
HGPPPRFLKGPPFGGPQPGGEGGTPRGGPPREGNSFPGEGGLGFYFPQKNPPAENPNPKAGPLPKSPLVFSPFGPGPNGLFGVVPFLFPTIKFSFIPPPPLFFFFPQGIFFF

SEQ ID NO: 158879 - protein, 80 aa, Glycine max
  Clone ID: PAT_MRT3847_114488C.1.pep
VEYVEGYDELEEEEDMEDFGGFATLKSQGDYDNDENAGSPDDEEEEAIDRSRAKRKMALSSKKLEKNGLDFKSKKTRVLV

SEQ ID NO: 158880 - protein, 188 aa, Glycine max
  Clone ID: PAT_MRT3847_114489C.1.pep
MDLTNDTNSQTPPQPNTTTNGSLKHHHHHPTTVSPPQQPPSTTVFYKECLKNHAASIGGHALDGCGEFMPSSSSNPNEPRSLTCAACGCHRNFHRRRDTQENHHRSNSRPNFISFYHSPPLSRHGPGLSPTPSPMSSPSPSPPPISHHFPPSSHHFQGPIPAHGLLGLGNENHHHHMSFNFNSSSHST

SEQ ID NO: 158881 - protein, 61 aa, Glycine max
  Clone ID: PAT_MRT3847_11448C.1.pep
NDCVVVLTQSFCYHFAHSTVTVKWEWARARWFLTSGCCTLLLYFQSCITISIILKVLEPCT

SEQ ID NO: 158882 - protein, 99 aa, Glycine max
  Clone ID: PAT_MRT3847_114490C.1.pep
NSARATYTYLWSQTLSLILPKPKHVYLRGFSKHSQPSLSRTRQPFCSTECFYLYVSLTPNAKPICITVVFLTTTLTIASAGPMHTRFDAHVSELEQDED

SEQ ID NO: 158883 - protein, 41 aa, Glycine max
  Clone ID: PAT_MRT3847_114491C.1.pep
PVNKYLLDEDALHYTIEDVRPHRGINKFTSAAYSNCIRKPC

SEQ ID NO: 158884 - protein, 56 aa, Glycine max
  Clone ID: PAT_MRT3847_114492C.1.pep
HHWTLTGHGHDVCLLCPTTTTTYTVYLILLYFGVCVFAILPEEPVELWRGIRTCVT

SEQ ID NO: 158885 - protein, 84 aa, Glycine max
  Clone ID: PAT_MRT3847_114493C.1.pep
PIGYPKFCLCASCYESLLRSNKRKKKATIKLEIQNLNIPDCLVCQVKIQSGRPHQIRIHLSFIGHPLLGEYLMLKFSWCSHEEK

SEQ ID NO: 158886 - protein, 50 aa, Glycine max
  Clone ID: PAT_MRT3847_114494C.1.pep
VINPIQRPPYSIQSRPRHYALDSMRRVIRITTILLSEILYPPSSPRLYHS

SEQ ID NO: 158887 - protein, 48 aa, Glycine max
  unsure (1)..(48): unsure at all Xaa locations
  Clone ID: PAT_MRT3847_114495C.1.pep
PGAGGELTTXPSNKQWFTCYTKREMGLLITILPLPDTVLIFLVLKYWE

SEQ ID NO: 158888 - protein, 53 aa, Glycine max
  Clone ID: PAT_MRT3847_114496C.1.pep
SGEPCTGSLTMHIHYLHICIPTKQDILYHPFTTTSFLRRTYFDERNLSLVAFN

SEQ ID NO: 158889 - protein, 113 aa, Glycine max
  Clone ID: PAT_MRT3847_114497C.1.pep
MASMREFSRVILSHLKKPHASPSQLLFLRTMTSKVFVKGLAFSTTEEELAKAFSQYGSVLKANIILNKAKNRSKGFGYVTFAKEEEACKAQIDMNGKILHGRVIYVDVQLPNK

SEQ ID NO: 158890 - protein, 124 aa, Glycine max
  unsure (1)..(124): unsure at all Xaa locations
  Clone ID: PAT_MRT3847_114498C.1.pep
IPAKQLKNDLSDQKKIVITPTPNKNSWNDANGVGRKGNPLRNVENRKEEYDRPLARIFSSSRSFESGDTSFEAPIDGTYSFSHPDENETNKIPMADSKRYICTRDSXLTPVVLLSDREKDQCDP

SEQ ID NO: 158891 - protein, 57 aa, Glycine max
  Clone ID: PAT_MRT3847_114499C.1.pep
MDPYKNRPSSAFNSPFWTTNSGAPIWNNNSSLTVGSRGTVWYSILFSLLHDHIFSSR

SEQ ID NO: 158892 - protein, 385 aa, Glycine max
  unsure (1)..(385): unsure at all Xaa locations
  Clone ID: PAT_MRT3847_1144C.1.pep
MGVEEQGEEINVQSMIEQLSQAFLELEAQKGETENKIQWVEIKQHFHDLETELNKKLEELEAKEREYEAKQVEVDTLLAERKTVIASKEQDLLDRLQELKDAAVASIVEAHANHRNATLESVYDGKNKDHKVSSSLGDTNSSEDDFPHKSDEKSKGVAVEGRPHPELTQFCEQMDAKGLLNYIMENKKKLSVNCEEISGALQSATNQLRLGLDLLEGFYPTNETSQLKDKSGASLQGMRKSCIIILEAMATLLARADPGADHLLNPQTKQHAKAIADEWRPNLARADTDAANGNSLEAKAFFQLISTXIASEFDEEELCKLVLAVAQLRQAPELCCSIGLIHKMPAVVESLINTGKQIAAVHFIHAFQLQESFPPVPLLKAYLIS

SEQ ID NO: 158893 - protein, 51 aa, Glycine max
  Clone ID: PAT_MRT3847_114500C.1.pep
PKPNARTESSHETSHATLERMRVRFDSRTLYKSLSSRCSFSMEGSAEDFGA

SEQ ID NO: 158894 - protein, 87 aa, Glycine max
  unsure (1)..(87): unsure at all Xaa locations
  Clone ID: PAT_MRT3847_114501C.1.pep
LKKPNVFLKNGVKVAPKKKRLEILSPYQGPXTFNWEEKTIPFGKFVRGTYLARTKFLAADPKSNLEVNYSFEIQKNSPTPQKDLFLT

SEQ ID NO: 158895 - protein, 319 aa, Glycine max
  Clone ID: PAT_MRT3847_114502C.1.pep
MKAKPSYHHHHRRTTTEEKRKRKMLEVKRIGVVGSGQMGSGIAQVAAMHGIDVWLHDLDPQALSKASSSISSSINRFVSKNHISQVAGADALKRLRLTTDLEDLQLADLIIEAIVESEDVKKSLFAQLDRIAKSSAILASNTSSISVTRLATSTSRPRQVIGMHFMNPPPVMKLIEIVRGADTSEETFVATKALSERLGKVVITSHDYSGFIVNRILMPMINEAFFALYTGVATKEDIDTGMKLGTNHPMGPLELADFIGLDVCLSIMRVLHAGLGDNKYAPCPLLVQYVDAGRLGRKRGIGVYEYSKDPRSTKSSSRL

SEQ ID NO: 158896 - protein, 59 aa, Glycine max
  Clone ID: PAT_MRT3847_114503C.1.pep
NIQGHKRYHRLLEPETIRLNTNNLQIINNPVYGDTLACHNLIGLLALRLNLACVKSNTA

SEQ ID NO: 158897 - protein, 41 aa, Glycine max
  Clone ID: PAT_MRT3847_114504C.1.pep
GEGSSGKGWDKSHLNSILCGKKGYKMGSNYSHYVSDCEQTN

SEQ ID NO: 158898 - protein, 334 aa, Glycine max
  Clone ID: PAT_MRT3847_114505C.1.pep
MDLTSISTHNTNTTQTLDAANTTTKTTPPTPIPTTTPKSLSFANGTLKRHPTTTVAQPPSMVVSYKECLKNHAASIGGHALDGCGEFMLSSSTVPSDPRSLKCAACGCHRNFHRREPQENNLNNNLKNNNPTFLNCPSHSPSQQQSPSPPPLSHVPPYHASAPHMLLALGTAYSPAPSDEHHHHQQQQQKSFNFSMMRSENASKKRYRTKFSKEQKEKMHGFSEKLGWRMQKGDDGLVQEFCNEIGVSRGVFKVWMHNNKNTLRKKPEDGIGNANAPQSNNDDGNANGGSGGFDSDINNPYNPNSNNNDNDIHMNEEDGCVNNVVHVSLNEMSS

SEQ ID NO: 158899 - protein, 54 aa, Glycine max
  Clone ID: PAT_MRT3847_114506C.1.pep
RPKCPKSNLIGIICHQFLHHHNKNLCANYFFTVKYIVAILKLLRVIIKNRCDIY

SEQ ID NO: 158900 - protein, 82 aa, Glycine max
  Clone ID: PAT_MRT3847_114507C.1.pep
QKRHRPPRKPTGKVQSKNPPLKNPTRKKKQDFWGGVFFSPGGAPLFLFFFKGGKPKKKKPPPFLNFPGPLNKPRNTGFSLGI

SEQ ID NO: 158901 - protein, 69 aa, Glycine max
  Clone ID: PAT_MRT3847_114508C.1.pep
KTIVSEEIIFSPSKAQVSCVCVFDSKVNLIQTCSQCMSGVFSFGLNFVNYVSPSPVSSYPTFYVISLHS

SEQ ID NO: 158902 - protein, 46 aa, Glycine max
  Clone ID: PAT_MRT3847_114509C.1.pep
HFPSNIFFSLLIEIHVSHYTRITSNKRTYMKPTKCGMKLAYLEGLT

SEQ ID NO: 158903 - protein, 103 aa, Glycine max
  Clone ID: PAT_MRT3847_11450C.1.pep
PIAGSSAYAIDEVGACCATGDGDIMMRFLPCYQVVESMRLGMEPKLAAKDAITRIARKFPDFLGAIVALNKKGEHAGACHGWTFKYSVKSPAMKDVEVFTVLP

SEQ ID NO: 158904 - protein, 44 aa, Glycine max
  Clone ID: PAT_MRT3847_114510C.1.pep
RYKLYIVTTANANNIYHTYKSFYRTANAKPLCTWESRLPNQANF

SEQ ID NO: 158905 - protein, 61 aa, Glycine max
  Clone ID: PAT_MRT3847_114511C.1.pep
WRKKEVRRRLLTWRPYQERLMNLAEARREIATALKFHRAPMKEASEQSHQQAHAQKPAERP

SEQ ID NO: 158906 - protein, 51 aa, Glycine max
  Clone ID: PAT_MRT3847_114512C.1.pep
MQPKRAVLSTKNYMRQYKIQPNPLLGSCEEDSSENKEPWIKTDADYLVLEL

SEQ ID NO: 158907 - protein, 325 aa, Glycine max
  unsure (1)..(325): unsure at all Xaa locations
  Clone ID: PAT_MRT3847_114513C.1.pep
GECYHXLYPRCVYDAFAEYQLPEILRTPLQSLCLQIKSLRLGSISEFLSRALQSPETLVVHNAIEYLKIIGALDEDENLTILGRCLTMLPMEPKLGKMLILGAIFNCLDPILTVVAGLSVRDPFLTPLDKRDLAEEAKSQFCGAYSDHLALVRAYEGWRDAEMDLGGYEYCWKNFLSSQSMKAIDALRREFICLVKDIGLVDSNTASCNEWSSDVNLIRAIICYGLYPGICSVVHNEKSFSLKTMEDGQVLLYSNSVNAQETKIPYPWLVFNEKIKVNSVFLRDSTAVSDSVVLLFGGSLLKGDTDNHLKMLGGYLEFFMEPSVA

SEQ ID NO: 158908 - protein, 361 aa, Glycine max
  unsure (1)..(361): unsure at all Xaa locations
  Clone ID: PAT_MRT3847_114514C.1.pep
QGLAVEKGDITRGTGFTATLPLPHTTAIDFSSVPDVKGSSKSFPKHETRHLSEHKXCARFSADGRFVATGSADTSIKLFEVSKIKQMLLPEAKDGPVRPVIRTYYDHIQPINDLDFHPQGTILISGAKDQTIKFFDISKTNAKRAYRVIQDTHNVRSVSFHPSGDFLLAGTDHAIPHLYDINTFQCYLSANIPETSPSGAINQIRYSCTGSMYVTASKDGAIRLWDGITANCVRSITAAHGTAEATSAIFTKDQRFVLSCGKDSTLKLWEVGSGRLVKQYLGAIHTQLRCQAIFNETEEFILSIDELSNEIVIWDAMTTEKVAKWPSNHVGAPRWLEHSPIESAFISCGTDRSVRFWKETV

SEQ ID NO: 158909 - protein, 92 aa, Glycine max
  Clone ID: PAT_MRT3847_114515C.1.pep
TLMRLSQIRSYNLQRNKFGNKNLYTIRSSKLQHIVISINSFKTSGLHQFGKYSILKSFQKLLRCYSSLRGIRCFCNYYTAIYHLTEIIMFYP

SEQ ID NO: 158910 - protein, 69 aa, Glycine max; identical to SEQ ID NO: 157625
  Clone ID: PAT_MRT3847_114516C.1.pep

SEQ ID NO: 158911 - protein, 55 aa, Glycine max
  unsure (1)..(55): unsure at all Xaa locations
  Clone ID: PAT_MRT3847_114517C.1.pep
LLCXKXSFLHAAEIHKXKPPXXQGLGSKWLEFQHWEFGSAMLSNSITTTLPIITC

SEQ ID NO: 158912 - protein, 71 aa, Glycine max
  Clone ID: PAT_MRT3847_114518C.1.pep
HPRKLLPHWSDQMAHKKKSNVSVLPFLGTSFSHMYIRPGTVQVRATYDPHAAHADLRCAPHKEHEAFFSSM

SEQ ID NO: 158913 - protein, 43 aa, Glycine max
  Clone ID: PAT_MRT3847_114519C.1.pep
KNSRFGPSLPTLVFTKKLVNKRPFQVLWNFKGNFKSKMGPKFH

SEQ ID NO: 158914 - protein, 47 aa, Glycine max
  Clone ID: PAT_MRT3847_11451C.1.pep
ATSLLLIHINVVNFSKCARLVFFFSSSPLTFNFLTARFVHQQSSVCK

SEQ ID NO: 158915 - protein, 90 aa, Glycine max
  Clone ID: PAT_MRT3847_114520C.1.pep
FGWLYNFTQTKCVPLSGAHPQYSKTQNEGQPFLYGEGERSNMGFNFPKIKKLERAGPQVGPLSKKKKQGLFFSLAHPAGRALRIKKANSF

SEQ ID NO: 158916 - protein, 49 aa, Glycine max
  Clone ID: PAT_MRT3847_114521C.1.pep
LRLHVFVTSCKTYIEERKRCLPEITPLREEDKPCRILKAISRYPKGDGD

SEQ ID NO: 158917 - protein, 152 aa, Glycine max
  unsure (1)..(152): unsure at all Xaa locations
  Clone ID: PAT_MRT3847_114522C.1.pep
MTSNGVPMNNLPVLGEKNFDXWHVQMKALLGFQDVYEIVTSGYQEPSVSATEAQRSTYKDLKKKDCKALFLIHQCVNDANFEKIANATTLKEAWDILIKSYEGAEKIKKAKLQTLRRQYELLAMEETESVAEYFTMILTLTNHVKCYGERSK

SEQ ID NO: 158918 - protein, 336 aa, Glycine max
  Clone ID: PAT_MRT3847_114523C.1.pep
MMRLTMLLMHKNSAAGASLASQSEDSQKSLRDGIYSKEVVSVSKILRGIPGNDKCAECSAPDPDWASLNLGILLCIECSGVHRNLGVHVSKVRSITLDVRVWENTVLELFDNLGNAYCNSVWEGLLLLDHERLGESNVPMKPCSTDAFQHKEKYIQAKYVEKSLIIREEDIPGNPSVSIRIWQAVQAVNVREVYRLIVTSTSNLINTKYYDESHHAADAKGHQHDPEACLRVEETTETERCFRGWSLLHLACHSGSALMVELLLQFGADVNMCDYHERTPLHHCITSGKNQLAKFLLRRGARPSVKDAGGLTVLERAMERGAITDEELFILLAECQ

SEQ ID NO: 158919 - protein, 353 aa, Glycine max
  Clone ID: PAT_MRT3847_114524C.1.pep
MEGESKEDVWCRETVPKVLKLVCSTLPLSLSHTNLVSLLLVSPSLHRTLLCSQPLWQSLNFRELNNAGNRLIAALSLPRYCNVKQINLEFARDVEDAHLILIMDKCFNSLQSLESLNLNGCQKISDTGIEAITSCCPQLKSFSIYWNVRVTDRGLQHIVKNCKHIIDLNISGCKNISDQGAQLVADNYPELESLNLTRCIKLTDDGLKSLLHKCLFLQSLNLYALSSFTDEAYRKICLLARLKFLDLCGAQNLSDEALSCISKCKNLESLNLTWCVRVTDEGVISIAKGCTSLEFLSLFGIVGVTDKCLEELSKSCSNKITTLDVNGCIGIKKRSREELLQLFPYLKCFKVHS

SEQ ID NO: 158920 - protein, 64 aa, Glycine max
  unsure (1)..(64): unsure at all Xaa locations
  Clone ID: PAT_MRT3847_114525C.1.pep
YLLSKFDISSSSFFGCQLMTPVSILVTDQYFCSHLQTSLFALQVGXVLFLGLRSPFPSAPCGFF

SEQ ID NO: 158921 - protein, 84 aa, Glycine max
  Clone ID: PAT_MRT3847_114526C.1.pep
QTGGALSLFPPFGLSEKALQGAGAAKAPPYTFFRTRLFNAPGVVVVPGFGFGRVPGPGHFRGPLLPPEEKFPAFVPGWVGFPGN

SEQ ID NO: 158922 - protein, 81 aa, Glycine max
  Clone ID: PAT_MRT3847_114527C.1.pep
KRSCPSLSLHQKCQPRRPSIYEQVMGTRCPSIPRLVEQPGRGHHCGIRPDREWKASASSRIKAMGMDLVSKYILYRLPSKD

SEQ ID NO: 158923 - protein, 80 aa, Glycine max
  Clone ID: PAT_MRT3847_114528C.1.pep
IVTVLGFPPPPPPCGYNQGPPRALGYSFLGSPSPGFSLGGRPSGCSSPSRGWGFPLRWRVTFVQPPPYNVSVTSQENGFV

SEQ ID NO: 158924 - protein, 54 aa, Glycine max
  Clone ID: PAT_MRT3847_114529C.1.pep
FLYKTEDKAYRGMKVLTEFPEAKGNVLSTCVLHQSSKVPFHFDRNTPYTSNIEI

SEQ ID NO: 158925 - protein, 59 aa, Glycine max
  Clone ID: PAT_MRT3847_11452C.1.pep
KLKKNFSPQNLSFTQLGAGPHFIFFFNPSNYPDFILRFEREQKFFWIGFGYGPSLFHQP

SEQ ID NO: 158926 - protein, 82 aa, Glycine max
  Clone ID: PAT_MRT3847_114530C.1.pep
IGIPPCLLPDKARKRKTNIAEREHRMTSIIKNQSLPKSNAINYPQRALNQISTSISMTKYKTKERKPEPIRHKNKFHIYVSS

SEQ ID NO: 158927 - protein, 82 aa, Glycine max
  Clone ID: PAT_MRT3847_114531C.1.pep
PRPTNKKALLLIKSADYKTPPLLTNFSFPPKTRPILFCFSTPSTKRIPYLLTCNSPTPKNLFFLFKRVFLPLFQTKTSFITF

SEQ ID NO: 158928 - protein, 78 aa, Glycine max
  Clone ID: PAT_MRT3847_114532C.1.pep
GSALFPISTDMNTSFYILIEIETDFTDVRNDNVIVIPVTAHCYRARFHGSSLLQMHAARSEHMPNPNLRRYTNSPEEP

SEQ ID NO: 158929 - protein, 58 aa, Glycine max
  Clone ID: PAT_MRT3847_114533C.1.pep
KFHVVGSPICKGLLALIGPIAQAISLRASSLCGFHLWSVEIPSTTAVAWCIRIQSVKM

SEQ ID NO: 158930 - protein, 272 aa, Glycine max
  Clone ID: PAT_MRT3847_114534C.1.pep
PRPTHNTPFLQFLSLTTTTPFFTSSHSPFHRVLIMLGKRPRPMIGKLSELLVSRGRTVAYLDTTGSPRGPLDMKMMQSSPRGLKNYDLGGVGLGIVVALDKSNEVAAREVLPKHAVCTSNLNRSGPIPVHYTKNPDEFDVEEYTYVTCHVPNKTFTKVYYDGGEGEIRRHYNNSNVGVLRRTAPQPLIVEAESLYPTSNFLSSCHLCGKKLHGKDIYMYRGEKAFCSPECRSSQIMMDERKERCRSEASRSVEMSSSPYAREQIFSTGILAL

SEQ ID NO: 158931 - protein, 66 aa, Glycine max
  unsure (1)..(66): unsure at all Xaa locations
  Clone ID: PAT_MRT3847_114535C.1.pep
SIGAAGCKLIDLCEKRIMNKYLYSGFLVHQLDKEFGICFNECPXMGHAFVGLDLSQQHHLSIRAPR

SEQ ID NO: 158932 - protein, 242 aa, Glycine max
  Clone ID: PAT_MRT3847_114536C.1.pep
MSGKRPRPMIGKLSELLVSRGRTVALLDTTGSPRGPLDMKMMQSPRGLKNYDLGGVGLGIVVALDKSNNEVAAREVLPKHTVCTSNLNRSGPIPVHYTKNPDEFDVEEYTYVTCRVPNKTFTKVYYDGGEGDIIRRQNNNNNNKNNVVVLRRTEPQPLIEPESSYPTSSFLSSCHLCGKKLHGKDIYMYRGEKAFCSPECRSSQITMDERKERCSSEASRSVEMSSSPYTREQIFSTGILAL

SEQ ID NO: 158933 - protein, 62 aa, Glycine max
  Clone ID: PAT_MRT3847_114537C.1.pep
YIIQTHNYPARLHIGTEIQSHNNYKHTHLPRRNEERNVSSMDHLLNWSIVDKHLKPLDATKV

SEQ ID NO: 158934 - protein, 71 aa, Glycine max
  unsure (1)..(71): unsure at all Xaa locations
  Clone ID: PAT_MRT3847_114538C.1.pep
LNWLEIHLSLASLLTNKQARTDRPNKHSRRMNSEWHALCTHSSRAACVVLTRRLTHSLASXLALVSFAFFP

SEQ ID NO: 158935 - protein, 127 aa, Glycine max
  Clone ID: PAT_MRT3847_114539C.1.pep
MSSSPFPSCFRPSPNAESHPPPPPPPHSTISNLTIYHTDTGPVSLTWSRSIVGRSLHIQLHQNPLDSPPYPNPNPNPNPSPSTNLSFHLHIKPFLFWKKHGSKKIAPNTLLLRNLSRAKFGAKPKLL

SEQ ID NO: 158936 - protein, 189 aa, Glycine max
  Clone ID: PAT_MRT3847_11453C.1.pep
TTRTQLFVRPPPYAVSVASSPSANTAISGLIVVDNRDKEKVVDLSSSLSKEDKRLNNMHQDFVLPSPKEISVCMTGNSTSSSRTLKLSRSRSCKASIMRNLSSDWFEDVDVIQNTPPIGIEKAFPGRPEGFPKNIYALNYNANAERLSCNGHGNSVQNSSVDDVQNVKSSTNKEREGTQNIIRGNLLAG

SEQ ID NO: 158937 - protein, 248 aa, Glycine max
  Clone ID: PAT_MRT3847_114540C.1.pep
EFGTSKKFKQTWKGFSTHSFRYVFTNMRLALPSAAMASLEYWAFEVLVFLAGLMPDSQITTSLIAICINTEFIAYMITYGLSAAASTRVSNELGAGNPERAKHAMSVTLKLSLLLGLCFVLALGFGHNIWIQFFSDSSTIKKEFASVTPLLAISILLDAIQGVLSGVSRGCGWQHLAAYINLATFYLIGLPISCFLGFKTNLQYKGLWIGLICGLLCQSGTLFLFIRRAKWTKLDLSRDNDKERPLVV

SEQ ID NO: 158938 - protein, 47 aa, Glycine max
  Clone ID: PAT_MRT3847_114541C.1.pep
TESYFQYIIFKLNHHICLNMNLNFENISPYKLYSLAEWLLAFTKSLV

SEQ ID NO: 158939 - protein, 43 aa, Glycine max
  unsure (1)..(43): unsure at all Xaa locations
  Clone ID: PAT_MRT3847_114542C.1.pep
RPSDCKGFTSNKVLFVRSLITDVTVCAPYXQRICKVWQVGKDL

SEQ ID NO: 158940 - protein, 81 aa, Glycine max
  unsure (1)..(81): unsure at all Xaa locations
  Clone ID: PAT_MRT3847_114543C.1.pep
VGAIKNHPFRCPMVQTAPPLEGLSRPPVLLCLPKMNLVRNTEMQYYEAFMKPNXNVEPYLTKGMPHSFYLTPIAVDMAPPR

SEQ ID NO: 158941 - protein, 51 aa, Glycine max
  Clone ID: PAT_MRT3847_114544C.1.pep
NISTRSIYSRRIIVEEKRRQHNLARLTYSIYTKSKTRQHIYEDTWVSKECI

SEQ ID NO: 158942 - protein, 317 aa, Glycine max
  Clone ID: PAT_MRT3847_114545C.1.pep
ANIGYVIPTTVVSHFLTDYERTGRYTGFPCLGVLIQKLENPALRAWLKVQSNEGVLVRRVEPTSDANNVLKEGDVIVSFDDVRVGSEGTVPFRSNERIAFHFLISQKFAGDTAELGIIRAGTLMKTKVVLNSRVHLVPYHIDEGLPSYLIIAGLVFTPLSEPLIEEECEDSIGLKLLARARYSLAKFKGEQIVILSQVLGNEVNIGYEDMGNQQVVKFNGARIKNIHHLAHLIDSCEDRYLRFEFEDSYVAVLEKEAVAAASPSVLSDYGIPSERSSDLSKPYVDTLEVEGDQPADQEFGDSPVSNYEFGPDGLLWA

SEQ ID NO: 158943 - protein, 109 aa, Glycine max
  Clone ID: PAT_MRT3847_114546C.1.pep
LFGFPADSKDKRSHLKNSMHVSRPINSIWGNIDCAHLSSGEILVNKDWRRGEEEEAGLENEEARMLDLMADFIEEIDVRCAILLHAEAIDDEIKSEEEQARKGLGSSHS

SEQ ID NO: 158944 - protein, 48 aa, Glycine max
  Clone ID: PAT_MRT3847_114547C.1.pep
GVGLVALGHRVGARQLASVHAVLGSSDISHLRVLQSAAFLTLPLPLAA

SEQ ID NO: 158945 - protein, 46 aa, Glycine max
  Clone ID: PAT_MRT3847_114548C.1.pep
YPGRHALFDFHLYAMGGDSPISSGIRRSSIIPPCLLNKRRGVVFYF

SEQ ID NO: 158946 - protein, 69 aa, Glycine max
  Clone ID: PAT_MRT3847_114549C.1.pep
GGGKGGIMAKSRGWGVFVKGKGGFLRKPCCKCYVKKFIFSPGCPKIRKGPVNGLKFFVEEVLTFYYKGG

SEQ ID NO: 158947 - protein, 112 aa, Glycine max
  Clone ID: PAT_MRT3847_11454C.1.pep
WSCSTLPPGGNQGPSLRVQGVHPPGSCLVKLGSPPTTKTEPYVCGVWVHFIKRLCLSLFFVLKFKVFVFCLPQWVIIFFRGCVCFVLAPPDKKNLSWYRPNSRVLCGCDCVI

SEQ ID NO: 158948 - protein, 125 aa, Glycine max
  Clone ID: PAT_MRT3847_114550C.1.pep
TRKHQAYTHNHLKKKKNMSNSTQMEKDLTMTVQRSSYFPRCMMSPSCLPIHNEYEYSRIHYNPRKRVRRWRNILRRFMRESKTLCRSKPMSFQYDPGSYSQNFDEGCHLDEPRPGLQDVKWDSHH

SEQ ID NO: 158949 - protein, 70 aa, Glycine max
  Clone ID: PAT_MRT3847_114551C.1.pep
QFKQSVSNAIVSIEGHRWWRKSYICLTFSPVPRVVIISPFLQDPDLIWDPRIHLETILPCVKLHSAHLNL

SEQ ID NO: 158950 - protein, 146 aa, Glycine max
  Clone ID: PAT_MRT3847_114552C.1.pep
YFIQQFSFLSSLHNFHAMSQQPCLCLSQLAIHTTSYLNSSIPYPDLFEILFTANSFLSISEPSTMLLTLNHYSLHPHGGITFSQPTFFLPTTLNPVALPRAPKMADRVTAVEDRLERVEASIVSLREFIGAEIQRAMASRPSPPPG

SEQ ID NO: 158951 - protein, 77 aa, Glycine max
  unsure (1)..(77): unsure at all Xaa locations
  Clone ID: PAT_MRT3847_114553C.1.pep
MKEKEEELALFLVMKKREKEHNDLLLNSSEEFYAPLXKAGVDDILNSKNDKNDYNWLQTSYFLLLLKIILCLRLRLA

SEQ ID NO: 158952 - protein, 90 aa, Glycine max
  Clone ID: PAT_MRT3847_114554C.1.pep
RKTSSYFLHYLPKKKSRPILSRRNRGAFNALFSEDYMISGALCAQVLDGHTRSIAGASGRQALCFHLDPKMAHALALVQSPKKYHNIREN

SEQ ID NO: 158953 - protein, 52 aa, Glycine max
  Clone ID: PAT_MRT3847_114555C.1.pep
CVLFILVELRWKFAENGLKTPGDGLEWGVLFGFGPGLPIETVVLCSLAIWDA

SEQ ID NO: 158954 - protein, 145 aa, Glycine max
  Clone ID: PAT_MRT3847_114556C.1.pep
KSKQGLAELYEQEYVQKTDPTSAPLSFKDEQKNEASMLFKRLCLKLDALSHFNFAPKPVIEDMSIQANVPALAMEEIAPVAVSDAAMLAPEEVFDGKGDIKEETELTKADRKTRRANKKRQFKAEAVKRTNKKAQEGAIRSQVNG

SEQ ID NO: 158955 - protein, 110 aa, Glycine max
  Clone ID: PAT_MRT3847_114557C.1.pep
RRRRVLDHGVLVERRGGFCRVVLVGIVALHIVVVVAPPEAQRPVVDGVRKEGRGAGQRAPRAALLLLLLAPIRKRVWQVGRRRVANIVLDALLHPLVPLWLCLAIEEGDE

SEQ ID NO: 158956 - protein, 504 aa, Glycine max
  Clone ID: PAT_MRT3847_114558C.1.pep
MPKGMASVTTFSLMLQFLFFILCSSFGQLSLAFTSQEYHEALEKSILFFEGQRSGKLPSNQQQTWRGDSGLSDGSSYHVDLVGGYYDAGDNVKFGLPMAFTTTLLAWSVIEFGSSMQDQLENARAAIRWSTDYLLKAATTTPDTLYVQVGEPNMDHRCWERAEDMDTPRNVYKVSATNPGSDVAAETAAALAASSIVFRDSDPSYSSKLLQAAIKVFNFADRYRGSYSDSLNSVVCPFYCSYSGYHDELLWGASWIYKASGINTYIQYIQSNGHILGADDDGYTFSWDDKRPGTKILLSKEFLEENSEEFQLYKAHADNYICSLMSGTPGFQAQYTRGGLLYKGSESNLQYVTSTSFLLLTYAKYLNTNGGNVVRCGTSAVTGENLVTLAKAQVDYILGNNPTKMSYMVGFGERYPKHIHHRGSSLPSIHAHTQHISCNDGFQFFHSASPNPNILVGAIVGGPDNNDNFSDDRHNYQQSEPATYINAPFVGALAYFSANPPTTY

SEQ ID NO: 158957 - protein, 90 aa, Glycine max
  Clone ID: PAT_MRT3847_114559C.1.pep
EPTLLFCGSHHYQAFRLVARRNALMYACATCHNVTICDTHPLGCVESLCVLISWSITTHDSIHVLPSKVTSKAPQHHTPGPSHISARICF

SEQ ID NO: 158958 - protein, 259 aa, Glycine max
  Clone ID: PAT_MRT3847_11455C.1.pep
MEESQYLLWIKRKQILKSHIQQPFGTSNNNNSSSWEERAFAEDAARILGGCIWPPRSYSCNFCKREFRSAQALGGHMNVHRRDRARLKQSLSHHNEALQHHQKNDCTVATSKVSSSRASTISTQEICSHQPTMSLYSSLIGWGHHHHMESPDSEPKGQVNAREEFLKGLGCNDYVETSLSVGQSAVFGQKLPTTESCGDESISYKRSKTSMPPLPGVFLKPCSNDRNLTFQSAEFVLGLKPGMEDLDLELRLGKPQKVI

SEQ ID NO: 158959 - protein, 79 aa, Glycine max
  Clone ID: PAT_MRT3847_114560C.1.pep
VKAKANVKFNLTQQRLQEVLLKRRRRSLGRLQIQWLKNCSICSSVLFYDLKIQIVAQQRYKLIITFSSYPASYFGITSC

SEQ ID NO: 158960 - protein, 46 aa, Glycine max
  unsure (1)..(46): unsure at all Xaa locations
  Clone ID: PAT_MRT3847_114561C.1.pep
VSMVADSQGLQFHYITNRANQQANRXCFPGTHXEFDQTXLRKFXPX

SEQ ID NO: 158961 - protein, 116 aa, Glycine max
  unsure (1)..(116): unsure at all Xaa locations
  Clone ID: PAT_MRT3847_114562C.1.pep
PQHQQQKQQLPRRKDLTITAFHSHYSYSSLMPRVNESEKDGSETETLKPIMDPFPFPHLATTKRNFNFSLKSHFPMKRTVRPLFALLLLLVFAATLTSRAXLRXGILSIELESRXR

SEQ ID NO: 158962 - protein, 114 aa, Glycine max
  Clone ID: PAT_MRT3847_114563C.1.pep
LGLIFSSIHIYLLRWIRSRWDRKKRGTTSTNWWTRDKGKDSAGDNPGAQKHGRPKKGEREPGGVQKRPSKGMCLQKGALTQKTWKGGGEYPPSIQAPREGEDNKKTCGLTPTGG

SEQ ID NO: 158963 - protein, 222 aa, Glycine max
  Clone ID: PAT_MRT3847_114564C.1.pep
MASSQEEVILLGVIGSPFLHRVQIALKLKGVEYKYLEDDLNNKSDLLLKYNPVYKMIPVFVHNEKPISESLVIVEYIDDTWKNNPILPSDPYHRALARFWAKFIDDKCVALAAKSVFIVDEKEKEKAKEELFEALNYLENELKGKFFGGDEFGFVDIAAVIIPIIQEIAGLQLFPSEKFPKLSKWSQDFYNHSLVNQVMPPKDQLFAYFKARAQSLAAKRKN

SEQ ID NO: 158964 - protein, 87 aa, Glycine max
  unsure (1)..(87): unsure at all Xaa locations
  Clone ID: PAT_MRT3847_114565C.1.pep
XXXQXCXXXXXSXXIXLXGXMXXDXXLXNRXNHXGCXXXXEXVGXXXFXXXXGRXLXRSYKXWVAQCAGSVAYFVFIGQNLYSVFQG

SEQ ID NO: 158965 - protein, 74 aa, Glycine max
  unsure (1)..(74): unsure at all Xaa locations
  Clone ID: PAT_MRT3847_114566C.1.pep
QIGFSFXLIEEFITEKGALAQLNIEIGIPISEINPLVLLKVLFFYIQPLNHEIGFFVQDEGQNNYTLPLLFVCV

SEQ ID NO: 158966 - protein, 91 aa, Glycine max
  Clone ID: PAT_MRT3847_114567C.1.pep
GFVRFIRFCFGFRSEMSEPHSSPRTSAYLDALSQAIHKKLQRALADSSQRRNLLQELFADIALEVDDRAKGKFAIKINALFNLKSFVLLLL

SEQ ID NO: 158967 - protein, 86 aa, Glycine max
  Clone ID: PAT_MRT3847_114568C.1.pep
PRAVLPLHFFLNFFFALYISLVLLTGSCKFGEIYFRCLLHCYRVCYCVGLISPINMIKHFIAFILRKLQQHLALPKVLLDLSPKHE

SEQ ID NO: 158968 - protein, 373 aa, Glycine max
  Clone ID: PAT_MRT3847_114569C.1.pep
GFVRFIRFCFGFRSEMSEPHSSPRTSAYLDALSQAIHKKLQRALANSSQRRNLLQELFADIALEVDDRAKDVIVNKEEDGISPAEDINDGPLCFYDVLADYFVLVSESRKPILDWIVQLWSQSFASHIFALLFHKWLFEVHLDNPEVLLRYSSALVQGATNVFWIDIQTNTRRFQSLFRYLLEDVALDHTRLNKIPFQAQRDTYLMLSRFILFYNKADKIDGFLKQCPAFPTAFLVGGPADILVTELTDQLQKLKVEPVLLHYLSEIKILQGLELRMTTSTRLKTCLYSFTSPGGPMYPTRAVRHAARESLDLLFPVGRYPRHLISLFFRLLYPWYWPSSCWNFVVSCIQAIFYSVLGFIFSTRNKIAKPKSQ

SEQ ID NO: 158969 - protein, 56 aa, Glycine max
  Clone ID: PAT_MRT3847_11456C.1.pep
LFNESFYLKKNQHSPLNKNPNKPYIPLQIPHTQIHVHRYSNYQSRNGVSINHLTEF

SEQ ID NO: 158970 - protein, 93 aa, Glycine max
  Clone ID: PAT_MRT3847_114570C.1.pep
RHSARASPPPPPPRPRTPPPCASRHAIPPPPRAHPPLCPRVLLPARGAPRPLARRLRPKPPVWKTRRPQNLPRPHLHARHVGLPQGFASRNGR

SEQ ID NO: 158971 - protein, 71 aa, Glycine max
  Clone ID: PAT_MRT3847_114571C.1.pep
RIYPGDYVLKNPTNSLATRRRKNGTVRPNTFQLLIGFQSYTLMRNMVVSIYTKFLKMMIPIWPMPALLDKA

SEQ ID NO: 158972 - protein, 101 aa, Glycine max
  Clone ID: PAT_MRT3847_114572C.1.pep
NQESMHMMKKVCGFAIVVMAALFLVEMSPMAEAVTCSPVELSPCLGAITSSSPPSTTCCQKVREQRPCLCGYLKNPSLRPYVNSPGSRRVASSCGVPFPTC

SEQ ID NO: 158973 - protein, 122 aa, Glycine max
  Clone ID: PAT_MRT3847_114573C.1.pep
AVSGTRRTSLLTWLTSVITVFIIAFIIVVGFVHGKASNLTPFLPYGVDGVFNAAAVVYWSYSGFDMVATMAEETKNPSRDIPIGLVGSLSMITVIYCLMALSLVTMVNYTQIDVDAAYSVAF

SEQ ID NO: 158974 - protein, 72 aa, Glycine max
  unsure (1)..(72): unsure at all Xaa locations
  Clone ID: PAT_MRT3847_114574C.1.pep
HLLRDWLIKLRQGCFNIXRHIRYMLRVENNVHKAISEAXDRNDMGSAHALGKELVRSKKTVDRVYENEAQMN

SEQ ID NO: 158975 - protein, 54 aa, Glycine max
  Clone ID: PAT_MRT3847_114575C.1.pep
LLSRNTLQYHQKETKMWDVAGDDFGSLDDCGILEIASLSLDEPELEGVFFNDDF

SEQ ID NO: 158976 - protein, 65 aa, Glycine max
  unsure (1)..(65): unsure at all Xaa locations
  Clone ID: PAT_MRT3847_114576C.1.pep
MYAALLLIDIKNAAAVHTFGCGNRTGGXGEKTTKIYSPLPYASAQVLIQQPYVLIQAIVYRIYNL

SEQ ID NO: 158977 - protein, 71 aa, Glycine max
  unsure (1)..(71): unsure at all Xaa locations
  Clone ID: PAT_MRT3847_114577C.1.pep
GGGGGGGGGGGGGGGXGVRFHGVLRYPPPWCVSFSPPPLILLAQGTASKKVQVYGTYNGCVRFKGLSSFFF

SEQ ID NO: 158978 - protein, 203 aa, Glycine max
  Clone ID: PAT_MRT3847_114578C.1.pep
MAALFHFSLLFTVLLSSILLSNHSVKCDDHDEEDDLYQGINKYRESLNLTSLTKNENANCFADEIAGQFKNQPCTNTTGANTVPGTEPQFSNYPDLLNKCQLNISNTRDGIVMPACVPGLVSSVVLTNFTQSLYSGNLNDSKYTGIGIGSEDNWIVVVLTTNTPEGSFVPETETKTDSGANFVSKIGSIYCSMFLLVSNLFLL

SEQ ID NO: 158979 - protein, 123 aa, Glycine max
  Clone ID: PAT_MRT3847_114579C.1.pep
ILERCVFLQRILRIKGMIKTAATVGIPENTGIAWACAMNCSIRGRASSDVHTICSQDCELWNPACAQAMTMSFNPNRASDAWSVQFVPRTGSQCDIMCATGWTDTAMQDVQATIEWIISCHEC

SEQ ID NO: 158980 - protein, 86 aa, Glycine max
  Clone ID: PAT_MRT3847_11457C.1.pep
FREGKKKNGSWMNQASKTQGPDYIHHAVAQMKVSDSHHYDSTSQNCVDSSTSKEFVLFSVKLKQGDAQVTDYKPNDELAAIVVKSA

SEQ ID NO: 158981 - protein, 46 aa, Glycine max
  Clone ID: PAT_MRT3847_114580C.1.pep
HFRTHARAKTRGGKDILGQMAPCINKRQQAESTTTKGNIIQGKHHE

SEQ ID NO: 158982 - protein, 83 aa, Glycine max
  Clone ID: PAT_MRT3847_114581C.1.pep
FSRTVTNVGSATSRYVAKVITPNPSFLNIQVVPNVLVFSSLGQKRSFTLTIEGSIDADIVSSSLVWDDGTFQVRSPVVVYVPP

SEQ ID NO: 158983 - protein, 57 aa, Glycine max
  Clone ID: PAT_MRT3847_114582C.1.pep
TRNESIDKIHFFYLSEFPNCLETLKFACWLRNNFYRLRMQFLLLKTELHLLKKQIHY

SEQ ID NO: 158984 - protein, 116 aa, Glycine max
  Clone ID: PAT_MRT3847_114583C.1.pep
PLPPLQVPYSLAQPLFTHICNSYVIRLQRSLFACVLPPGQHSTNLLLLVPGSQALRPMPSHHYSTSSVKPRCLSIDSRATSSTECSDSSRSSGSNAAPPRYLSVQGETRSIIVHVS

SEQ ID NO: 158985 - protein, 42 aa, Glycine max
  Clone ID: PAT_MRT3847_114584C.1.pep
SSVKSNVSSFISYCIKVDQFLSVCLFSPMSYSVMSPRLSTNL

SEQ ID NO: 158986 - protein, 481 aa, Glycine max
  unsure (1)..(481): unsure at all Xaa locations
  Clone ID: PAT_MRT3847_114585C.1.pep
MAAKRFFDDSDQDNNKPPGDKRMRTTPRPSFASVIGEVVMVKNLQNLFSGLEPLLRRVVNEEVERVMRHCTVPRTISRSPSLRIEAASLEKPSNYELMFSKKLLVPIFTGSRIVDIDGNPIQVILVDKSGGDGELVAVPTSVPQPIKPEIVVLDGFVTNNKESWTTEEFNNNIVKERTGKRPLLTGELNLTMRDGIAPIEEIEFTDNSSWIRRFRVRVAEVLLAHYINSVQPALAYIXAFFSFWLGVVYYEAHFKDMCKDEAWLFCKIXQPAFAGLMLLCFIISAITKQNXCFINSDKINDAIXDYTVMSEKMWEVTMKQARTCEKGNKYYVYRGPNFSVFLNSICQLVRADINGQSFPSRERSNMTRSYMEKLVREAYVRWNDLEEIDAAFLTQGETLEQFPNNHQASLIAYDQNDYFGDKSAEVGNYVPTHNAQIGCSEWAVNGTFGTTSFVNGIPYSFLDSQSDSDISPSVDGAARWP

SEQ ID NO: 158987 - protein, 224 aa, Glycine max
  Clone ID: PAT_MRT3847_114586C.1.pep
MGQGHEPPKSPAAAPPLLRRIHNLDNAISLYIHTLTRPIAPRPLLRFLELLADFRFFFPVSLSLYLAAPSSSPLRRNLLLPLLLCSLLDLLFIALLKFLVRRSRPSYSNHSQYNAVVSVDNFSFPSGHSSRVCFVASVFSLSRSSLLADLSRPRVAILVRRWFAGDDALAVDMLLAAICAWAVITVVSRVALGRHYVIDVFFGACFGVLEAMVTFRVLEYRGLI

SEQ ID NO: 158988 - protein, 190 aa, Glycine max
  unsure (1)..(190): unsure at all Xaa locations
  Clone ID: PAT_MRT3847_114587C.1.pep
RPPICKAKKGPKLANMTKIITSTAIKRYKEKVMNPXNVQTYSGTLFLKYNTALGPPFPVLLDTDLIHLYLLIKXDQLKGMMDCXIXKSSERNTEFLIAELDNLGXKLREAIRLVKGPQIESRFYNHQGTYTDDYPVDRVTQHKCYIVSTCDRDLKRRIRKIPGVPIMYITKRKYSIERLPEATIGGAPRI

SEQ ID NO: 158989 - protein, 92 aa, Glycine max
  Clone ID: PAT_MRT3847_114588C.1.pep
DNIFNEQVSKFEDDDVSNDHNQAKESCNQESTPMPESSFQRGKCPGENTLKKELWTKFEVASTWGCQPKVPTVQKSAHKGFLDLLEEASCDE

SEQ ID NO: 158990 - protein, 198 aa, Glycine max
  Clone ID: PAT_MRT3847_114589C.1.pep
MGKAKKGPKFAVMKKIVTSKAIKSYKEEVLNPEKKNLMKEKLPRNVPTHSSALFFQYNTALGPPYRVLVDTNFINFSIQNKLDLEKGMMDCLYAKCTPCITDCVMAELEKLGQKYRVALRIAKDPRFERILCTHKGTYADDCLVERVTQHKCYIVATCDRDLKRRIRKIPGVPIMYITKRKYSIERLPEATIGGAPRI

SEQ ID NO: 158991 - protein, 168 aa, Glycine max
  Clone ID: PAT_MRT3847_11458C.1.pep
MIRGGQGMAKDLSWQVPGDAGNTLHIGAWRFEGDGSGPKVHLQAGVHADEIAGMLVLHQLLPRLQACQAQGRLRGSVTVVPQANPFGIGQFRQGKLLGRFHEATGQNFNRAFDHSLAMERPASNLAHWQKSLVQLASDADLVLDLHTDDEALPYLYIHRSFWPEQGLA

SEQ ID NO: 158992 - protein, 42 aa, Glycine max
  Clone ID: PAT_MRT3847_114590C.1.pep
LSFENCIQLICCSFWFWLHMMDFNQSANLFSQSPVGLTDQTG

SEQ ID NO: 158993 - protein, 108 aa, Glycine max
  Clone ID: PAT_MRT3847_114591C.1.pep
NILVIGSLLCNVLPSGVCRLLPKKGNCLKGESSNRPKWPSRRCSPLSFRTIHGLLLDSWVILLLSGGDCKNVSKLIGVAHGSLTSAVNFVSFKFFRGISALFRAGPDQ

SEQ ID NO: 158994 - protein, 54 aa, Glycine max
  Clone ID: PAT_MRT3847_114592C.1.pep
VINTKKLFFYLGSAQALYRNILFSSRFFSCVKRLKCYIKPVLNVYIMIGLWRDQ

SEQ ID NO: 158995 - protein, 78 aa, Glycine max
  Clone ID: PAT_MRT3847_114593C.1.pep
LFTTQRANPNLRTGFLYTHCLIPTKLRPFTTHIPNFLAFFLSTPLMAITFNWGARFYRNKTPAPKTRTHECLIKLTPQ

SEQ ID NO: 158996 - protein, 309 aa, Glycine max
  Clone ID: PAT_MRT3847_114594C.1.pep
MDYNNNDHGAREPWDWHGKNYSLGRTSDFEISEELWNDVPQNEEDLSYMLDDETTPVKACGDLAYNVNNADNMQKELEECRETYSQAKRRRMLQFNSQESDQSLSNEGMSLSYLKNGKEDPVKEIFPEVSQWVSGASDFTLGNASASDYVDLESTETWLADYFNDAEMDISPEELKFSVADDVQIDGTEVSAIKPSREQNVVQQTHIPRTTRNIIFKGRKSFIHMPTKLASSVAYPFAFIKPSGAHGDVTLKEINQHIQTPPPLKSKQSNDDDPSAYPKSAFSGKPVVGKTKIRTEGGKGSITITRTKG

SEQ ID NO: 158997 - protein, 66 aa, Glycine max
  unsure (1)..(66): unsure at all Xaa locations
  Clone ID: PAT_MRT3847_114595C.1.pep
STEHLHEFDSEISRSVSRYPPEAELLERSIXWLPCSRRRRRRRHINLNVCHSRRLLGFWLPTQQQT

SEQ ID NO: 158998 - protein, 59 aa, Glycine max
  Clone ID: PAT_MRT3847_114596C.1.pep
LSPRNIQVKTQLMALEENPNKDMPSQLILKDLGAYHIAKHYIKFTTIEIRTMKILTRKK

SEQ ID NO: 158999 - protein, 82 aa, Glycine max
  unsure (1)..(82): unsure at all Xaa locations
  Clone ID: PAT_MRT3847_114597C.1.pep
MASSXISSPXVTTXNRAGAXMXAPFTXLKSMAVFPXRXTXNXITSIASNRWKXAMQXXWXPXGKKNFEXLSDXXXXXDXXWA

SEQ ID NO: 159000 - protein, 296 aa, Glycine max
  Clone ID: PAT_MRT3847_114598C.1.pep
KKKLLSRVLPPPSLTLHPHAHFSPSMSILRRLHLNLCTTTRRRRLATASAALRQDTTVWTPAPLSKVEHAAESLFHIAIDVSDAPDHAASHTLAGQYLQLRLPDALKPSFLAIASPPKLAAARGVFEFLVKSVAGSTAEALCALKRGDVVELSQVMGNGFNIDRIHPPKNFGTVLVFATGSGISPIRSLIESGFDAAKRSDVRLYYGARNLQRMAYQDRFKDWESSGVKIVPVLSQPDESWTGESGYVQAAFSREKPISDPLATGAVLCGQKQMTEEVTSILVAAGVSADKILKNF

SEQ ID NO: 159001 - protein, 295 aa, Glycine max
  unsure (1)..(295): unsure at all Xaa locations
  Clone ID: PAT_MRT3847_114599C.1.pep
MSLLFSPPPSLTGLSLHPHVHFSPSMSILRRLPLNLRTTRRRRLAXVSAALRQDTAVWTPAPLSEVEHAAESLFHIAIDVSDAPDLAASHTLAGQYLQLRVPDAPKPSFLAIASPPKLAAARGVFEFLVKSVAGSTAEALCALKRGDVVELSQVMGNGFDIDRIHPPENFGTVLVFATGSGISPIRSLIESGFDAGKRSDVRLYYGARNLQRMAYQDRFKDWESSGVKIVPVLSQPDENWTGESGYVQAAFSREKQISDPLTTGAVLCGQKQMTEEVTSILVADGVSADKILKNF

SEQ ID NO: 159002 - protein, 91 aa, Glycine max
  Clone ID: PAT_MRT3847_11459C.1.pep
FVLVYVLYTFPLTTFPGFKFFLLFPPIVQFLLMLSSSSLPFTSLFVDEGSAFDALKTLADLSLMLPVTNPCNLLLYSVSSCNMLNKIHKMA

SEQ ID NO: 159003 - protein, 56 aa, Glycine max
  Clone ID: PAT_MRT3847_1145C.1.pep
LEHCHCSLYELITYSVGVIFHITRSDSACRASGYELDYEPLAHSYVHSFHSPYNPL

SEQ ID NO: 159004 - protein, 81 aa, Glycine max
  Clone ID: PAT_MRT3847_114600C.1.pep
HLHLFIVFLRDMGIVCFLREPEKKKIFFLGFGVTKYMGEYLYMFCYALFFLCVLHCWLLRNWDCYLIRRFSMQRNKLFFFL

SEQ ID NO: 159005 - protein, 75 aa, Glycine max
  Clone ID: PAT_MRT3847_114601C.1.pep
SARGRTPLIEHLLQNQTFVEDVMSRTPLKRIAEPEEVSSLVAFLCLPAASYITGQVICADGGVTVNGFLPSMRIT

SEQ ID NO: 159006 - protein, 53 aa, Glycine max
  Clone ID: PAT_MRT3847_114602C.1.pep
IFNHTCESRRISRGHKTKMDYRMNKMPLYAHSNECLFRPEQVTKLNWRTSVNN

SEQ ID NO: 159007 - protein, 79 aa, Glycine max
  unsure (1)..(79): unsure at all Xaa locations
  Clone ID: PAT_MRT3847_114603C.1.pep
NRCLXVXIPDXMKGXXXXDXXNXVQXNXXKNSXXXYXVRGXAGQKXXXXXWGXXRGXXXXXXVXGXGXKXAXXGXFGKM

SEQ ID NO: 159008 - protein, 111 aa, Glycine max
  Clone ID: PAT_MRT3847_114604C.1.pep
GAQINVFPRCARAFFLRKKTSCWFFFKKTGRPLVLGLFYYTVVPWYLHLVFIKAFPFSLASGAAYFSLSSCLMAFLFVFFQVFFFIPVLEFFICVLITLFFCIENPRFCVF

SEQ ID NO: 159009 - protein, 84 aa, Glycine max
  unsure (1)..(84): unsure at all Xaa locations
  Clone ID: PAT_MRT3847_114605C.1.pep
VSAHILXAYLHGVAGTQGXKGGFNLEVNRDIALVNKSMHALKDEYLVPVAWRVQENKGMVQQSHGSWKIVDQVLVDMESIHSNL

SEQ ID NO: 159010 - protein, 234 aa, Glycine max
  Clone ID: PAT_MRT3847_114606C.1.pep
MVRAPYFDKNGIKKGAWSEEEDKRLMAYVERHGHPNWRQLPKFAGLQRCGKSCRLRWMNYLRPNLKRGNYTQKEEQIIKDLHKKHGNKWSLIAENLPGRTDNEIKNYWHSNLKKFLKGNENTPCDDDDELKSTECKEFERSMNKAHSADSHHILESSVSISSETSYTEGNSPSFSSSHTTESSTLSKEEDSVVSWQTMDVLSSNFWTEPFISENALNQDYFPISSYGTEPFFLW

SEQ ID NO: 159011 - protein, 76 aa, Glycine max
  unsure (1)..(76): unsure at all Xaa locations
  Clone ID: PAT_MRT3847_114607C.1.pep
PVQEFVVGKNMXCGSTIGPIFASGGGIRPVYVGAPQLSMHSTPEICAVDNVKDSYEPFKAFFQKFFHVYGKKGVDK

SEQ ID NO: 159012 - protein, 139 aa, Glycine max
  Clone ID: PAT_MRT3847_114608C.1.pep
GLVSSLEVVNRNRVRVHLHSPISPSGSQYPSPSSSGGPITSPLPSSSSPAPYHFTIGSVDSFETQLTAAQEELGIPSQERIPVQYKEEGSGWSVLISLAPTLLLGGFLFWSMRRSPMGRGGGSGRIFGVGKSKARCSTG

SEQ ID NO: 159013 - protein, 93 aa, Glycine max
  unsure (1)..(93): unsure at all Xaa locations
  Clone ID: PAT_MRT3847_114609C.1.pep
KEQGNITDNKGVYAWCQGVGAKWHTMCDAEKAPYWAKCEKRKVQGHXKNMRAYLKKQAXVPTWGDEEESLKSVSKVNDEDHDEECSGDEQDXD

SEQ ID NO: 159014 - protein, 41 aa, Glycine max
  Clone ID: PAT_MRT3847_11460C.1.pep
VCHSRTKTYMFFSRYNYLMITSPSSIYYQSPSPVKKQHHHQ

SEQ ID NO: 159015 - protein, 69 aa, Glycine max
  Clone ID: PAT_MRT3847_114610C.1.pep
EYVVRGTDGGRISTWKKKGGQTNRDKEARKHGENWKETQTETKGPASSGIEKDIKIWTPKAKEKATEAK

SEQ ID NO: 159016 - protein, 77 aa, Glycine max
  Clone ID: PAT_MRT3847_114611C.1.pep
SPEKHLDNSPRIDSKESYHQKVEQSSESMSKIEAELEAELERLGLDMNASSLEGKLSELVEVRIMFIFSFPHFRVIT

SEQ ID NO: 159017 - protein, 575 aa, Glycine max
  unsure (1)..(575): unsure at all Xaa locations
  Clone ID: PAT_MRT3847_114612C.1.pep
MADGSSSNTKRNSLILHHPTNLKGGWNAAIFIIFVEFAERFAYQGLASNLIQYLTNVLNEPITQAAKDVNTWVGASSLFPLLGGFIADSYLGRFNTILLSSVIYFGGIXLTLSVSALKHKFLFFLALYVLAIGDGGHKPCVQTFAADQFDEDTPEEKDAKSSFFNWWYLGIVAGSTASVFVVIYLQDNVGWGVGLGVLAGVLALALALFLLGIKRYRKEGPAGSPFTRLAQVFVAASRKWRVQATHGHHNYCYDEDEEHHEPHNHLHVQPKIHTLLHTHQYRFLDKAAIIDEIDAKTKTRDPWRLCSVTQVEEVKLVLRLIPIWLSCLMFTVVQAQVHTFFIKQGATMVRSIGPHFQVPPASLQGLVGVTILFAVPFYDRVFVPLARKITGKPTGITVLQRIGVGLFLSILNMVVSALVEAKRVGVAKESGLIDDPKAVLPISIWWLLPQYMITGISDAFTIVGLQELFYDQMPEALRSLGAAAYISIVGVGSFVGNIVIVVVEGVTSRAGEKWLGNNLNRAHLDYFYWVLAGLSAVNLCVYVWLAIVYVYKKVDEGHQTSDQQGSSHKKYKPGV

SEQ ID NO: 159018 - protein, 83 aa, Glycine max
  unsure (1)..(83): unsure at all Xaa locations
  Clone ID: PAT_MRT3847_114613C.1.pep
QMSNDILATREDKDSSTSQVHYVSCNMTAKCKKLSXVSLVNELPDLYMHNQHEGSHIRRKALSRIDWLHHAKIDTISHTHQFH

SEQ ID NO: 159019 - protein, 37 aa, Glycine max
  Clone ID: PAT_MRT3847_114614C.1.pep
PFGVSGGPTIPTTTLLYLHGITTYYLPTPIHSPERLR

SEQ ID NO: 159020 - protein, 126 aa, Glycine max
  unsure (1)..(126): unsure at all Xaa locations
  Clone ID: PAT_MRT3847_114615C.1.pep
QGALLTCSSPVLDYAPPGLIPPVFFFKIMEWWSPSPQEKMSAPSSISSXTPSPPPPKVAKKGIPLPPARPICPLCSQKRXNPPVVSVSGFVFCYACLFKYIPPYKPCPIPLIPSPVAPIRRLFPYV

SEQ ID NO: 159021 - protein, 67 aa, Glycine max
  unsure (1)..(67): unsure at all Xaa locations
  Clone ID: PAT_MRT3847_114616C.1.pep
FVDKSVYFDLXDLGHSTWQWDLYCSNAPSPYNPFQSKFLKTFAAPFTKRGLLLKCLILGGGFTHSYF

SEQ ID NO: 159022 - protein, 92 aa, Glycine max
  unsure (1)..(92): unsure at all Xaa locations
  Clone ID: PAT_MRT3847_114617C.1.pep
ENFDFPPPGIRTTIRFFQILNSKISLDDYVHLAEFVRAKDLSHGGYIKPIGPXDGLLGLLGYRMKGMHCLFNNAKNMEMFKKKEEVAIGQYL

SEQ ID NO: 159023 - protein, 98 aa, Glycine max
  Clone ID: PAT_MRT3847_114618C.1.pep
LPFFLTKASINGDGTLSLATPKPFFFIIHISLNLYRTQYKYFQENLMYNIQLLLKSNPIHNKSPLFIHNEKPISQSILTVEYIHQTFNNNPIFPSDSY

SEQ ID NO: 159024 - protein, 228 aa, Glycine max
  Clone ID: PAT_MRT3847_114619C.1.pep
MNDADVSKQIQQMVRFIRQEAEEKANEISVSAEEEFNIEKLQLVEAEKKKIRQEYERKERQVEIRKKIEYSMQLNASRIKVLQAQDDVISSMKEAASKELLNVSHHHDDHVYRNLLKDLIVQCLLRLKEPSVLLRCRKDDLQLVEHELDSAAQEYAEKANVDPPEIIVDNQVYLPPGPTHHNSHDLYCSGGVVLASRDGKIVCENTLDARLDVVFRKKLPEIRRQLFG

SEQ ID NO: 159025 - protein, 133 aa, Glycine max
  Clone ID: PAT_MRT3847_11461C.1.pep
LAHAFSPTNGMFHLDSAEDWVASGDVTKASLSNPVDLESVAVHEIGHLLGLGHSSVEDAIMYPTITARTRKVELNEDDIQGIQVLYGSNPNFTGTPATSSRESDTSDGGVRHVGATCGVFFSLLFFVVFGLHV

SEQ ID NO: 159026 - protein, 236 aa, Glycine max
  unsure (1)..(236): unsure at all Xaa locations
  Clone ID: PAT_MRT3847_114620C.1.pep
MNDADVSKQIQQMVRFIRQEAEEKANEISVSAEEEFNIEKLQLVEADKKKIRQEYERKERQVEIXKKIEYSMQLNATRIKVLHAQDDGVIPXEKLHLIGTVECEFIIMNHLHEETFVKDLIVEYLXLRLKEPSVLLRCRKDDLHLVENVLDSAXQEYVXKANVDPPEIIVDNQVYLPPGPSHHNSSGSLHAPVGMGVGFSVMERFVCENTLDARLDVVFRKKLPEIRKQLFGQIVA

SEQ ID NO: 159027 - protein, 128 aa, Glycine max
  Clone ID: PAT_MRT3847_114621C.1.pep
MNDADVSKQIQQMVRFIRQEAEEKANEISVSAEEEFNIEKLQLVEADKKKIRQEYERKERQVEIRKKIEYSMQLNASRIKVLQAQDDVISSMKEAASKELLTVSHHHDDHVYRNLLKDLIVQCLLRLK

SEQ ID NO: 159028 - protein, 497 aa, Glycine max
  Clone ID: PAT_MRT3847_114622C.1.pep
MAKHEELPIPINNNLEPVYGGGSALEEAQLRFDNLKSKFVEIFGHHPQIFARSPGRVNLIGEHIDYEGYSVLPMAIRQDTIVAIRKNEAEKVLKIANVNGEKYSLCTYPADPLQEIDLKNHKWGHYFICGYKGFHDYAKLKGVNVGEPVGLEVLVDGTVPTGSGLSSSAAFVCSSTIAIMAAFDVNFPKKELAQVTCDCERHIGTQSGGMDQAISVMAKTGFAELIDFNPIRATDVQLPAGGTFVIAHSLAESQKAVTAATNYNNRVVECHLASIVLAIKLGMDPKEAISKVSTLSDVEGLCVSFAGIYNSSDPVLAVKEYLKEEPYTAEEIEAVTGEKLTSFLNNNAAYLEVLKVAKQYKLHQRAAHVYSEAKRVHAFKDVVSSNLSDEDMLKKLGDLMNESHHSCSVLYECSCPELEELVNICRNNGALGARLTGAGWGGCAVALVKESIVPQFILNLKECFYQSRIDKGVIKKNDLGLYVFASKPSSGAAIFKF

SEQ ID NO: 159029 - protein, 238 aa, Glycine max
  Clone ID: PAT_MRT3847_114623C.1.pep
MNDADVSKQIQQMVRFIRQEAEEKANEISVSAEEEFNIEKLQLVEADKKKIRQEYERKERQVEIRKKIEYSMQLNASRIKVLQAQDDVISSMKEAASKELLHVSHHHHLTLTHHDHVYRNLLKDLIIQCLLRLKEPSVLLRCRKDDLHLVENVLDSAAQEYAEKANVDPPEIIVDNQVYLPPGLTHQNSHDLYCSGGVVLASRDGKIVCENTLDARLDVVFRKKLPEIRKQLFGQIVA

SEQ ID NO: 159030 - protein, 82 aa, Glycine max
  Clone ID: PAT_MRT3847_114624C.1.pep
MYLFYSYHEAAFTINFTNRIAEAVSGASHRHNSHDLYCSGGVVLASRDGKIVCENTLDARLDVVFRKKLPEIRKQLFGQIVA

SEQ ID NO: 159031 - protein, 33 aa, Glycine max
  Clone ID: PAT_MRT3847_114625C.1.pep
VWMFSNRQRILNYRVRNNFVNSIKGVNGSSSKR

SEQ ID NO: 159032 - protein, 233 aa, Glycine max
  Clone ID: PAT_MRT3847_114626C.1.pep
MNDADVSKQIQADGIVSFIQEAEEKANEISVSAEEEFNIEKLQLVEAVKKKIRQEYERKERQVEIRKKIEYSMQLNASRIKVLQAQDDVISSMKEAASKELLNVSHHHDDHVYRNLLKDLIVQCLLRLKEPSVLLRCRKDDLHLVEHVLDSAAQEYPREVNVDPPEIIVDNQVYLPPGPHHHNSHDLYCSGGVVLASRDGKIVCENTLDARLDVVFRKKLPEIRNQLFGQVVA

SEQ ID NO: 159033 - protein, 162 aa, Glycine max
  unsure (1)..(162): unsure at all Xaa locations
  Clone ID: PAT_MRT3847_114627C.1.pep
QIWNSFIPLLYLTSIVFLPWRICFTFKKSLXSRVIDWGNTLQSEIFLTDMTEMSILKKFIECAELFVLHDMLXEXPETHLQDLRTGTYRETVLLIRTLNEHRMNTILHFSTNIIXVFILSGYSILGNQELVVTNSSIREFIYHLSDTMKGMPSLLLTEPCIG

SEQ ID NO: 159034 - protein, 48 aa, Glycine max
  Clone ID: PAT_MRT3847_114628C.1.pep
DLENEIVCSICNDNTNIFEVSFLESVMSDEYILISEKHLCTWYIDYDS

SEQ ID NO: 159035 - protein, 62 aa, Glycine max
  Clone ID: PAT_MRT3847_114629C.1.pep
VVESAVTSIYICYAEDPLLIQRWDTEFFNQMSETLHQRLQHRSSRGAREVLTHDQLDSHASI

SEQ ID NO: 159036 - protein, 54 aa, Glycine max
  Clone ID: PAT_MRT3847_11462C.1.pep
PAPASRGSREEYILLDSEDSASYSSTFPITKGGAEFQITHKLGTVHETHMEVSV

SEQ ID NO: 159037 - protein, 55 aa, Glycine max
  Clone ID: PAT_MRT3847_114630C.1.pep
MKIDQPTYTSMNIKGTATAILTALTPIHPICNTMNMPSYPTLSYLPSPTYIHTPD

SEQ ID NO: 159038 - protein, 102 aa, Glycine max
  unsure (1)..(102): unsure at all Xaa locations
  Clone ID: PAT_MRT3847_114631C.1.pep
KGPQDPSPPKAVSYKTAARKKLIRQGSNIVGIIGDQWSDLLGGPKGESRPFKLPNXPCTTFSSSFPSQQYSLXPIYLNEIKWVQIGAPAPLYVVSPVGHQVM

SEQ ID NO: 159039 - protein, 109 aa, Glycine max
  unsure (1)..(109): unsure at all Xaa locations
  Clone ID: PAT_MRT3847_114632C.1.pep
VLFEALKMGNAEGPHPVKKSEFKKIFPEKLGSIIFPLKGNPQFVFSKXVGHEPLGSFFTLLHPFFIETAKLFQICGGSKTQAHKNFFSWKLFRKKFVFKKIPLYNGGFL

SEQ ID NO: 159040 - protein, 66 aa, Glycine max
  Clone ID: PAT_MRT3847_114633C.1.pep
LCIDISNCNYGSSRSFYGLFFFFKIKASSNYWWVITINIFKQLPVLYLLSWLLITPPYNLEPNYEL

SEQ ID NO: 159041 - protein, 54 aa, Glycine max
  Clone ID: PAT_MRT3847_114634C.1.pep
IWPNPFLGGGANFFFYLKIWPPGFTFLQKRGGPTFRPWLELFVFYSGWFLNPRK

SEQ ID NO: 159042 - protein, 59 aa, Glycine max
  Clone ID: PAT_MRT3847_114635C.1.pep
TCRYFAKTLTGKTITLEVESSDTIDNVTAKIQDKDGIPPDQQTLIFPGTQLAAGRTLAD

SEQ ID NO: 159043 - protein, 169 aa, Glycine max
  Clone ID: PAT_MRT3847_114636C.1.pep
RQTEVVFLGQLRHPHLVKLIGYCCEEEHRVLVYEYLPRGSLENQLFRRFSASLSWSTRMKIAVGAAKGLAFLHEAEKPVIYRDFKASNILLGSDYNAKLSDFGLAKDGPEGDDTHVSTRVMGTHGYAAPEYIMTGNLITLYFPSIHFHQIIIIIMITKDLKVIFYYKKV

SEQ ID NO: 159044 - protein, 91 aa, Glycine max
  unsure (1)..(91): unsure at all Xaa locations
  Clone ID: PAT_MRT3847_114637C.1.pep
IIFSYYYNWNSIFTTKKWISTFFSKSNPRFFLLIYNLYVWEYESIFLFIRNKSYKLRLKYFSVPFECIKFXENIEHLVEVXVKNCSYTLSF

SEQ ID NO: 159045 - protein, 144 aa, Glycine max
  Clone ID: PAT_MRT3847_114638C.1.pep
PLPHMYVVKDLVPDMTLFYKQYRSVKPYLQRDTPSPDGREYRQTKEDRKKLDGLYECILCACCSTSCPSYWWNQEEYLGPAVLLQSYRWIADSRDERKAERQDALNNSMSLYRCHTIFNCSRTCPKGLNPALAIAEIKKSMAFT

SEQ ID NO: 159046 - protein, 68 aa, Glycine max
  Clone ID: PAT_MRT3847_114639C.1.pep
RGPNALMLKTLQICCSFYSDMDTRREIGRKGLHTLLNKFETLQIQFSLCAGGCAWFKLAELDCICGTT

SEQ ID NO: 159047 - protein, 76 aa, Glycine max
  Clone ID: PAT_MRT3847_11463C.1.pep
LYTRGCGHVCQSLGLWYQEKAEWERLIHYVCVPRRKYTLSWLIEAKMLPARCLYTSPQTRGICSYNLFFNGEDVVN

SEQ ID NO: 159048 - protein, 90 aa, Glycine max
  Clone ID: PAT_MRT3847_114640C.1.pep
IDRKRSYIKSSWLSSSRQRGLASHYHGDFIIVRGKYLIKEEKIRKEMEGRNDSHYLLLLLLIFAFYKELYSLGIFVGLFLLLSSSFIGAD

SEQ ID NO: 159049 - protein, 73 aa, Glycine max
  Clone ID: PAT_MRT3847_114641C.1.pep
LQSRPPRMVTGLLSYVPISPQVDQEFAQVNLIIHVVLGSSETYNLWNHNGSAHLVFHGRSLPEHLSLTGHTYD

SEQ ID NO: 159050 - protein, 287 aa, Glycine max
  Clone ID: PAT_MRT3847_114642C.1.pep
MIKHSLLVLPISLTLVISLLHSTTLAAIAPATAPAQAPPTTPAASAPTPPQPSGGTTDIVQVLQQANSFNIFLRLMKTTQLINQLNSQLLTIKSGGLTILAPDDGAFSELKPGFLNSLSDGKKLELVQFHVLPDFVSASNFDTLTNPVRTLAGNKPGKVELNVISYGGSVNISTGAVNATMNGVIYTDKHLAVYRVGKVLLPSEFVATTKKPLAPAPALKPAPVTSANDVAEAPKPEKEKPSPKPEQSSESSTQVVPTVTSGGVRIGVSGMWVSLVLGLVFVGVFAA

SEQ ID NO: 159051 - protein, 83 aa, Glycine max
  unsure (1)..(83): unsure at all Xaa locations
  Clone ID: PAT_MRT3847_114643C.1.pep
MAPTVDRASQQMNEYKSSNKELDVLTMYNGAAIHNKNAVLTVGPGGPELMQDVVYLDXTGHFDRERIAERVAHAKGRGAHGYL

SEQ ID NO: 159052 - protein, 78 aa, Glycine max
  unsure (1)..(78): unsure at all Xaa locations
  Clone ID: PAT_MRT3847_114644C.1.pep
SHQHHNPSPNNPHISLPHAYIFIIIQHMSIPSPPGNLFHTIILISYVTRPHSPLSLPTLITNPSXPPLIILKXXXHRP

SEQ ID NO: 159053 - protein, 323 aa, Glycine max
  Clone ID: PAT_MRT3847_114645C.1.pep
HPNECSGSDLDGDIYFVCWDHELIPSRPIDPMDYTAPATVELDHDVMIEEVEEYFANYIVNDSLGIIANAHTVFADKEHLKAMSDQCVKLARLFSTAVDFPKTGVPAVIPPELHVKEYPDFMEKPDKPTYKSHNVIGKLFREVKEISTSAGSITSFTKLVARDSYDHEMEVDGFMDYVDDAFYHKTNYDYKLGNLMDYYGIKTEAEILGGNIMKMSKSFNKRRDAEAINMAVRSLRKEARAWFNENSSGDVDSGSSDVYAKASAWYHVTYHPSYWGCYNEGMNRDHYLSFSWCVYPLLVQIKKEKLSIRRSSLEYSFSGLRLS

SEQ ID NO: 159054 - protein, 38 aa, Glycine max
  Clone ID: PAT_MRT3847_114646C.1.pep
ELSLNYTPLYIINLLIFIIIMLRVILIMISNDFYLTIY

SEQ ID NO: 159055 - protein, 81 aa, Glycine max
  unsure (1)..(81): unsure at all Xaa locations
  Clone ID: PAT_MRT3847_114647C.1.pep
YSYYWLPFTPLIINLLFVTNLQMIITNIIQIIQQLLKIIKLIPLFQPNDDLFXFNKPRLTLYLINFMLFYKSFQLSYFSIL

SEQ ID NO: 159056 - protein, 134 aa, Glycine max
  Clone ID: PAT_MRT3847_114648C.1.pep
VVLAVIVCAFLCALGLNTMLQCVFQCANRVLTEPLQWIASRRLNSGLKKREMVALPTSTYTHSCASPSSPSNNICAICLTEFSDGDRIRFLPNCNHRFHVDCIDKWLLSHSSCPTCRNLLKPTDSVHSLHTVVS

SEQ ID NO: 159057 - protein, 47 aa, Glycine max
  Clone ID: PAT_MRT3847_114649C.1.pep
YIDRVFNFCHFLNITNAICNYISGVKKGHGLFYHRIIYRSFILFSTF

SEQ ID NO: 159058 - protein, 81 aa, Glycine max
  Clone ID: PAT_MRT3847_11464C.1.pep
GSTHASGDNYKQCDENEGPCSLPCTILVAWQCHAYDMFPLRVSTGYGARTPEVKCASWRLAVQAHTIFGSETIPDEGVEAT

SEQ ID NO: 159059 - protein, 55 aa, Glycine max
  Clone ID: PAT_MRT3847_114650C.1.pep
IMISKPCTSRTMITPGLNTPQTPYRSTNLSSCTPCSIISCGKNNPVYDFIKAHES

SEQ ID NO: 159060 - protein, 150 aa, Glycine max
  unsure (1)..(150): unsure at all Xaa locations
  Clone ID: PAT_MRT3847_114651C.1.pep
MTFYLFLLLLSAISVLSHASSIAFQIKGNVYPLGYYTVNLAIGNPPKAYELDIDTGSDLTWVQCDAPCKGCTLPRDRQYKPHGNLVKCVDPLCAAIQSAPNPPCVNPNEQCDYEVEYADQGSSLGVLVXDIIPLKLTNGTLTHSMLAFRC

SEQ ID NO: 159061 - protein, 110 aa, Glycine max
  Clone ID: PAT_MRT3847_114652C.1.pep
YVLSLGRILERRNVPESDTSHLARRLKKILVDLNEYDHARSMARTFHLKEALELAWNSCFVVSWFVVESGPRLTHSAILDSFLTFTQVFIRSMLMISNPEKASFSLTTEG

SEQ ID NO: 159062 - protein, 53 aa, Glycine max
  Clone ID: PAT_MRT3847_114653C.1.pep
NYSKPDLLLYTYTQPTHYFNYTPIEYPLLPIIPQQFQLLTILAPEEHLQLPQS

SEQ ID NO: 159063 - protein, 276 aa, Glycine max
  Clone ID: PAT_MRT3847_114654C.1.pep
MSLSWASALRITILLLLLAAVIVACFTLPIEKMMKDFLLWVDHDLGPWGPLVLAAAYIPLTVLAVPASVLTLGGGYLFGLPVGFVADSIGATVGAVASFLLGRTIGKSLVVSRLKDYPQFRLVTIAIQRSGFKISILLRLAPFVPFNILNYLLSVTPVPLGEYTLASWLGMMPITLALVYVGTTFKDLSDVTRGWGEFSKTHLPWIISGLVISVVLMIWVTKVAKSALDKALAECEDMDNTAFSPELPIVTETSVDFNQPLINKTNQDEGNLNFTV

SEQ ID NO: 159064 - protein, 157 aa, Glycine max
  Clone ID: PAT_MRT3847_114655C.1.pep
FRLVTIAIQRSGFKISILLRLAPFVPFNMLNYLLSVTPVPLGEYTLASWLGMMPITLALVYVGTTFKDLSDVTRGWSEFSKTHLPWIISGLVISVVLMIWVTKVAKSALDEALAECEDMNDTASSPELPIVTETLVDLNQPLINKTNQDEDNLNSSV

SEQ ID NO: 159065 - protein, 166 aa, Glycine max
  Clone ID: PAT_MRT3847_114656C.1.pep
MALALGNIVALPLSNLKPSLKLSSSSSSCCITKLFPISRINVSPTSVLVRASSSSSFGSRLEDTIKKTVAENPVVVYSKTWCTYSSEVKILFKKLGVDPLVFELDEMGPQGPQLQKVLERITGQHTVPNVFIGGKHIGGCTDTLKLYRKGELEPLLSEANAKKTES

SEQ ID NO: 159066 - protein, 81 aa, Glycine max
  Clone ID: PAT_MRT3847_114657C.1.pep
NNNSCMGSALVLKAKYHMKEKSQHETRKTLGDKEKKMTLSSVDMAEAHALTLRKGSDLAFSLQLSSVCMYENRFISGLESF

SEQ ID NO: 159067 - protein, 56 aa, Glycine max
  Clone ID: PAT_MRT3847_114658C.1.pep
PGNRPRKGTPPPPHHTVERFTQHKRTGKNRPQQGIRTIWGHQAASRINNHSKPPQP

SEQ ID NO: 159068 - protein, 64 aa, Glycine max
  Clone ID: PAT_MRT3847_114659C.1.pep
QQAGHIGAHRGVHPPRSRPGGSAQAVQVALLGEHEGVKQSSTKCSEGSILLSSCFIDASRECPR

SEQ ID NO: 159069 - protein, 148 aa, Glycine max
  Clone ID: PAT_MRT3847_11465C.1.pep
HHHITNAYSFSLTHSSFLLQIAINKISRQNLFLFFLSFIDFPMGLSRNAASQPEIDDAGGGDIGFGAIRGGFPFKRNPSHHRHRGSFDRQLPRSNNNSNSNNNINRSHLHKRKGLLLWLFPFPKSKSGFYAFIIAVVFLFALAFLVMQ

SEQ ID NO: 159070 - protein, 281 aa, Glycine max
  Clone ID: PAT_MRT3847_114660C.1.pep
SRWRGFTLQEFANQLFSNIYDYGKGRQMPAHYGSKKHNYFTVASTIATQISHAVGAAYSLKMDKKDACAVTYFGDGGSSEGDFHAALNFAAVLEAPVIFICRNNGWAISTPISDQFRSDGVVVKGQAYGVRSIRVDGNDALAIYSAIQAARQMAITEERPILIEALTYRVGHHTTSDDSTKYRPANEIEWWRVARDPVVRFRKWIEKHGWWNDMAESELINNLRQQLLHTIQEAEGVEKPPLADSFSDVYDVAPSNLREQEQWLKEIVRKQPQEYPTNISV

SEQ ID NO: 159071 - protein, 86 aa, Glycine max
  Clone ID: PAT_MRT3847_114661C.1.pep
LTLFFSFGNDLVNLDSSILRYALKIVLEKLTLKTFMNSINIVIEILQWTSLFTQHMRVDRLVAVQISEMIFRASEHKLIDLYITLL

SEQ ID NO: 159072 - protein, 45 aa, Glycine max
  unsure (1)..(45): unsure at all Xaa locations
  Clone ID: PAT_MRT3847_114662C.1.pep
MKLNENVCCCCCCCCRSVSLCSLXCCCCCCCSCCCCCGLLSVANL

SEQ ID NO: 159073 - protein, 67 aa, Glycine max
  unsure (1)..(67): unsure at all Xaa locations
  Clone ID: PAT_MRT3847_114663C.1.pep
ALLKGPFGRLFPANLYMGVIHPLSRFTPPPHDFIFQIPPTKILFQFFFFLMXLGRAKGSPYSLFPPF

SEQ ID NO: 159074 - protein, 167 aa, Glycine max
  Clone ID: PAT_MRT3847_114664C.1.pep
MFKILLLHQSGTGNHSDLHTTLTSSSNPINVSRRLMPVEEAETMVRQWQTIKAEALGPSHEVNCLAQVLDESMLAQWKGLANAAKERSCYWRFLLLKLSIIRADILSDGNGDDMAEIEALLEEASELVDGSQQKNPNYYLTYKVKYVMKRQDDGSWKFCENDIMETP

SEQ ID NO: 159075 - protein, 54 aa, Glycine max
  Clone ID: PAT_MRT3847_114665C.1.pep
CGQRTWRPSSSFLGGKKTVPRRPPWEHHHYHLLLLHPLISYSALMHSILPLSRP

SEQ ID NO: 159076 - protein, 300 aa, Glycine max
  Clone ID: PAT_MRT3847_114666C.1.pep
MTGMTKNQPSQWWWLDSHTTSNRSPWLQSTLSELNEKTRAMLKLIEEDADSFAKRAEMYYKKRPELVSMVEDFYRTHRSLAERYDQVKPDTTGIGHLITGGSPFASAKHQLEKLMTFSDNGYDTYSEHCDVYESEESEVDDPEQEEDEEGTKFLHNSIKNEQVSFVAASDVEVMKLRGEVKRLNEENKAHRDQIKQKDTICDEIMMLREEIGRLRDENEAQKEQLKQKDEEKIEVIRQLSLAIDVLKQENVKMRNFIAKESTKKWKNPFEINKLVGAFSVKLFSGGTPKNQPGVELSRCG

SEQ ID NO: 159077 - protein, 71 aa, Glycine max
  Clone ID: PAT_MRT3847_114667C.1.pep
SSPWSLRGIHQGKLGVVNVAGSRDDLYNVGSSTKRLLYERLYIGLVITRWLRIGRSGQFNSPGPSSMCFNE

SEQ ID NO: 159078 - protein, 111 aa, Glycine max
  Clone ID: PAT_MRT3847_114668C.1.pep
NDKDVQYQPCDDFGHHRNLVFSSANNVVVGQCPGMEGLITQCSEYVEKSGPEMSPSPQCCHEIENADTPCLCQHFNKAILQFIDIQKVIYVARSCGKPIPSGTTCGGVTVS

SEQ ID NO: 159079 - protein, 44 aa, Glycine max
  Clone ID: PAT_MRT3847_114669C.1.pep
RHDLHLLLLAFKNPPSQASPIMGILRCGCFPLFFLQNFLLTHSP

SEQ ID NO: 159080 - protein, 40 aa, Glycine max
  unsure (1)..(40): unsure at all Xaa locations
  Clone ID: PAT_MRT3847_11466C.1.pep
XWTRXPWEXXXFCXMCGRSVCLIXSTRVXNRTVSVXXSXL

SEQ ID NO: 159081 - protein, 58 aa, Glycine max
  Clone ID: PAT_MRT3847_114670C.1.pep
VLPQIYKLLKTLLDVIIQALSSTKEGEDALTRIEQALDCADNQQLATNSRLPVIRSQG

SEQ ID NO: 159082 - protein, 165 aa, Glycine max
  unsure (1)..(165): unsure at all Xaa locations
  Clone ID: PAT_MRT3847_114671C.1.pep
MKTQTQTTAKPTITDPPIAPPKWGLLLKLSLFLLPYLYLLFHHYPIEPELRSSILINAGMSLAGLFVTVKMIPVASRYVQKRNLFGYDINKKGTPQGTVKVPESLGIVVGIVFLVVAILFQYFNFTADSNWLVEYNAALACICXMTLLGFVDDVLDVPWRVKILL

SEQ ID NO: 159083 - protein, 64 aa, Glycine max
  Clone ID: PAT_MRT3847_114672C.1.pep
ELTNDDYYAEHETQESAPKCQIPAYREGLTVRCPHSPGTGRRRQWRSVDGYPGQNGISVIGVNL

SEQ ID NO: 159084 - protein, 147 aa, Glycine max
  unsure (1)..(147): unsure at all Xaa locations
  Clone ID: PAT_MRT3847_114673C.1.pep
SLAGKITTEIGVHAPAAMGSNLFATQLHRXQNLTARVHGTTPHQGEDWHHSATXKHWTXAIDGKAPTGVESIECTDEQNKTVTYRLWRGDIGHKXEKWKVTAQAIGXDQGGRCLKWAGESERLAGEGDPPEGSIECRHKCPKDIEGH

SEQ ID NO: 159085 - protein, 78 aa, Glycine max
  unsure (1)..(78): unsure at all Xaa locations
  Clone ID: PAT_MRT3847_114674C.1.pep
VNIFPLPTAGPFRPIVHGQSLXYNLNAXGGRGSFLEQLKAARILNNLAPSIRIVVDHXPKNRCLESLQAIVQRLKIYR

SEQ ID NO: 159086 - protein, 86 aa, Glycine max
  Clone ID: PAT_MRT3847_114675C.1.pep
ICDPLVKDKKNPKKFKAGSKTRSVLGLFLTVNILFFALASAYGTCPSPKPRHNMLKPVKPSPSGGSGGSGGSAGSGGSGGSGGSGG

SEQ ID NO: 159087 - protein, 180 aa, Glycine max
  unsure (1)..(180): unsure at all Xaa locations
  Clone ID: PAT_MRT3847_114676C.1.pep
GSRLYLLKDDSTYKLFNLLNQEFAFDVDVSQLPCGLNGALYFVQMDADGGKSKYPNNKAGAAYGTGYCDAQCPHDIKFINGEANVNNWTPSKTDPNSGTGQYGSCCPEMDIWESNSISNAFTSHPCTVSGXTRCTXPTQCGDXASGNRFKGVCDKDGCDWNPYRXGNKTXXGPGSSFTLD

SEQ ID NO: 159088 - protein, 70 aa, Glycine max
  unsure (1)..(70): unsure at all Xaa locations
  Clone ID: PAT_MRT3847_114677C.1.pep
MSLTIPSNLSKPAALRPKLSPKLRSAATXTIVCCXTNKQXTNNKRVFRTXKGVXPAXXGXSLXSXSPAXL

SEQ ID NO: 159089 - protein, 62 aa, Glycine max
  Clone ID: PAT_MRT3847_114678C.1.pep
RIGHQCLVWCAYASSQVGDLPVCASEVSLDGGGAEYSFPRGHWYGCQSSRFELDERELASMP

SEQ ID NO: 159090 - protein, 210 aa, Glycine max
  Clone ID: PAT_MRT3847_114679C.1.pep
MISEPASSLRKSNFQDRRLSIIDVSSADDSLLDGNPLSHQRSENQEQADVLYTPNSKKFEDAATKLQQWDHEPHSNDSSGIGKPKKNSKCNLRKSLAWDSAFFTSAGVLDPEELTIIIEGVEKDEKPELPSIQEDVYKSCESISTLASDSLTFESVEMEGDLFEDVRASIQKSSKECSPAASNIKVPSSPSVPLVQTHDSSKKVGMGSLH

SEQ ID NO: 159091 - protein, 59 aa, Glycine max
  Clone ID: PAT_MRT3847_11467C.1.pep
QNSRSPLKPSLTPRVARATMLQSTDQPNKYRGTTVISSPQNSKLKTLFSLYISRNLLSF

SEQ ID NO: 159092 - protein, 91 aa, Glycine max
  unsure (1)..(91): unsure at all Xaa locations
  Clone ID: PAT_MRT3847_114680C.1.pep
TSMCGPEIAKAMVDVGEEGGADAVCHGCSSKGNDQVRFEDTFFARNWMHNIAAPRREWNITWRXNTIEYAKNHIMPVTMTKTSIYSRNRNI

SEQ ID NO: 159093 - protein, 90 aa, Glycine max
  Clone ID: PAT_MRT3847_114681C.1.pep
KNYDGVLFSRYVVNQITIMHDMLRLQIEVMCHQSLKDLLLWSPGILVKMLSNSRLMEARLGILILRGRVTFCMRDSLGKWLVGFFWFVLV

SEQ ID NO: 159094 - protein, 98 aa, Glycine max
  unsure (1)..(98): unsure at all Xaa locations
  Clone ID: PAT_MRT3847_114682C.1.pep
TAEQKIGSLEAKWEESLFQHGXKPTMVGPEICEMRNLFCCAKLVVSSALSRHESRGLHYTVDFPYLEESKRLPTIIFPSSPVNSTWSSRQLHKQPMYQ

SEQ ID NO: 159095 - protein, 78 aa, Glycine max
  Clone ID: PAT_MRT3847_114683C.1.pep
KQENHPVVDNLGLGLPCGSGSVPDVMMGPITPFVGQPMTRDLLGLSVGGGATSRGGLSALLTSFGGNFDSPSEGGVHR

SEQ ID NO: 159096 - protein, 161 aa, Glycine max
  Clone ID: PAT_MRT3847_114684C.1.pep
PCVRVSQVLNRLTYTATLSHLRRCNSPIGREGKLAKPRQLHNTQWGMICPAETPEGQAVGLVKNLALMAYISVGSLPEPILEFLEEWSMENLEEVAPMSIADSTKIFVNGAWVGIHRNPDQLMTTLLKLRRQMDIIVFEVFMVRDIRDREIRNSTDAGRVC

SEQ ID NO: 159097 - protein, 71 aa, Glycine max
  Clone ID: PAT_MRT3847_114685C.1.pep
STYLSEVKILPKMIKKKMGLRAKEKPEDEAPVRYSSTCCEASRVDDLGGWKDALAQRDMSVAPPVNQEVDC

SEQ ID NO: 159098 - protein, 61 aa, Glycine max
  unsure (1)..(61): unsure at all Xaa locations
  Clone ID: PAT_MRT3847_114686C.1.pep
MAKISSPTETEXCIESLIAVFQKYAGKDGYNYTLSKTEFLSFMNTELAALXKNQKDPGSLT

SEQ ID NO: 159099 - protein, 145 aa, Glycine max
  Clone ID: PAT_MRT3847_114687C.1.pep
ARAHTPKPPKVEPTHSPKPPKKPPCPPKVKPPHAPKPPKVEPPHPPKPPKKPPSPPKVVPPLAPKPPKVKPPYSPHTPKKPPSPPKGKPPPKPPVKPPCPPKVEPTHSPKPPIPKMPPLAPPLPPVPALPKFPPLHPVPITRTTF

SEQ ID NO: 159100 - protein, 124 aa, Glycine max
  unsure (1)..(124): unsure at all Xaa locations
  Clone ID: PAT_MRT3847_114688C.1.pep
MKPTFLLSLSFLPFFAFLALWEDAVLVVVMRGNLIFPGGTYYIMPLTWGAVGGGLKLRRTGNSYCAATVFQDYXKIFRGTPPKDSIPVISPGIIFTGTGLEILFAEEAYCAESFKWVAFVDIEI

SEQ ID NO: 159101 - protein, 76 aa, Glycine max
  Clone ID: PAT_MRT3847_114689C.1.pep
WCSCRRRIASGVMNMEALTWNSTMLKFGCGVTPFNLTQLLDIFFSILGNEKIVRMQLFRIVSVLIILPVRMLVSGV

SEQ ID NO: 159102 - protein, 78 aa, Glycine max
  Clone ID: PAT_MRT3847_11468C.1.pep
MLWVEHMYCKILEPLTLTSLLPMPLEETTGSTCTLCQTLENQLQILTYLCLIVRLAIEGRTLYPQELLLTTFMTQLFY

SEQ ID NO: 159103 - protein, 35 aa, Glycine max
  Clone ID: PAT_MRT3847_114690C.1.pep
LLPEDLNQVLCSCSSFHMASQTQKRREDLLIGSGG

SEQ ID NO: 159104 - protein, 659 aa, Glycine max
  Clone ID: PAT_MRT3847_114691C.1.pep
MAAVAPSSDKTADLLQNLTLDSESKAIGVAEPAKKNGPAFSNGAAKGRAKPFNPNSCFVPNGYPSAYYYGGYDGQGDWNAYSRYMNLDGGMAQGVYGDSCSYMYHQGYGYTPYGTYAPPNSSSPMIQQDGQHYGLQQYQYPCSYYKSPASADVSFTPNKISLPQGEISTAVDADRVASSNVMNKGHTVNMANSDFTNKNGFNPFLTSSQHTSLNTNDSYQGTSLPAYASLSGYQGPRSTHGTQLPVPSDVSLVSDRQSKHGAKVGLSSSVVPVKDFTSQRNQRLPQPLPQYVSMSGSRHPSGLDLVSGFMNGMYPSNRMYSQYGNTFRPDSRFGSAGYGSRMGSFDSKFNGTGYGCGLKKSMDGFSELNKGPRAAKSSDNKNIKSLGPVTLLLKGQNLPVKSDNKEVPPVPDKEQYNGKDFAENYSDAKFFVIKSYSEDDIHKSIKYSAWASTPNGNKKLDAAYQEAKEKPGGCPIFLLFSVNTSGQFVGLAEMLGPVDFGKTVDYWQQDRWTGCFSVKWHVIKDIPNSVLRHITLENNENKPVTNSRDTQEVKFEKGVQIAKIFKEHSSQTCILDDFGFYEAREKATQEKKSKEQQLPKQVSKPSDFTFGTVTFPKSLDATLMNEAATANAAEGRMNAEGLVEGNGSTPTLGDSSKSC

SEQ ID NO: 159105 - protein, 82 aa, Glycine max
  Clone ID: PAT_MRT3847_114692C.1.pep
PFNPKLGRKSFNVLDPGPRCRVGVPSGGGPAFRVWAHAPRVWVTPSLGEEPAPLGVKMPFLLANGKGPTQTFFPPPKGLPQC

SEQ ID NO: 159106 - protein, 116 aa, Glycine max
  Clone ID: PAT_MRT3847_114693C.1.pep
TAARRRQKGIAPNIEINNAYTSLFFFPTTTYQSKSFQYLQEPICTLQHGLICMQFNVTWLLLTMETQTGEIQSTSSLGIPRISSVARDSDLIDNLPYTSLKDIICHTPSRCYLTLY

SEQ ID NO: 159107 - protein, 129 aa, Glycine max
  unsure (1)..(129): unsure at all Xaa locations
  Clone ID: PAT_MRT3847_114694C.1.pep
FLQLSFIARLPDVLKNLLESLQSVIDYAIQSGGFEFYFQGTYSVKCIQDRFLVKDFEKFNSPFRLGLEAGSKPELLXGMSCLLKSNPDALLICNGFKDAXYILLALAANXLALKTVIVEEQDEEGALIR

SEQ ID NO: 159108 - protein, 77 aa, Glycine max
  Clone ID: PAT_MRT3847_114695C.1.pep
FFFFFFDTYFTEYLFIPSEIKIKKQKKCQIRRCLDSYKSTLTFSSSTFFYLCFPSSHYLSHISLHLVPNSARGLGRI

SEQ ID NO: 159109 - protein, 63 aa, Glycine max
  Clone ID: PAT_MRT3847_114696C.1.pep
VTMAWVGLEWSWNSSVSFLYGGLAPIFGVIVVALLLVARQGCRPRWPETTTTTTIESLRADDA

SEQ ID NO: 159110 - protein, 91 aa, Glycine max
  Clone ID: PAT_MRT3847_114697C.1.pep
RLSDAANNFTTWLYMECFLIYCSKRGWRLSLLYYTDALRLCHKILRVRKMEHEGRILPLLLAALMITYTPFGIDKAIRRNRDSLEVNVRLL

SEQ ID NO: 159111 - protein, 77 aa, Glycine max
  Clone ID: PAT_MRT3847_114698C.1.pep
CTPPPPRKEGREVEPGDRNRRRRVVIKEMGQRLSCVQQQHEEHGGLFPAHASGEMEEVEDMEEEDPTALEHTTGSDR

SEQ ID NO: 159112 - protein, 136 aa, Glycine max
  Clone ID: PAT_MRT3847_114699C.1.pep
GKENVVGLNGTSTTTTTTPFAEFFAFPQYTTRGTTMAQNNQEQKQWAVADIEVTMVDNHANLKVLSKKQPGQIMKIVVGLQSLKLSILHLNVSTLDDMVLYSVSVKVEDGCLLNTVDEIAAAVNQLLRTIQEVTFS

SEQ ID NO: 159113 - protein, 86 aa, Glycine max
  Clone ID: PAT_MRT3847_11469C.1.pep
SLNKKSCQHIKVFILKPNMGLMSPMKLYKPWVENQFTSMPLRIFLQFSLRNGIRNWPQQWHRTWTITFQQAKETKKMVALSGTPFA

SEQ ID NO: 159114 - protein, 88 aa, Glycine max
  Clone ID: PAT_MRT3847_1146C.1.pep
YKNYFKTVQRVMSKNQRATCHTLIMHWNLGGGCQLPPKTWNGRALFFTGLKDALGKKVDRGNLDFNLTARRYPMLLKRIDKILILRDT

SEQ ID NO: 159115 - protein, 65 aa, Glycine max
  unsure (1)..(65): unsure at all Xaa locations
  Clone ID: PAT_MRT3847_114700C.1.pep
MGSFGGLLMLVLAALILMPQGLGSYYKPIXKPPLCKPSVCKPPLCKPPGYMPKPPGFKPKPPVFK

SEQ ID NO: 159116 - protein, 93 aa, Glycine max
  Clone ID: PAT_MRT3847_114701C.1.pep
IFSGQKTEGNRTGAGGGNRNLLFHLGSLKHLFQKPLPFTGPFNYPPEMGGPGIPTGNGEICRFFSGKKNFIFGLPGNQKKNFFDFCWSLKTGL

SEQ ID NO: 159117 - protein, 122 aa, Glycine max
  Clone ID: PAT_MRT3847_114702C.1.pep
SLIFHSLNSDGSTVVSTAYNLTPDRTHEQKLSLNNFKEGLFIGGISIGSCLGLVMSGREIHLHTILNTCRKFCCKLDQIREALKCNKVVFLAECHQHGMSELLTQAHLGSQCRCPIQRTGPH

SEQ ID NO: 159118 - protein, 59 aa, Glycine max
  unsure (1)..(59): unsure at all Xaa locations
  Clone ID: PAT_MRT3847_114703C.1.pep
GXXCXFXPGCGXSXXLVVXXPLXXRXXLCCVVXXXVVLPRXXLXXXQXXXXLPLCXRVG

SEQ ID NO: 159119 - protein, 63 aa, Glycine max
  Clone ID: PAT_MRT3847_114704C.1.pep
GYKNVYGKTGSSGSNVRTKLAISASIYNGITKYLPMGISGFNPNSIQLSRSEHKVFQVTPSPL

SEQ ID NO: 159120 - protein, 108 aa, Glycine max
  Clone ID: PAT_MRT3847_114705C.1.pep
QLSRRHHPGRMDRPTSEAGACELSIPLSRGGPIYVPNMVGPSTKDPHFQTCLGSELQDREAELSEDTLQPALLTDDLHAFTEDDLEDMDLYVVLKGWVNEAHYAPLVD

SEQ ID NO: 159121 - protein, 107 aa, Glycine max
  unsure (1)..(107): unsure at all Xaa locations
  Clone ID: PAT_MRT3847_114706C.1.pep
TTLAATINISITLWVLNSMVNFFHDDLLAELIPXTCPCNSLFYHALFISCLIXPMLIPNSQXNYKAIYWSFHXCSLGPTIGPLFHKVFPKQSSIPLMNLLILLAATL

SEQ ID NO: 159122 - protein, 348 aa, Glycine max
  Clone ID: PAT_MRT3847_114707C.1.pep
EAPEELSFGGSKDHTNIAKGKRTKRVRPQSPIPFSITANSSTGGEKEEDCYNVDDDNIIKNEDINNNNINNINSTPTTSAELQDITDEEEDMANCLILLAQGQSRESPKHAEEDAGMSYAKHNSRKFLEAATLGSSRAGYYVYECKTCNRTFPSFQALGGHRASHKKPKALMAIGQKKKQQHLLSSDEEEFQLKTNKSPFSIQLNTNGNLYSSSSNNNNKSKVHECSICGAEFTSGQALGGHMRRHRAPVGTTPTATILSFTPLALEPEEDHPRKKRNVLNLDLDLNLPAPEDDHRESKFAFASKQQQQQHGQKQPQQHHHPEQKQQQPQQQQTSLVFPVPALVDCHY

SEQ ID NO: 159123 - protein, 87 aa, Glycine max
  Clone ID: PAT_MRT3847_114708C.1.pep
MAAQALVSGASLTFSAEATRQILGPRSLQSPFCFSRKVSFLVKAAATPPVKQGSYRPLWFASKQSLSYFYSSLPVDYGLDPLGLSDP

SEQ ID NO: 159124 - protein, 155 aa, Glycine max
  unsure (1)..(155): unsure at all Xaa locations
  Clone ID: PAT_MRT3847_114709C.1.pep
GSSREEASEMGGYFILNGLERVIRLLILPKRNHPMSMVRNSFNDRREGYTDKAIVIRCVRADQSSLSVRLYYLRNGSARLGFWLRGREYLLPVGIILKALIDTTDREIYVNLTSCYNEKYXRGKXACGTQLVGERAKIILDELRDLSLLLVLMSR

SEQ ID NO: 159125 - protein, 113 aa, Glycine max
  Clone ID: PAT_MRT3847_11470C.1.pep
LITKYEQRQNKMLEHTYNPTMLSSFGISLETRFSILLLRAIIHYFSFSKTIPLAPSCIDFKSVRLLRKLSIQILSSFRFITFGYFIGILNSFGIMLVSVSILRLLCPITLSSF

SEQ ID NO: 159126 - protein, 100 aa, Glycine max
  Clone ID: PAT_MRT3847_114710C.1.pep
NGEKRVTEIKGIIIGDSNRMKAKCEHARVRIKEKGIVKGRLRRVFRQWYIVAKSLSIEKCSASDRVAMYTAVPDYKKSFYTWSERDVRAQGEAMLSNRRR

SEQ ID NO: 159127 - protein, 99 aa, Glycine max
  unsure (1)..(99): unsure at all Xaa locations
  Clone ID: PAT_MRT3847_114711C.1.pep
MELLVDHNEQPSVPSDASTNPKDSRETITHTVFETFNAPDLIVALQDXILLHASGADTRIVKDYGEGVSHTVPIISGXALPHAITRDRLAGRDLTVSAV

SEQ ID NO: 159128 - protein, 84 aa, Glycine max
  unsure (1)..(84): unsure at all Xaa locations
  Clone ID: PAT_MRT3847_114712C.1.pep
MMAKKVALGFRVSEVVLCLISLSAMAADKTRGWSGDSCDRYKEYRYCSTANVIAFVYAAYQACDLAYXGVTGRRMINQHLRYHF

SEQ ID NO: 159129 - protein, 75 aa, Glycine max
  Clone ID: PAT_MRT3847_114713C.1.pep
DQSFQSSNPFYIHPIENTMVLVSPHSKTNDENQIRNKEIEAIQGLGESMTKTPAKKAKEALNQMMTTFIEQHKTT

SEQ ID NO: 159130 - protein, 66 aa, Glycine max
  Clone ID: PAT_MRT3847_114714C.1.pep
MNIVPLFFPFRHTMKLHHYELSPGNIAKQINLISKVRGLEQAEKYFRGIPDAKIEFKIYAALLRCY

SEQ ID NO: 159131 - protein, 434 aa, Glycine max
  Clone ID: PAT_MRT3847_114715C.1.pep
MASKKKHSEGIALLSMYNDEEDDEMEDAEDEDDEEEGDAGMRMEEDAAGDARFAAEEDSANRTAIVDSGNEGGADVGFIPAEKSRVGTSTPQTNNLISPPLEQPRIGRKGALTIVDYGHDEVAMSPEPEEGEIYGSVRVMIGDQLHVTNGDFQDRSPLGTVQVLTPSNQANTPQFSEPLKSDTMNNDAAIRSEDAELGEACEKTTEGVDPLDKFLPPPPKAKCSEELQRKINKFLEYKKAGKSFNAEVRNRKDYRNPDFLLHAVRYQDIDQIGSCFSKDVFDPHGYDQSDFYDELEADMRRESERKEQEKKKAQKVEFISGGAQPGIVASAPRISMPIAGVSAVTAGGLPLVPATSDSINRDGRQNKKSKWDKVDGDKKNPLPSAGQDSVSTIGAHAAILSAANAGGGYMQFAQQKKREAEEKRSSERRVERRS

SEQ ID NO: 159132 - protein, 81 aa, Glycine max
  Clone ID: PAT_MRT3847_114716C.1.pep
EILSLSLSLSFFNMFKLIQLLAQKIYICTKFLDFFWYHSNFSIDHECLGTGVARLINVFVFMFVRILMYQNAETNTHLESK

SEQ ID NO: 159133 - protein, 114 aa, Glycine max
  Clone ID: PAT_MRT3847_114717C.1.pep
LPSSEPPTLTLLMLITNLLGSLTSDLALPTPPLLPLTSSSTSLPCPLKLLPPLPEVPLTRDLSMVTLPVEMALFKMVDMRNAILPQPLSLTEKTLTSAATLVLANMRSPELLAL

SEQ ID NO: 159134 - protein, 37 aa, Glycine max
  Clone ID: PAT_MRT3847_114718C.1.pep
RANQAFCKILSTNSLAACIKQSKQAYPFQHGPQNWFS

SEQ ID NO: 159135 - protein, 59 aa, Glycine max
  Clone ID: PAT_MRT3847_114719C.1.pep
LHMLLPDLLNMRDPMHDLEFVISFARSCGQFNKGTCVRKFSMTLLMGMLGLSRKYPHLF

SEQ ID NO: 159136 - protein, 48 aa, Glycine max
  Clone ID: PAT_MRT3847_11471C.1.pep
PKKGKVGVVLEYARISHQVYTKVDDYYKFRDAVNQLVQNGFTCAVLSD

SEQ ID NO: 159137 - protein, 51 aa, Glycine max
  Clone ID: PAT_MRT3847_114720C.1.pep
MECNKDEATRAKEIAERKFAAKDTLGAKKYALKALKLFPDLEGISQMVATL

SEQ ID NO: 159138 - protein, 143 aa, Glycine max
  Clone ID: PAT_MRT3847_114721C.1.pep
PRPVRARDDLCISVPSFFKCPISLDVMKSPVSLCTGVTYDRSSIQRWLDAGNNTCPATMQLLHTKDFIPNRTLQSLIQIWSDSLLRHPTPSEPLPSPDQVLRTVFDFKSDSDSLRFGSLSKLLLFAKDSLQNKLFLAKLEGLR

SEQ ID NO: 159139 - protein, 46 aa, Glycine max
  unsure (1)..(46): unsure at all Xaa locations
  Clone ID: PAT_MRT3847_114722C.1.pep
GGANSFGIDTHGPRQXTGGGNKHTFCSTYNKLLLTGVTFSRGLNFL

SEQ ID NO: 159140 - protein, 41 aa, Glycine max
  Clone ID: PAT_MRT3847_114723C.1.pep
YSPPCLFSLLSLCPTGIWNKCYGLYIHIFSLLKVKCDMNFC

SEQ ID NO: 159141 - protein, 55 aa, Glycine max
  Clone ID: PAT_MRT3847_114724C.1.pep
HGNMGQSHILLLDCNITYRSLRTIILFHTFAILNTKNSPLQKQTGMKIDHRPSKT

SEQ ID NO: 159142 - protein, 37 aa, Glycine max
  Clone ID: PAT_MRT3847_114725C.1.pep
LIYVSQSKKPKPINNIYYILTPIKYSFFSSYALQKSD

SEQ ID NO: 159143 - protein, 327 aa, Glycine max
  Clone ID: PAT_MRT3847_114726C.1.pep
MREIQLPLSQTQKVRLQKALEQLESLSTKVNSDASVIIADSIHVNHEDGVLKGHGTADLNGEVVATLCGVVERVNKLVYVRALRSRYKPEVGDIVIGRVVEVAQKRWRLEINYNQDAVLLLSSMNMPDGVQRRRTAVDELNMRCIFEENDVVCAEVRGFQHDGLHLQARSRKYGKLNRGQLLTVPPYLVKRQKQHFHHLEEFGIDLILGCNGFIWVGEHVEAKDDMIEDQVSQSDSQVLFPNKNCVSLEEQEKNYTILETRKYISRAANAVRVLSTLGFNITLEIIKGIIDLSLSMNLDIHDMLGSEFCVLVAEKEAERRSSMKKRR

SEQ ID NO: 159144 - protein, 123 aa, Glycine max
  Clone ID: PAT_MRT3847_114727C.1.pep
LLLRDNLPRFLHLWRHWGICIGRLLARALRDILRLNCHNTPFILFDRRSFCFIGNRSLFLLLRDRGYYLLLRNYLPRILHLSHYSICIRSLLARAQGTILPLNLHILPRSTYKRFRSSTHHLL

SEQ ID NO: 159145 - protein, 62 aa, Glycine max
  Clone ID: PAT_MRT3847_114728C.1.pep
MPHCMTNHLLGVCSSTHVPLRFVLDTILASLRLYELCAVYTLIAIVTTDMGSSVFYIIQQVI

SEQ ID NO: 159146 - protein, 75 aa, Glycine max
  unsure (1)..(75): unsure at all Xaa locations
  Clone ID: PAT_MRT3847_114729C.1.pep
MAAISIPSHMKACTYSVYVKSKEVLKFNXIIGFAXVNEYHVLIKVSSVSLNPIDHNTMESYFKNIYFSLPTAPDY

SEQ ID NO: 159147 - protein, 76 aa, Glycine max
  unsure (1)..(76): unsure at all Xaa locations
  Clone ID: PAT_MRT3847_11472C.1.pep
TXXXIFLXXXKPCLCVXHXDFRXDCPLRVXNXXXSYSXXLSQSXATRSVGISXRXQSSXXXPXTXLNDDVANRGTK

SEQ ID NO: 159148 - protein, 55 aa, Glycine max
  Clone ID: PAT_MRT3847_114730C.1.pep
PSSSASPPPFIAPHNPQTPNPPHPHFFLTGWYYPAPTQPYQNPTRNPTPSTFRDN

SEQ ID NO: 159149 - protein, 141 aa, Glycine max
  unsure (1)..(141): unsure at all Xaa locations
  Clone ID: PAT_MRT3847_114731C.1.pep
MITFAAHQFKYQGYDSLLHRNSNLNDHALLFDVEGALLKSSFLFPYFMLVAFEAGGLLRAIVLLLGYPFVCLVGDEMGLKIMVMVCFFGIKAERFRVGRTALPKYLLEDVGXQMYEELKRGGKKDGMSKLLTVMVEKFLTE

SEQ ID NO: 159150 - protein, 33 aa, Glycine max
  Clone ID: PAT_MRT3847_114732C.1.pep
VNKPLQATTYEYLIMVVLLITIVRSIKQMNYIL

SEQ ID NO: 159151 - protein, 74 aa, Glycine max
  Clone ID: PAT_MRT3847_114733C.1.pep
MEFEHPTATPLNSAMTYDEASMERSKSFVNALQELKNLRPQLYSAAEYCEKSYLHSEQKQMVLDNLKDYAVRAL

SEQ ID NO: 159152 - protein, 42 aa, Glycine max
  Clone ID: PAT_MRT3847_114735C.1.pep
MQRLLPHSISIVVVIVIIWCQYHMAELASTYITYTTPNTQHH

SEQ ID NO: 159153 - protein, 83 aa, Glycine max
  Clone ID: PAT_MRT3847_114736C.1.pep
CIGKNAPRFPREIFCISIFGIKNRESFVWDPQSHPPTSLQLITLPTFSTKIESKDLTLMLLWGIKLILHPQPLVSLIIFLLTS

SEQ ID NO: 159154 - protein, 109 aa, Glycine max
  unsure (1)..(109): unsure at all Xaa locations
  Clone ID: PAT_MRT3847_114737C.1.pep
TGPKFPFGPHPSGVLNYVNKLFXSLPSPSEGAGLTCNRVAKIPNITLTMGNKLFVLTPDQFFLRTGEGFPEACLSGLIAFDVPPPRGPWGFFVKVLIRAFKTAFAYGNF

SEQ ID NO: 159155 - protein, 75 aa, Glycine max
  Clone ID: PAT_MRT3847_114738C.1.pep
ARGRVSNKWSIYEAIGGQSWPFIIGGDPLRALYNMFPAHEERKFLLPRNGLRIDQTEFGSMYIKFSLMSWVQFSS

SEQ ID NO: 159156 - protein, 303 aa, Glycine max
  Clone ID: PAT_MRT3847_114739C.1.pep
MNKIFRFCYSFSNYSVARREEKIIESGDSSNIEERNMGLRLKETFYLSHGAPTLAVDDSIPAWNFFNSWKEQFPTRPSSILIISAHWDTHVPTVNVVHQNDTIYDFYGFPKSMYKLKYPAPGAPHLAKRVKELLLGSGFSHVDEDKKRGLDHGAWVPLLLMYPEADIPVCQLSISSNKGGTYHYNMGKALAPLKDEGVLIVGSGSATHNLRAIAPRGTPPAPWASAFMSWLKTSLLDGRYEEVNEYEEKAPYAKMAHPWPDHFFPLHVAMGAAGENSKAKVVHDSWDGGSMSYASFGFTTADS

SEQ ID NO: 159157 - protein, 96 aa, Glycine max
  unsure (1)..(96): unsure at all Xaa locations
  Clone ID: PAT_MRT3847_11473C.1.pep
WFPKGWGFPALFGVPVKVPAFKGVRFNFLKNRVFKGPFLGPLKPWTVFPSVVEKSMSGELEVAKFFPLPVPFXGIPKAFDLNLKGRSLRCFNPKQK

SEQ ID NO: 159158 - protein, 85 aa, Glycine max
  Clone ID: PAT_MRT3847_114740C.1.pep
MKMSSKVTSATLCLAVLFLFLTFTYAGRLGPASSSITSIKTQHGVLEEEKLDVEETCDGIGEEECLMRRTLVAHTDYIYTQKHKP

SEQ ID NO: 159159 - protein, 229 aa, Glycine max
  Clone ID: PAT_MRT3847_114741C.1.pep
MNSQILTPIRVFGQRTVASTFRNLPPRNPPSEGNERKAASRKSETAHHSLSHFLTLKPQKSPQTVPGKSTPFLSPLGLKGEEGGAVKEVEKEKNGGSDDKVIFKSFKHTEEDKRDFVDQIEVGELENSVAEDIQESNKRKTPFEGANESQTARNNVVVLGGASKLKPKKGQIGNDTSNKRPRPHYNHYANGRGWWDYDMEGVDNEELGFSDEVWEGVGSTTLGGIVDWH

SEQ ID NO: 159160 - protein, 203 aa, Glycine max
  unsure (1)..(203): unsure at all Xaa locations
  Clone ID: PAT_MRT3847_114742C.1.pep
SFNGNIEHSPANGDAISTERREAVKKFFKNHLDVVPKEEXHNFLTFVIPHDREALMTNFFSELQDREEEFGISDIQLGLTTLEEVFLNIARQAELESAAAEGRLVTLTLTSGESVQIPIGARFVGIPGTESAENPTGFMVEVYWEQDDTGALCIAGHSQKVPIPNGVQLSSSPSVRHRRYLGRSGTVHGVVIDPSQVSSVAFQ

SEQ ID NO: 159161 - protein, 83 aa, Glycine max
  Clone ID: PAT_MRT3847_114743C.1.pep
CSSMMLLTLTHNAVQNSPASQLQKTNFLSLLLIVNIQISLGECPCEKSPGCSVPKVDYSSLLFLINIQISMSVLVALSHVVMA

SEQ ID NO: 159162 - protein, 547 aa, Glycine max
  Clone ID: PAT_MRT3847_114744C.1.pep
VLSDAVATSEDKGISWSKRGECALNDSDCVITIDDIYKWLAATFFLWFVLAIYFDNIIPNASGVRKSILYFLNPSYWMGKGGQKVKEGGVCSCIGSAPRQEQSTPDDEDVLEEENKVKQQLTEGLLDANVAVQIRGLAKTYPGTRSIGCCFKCKRTSPYNAFKGLWVNFAKDQLFCLLGPNGAGKTTAINCLTGVTPVTDGDALIYGHSIRSSTGMSNIRKLIGVCPQFDILWDALSGQEHLQLFATIKGLSPASIKSITQTSLAEVRLTDAAKVRAGSYSGGMKRRLSFAIALIGDPKLVILDEPTTGMDPITRRHVWDIIENAKRGRAIVLTTHSMEEADILSDRIGIMAKGSLRCIGTSIRLKSRFGTGFIANISFNGNNIEHSPANGDAISTERREAVKKFFKNHLDVVPKEENHNFLTFVIPHDREALMTNFFSELQDREEEFGISDIQLGLTTLEEVFLNIARQAELESAAVSFTSLVRAKRKLKRKNHSPSVLLKTWENRAQNSLPSTASTSPTLTSTNPSIYSNRHVWIPVFSTLSIME

SEQ ID NO: 159163 - protein, 42 aa, Glycine max
  Clone ID: PAT_MRT3847_114745C.1.pep
KSYIYSYIRKHIIDNQHLMRNPLLAITHLCKDPIGGSQQSRS

SEQ ID NO: 159164 - protein, 46 aa, Glycine max
  Clone ID: PAT_MRT3847_114746C.1.pep
LHGLSLVSRWMWDGFAIRSLLDPWLQTSQSMSNIRISNLRACPRVP

SEQ ID NO: 159165 - protein, 151 aa, Glycine max
  unsure (1)..(151): unsure at all Xaa locations
  Clone ID: PAT_MRT3847_114747C.1.pep
FYFLGGRVGNSAISNLLRGAAWYKGCLMVKIAMSGNAAVKRSDRASLVHVFLTYSNSSEHFDACNXWQKSEPHSWELIFPIXCCGPNNGFEMWTSEWANQTSWHLSFLIDNPKQSTVFDILLGIFQEFRIACNTFMPALSVSQVTFRSSEN

SEQ ID NO: 159166 - protein, 214 aa, Glycine max
  Clone ID: PAT_MRT3847_114748C.1.pep
MRWFPLSTTSNSERERNRENTSRTSVYLNVYDLTPINNYLYMLGLGIFHSGIQVHDIEYGFGAHEYPSSGVFEVEPRSCPGFIFRRSVLLGSTDMSNSEFRYFIERLSAKYHGDTYHLIAKNCNHFTDEVCQHLTGSPIPGWVNRMARVGSFCNCLLPESLQVAAVRHLPERVAFDDDDGSGSDGLFASIESEEDEPNHHFLTSPNGDVAFLKE

SEQ ID NO: 159167 - protein, 47 aa, Glycine max
  unsure (1)..(47): unsure at all Xaa locations
  Clone ID: PAT_MRT3847_114749C.1.pep
QHPTNHKYFEKGKPIXFFVQKLKTPPRERLFEAIQNGAGFPITQKNF

SEQ ID NO: 159168 - protein, 74 aa, Glycine max
  unsure (1)..(74): unsure at all Xaa locations
  Clone ID: PAT_MRT3847_11474C.1.pep
PINTGLDSRGVPLTATELVTTVQHSEKTDRAQRAKSTACLASSXGVGPQTTTLRHKYHIESPRGHDTLSSNTGP

SEQ ID NO: 159169 - protein, 65 aa, Glycine max
  Clone ID: PAT_MRT3847_114750C.1.pep
RPFFFFWGFILHYLRGSSVYNLYMNRSLGSKIASRLVWEPSFLFDIETKVIHFDSVGVSLMILTN

SEQ ID NO: 159170 - protein, 63 aa, Glycine max
  Clone ID: PAT_MRT3847_114751C.1.pep
KGPPFKYKDNIFCGIDNFLIYKFGFFFLEAVTLTNNTKRSYLALNIVHFESTTCRFIRNSCNM

SEQ ID NO: 159171 - protein, 47 aa, Glycine max
  Clone ID: PAT_MRT3847_114752C.1.pep
FTKGGSSLQPDAHSRAGSNRPCKYHRMNAESQTSDEAPEMDDQDKPT

SEQ ID NO: 159172 - protein, 71 aa, Glycine max
  Clone ID: PAT_MRT3847_114753C.1.pep
EQLFADVTGSSCCSPYSQLVGYFPSGDSLPDCIYRIFYQPLLDRKTLHAFSLTSLSLCSHIYIIKLYNWPI

SEQ ID NO: 159173 - protein, 54 aa, Glycine max
  Clone ID: PAT_MRT3847_114754C.1.pep
EITPEAFHRFIHLATILRFISASISSPLCMICKFLISQSGRIMVSLQASQLMIK

SEQ ID NO: 159174 - protein, 109 aa, Glycine max
  unsure (1)..(109): unsure at all Xaa locations
  Clone ID: PAT_MRT3847_114755C.1.pep
QRFESEKRLALIRAWEESEKTKAENRAYKRHNAVVLWENSKKXCEAHLKRIEEKLDRNKAKCVEKMQNKVAEIHRTAEEKRAMIEAYKGEEFLEIEEKAAKFRTRGYSP

SEQ ID NO: 159175 - protein, 54 aa, Glycine max
  unsure (1)..(54): unsure at all Xaa locations
  Clone ID: PAT_MRT3847_114756C.1.pep
HVAIVQAALPXQGIVPFVFAKEYNAHPAILSTAVIFGMLIALPITLVYYILLGL

SEQ ID NO: 159176 - protein, 65 aa, Glycine max
  unsure (1)..(65): unsure at all Xaa locations
  Clone ID: PAT_MRT3847_114757C.1.pep
YHSMPECGLXGEKNSLGMEGLAKEDSGGSGSKGGAAHLKGFMRWEKFLPKMIFRVLLVEADDSTR

SEQ ID NO: 159177 - protein, 137 aa, Glycine max
  Clone ID: PAT_MRT3847_114758C.1.pep
IRLEGKENKVVGVLWANKRDSGLWFAPPEWRECRLGIQLLPILPISEVLFSNVDFVKELVEWTLPALNREGVGEGWKGFVYALQGIYDNEGAMQKIRSLNGFDDGNSLTNLLWWIHSRSDDEEFGHGKHCWFGHYCH

SEQ ID NO: 159178 - protein, 28 aa, Glycine max
  Clone ID: PAT_MRT3847_114759C.1.pep
PIRPLKGIPPILASHEAPILSLITHTLC

SEQ ID NO: 159179 - protein, 236 aa, Glycine max
  Clone ID: PAT_MRT3847_11475C.1.pep
LDPFCRFRHTVFGAALRQPIDEHLLALLLLLSRVPWTLPFHLVQFLLCAHAQHFDKALLLDRRLLVDALQFVLHVLHQFDQCLLRLLHFWHLRKRRTLSIRAKVVVTVPVKAFLIHFLAVGVHQRLFRARTHRRDLLVCVFGVHRMQCGGNDRLHGGTVVSHGTLRVTVQILGAHLAAVQCVLLGGLALDLTANDRGTVQLVLFHFLRVALGTWVLFSVLCVVRFRVALLEILATQ

SEQ ID NO: 159180 - protein, 76 aa, Glycine max
  Clone ID: PAT_MRT3847_114760C.1.pep
DFHETITESRWSCIILISLLIIIVLSEFELNMNESKVKKFYSRNSITSKQLLQKIRAPAHIPFKQQKFKIQRILIT

SEQ ID NO: 159181 - protein, 93 aa, Glycine max
  Clone ID: PAT_MRT3847_114761C.1.pep
ITTPYTSKAALNKIHYKLNYTYKNVNIRTISDPLIILPTLYTQYHDRTILSLESLVSITTRTTWLASLIMYILNPSQYTMIYTLFYVSPYKKA

SEQ ID NO: 159182 - protein, 116 aa, Glycine max
  unsure (1)..(116): unsure at all Xaa locations
  Clone ID: PAT_MRT3847_114762C.1.pep
MPCLNLSTNVSLEGVDTSSILAEATSSVASIIGKPEAYVMIVLKGSVPIGFLVGMSQPAAYGELVSIGGVNXYVNKELSAAIASILETKLSVPKSRFFLKFYDTKGSNFGWNGSTF

SEQ ID NO: 159183 - protein, 48 aa, Glycine max
  Clone ID: PAT_MRT3847_114763C.1.pep
WICYVFMRCDVYPRGHDKLFFFSYMTPKHFRIDRVLWCNIQKIITTIY

SEQ ID NO: 159184 - protein, 66 aa, Glycine max
  Clone ID: PAT_MRT3847_114764C.1.pep
MYSPKQNSGRQRLRLTTDLAVDFNEQEFSYLHLYFHDKIFYHEQEFSLILSLLGVTPISSCIPNLT

SEQ ID NO: 159185 - protein, 124 aa, Glycine max
  unsure (1)..(124): unsure at all Xaa locations
  Clone ID: PAT_MRT3847_114765C.1.pep
WVNGNSIGRYWSSYLADENGCSPKCDYRGPYTSNKCLSMCAQPSQRWYHVPRSFLRDNDQNTLVLFEELGGQPYYVNFLTVTVGKVCANAYEGNTLELACNXXQVISEIKFASFGLPKGECGSF

SEQ ID NO: 159186 - protein, 46 aa, Glycine max
  Clone ID: PAT_MRT3847_114766C.1.pep
SSPEPAIYELESHLFAQGYIRHDPPLNSTLFMGVIKLTRACKMIST

SEQ ID NO: 159187 - protein, 313 aa, Glycine max
  Clone ID: PAT_MRT3847_114767C.1.pep
MDVKERPLKLYFIPYLAAGHMIPLCDIAQFFASRGHHVTIITTPSNAQILHQSKNFRVHTFDFPSEEVGLPDGVENLSAVTDLEKSYRIYIAATTLLREPIESFVERDPPDCIVADFLYCWVEDLAKKLRIPWLVFNGFSLFSICAMESVKKHRIGDGPFVIPDFPDHITINSAPPKDMREFLEPLLTVALKSNGFIINNFAELDGEEYLRHYEKTTGHRAWHLGPASLVRRTALEKAERGQKSVVSANECLSWLDSKRDNSVVYISFGTLCYFPDKQLYEIACGMEASGYEFIWVVPEKKGKEDESEEEKEK

SEQ ID NO: 159188 - protein, 103 aa, Glycine max
  unsure (1)..(103): unsure at all Xaa locations
  Clone ID: PAT_MRT3847_114768C.1.pep
PEVGNHYYGLXHPFIPHQIRMTRALLTQDGGVQHIQFHKPSPTXYYHLCHLHADDYVXLLQNITPETQNDHLKQLIRYNVKQDRPIKNNQKNPSLSFTKGADP

SEQ ID NO: 159189 - protein, 148 aa, Glycine max
  Clone ID: PAT_MRT3847_114769C.1.pep
AVLAAIPLTIIAAISSVFHAYVASAGLGFLQFCNLNSYRSMFIVGFSLFMGLSVPQYFNEYVLLSGHGPVHTGTTAFNNIVQVIFSSPATVAIIVAYFLDLTMSRGEGSTRRDSGRHWWEKFRTFNQDTRTEDFYSLPLNLNRFFPSF

SEQ ID NO: 159190 - protein, 27 aa, Glycine max
  Clone ID: PAT_MRT3847_11476C.1.pep
SDNLDNLSQSYACSIPRISRVGMRAYT

SEQ ID NO: 159191 - protein, 92 aa, Glycine max
  Clone ID: PAT_MRT3847_114770C.1.pep
PSDSFVLPIKAPIITICNSKASHRGLPRDYRLVSTVPRTCLHLQEDHVTSDIFMLLTKTPTTTLALSARTIHIRLSCSFAPLVTTVADLTCH

SEQ ID NO: 159192 - protein, 57 aa, Glycine max
  Clone ID: PAT_MRT3847_114771C.1.pep
LCFKSHTNKHYENLNQHTNASLQTGSKIVKLRKIPIIRPTEVVNGYKIWVGLNLRVL

SEQ ID NO: 159193 - protein, 108 aa, Glycine max
  Clone ID: PAT_MRT3847_114772C.1.pep
MEVGMLPISASKRGKLLAAGYTTLDAIARASPTHLVRDIDVSESEATEILNLASKPSALERPNGSHTAVVGDLDNILGGGIKCKEVTEISGVPGIGKTQIGIQLAVNV

SEQ ID NO: 159194 - protein, 216 aa, Glycine max
  unsure (1)..(216): unsure at all Xaa locations
  Clone ID: PAT_MRT3847_114773C.1.pep
MEVGMLPISASKRGKLLAAGYTTLDAIARASPTHLVRGFPFQFQFSTLLSFSNWVCIYVKKFLFFSPTHYLTLTDIDVSDSARTEILNLASKPSALERPNGSHTAVAGGGQTAWDMLNDEKFSSYITTSCADLDNILGGGIKCKEVTEIXIQLAVNVQIPQEYGGLRGKAIYIDTEGSFMVERVLQIAEACIEDMAEYSQHFHKDFQACDAKKHPN

SEQ ID NO: 159195 - protein, 90 aa, Glycine max
  unsure (1)..(90): unsure at all Xaa locations
  Clone ID: PAT_MRT3847_114774C.1.pep
HVRXFKELNTENLKTLCNALEKKVPWQKDIIPEIASTLLQCRSGHGEKKRESXEKQXKKXKEETWLFLQGVDVEAKEKIARELARLVFGS

SEQ ID NO: 159196 - protein, 73 aa, Glycine max
  Clone ID: PAT_MRT3847_114775C.1.pep
PGTSESSSRVAPFLSSCFINNKISILIYTSCLAIYGPHILYNSTNISFLCSIIFLNHTIIFLISSKIRFCRIL

SEQ ID NO: 159197 - protein, 156 aa, Glycine max
  unsure (1)..(156): unsure at all Xaa locations
  Clone ID: PAT_MRT3847_114776C.1.pep
GSSKHAGAFWRGPDYRGLNWDNKLAGAQVLLNHPRQGLSAGHPYQQTLRTLHNQTCVIMRCYLPGFTCCNSTKGGWIELIHGKPQPVXYAANAALLAALYSDYPDAGDTPVWDRGPXLFSTDMLRCFAMAQMEYILGNNPRTMSYVLRFGXHYPDH

SEQ ID NO: 159198 - protein, 124 aa, Glycine max
  Clone ID: PAT_MRT3847_114777C.1.pep
VISEQFTWEPQLDVDDNFFSSFQMCDLDSSAYETGFPIIDELSSFDNSQSCYNLSDLLFPGINFTNDGTEENMEYPTLEETIGAADFTFGGSSEGFQQMFDSSWVNHLMCHQAIAFTEELLSAS

SEQ ID NO: 159199 - protein, 123 aa, Glycine max
  Clone ID: PAT_MRT3847_114778C.1.pep
NHKLQTEMALRHRRLTKQLSKFLTPVLNAGNCCQQSSKALNLVALSIMHMPSAQSPIANWTQVRGFREYRISTKSDELCEPATEIDLLSFIKASLDEFEGTHHYWVNRSDNNDQLFGADGIFL

SEQ ID NO: 159200 - protein, 406 aa, Glycine max
  unsure (1)..(406): unsure at all Xaa locations
  Clone ID: PAT_MRT3847_114779C.1.pep
GKTKVAILLLWVLCIKLQLNVEARTSSALETEIEAKLKQLNKPAVKTIKSEDGDIIDCVNIYDQPAFDHPALKNHTIKMMPDFLLESQNPSTEDASESVIFQTWQKSGSCPKGTIPIRRILKEDLLRASSLGRFGQKPPASLNFSNADSEFIPVNRSSSYLVTLGYNYIGAEADINVWNPKVTMPNDFTTAXIWLKNTXGEVFESVESGWMVNPKLYHDGATRXVRSWTRDSYRSIGCFDLTCPGFVQTGQVALGASIGPISSIMGPQYELNVGLFLEPDSGNWYLKIKNNVPVGYWPAEILGSLTHSAILVEWGGQVSSPNIKNHESPHTGTEMGSGHAASGRFQNACFMRNVRIKDYSLQLKYPEHAYAMAEEPYCYSSLNDVHYGKEPVFYFGGPGRNPPFCP

SEQ ID NO: 159201 - protein, 198 aa, Glycine max
  Clone ID: PAT_MRT3847_11477C.1.pep
AGCKQLMRVASEIHIKCLHYLLIDDCSDPSLLDELTSTEMSMLQNIAQDAGVEIILNSSIGQLSSLECSDVVDQQFKNLPNELLCLRCTYYLKLSKSRQQDIGKPKLHILFDSLRYYQRISVSQLYKPVVVFPPKSRAEMWLKGAKKEVKGFVVATFYIHLYTVLFFLSPSTFSITIFTQTITLSFLLFCCILLSFFT

SEQ ID NO: 159202 - protein, 114 aa, Glycine max
  Clone ID: PAT_MRT3847_114780C.1.pep
MASLYSAPPLLRFSSRRSSSLAPDLSLVNLRKSHLRFESKISPIKLQWKSIEGKWQRKRKIQWGVRCTADGIDGGMFLGGRKEGAGVSIPERLKVVSLIACVMCLCNADRVVMS

SEQ ID NO: 159203 - protein, 130 aa, Glycine max
  Clone ID: PAT_MRT3847_114781C.1.pep
RGFGLPPPAKFRSGHLPANAIPVSTVMPGETGDSGSNSDNDDSIESEEEVYGGRYSLDSSPQDRRVPPNGAARRYGNLTRPRYASDYTYSEVSSSRETLVGKPGTVRDPLMRGAANVGQSGFNRDDSSDS

SEQ ID NO: 159204 - protein, 93 aa, Glycine max
  unsure (1)..(93): unsure at all Xaa locations
  Clone ID: PAT_MRT3847_114782C.1.pep
LGKGGAKRPRKVLPLTIQGIPKPALFRLVSKGGVKKISGLIYEKTPGVLKIFLENVIRAAVSSPEPARRKTVPPMEVVXALKRQGRTFYGFGG

SEQ ID NO: 159205 - protein, 67 aa, Glycine max
  Clone ID: PAT_MRT3847_114783C.1.pep
ALFFFFFFFFFFFFFFFFFLKPATTNIGFTLQKKGQNFPYGARILDRTLTHLAIKARTQNILSKDSR

SEQ ID NO: 159206 - protein, 71 aa, Glycine max
  unsure (1)..(71): unsure at all Xaa locations
  Clone ID: PAT_MRT3847_114784C.1.pep
HHSWAPQTISXHYHTTRFLXEPGVXIXXXHGTRIPXXAGILXSMXXXXDXFXDRPXKHVNSEXVIXXXXXX

SEQ ID NO: 159207 - protein, 311 aa, Glycine max
  Clone ID: PAT_MRT3847_114785C.1.pep
QFESDVFLICSNAMQYNAPETIYHKQARSIQELGRKKFEKLRIGFEHSQIELKSEQKAGSNYLVKKQPKKPLARASQEPVGSDFSSGATLATIADVQPTSHLMQGGRCERSGNLDGILEANAFWIDANQEKAEDVLLGKGLLSKWGRKSFALDESRRASYNMSNQPIVKPDSIFMTFERGMKHLVTVGLHAEYSYARSLARFSASLGPIAWKIASHRIQHALPAGCKFGRGWVGEYEPLSTPILMVNNRVQKENSLVMKLHSTTELPKGNQNCKNVESSIMHPVNGQMLEGKRPSMPDFKGKPLFQSHKQP

SEQ ID NO: 159208 - protein, 165 aa, Glycine max
  unsure (1)..(165): unsure at all Xaa locations
  Clone ID: PAT_MRT3847_114786C.1.pep
IRSGYATGCGLLPCLFGITPFLACPSARLIGLRWRTEKEVISGKGQFICGNKHCNEKDGLASYEVNFYYFEAGENKQALVKLVTCWRCSFXLNYKRQKEKEQLEKRQQEQDRRKRNRSKSDDDLDDFHESKERRRKGKRALTSASDHKIDDDDDNLDEFLEGMFP

SEQ ID NO: 159209 - protein, 127 aa, Glycine max
  Clone ID: PAT_MRT3847_114787C.1.pep
VKDAEKLKGKVRGTGRMPVLLAIGVAFAWMFLCAAIFLKFEKDWDYFKSFYFFFCSLTTIGYGDVTPTNSEDEHGRPVESLAAEKATKESIDRFGGDGALGRLATTKAIQTEQSTDVCWEGPVRGTT

SEQ ID NO: 159210 - protein, 136 aa, Glycine max
  Clone ID: PAT_MRT3847_114788C.1.pep
IGLRWRTEKEVISGKGQLICGNKHCNEKDGLASYEVNFCYFEAGENKQALVKLVTCERCAFKLNYKRQKEKELLEKRQEEQDRRKRNRSKSDDDLDDFQESKERRRKGKKALTSASDHKIDDDDDNLDEFLDGMFL

SEQ ID NO: 159211 - protein, 120 aa, Glycine max
  Clone ID: PAT_MRT3847_114789C.1.pep
MDDKQENLLTLSLPSQLVSIDEELWRMAEDRVQEILWTIEPNVLSEVNRKDVIDYVQRLIKGYYGAKVLPFGSVPLKTYLPDGDVDLTTLIHEDAEEDLAQAICNILKSGDDSEYQVKDI

SEQ ID NO: 159212 - protein, 65 aa, Glycine max
  Clone ID: PAT_MRT3847_11478C.1.pep
PGCFHFCSKIKNPNQESFHRISTYSQSPQIEEKRMSRRSSRTVYVGNLPGDIREREVEDLFLKVL

SEQ ID NO: 159213 - protein, 34 aa, Glycine max
  Clone ID: PAT_MRT3847_114790C.1.pep
IHQQCLYKTLRAGHTSICSTVEFLPWRSWEGIYI

SEQ ID NO: 159214 - protein, 73 aa, Glycine max
  Clone ID: PAT_MRT3847_114791C.1.pep
VPDTLNTDHWLILEYMLKNADSMVNRKSPRLMVHYNTFTHTIHTKYRNSWSTKPGHFHLLHKLWVLMIYNRVM

SEQ ID NO: 159215 - protein, 94 aa, Glycine max
  unsure (1)..(94): unsure at all Xaa locations
  Clone ID: PAT_MRT3847_114792C.1.pep
MASFVSFLVLLLAALILMPRGLATFYKPIKKPPVYNPPVFXPPVYEPPVYKPKPPVYQPIPPVYDPPYKKPPYKKPPYGKYPPVDDNTHASSKQ

SEQ ID NO: 159216 - protein, 62 aa, Glycine max
  Clone ID: PAT_MRT3847_114793C.1.pep
PGVLLADSAFTMGKSRLRTGSSHDFPGYMKSWQDIIYRSAWAAHYYSTVQGSGCGMVVMIAL

SEQ ID NO: 159217 - protein, 102 aa, Glycine max
  unsure (1)..(102): unsure at all Xaa locations
  Clone ID: PAT_MRT3847_114794C.1.pep
NARRNLLQGPMAKDPPFPHKADGDYGPAKVMLSPASPGPGVIAGGSVKNVFXKGGVENALGXQLGGNNALNNARATVGGVPKNKQLXRFLXERGIPKEELWK

SEQ ID NO: 159218 - protein, 56 aa, Glycine max
  Clone ID: PAT_MRT3847_114795C.1.pep
HPIQLVHGRSCQNQHDNANPTTLKTCHKLDDVTKCPSTNFKNITLFSVSRSTYFPI

SEQ ID NO: 159219 - protein, 76 aa, Glycine max
  Clone ID: PAT_MRT3847_114796C.1.pep
RRLIGKRQLQSPAGATPPPRLLLFCILPLPTQRSLSETIYSLTLTNCRSVSRVRIQYSLIRELNAEWLSVLIYIRT

SEQ ID NO: 159220 - protein, 100 aa, Glycine max
  Clone ID: PAT_MRT3847_114797C.1.pep
PFSFPTALFKNNLGAPRFFRFFLDGPNMGVSEPPHFVPVFSPKPASRKRPKIFFFGGIFGVFFTPHYEGLFFGIWGRAFASFLPFYRKPPFKFFYAPRWS

SEQ ID NO: 159221 - protein, 42 aa, Glycine max
  Clone ID: PAT_MRT3847_114798C.1.pep
HTLFTFFQTSQTVHIISNMQSGLNILHMPKHTQQRGQAHLCL

SEQ ID NO: 159222 - protein, 58 aa, Glycine max
  Clone ID: PAT_MRT3847_114799C.1.pep
QVFYISLTCLYWFFFFFFFLYANSIGFFVRYFFFFFIFFFLSKIISNACAKAWMDAWA

SEQ ID NO: 159223 - protein, 48 aa, Glycine max
  unsure (1)..(48): unsure at all Xaa locations
  Clone ID: PAT_MRT3847_11479C.1.pep
IIIQCDDNAAVVIDQKVNPRGTXILCAIDRGLTQXYFTKRVSLAPEVL

SEQ ID NO: 159224 - protein, 164 aa, Glycine max
  Clone ID: PAT_MRT3847_1147C.1.pep
LPTTPGPLLHTQPSLSNALIAALKRAQAHQRRGCIEQQQQQQQPPLLTIKVELEQLIISILDDPSVSRVMREAGFSSTVVKSNIEDTSSSAPSVFYNSSGGGVFSSPGSPSPSEKNNVFRQNHFLAAYTSNEFSSTSPNSSLLLKKASVFPIIESPPPSSSKED

SEQ ID NO: 159225 - protein, 47 aa, Glycine max
  unsure (1)..(47): unsure at all Xaa locations
  Clone ID: PAT_MRT3847_114800C.1.pep
WGSMHSSVCLVISRDFDWLVLFTLICKIHPGISXVGXFNFHKSYFMV

SEQ ID NO: 159226 - protein, 66 aa, Glycine max
  Clone ID: PAT_MRT3847_114801C.1.pep
MLINQEDSCHLREVLWFLAQVQRFKLVKFVVFNRKLCWKLINPEVSPWNAQALWKCSSSEICFNLF

SEQ ID NO: 159227 - protein, 64 aa, Glycine max
  Clone ID: PAT_MRT3847_114802C.1.pep
YSSTILAKVSDIPTCQLVIEAFVKRYNESDSKVGSGDVQSPLQVSFIGLSIMGLCSAFAWESQH

SEQ ID NO: 159228 - protein, 149 aa, Glycine max
  unsure (1)..(149): unsure at all Xaa locations
  Clone ID: PAT_MRT3847_114803C.1.pep
FLSGTISSDHFWQPPIPDSGGQLPATEPEAYEWALQRFLQEASVFAPSATTASYDADGVFVEIEDQPKPAPPPTEEAHDSPTALVPAPSTPDEDQAXPKRKPNLTCAAVCMTRGSLDKSQDPCPFSERGSQTANPSLVESKTTCRGSIP

SEQ ID NO: 159229 - protein, 70 aa, Glycine max
  Clone ID: PAT_MRT3847_114804C.1.pep
SKIESRPLKQRSLRVVDHLNEGSATYFDYLFYIDIEASMAEPRAQYALGQLQEFARFLRVLGCYPMDTVL

SEQ ID NO: 159230 - protein, 85 aa, Glycine max
  unsure (1)..(85): unsure at all Xaa locations
  Clone ID: PAT_MRT3847_114805C.1.pep
MAASVSTVGAVSRVLXNLNGSGAGASAPTSAFFADQLEEGYCLRVPNSKVSGGSFKIVAVEAQXRYEETQHLDNDRRNSHAYDIS

SEQ ID NO: 159231 - protein, 100 aa, Glycine max
  Clone ID: PAT_MRT3847_114806C.1.pep
FFLFLCYVLCLFQSCFLFGTFSFFLWVRVRPFCLVCVPSLFRLVCVLRFELFSFPSAIVLLLFLLFASFFLISCASVFCGGLRQMMSMVSLFQGRAFSRP

SEQ ID NO: 159232 - protein, 147 aa, Glycine max
  Clone ID: PAT_MRT3847_114807C.1.pep
MMHMTFYWGKKVTILIDSWKTDSWTSYFLSLLACLVAAALYQYLENRRIRLKLLAGGRRPSPAPEIRAPLLRWGVAGDKEKLGVKFAEAVLFGVNSAIGYLLMLAVMSFNGGVFLAIAVGLTIGYFFFRNEGENDALVVDNNSCACA

SEQ ID NO: 159233 - protein, 371 aa, Glycine max
  Clone ID: PAT_MRT3847_114808C.1.pep
FGSRLTPVSLRIAALETLESLITVAGALKSEPWRSKVDSLLLVTAMDSFKEGSVSEERSVFQQKEPAATTTELQLAALRALLVSLLSFARVRPPYLAQGLELFRRGRQQTGTKLAEFCAHALLTLEVLIHPRALPMVDYAYANNSSFGEAHSNLQHGYFGWSHNTPYGLPQVPPDYDDDLCARWLENDNEVGESLDKNTKYTQEPSEACRASDPEVLFVHVSSDTNIQERIEMVSETATCADVEMKTVEDETNFKSDQPGESVVQFQETVSCTTNIPVVETRGDVADDKVSEKIVSDNSIPHNEASHMESRHGSSVNKDFKFSSPSSSLWHRTSGSNIFEEFAFQLEHDKALADEDDFPDIVDGDPDSDSE

SEQ ID NO: 159234 - protein, 334 aa, Glycine max
  Clone ID: PAT_MRT3847_114809C.1.pep
MIPTLVCIGTTIFQSTLSSYSLSFISLFLSTSLALLAISLNYWLVPGGFAWRKYHSRYKGHAKLSGPMGWPILGTLPAMGPLAHRKLAAMATSPKAKKLMTLSLGTNPVVISSHPETAREILCGSNFADRPVKESARMLMFERAIGFAPYGTYWRHLRKVAITHMFSPRRISDLESLRQHVVGEMVMRIWKEMGDKGVVEVRGILYEGSLSHMLESVFGINNSLGSQTKEALGDMVEEGYDLIAKFNWADYFPFGFLDFHGVKRRCHKLATKVNSVVGKIVEERKNSGKYVGQNDFLSALLLLPKEESIGDSDVVAILWVSTPFLFFFVKCMYY

SEQ ID NO: 159235 - protein, 54 aa, Glycine max
  Clone ID: PAT_MRT3847_11480C.1.pep
KLRPDESTLKANFQLQISTVSGIVAEIILCDNFGSTLDGNTKVSSIQRHHVLNW

SEQ ID NO: 159236 - protein, 50 aa, Glycine max
  Clone ID: PAT_MRT3847_114810C.1.pep
VHALVHCQSVKVNLFHMKQEDDEKRREPWTYHNKDKNCIATFLSFWFGFP

SEQ ID NO: 159237 - protein, 179 aa, Glycine max
  Clone ID: PAT_MRT3847_114811C.1.pep
LIVFPMILKSAVGSGMILHLWHVNPNLVLRGFIDSQNNDAGSIVRIVEICQELKILSSVVEIIPYYYSIRLAAVASRKEFLDLEKWLSSNLTTYKEAFFEECLKFLKDTHFGGSQNLSGKSFHQSGAVLSLYAEATATILKVLKSHTDLVASRQLSEELERLHISMIDTNPRLQNGGTA

SEQ ID NO: 159238 - protein, 47 aa, Glycine max
  Clone ID: PAT_MRT3847_114812C.1.pep
PASLSLCIVHSLHLTLATLMAVIKAQSPPLAAVVVPSEDLSLSEYVS

SEQ ID NO: 159239 - protein, 70 aa, Glycine max
  Clone ID: PAT_MRT3847_114813C.1.pep
KNKNKGRRVLADTNDVNACMYVREDTIHTQSQSNLTDRLTTNNPSIGKLSHDIQTNPSETYSLPSQSKHQ

SEQ ID NO: 159240 - protein, 55 aa, Glycine max
  Clone ID: PAT_MRT3847_114814C.1.pep
SVFHLFGDFLLLHHPTTVTDCLRIIRKGSAGNTNGTHHAQTKRSRRPHHKSMVLL

SEQ ID NO: 159241 - protein, 55 aa, Glycine max
  Clone ID: PAT_MRT3847_114815C.1.pep
KTPDRRSAPPGTRIEDRGLAMSIPLPFKEADMSKTRCLKRLRIIGRMKMPTHLLP

SEQ ID NO: 159242 - protein, 71 aa, Glycine max
  Clone ID: PAT_MRT3847_114816C.1.pep
FTRLCFMSPGTDVTPIIPALEAIWPTSAGERLSDFTFRTVTGKLIHLAHNYPIRIPDRFPLVILSLLTHKG

SEQ ID NO: 159243 - protein, 84 aa, Glycine max
  Clone ID: PAT_MRT3847_114817C.1.pep
APIESLRKWVVGPQLRSVGCLWLRGYSGSIAYHWSGPHMGACVWIFPARLPAPGLSLGAFAGAALVAYFGRNAGAKAFKAILGP

SEQ ID NO: 159244 - protein, 94 aa, Glycine max
  Clone ID: PAT_MRT3847_114818C.1.pep
GGDDGSLAFVPNNFSVASGEKIVFKNIAGFPHNVVFDEDEIPTGVDAWKISMSDQHLLNAPGETYSVTLNAKGTYIFFYSPHQGADMVVKITVN

SEQ ID NO: 159245 - protein, 79 aa, Glycine max
  Clone ID: PAT_MRT3847_114819C.1.pep
WAAVAGGLFGSRGAPAASCVFGVVVCAPCSVSGVFPWVVQLIPSSGLGFRLPFVPLPLLGLSSWCVHLALAPLEPGSVL

SEQ ID NO: 159246 - protein, 36 aa, Glycine max
  Clone ID: PAT_MRT3847_11481C.1.pep
ACRSILITKFLQWSQCAHNLATHRIDLNHYHQKPNP

SEQ ID NO: 159247 - protein, 137 aa, Glycine max
  unsure (1)..(137): unsure at all Xaa locations
  Clone ID: PAT_MRT3847_114820C.1.pep
LHAFAHASELVHSLCAVPYLSKKRSRSSPKTLTGKTITLXEVASSHTIRHLQGSASRTTEGIPPDQHTSNLSXRQHSLGQGVLLADYNIHMESXTLHLRTSTSEGGMQNLASRLSPGKTITLQVESSHTIDNVKAKI

SEQ ID NO: 159248 - protein, 68 aa, Glycine max
  Clone ID: PAT_MRT3847_114821C.1.pep
DELKVKKETGPPIRCFPFAHPQGVNTCLMPANPPEEVPIFSKSSYLRKLAYSLPPQIILSASGYLYFV

SEQ ID NO: 159249 - protein, 50 aa, Glycine max
  Clone ID: PAT_MRT3847_114822C.1.pep
FLIFWGFVKSPPLFFGFTRISALGFLLPQQRKDSPTITIVRYQKSLVGFA

SEQ ID NO: 159250 - protein, 74 aa, Glycine max
  Clone ID: PAT_MRT3847_114823C.1.pep
IKIIYGAKRTFSFKSQISHSLTQTCPVCSLHYKTSPESSKLFHDYFLFFTHRHYYEKYNSGYIIQIFGLLIQVG

SEQ ID NO: 159251 - protein, 73 aa, Glycine max
  Clone ID: PAT_MRT3847_114824C.1.pep
EHTDGHQKQKAELNPEGGGLSNGNTAIINHSPCWWTNSSFTRAPMITTSPWTVSYRIHGLMSTITMSYHDTKP

SEQ ID NO: 159252 - protein, 76 aa, Glycine max
  unsure (1)..(76): unsure at all Xaa locations
  Clone ID: PAT_MRT3847_114825C.1.pep
LVDSFPSYVAKTFIQTTPDKNCPKNPFRVLSSIYQRGGFKGCXTGLGPPVSGAFPANAATIVAWGLAFKMLGIKHD

SEQ ID NO: 159253 - protein, 56 aa, Glycine max
  Clone ID: PAT_MRT3847_114826C.1.pep
PVTQFYHPKENLTEIQQHNPRNIVRARHKPICIHISWTHKNLKSSPITSRRLLLQN

SEQ ID NO: 159254 - protein, 58 aa, Glycine max
  Clone ID: PAT_MRT3847_114827C.1.pep
LKRKLKGQAFSLPSKQLAHILCFVILPLICVLCDATECTSWLCIHLSILVLLWLAYTF

SEQ ID NO: 159255 - protein, 218 aa, Glycine max
  Clone ID: PAT_MRT3847_114828C.1.pep
MAEDRSEVSDYSSEDEGTEDYRRGGYHAVRIGDTFKNGSYVVQSKLGWGHFSTVWLAWDTHKSRYVALKIQKSAQHYTEAAMDEIKILKQIADGDPDDKKCVVKLLDHFKHSGPNGQHVCMVFEFLGDNLLTLIKYSDYRGVPLPMVKGICFHILVGLDYLHRELSVIHTDLKPENVLLLSPIDPSKDPRRSGIPLILPNTKDKTVTKNGITIENKSL

SEQ ID NO: 159256 - protein, 61 aa, Glycine max
  Clone ID: PAT_MRT3847_114829C.1.pep
QMLYRKSDGSLSLHTPRIFFSSFHLFSLLFSIFCGYCLRLQCIYLECTGSNTTLYKSWGAN

SEQ ID NO: 159257 - protein, 94 aa, Glycine max
  unsure (1)..(94): unsure at all Xaa locations
  Clone ID: PAT_MRT3847_11482C.1.pep
HPYILNLTLSVAFYKLVLWQWLHLHDSLFIQTQLGKTLQDLNALDCLKHHIESIYGSYTDTXANLYFHGAPIVDLRLDTTLPGYTKYTLHPLQP

SEQ ID NO: 159258 - protein, 52 aa, Glycine max
  Clone ID: PAT_MRT3847_114830C.1.pep
NWIRNKEETDIYWIEEIFQVLDRPEFSIFKWLTISFPIYFLFPFYSHLLISS

SEQ ID NO: 159259 - protein, 46 aa, Glycine max
  Clone ID: PAT_MRT3847_114831C.1.pep
HVISSTQSIGCCFIALNNGTILLDGIKLIPWCSSRIRILAAIIYPL

SEQ ID NO: 159260 - protein, 150 aa, Glycine max
  unsure (1)..(150): unsure at all Xaa locations
  Clone ID: PAT_MRT3847_114832C.1.pep
RRQKGSASGTPYHDGFVFFDICFPPEYPSEPPMVHYNSGGYQLNPNLYESGKVCPSLLNTWTGTDTEVWNPGASTVLQVLLSLQALVLNEKPYFNEAGYDQQIGRAEGERNSVSYNENASLVTCKSILYLNRKPPKHXEALVEEHFRQRS

SEQ ID NO: 159261 - protein, 685 aa, Glycine max
  Clone ID: PAT_MRT3847_114833C.1.pep
ARASFSHTNWQLGDWCMLPVVDQKEEMIQDASTCDAYNEHGMARGYKRRNLNVGELFLIEKIKTKVDVVWQNGEHTLGLDPHNLVPVNVINTHEFWPQQFVLEKGASDDPLKPSKQRWGVVLSMDAKEHTVKVHWRTVPTSETDNLAGDTMIETVSAYELVEHPDYSCCFGDIVFKEAQKQLGYQADKDNAKSVTDLNVEVPLINWDQISHPNKYADNSYLSCIGNVTGFEDGDMEVKWATGLTTKVAPYEIFRIDKHEGSTATPVSYEANVEELTQEMIVSQPSDKKGKGLLDCDGYRDNCEHPGESSSSSLPQAAFELFSSIKASIFKTLGVTSLSGKFCPVPTFEEGNESGCLDKKDLDTCGPESESHPVSKMQSSGDICEVIRTHKRNDFPVSLDNKNSLDQLKQFDVIDNCSDHHFIQEGKGLTSSQFKKGWVKKVQQEWSILEKNLPETIYVRVFEERMDLMRAAIVGASGTPYHDGLFFFDICFPPEYPSEPPMVHYNSGGLRLNPNLYESGKVCLSLLNTWTGTDTEVWNPGASTILQVLLSLQALVLNDKPYFNEAGYDQQIGRAEGERNSVSYNENAFLVTCKSILYLLRKPPKHFEALVEEHFRQCSKHILLACKAYLEGAPIGCGFGGGKAEHENQKGTSTGFKIMLAKLFPKLVEAFSDKGIDCSQFAEMQK

SEQ ID NO: 159262 - protein, 134 aa, Glycine max
  unsure (1)..(134): unsure at all Xaa locations
  Clone ID: PAT_MRT3847_114834C.1.pep
LKRYPAELSLIFIGLLIGCFACXRGGKCNNSFFKGSAASFLKKLLEAPPPYTNGGKSLSDHIACPMFVFGNHMSSIANCLPSRLNGNPSRPRLVPLCKKSPPVTFPCCWGYRIGTALCAMVLRKRLFKPNAGIS

SEQ ID NO: 159263 - protein, 84 aa, Glycine max
  Clone ID: PAT_MRT3847_114835C.1.pep
CHIPGSDPSLYNVHISTVSHQVNAVASVIRGCMHSVRLLLSTWSSRIILASVRVYWLREGHMLRSWHVLDRYEPDSYEGQSQWH

SEQ ID NO: 159264 - protein, 102 aa, Glycine max
  unsure (1)..(102): unsure at all Xaa locations
  Clone ID: PAT_MRT3847_114836C.1.pep
ARAQGVLTIFLTFTDDKTKTNCLFSAAGVYPIDSIAANVTEHNLTVIGEMDALLFXMKLKKEGIVHIISFRPPKEDIKEENKALTIEDKPEGKPDDRQEEKK

SEQ ID NO: 159265 - protein, 57 aa, Glycine max
  Clone ID: PAT_MRT3847_114837C.1.pep
RQTNGILLHYELQVSCMAFFKENWEVVFCELICPHLILTYKMLNININTFSEKKTLF

SEQ ID NO: 159266 - protein, 130 aa, Glycine max
  Clone ID: PAT_MRT3847_114838C.1.pep
RAPLHGFAFWFDVEFNGHAISSTNYQSTTSFVDNHQMNGSQRKRRTNPNEALVLSTAPEDPPTHWQQTLIYFYDPIELEQDQLIEGSLIKKKLIEGSVTLSQSKENARFMNSHLEYTSGGRSYVKESVMR

SEQ ID NO: 159267 - protein, 52 aa, Glycine max
  Clone ID: PAT_MRT3847_114839C.1.pep
NSCEPANELLKIEYILNIELPFKALDTKHATPTFSTFSISSGYKRLTPKLNF

SEQ ID NO: 159268 - protein, 150 aa, Glycine max
  unsure (1)..(150): unsure at all Xaa locations
  Clone ID: PAT_MRT3847_11483C.1.pep
NSSPLQNLWSLPPPDCQVHQFSRSNIVPNGGLSPVREESNFHFAKXQLQSMVKSHLKSLSQNIDLGHNTIKDIARSSMHTILAACDLEHMKSEVCTVPPPSACSHMELMAGGQTSLIKGCCSSCFDSFVGDVVKRILDTRISSQWLRLGL

SEQ ID NO: 159269 - protein, 255 aa, Glycine max
  unsure (1)..(255): unsure at all Xaa locations
  Clone ID: PAT_MRT3847_114840C.1.pep
MFPQEKYSNGYQQGQGVGYSHRERVRRGTRARASTSSVRGYDQHQPQHRAGWTDFDVAYYHSYAHLGIHQEMIKDRVRTETYRDAIMQHQSSIAGKANEVVKANNLXDVVVVLHGRVEDVXIDEEVDVIISEWMSYMLLYESMLGSVINARDRWLKPGGLILPSSATLYMAPVTHTDRYSDSVDFWRNVYGIDMSAMVSLAKQCAFEEPSVETITGENVLTWPHVVKYIDSYSVTVQELESXVTAKFKFNXMMRA

SEQ ID NO: 159270 - protein, 99 aa, Glycine max
  Clone ID: PAT_MRT3847_114841C.1.pep
MLSSGRNHSNGYQQGQGVGYSHRERVRRGTRRSRASTSSVRVYDQHQPQHRPPWTDFDVDYYHSYAHLGIHQEMIKDRVRTETYRDAIIQHQSSIARKA

SEQ ID NO: 159271 - protein, 157 aa, Glycine max
  Clone ID: PAT_MRT3847_114842C.1.pep
MFPQENHSNGYQHQQGYSHRERVRRGTCRSRASTSSHSHSVRVYDQPRPPCTDFDVAYFHSYAHLGIHQEMIKDRVRTDTYRDAIMQHQSFIAGKVVVDVGCGTGILSIFCAQAGAKRVYAIDASDIALQANEVVKANNLSDVVVVLHGRVEDVEIN

SEQ ID NO: 159272 - protein, 97 aa, Glycine max
  Clone ID: PAT_MRT3847_114843C.1.pep
DECSQRKRRTNPKEALVLSTAPEDPPTHWQQSTAPVAPPTLWHQTLIYFYDPIELEQDQLIEGSVTLSQSKENARFMNIHLEYTSGGRSYVKESVMR

SEQ ID NO: 159273 - protein, 63 aa, Glycine max
  Clone ID: PAT_MRT3847_114844C.1.pep
CIAWLGFVFGIPSWLELEVHGIRNVEILLMIELGKCAYLLMFYLEIIIVHQCLRSKVAGILLF

SEQ ID NO: 159274 - protein, 152 aa, Glycine max
  Clone ID: PAT_MRT3847_114845C.1.pep
NQPILSYYSENEELDNVLWSAKLPDRTVILTMVDESMASPGSILDILLQSFKSGEGTERLLNHLVIISMDPQAFEYCSSLHPYCIHPSIFPRPIMTTPDHNLFTWTTNDVLYEVIRLGYNIIFTDADVLRLRSPIINFHAASELTISCSDGP

SEQ ID NO: 159275 - protein, 286 aa, Glycine max
  unsure (1)..(286): unsure at all Xaa locations
  Clone ID: PAT_MRT3847_114846C.1.pep
MGQKSLIYAFVSRGTVILAEYTEFSGNFNSIAFQCLQKLPATNNKFTYNCDAHTFNYLVDNGYTYCVVADESIGRQLPMAFLERVKDEFVAKYGGGKXAATAPVNSLNKEFGPKLREHMQYCXDHPEEISKLAKVKAQVSVVKGVMMENIENWPGHLKGTYHERWISISSFQGWVLLLSRLLVKYIDSYSVTIQELESITAKFKFNSMMRAPLHGFAFWFDVEFNGHAISSTNYQSITSFVDNHQMNGNQRKRQTNPNEALVLSTAPEDPPTHWQQLQYLFFQFSV

SEQ ID NO: 159276 - protein, 172 aa, Glycine max
  Clone ID: PAT_MRT3847_114847C.1.pep
SLKQANPIQQHSNIHSSDLNSGSQHVSRTDNDNRKRRQLHNRHIKICNCMHLHSLCNPLFEFSILSSSDQTATGQNQLCLLCELLGLARYTSSSGEFMNNGNGKSGETCAENTTDGKVFNEDTHVYCVNDLAVQSEMDFSTLLANDMCQRFHPSLPIPLPPSNGKEHGISGA

SEQ ID NO: 159277 - protein, 84 aa, Glycine max
  Clone ID: PAT_MRT3847_114848C.1.pep
MNGSQRKRRTNPNEALVLSTAPEDPPTHWQQTLIYFYDPIELEQDQLIEGSVTLSQSKENARFMNIHLEYTSGGRSYVKESVMR

SEQ ID NO: 159278 - protein, 313 aa, Glycine max
  Clone ID: PAT_MRT3847_114849C.1.pep
TRPGERRCFLRKITSNGYQQGPGVGYSHRERVRRGTRRSRASTSSVRVYDQHQPQHRPPCTDFDVAYFHSYAHLGIHQEMIKDRVRTETYRDAIMQHQSSIAGKVVVDVGCGTGILSIFCAQAGAKRVYAIDASDIALQANEVVKANNLSDVIVVLHGRVEDVEIDEEVDVIISEWMGYMLLYESMLGSVINARDRWLKPGGLILPSSSTLYMAPVTHTDRYSDSVDFWRNVYGIDMSFVVSLAKQWAFEEPYVETITSENVLTWPHVVGKSLLIKSLVKHYTKHNLPDVRGLITIISGKQRQVQFAVCGMSK

SEQ ID NO: 159279 - protein, 75 aa, Glycine max
  unsure (1)..(75): unsure at all Xaa locations
  Clone ID: PAT_MRT3847_11484C.1.pep
IAPXYKWPLFCAFVITLISFIAAIFFLPIQILCLLVTKISLFTISDSFENIRNNACMLICLDNYSLVLVCHFGVT

SEQ ID NO: 159280 - protein, 609 aa, Glycine max
  unsure (1)..(609): unsure at all Xaa locations
  Clone ID: PAT_MRT3847_114850C.1.pep
AREKIEQGTHKSGRNVGLKAYVVCQVLEIVVKKEIKQAERKCTQVKIRKVIRPEDLSNERAYXTDIRDVYYSDETYIISVESIEGKCQVRKKNDIPECSALGGIFQNVFFCELLYDPATGSLKKLPANIKVKYSSGQTSDAAARKRKGKCIEGDGVSESTKEGKTLNDKRLATLDIFAGCGGLSEGLQQSGVSSTKWAIEYEEPAGDAFKANHPEALVFINNCNVILRAVMEKCGDTDDCISTSEAAELAAKLDEKEISSLPMPGQVDFINGGPPCQGFSGMNRFNQSSWSKVQCEMILAFLSFADYFRPRYFLLENVRNFVSFNKGQTFRLTLASLLEMGYQVRFGILEAGAFGVSQSRKRAFIWAASPEDVLPEWPEPVHVFSAPELKITLSENVQYAAVRSTANGAPLRAITVRDTIGDLPAVGNGASKGNMEYQNDPVSWFQKKIRGDMVVLTDHISKEMNELNLIRCQKIPKRPAXVSWRDLPEEKIKLSSGQVVDLIPWCLPNTAKRHNQWKGLFGRLDWQGNFPTSVTDPQPMGKVGMCFHPDQDRILTVRECARSQGFPDSYEFAGNIIHKHRQIGNAVPPPLASALGRKLKEAVDSKSST

SEQ ID NO: 159281 - protein, 134 aa, Glycine max
  unsure (1)..(134): unsure at all Xaa locations
  Clone ID: PAT_MRT3847_114851C.1.pep
PYFFIDAYQANLILLQLQDHSIALSLFYCLTRKPTFWHDGHTNTTRAGXLRQPREFGAIGKMLQQMVNDGCRPIAATYSRLLHSXGRPNYLREALFVFHQMQEMLCTPXRXTYCTLIEKQPKTVFLEAAMWMNK

SEQ ID NO: 159282 - protein, 76 aa, Glycine max
  Clone ID: PAT_MRT3847_114852C.1.pep
FGSRRPRLDEGGAPLTSFENRGTLLAGAIGTLLLTRLDIFGGFRCDARLGIPLAADNFHEYKCVSFVTNKSDPMLS

SEQ ID NO: 159283 - protein, 85 aa, Glycine max
  Clone ID: PAT_MRT3847_114853C.1.pep
YSEFDLGWDARHNVVDNAESSFILYFLYSVISVNSDMTSIFGVVVVVFRYMLKGYYSERGCEDSAPRHPHESEVHVIVFHILFGA

SEQ ID NO: 159284 - protein, 58 aa, Glycine max
  unsure (1)..(58): unsure at all Xaa locations
  Clone ID: PAT_MRT3847_114854C.1.pep
ADVGVGICGLEGRQAVMAWGFVMGQXQVLNKLTFVHGHWNSQRVAYLIWTLLYKSAFG

SEQ ID NO: 159285 - protein, 60 aa, Glycine max
  Clone ID: PAT_MRT3847_114855C.1.pep
RTKERGGGRPESTNNRAPLEYYSPCSSKSINHLHYTTRRFASLCKLNAPALPPSNSLFQP

SEQ ID NO: 159286 - protein, 93 aa, Glycine max
  Clone ID: PAT_MRT3847_114856C.1.pep
RTQMQMKKSLWIALVTIMLVLSSQLCLVHSRVLRSKVVLTEVADDCVELKESGSSLWRDQFFVVSSENSSTRVSKRSLAFRLASGPSKKGPGH

SEQ ID NO: 159287 - protein, 75 aa, Glycine max
  unsure (1)..(75): unsure at all Xaa locations
  Clone ID: PAT_MRT3847_114857C.1.pep
RLDXXTVXTTTTVXKXXQEXLXPSLQSMISLSQALVXXGRLDRYMSSRELMDSVEREEGCGGHTAVEVKDGTFSW

SEQ ID NO: 159288 - protein, 136 aa, Glycine max
  Clone ID: PAT_MRT3847_114858C.1.pep
MGKEKKRYLLKTEPSEWSWEDQAANGGISKWDGVKNKQAQKYLKSMSINDLCFFYHSGPKARRIVGVVSVVREWYGDAVDVKAVGEMRRPVDLKEMKHFKDFALLRQPRLSVVPVPDHIWNQICHLGGGYQGDHAS

SEQ ID NO: 159289 - protein, 70 aa, Glycine max
  Clone ID: PAT_MRT3847_114859C.1.pep
RVRCSTTQSPWRRRRVLEKLLSRQNYRNLRHTDLLRSTSGRYTLLLPRVVVVCDLELPLTMAMFLSILVL

SEQ ID NO: 159290 - protein, 541 aa, Glycine max
  unsure (1)..(541): unsure at all Xaa locations
  Clone ID: PAT_MRT3847_11485C.1.pep
SSRIGSRKKEKCEDEDNFMDNGTTIGTTTGRKRGQKRRRVLLSDSDYASSGSSDFEFTISEEEREQVREAKRLCGNLRNNLRSSSHPINKKRLESMSINXPQRKPPARKGKEKIEEPLGRKGKEKVEDLKSKGKQTCGICLSEEDKRRVRGVLNCCTHFFCFACIMEWAKVESRCPLCKQRFKTISKPARSTTGIDLREVVIQVPERDQVYQPSEEELRSYIDPYEYVICSECHQGGDDGLMLLCDICDSPAHTYCVGLGREVPEGNWYCDGCRPVALGLQEVQRREGVADPRVSVQSHPVRPPPVLHVRESIDLNLISSPRAAFNQGFGHLPSSRFSGRSAEGASPVSGGAPTLSERRWIHRQIQQLLSIDRMASTPGRTNGISATSSTSNLYSSHFDQSRGTTTLHARTQDVGTSYHTFFDERLCNNSSPLMQNGALWPGLMGTTPVPDCELAHQFSRSNIVPDSGLSPAIREESNFHIAKEQLQSMVKSHLKNLSQNIDLVKYILSSCGHRYCNSYLFSLPSSYGEGRIVATFGTQNT

SEQ ID NO: 159291 - protein, 74 aa, Glycine max
  Clone ID: PAT_MRT3847_114860C.1.pep
IRGLFRSLYQFIFFTPYFHLIFPIINFTISPTTSLFVWFFYFGPFFFCGFFHYYLVSLIFFFSSLEIQILCFPS

SEQ ID NO: 159292 - protein, 107 aa, Glycine max
  unsure (1)..(107): unsure at all Xaa locations
  Clone ID: PAT_MRT3847_114861C.1.pep
GALVRRGLGGNLKRAGAAGASPSPRERAQSADDEKRAQLDEDNHAQPAGAEVLKAPAQAGEKVDRSHSDDCRSDEEKGKRDTDDDWSDESQEPRKRTTGNNPTRKXG

SEQ ID NO: 159293 - protein, 31 aa, Glycine max
  Clone ID: PAT_MRT3847_114862C.1.pep
IFLKSEAQFNLHYLDILPFFSKNVLLPLKNY

SEQ ID NO: 159294 - protein, 124 aa, Glycine max
  Clone ID: PAT_MRT3847_114863C.1.pep
LRRKKDQRLTMKQKCLVVLVFVVLLACAVGWDEGIPGGWNPIKNINDPHVTEIANFAVTEYDKQSGEKLKLVKVIKGDLQVVAGLNYRLSLTASDSNNYQAIVYEKAWAREHYRNLTSFTPLHA

SEQ ID NO: 159295 - protein, 57 aa, Glycine max
  Clone ID: PAT_MRT3847_114864C.1.pep
SGKAHSSDNLMVLELWSVKKIQSSARISAVEIIISVRKSIREAHYNEYAANNKENPW

SEQ ID NO: 159296 - protein, 74 aa, Glycine max
  Clone ID: PAT_MRT3847_114865C.1.pep
NYFGGYWHCILLRHLCSCNFKQLDFTSNNKSDRHRLVRLLTSKFLSQMQISNYASIVFMALFISIAATGILEMQ

SEQ ID NO: 159297 - protein, 238 aa, Glycine max
  Clone ID: PAT_MRT3847_114866C.1.pep
DRPFFQTDLVDQGHSKSSSIIEAYKRSKSDAPVISILGAKVEVGRREYIPQTLSLPNGKAIEPAMDLPLSGAGSILGMGPTLPYNHSTAFGYNRLTSVPALSFSSAMYGSSGGPIPYMVDSRGTPVVPQVEGSSSTVLSSYSQPPFIVSMTGTQLGLNGVGSSRPNFDLNSGFTIDGGNRDMLTARQFFFPAQGRAMEEHVRTLPQSSSSGVSVKRKEPDGGWDRDTYAFSYKHQQPP

SEQ ID NO: 159298 - protein, 122 aa, Glycine max
  Clone ID: PAT_MRT3847_114867C.1.pep
GCRSRPVPDFGFCRIAIWFLFCLIHFFGFASSPSLGLLNFCFFICLNFQVRFFKPAGNSERLLLLKNIKFFCGPNFHGQGSGRDILLTNKKKTKKLGVVNSRHVFLWALLFWKLWKPALVSI

SEQ ID NO: 159299 - protein, 195 aa, Glycine max
  unsure (1)..(195): unsure at all Xaa locations
  Clone ID: PAT_MRT3847_114868C.1.pep
RRGPRFRDLNPVWKETLSFNVDNVNSQSSQIFGDTLELDXYHDKSYGSTRRHNSLGRIRLSSAQFVNKGEEALVYYVLEKKYLLSMIQGEIGLKIYYVDEEKVLKIEEAPPPPPPPQKEAEITEPEKVEETPPPQPPEGEKPKEEEMKEKEKENAEPPPPPAPAAATEKPPPEAEQDYQPLDPLLDVKAASVSRS

SEQ ID NO: 159300 - protein, 65 aa, Glycine max
  Clone ID: PAT_MRT3847_114869C.1.pep
MESQVKHALVVKVMGRTGSRGQVTQVRVKFLDDQNRHIMRNVKGPVREGDILTLLESEREARRLR

SEQ ID NO: 159301 - protein, 33 aa, Glycine max
  Clone ID: PAT_MRT3847_11486C.1.pep
YKHLIPIQDSTNNMCLTRTILFLIFSDQYYCCG

SEQ ID NO: 159302 - protein, 358 aa, Glycine max
  Clone ID: PAT_MRT3847_114870C.1.pep
MLMIQNRKKMRFFTVKVALCCVVVMLLTLSDAQLDNSFYKDTCPRVHSIVREVVRNVSKSDPRILASLIRLHFHDCFVQGCDASILLNDTATIVSEQSAPPNNNSIRGLDVVNQIKTAVENACPGIVSCADILALAAEISSVLAHGPDWKVPLGRRDSLNSSFSLALQNLPGFNFTLDQLKSTFDRQGLNTTDLVALSGAHTIGRSQCRFFAHRIYNFSGNGNSDPTLNTTLSQALRAICPNGGPGTNLTNLDLTTPDRFDSNYYSNLQLQNGLLRSDQVLFSTSGAETIAIVNSFGSNQTLFYEHFKVSMIKMSIIEVLTGSQGEIRKHCNFVNGDSSNLATLATKKSSEDGMVSSI

SEQ ID NO: 159303 - protein, 92 aa, Glycine max
  unsure (1)..(92): unsure at all Xaa locations
  Clone ID: PAT_MRT3847_114871C.1.pep
GHRGKKANDQDFIVAPKKEGWQRQACALKTLGMNTGXGARSAGGKCTSTRLAEEAHGSLWLMRPCXESAQAHTNEYIHGEQYRTDCTTVNQQ

SEQ ID NO: 159304 - protein, 252 aa, Glycine max
  Clone ID: PAT_MRT3847_114872C.1.pep
MATTTFCTYLFLLSVYLSIFINLSSSSSEGNILLSFKASIEDSKRALSSWSNTSSNHHCNWTGITCSTTPSLSVTSINLQSLNLSGDISSSICDLPNLSYLNLADNIFNQPIPLHLSQCSSLETLNLSTNLIWGTIPSQISQFGSLRVLDLSRNHIEGNIPESIGSLKNLQVLNLGSNLLSGSVPAVFGNLTKLEVLDLSQNPYLVSEIPEDIGELGNLKQLLLQSSSFQGGIPDSLVGIVSLTHLDLSENT

SEQ ID NO: 159305 - protein, 46 aa, Glycine max
  Clone ID: PAT_MRT3847_114873C.1.pep
SVKKLKPGRLILTDLNVGLCSPPYCWRYSNLNRGCKFKRPFLNIGR

SEQ ID NO: 159306 - protein, 113 aa, Glycine max
  unsure (1)..(113): unsure at all Xaa locations
  Clone ID: PAT_MRT3847_114874C.1.pep
RXACPLLXXXXXPXXXSXXSLFXPXXFSXXCCPXXXSXCLXXVXXXVXGXXRPRXXSLPLXWXCFXSXLXXXXXXXXXXCSLXXRSCXXXXFXXXCXGFLPLXXXXALPPPPP

SEQ ID NO: 159307 - protein, 99 aa, Glycine max
  unsure (1)..(99): unsure at all Xaa locations
  Clone ID: PAT_MRT3847_114875C.1.pep
VHVISGLPAGSSTGRLDVVDDDXLVILFTIKQGDHMLMNYQSVTLLLGLKCDGKTGTRVVEXLLPDLHEGNTDXDTRLAADTAAKLNVHRLAYVSVRML

SEQ ID NO: 159308 - protein, 258 aa, Glycine max
  Clone ID: PAT_MRT3847_114876C.1.pep
MIGKDEFVSYSPLPSNPNPNPNPNPNPNPNPYSNPNPYYDPNPHPYPQNVVVLLPSYRLRSQRRRRRCILYSAALFLFLLIAGAAFLLYPSDPEIRLTRIRLNRIGIRTNPRPILDLSFSITVKVHNRDFFSLTYDTLAVSVGYRGRQLGFVTGGGGGRIRARGSSYVDATLTIDGFEVIYDAFYLLEDIAKGVIPFDTDTRVEGKLGLFFFTVPLKATVSCEVYVNINQQTIVRQDCYPKSLGDPLDQSAYIEAGDT

SEQ ID NO: 159309 - protein, 52 aa, Glycine max
  Clone ID: PAT_MRT3847_114877C.1.pep
PNPTETLILHRNGLTYHGRSPHHQIILMQTRHNLHVPNPTPLRTFKTSNFTP

SEQ ID NO: 159310 - protein, 157 aa, Glycine max
  Clone ID: PAT_MRT3847_114878C.1.pep
MTGKDEFVSYSPLSSNPNPNPNPNPYSNPNPYYDPNPHPYPQNVVVLLPSYRLRSYRRRRRCILYSAALFLFLLIAGAAFLLYPSDPEIRLTRIRLNRIGIRTNPRPILDLSFSITVKVHNRDFFSLTYDTLAVSVGYRGRQLGFVTGGGGGRIRAR

SEQ ID NO: 159311 - protein, 92 aa, Glycine max
  unsure (1)..(92): unsure at all Xaa locations
  Clone ID: PAT_MRT3847_114879C.1.pep
MSEEGPPKLYTDKPRKARLKQFRGQQKSNAFSSPAAMGTHAVTPPXPSSPSKEPFIRRYKFVWPMLLAVNLGVAAYLLXRTKKKGTGEEEQD

SEQ ID NO: 159312 - protein, 103 aa, Glycine max
  Clone ID: PAT_MRT3847_11487C.1.pep
ILRAQSFFLPIKATRAEFYWIVGDRPLCHLQYPISYLSPLRRILPTDRWELRLKVFCKGNSPPKAHHLHVPLGGRRLLLLLGKRTAGTLRCLPTVIRLIGVHS

SEQ ID NO: 159313 - protein, 59 aa, Glycine max
  Clone ID: PAT_MRT3847_114880C.1.pep
CVHELEFVDHWCCDSQFEGYGSGSGSHLLRREKQLLAVFKLPKNGFYSLKTIMKHYLAV

SEQ ID NO: 159314 - protein, 92 aa, Glycine max
  Clone ID: PAT_MRT3847_114881C.1.pep
WSLLYGKDANTCSFERSDALEHDPPSKAKGLWTFRGQDRHYLSKVQSCRPQLVLISHQVFSCQPQRGLENPAIQHADLLLPLELCKSDGLIL

SEQ ID NO: 159315 - protein, 37 aa, Glycine max
  Clone ID: PAT_MRT3847_114882C.1.pep
CTSDTIYHLHSNSNHNGILNSMFDLWGQNPGLVFNIR

SEQ ID NO: 159316 - protein, 46 aa, Glycine max
  unsure (1)..(46): unsure at all Xaa locations
  Clone ID: PAT_MRT3847_114883C.1.pep
GSCVRXHYTQLLDARRRCYGYEFATRRQIGTAAKRPQMGSAVTRQQ

SEQ ID NO: 159317 - protein, 33 aa, Glycine max
  Clone ID: PAT_MRT3847_114884C.1.pep
YTNLSLCLARRYKHTHHSRRHSSSKILVTLQSQ

SEQ ID NO: 159318 - protein, 59 aa, Glycine max
  Clone ID: PAT_MRT3847_114885C.1.pep
KNQLKKSQRLICYNRQCYKQISLRYPLPTKEGQQWRVPLGTLRKFNTDFAQRYHPSFRR

SEQ ID NO: 159319 - protein, 73 aa, Glycine max
  Clone ID: PAT_MRT3847_114886C.1.pep
KIWYLKPLFTLPLYFSALGSKFLGFLHIKGFDIGFKIWGRPLPWVRKTDFGEMVANKTMGRPKGKFFFLNYWA

SEQ ID NO: 159320 - protein, 70 aa, Glycine max
  unsure (1)..(70): unsure at all Xaa locations
  Clone ID: PAT_MRT3847_114887C.1.pep
YIYLLHATIVTYVHTKTTALAYRHNIHNQHYTTNAYSINTXXHHSTCCYECHTNKHHITTCALNDNTNKH

SEQ ID NO: 159321 - protein, 64 aa, Glycine max
  unsure (1)..(64): unsure at all Xaa locations
  Clone ID: PAT_MRT3847_114888C.1.pep
TDADWAGSITDQKSTSGYCTFVWGNLVTXNEQXQDVVAMSSVYAEYRAMAHSVCEILCLRRILE

SEQ ID NO: 159322 - protein, 154 aa, Glycine max
  Clone ID: PAT_MRT3847_114889C.1.pep
MQNGINRQLSLKEKLKSSLCCFSGSVHSDPLERGEGGFYSKLRIPKTPISPQGSTSSPSWFKIRSPTCTEYGGDPHPRVRGRSLKSRMGRKLLHHRQSQSADFSYDPSSYALNFEDDSPEEIPFRNFSSRLPPSPPSSTPPVEYSTGKEIVGYS

SEQ ID NO: 159323 - protein, 66 aa, Glycine max
  unsure (1)..(66): unsure at all Xaa locations
  Clone ID: PAT_MRT3847_11488C.1.pep
VETKPPKGGLSPIHALEWGQWFAQHECDKFTGXDWLHCCERTSSGYIYDEALDNTPNEYPNIARHD

SEQ ID NO: 159324 - protein, 149 aa, Glycine max
  unsure (1)..(149): unsure at all Xaa locations
  Clone ID: PAT_MRT3847_114890C.1.pep
PKISRRSGKKLXRSPSFLKHGNAGFVKIIPPKPMVVETFSEYPPLGRFAVRDMGQTVAVGVIKNVXKKDPPGAKVPKAAQKKNLIVRGGLSGDFGSNKCWFFFWTLGFSFLGSLFFGQSFKFPPSFCNCCSQNWVFDRRGQNCFYLFVF

SEQ ID NO: 159325 - protein, 215 aa, Glycine max
  unsure (1)..(215): unsure at all Xaa locations
  Clone ID: PAT_MRT3847_114891C.1.pep
MKKLYHKGTVHPSPPLISDQLSFLPAAILTLAAALSPEDREVLSYLISCSSSATSTSTFSGNARRKTGAETEHSPSFSCSCFCCYTSYWVRWDESPNHQLIHEIIDAYEDSLSKKGNKGKKNGKGKKEKRNNKKGCSSTTTSSNHTHEHAHSSELKRSELASSPSRESAESEPVVEIHTNISGDESCEGVVVEEKGSVRRFMSFVGERIXGAWGQ

SEQ ID NO: 159326 - protein, 210 aa, Glycine max
  unsure (1)..(210): unsure at all Xaa locations
  Clone ID: PAT_MRT3847_114892C.1.pep
MKKLYHKGTVHPSPPLISDQLSLLPAAILXLAAALSPEDREVLSYLISCSSSTFSGYSRRKTAAETDHSPSFSCSCFCCYTGYWVRWDESPNRQLIHEIIDAYEDSLAQKGNKSKKNGKGKKEKRNNKKGCSTTTSTNHTHEHAHSSELKRSELESSPSRDSAESEPVVEIHTNNISGGESCEGVVVEEKGSVRRFMSFVGERIWGAWGQ

SEQ ID NO: 159327 - protein, 98 aa, Glycine max
  Clone ID: PAT_MRT3847_114893C.1.pep
NWRVLLIFRFRYQHYKLPLPRPIGISFTNIEVNLARRPHCPEGYDLFTRFSMSIMDIKDAEFNDRLKPIPPKALDQDETESLDTYETPRWEYSTTSGL

SEQ ID NO: 159328 - protein, 42 aa, Glycine max
  Clone ID: PAT_MRT3847_114894C.1.pep
KRLYYLFLREEENASLWSGYLVTKPSPTFRCANVFLRGKPHF

SEQ ID NO: 159329 - protein, 320 aa, Glycine max
  Clone ID: PAT_MRT3847_114895C.1.pep
MASIAGSNCVALRTANFGASGNRKIGQIRQWSPILTNLRPVSGLRHRSNTPFSSSGVRAQVATLEEAGTGATQKVEAPVAVVTGASRGIGKAIALSLGKAGCKVLVNYARSSKEAEEVSKEIEEFGGQALTFGGDVSNEDDVESMIKTAVDAWGTVDVLINNAGITRDGLLMRMKKSQWQDVIDLNLTGVFLCTQAAAKIMMKKKKGRIVNIASVVGLVGNVGQANYSAAKAGVIGLTKTVAKEYASRNITVNAVAPGFIASDMTAKLGQDIEKKILETIPLGRYGQPEEVAGLVEFLALNQAASYITGQVFTIDGGMVM

SEQ ID NO: 159330 - protein, 116 aa, Glycine max
  Clone ID: PAT_MRT3847_114896C.1.pep
RKGRIVNIASVVGLVGNVGQANYSAAKAGVIGLTKTVAKEYASRNITVNAVAPGFIASDMTAKLGQDIEKKILETIPLGRYGQPEEVAGLVEFLALNQAASYITGQVFTIDGGMVM

SEQ ID NO: 159331 - protein, 136 aa, Glycine max
  Clone ID: PAT_MRT3847_114897C.1.pep
MAFRGLGVLLVLLFVIGAGADDAKRDDDRAPKSESCNNPFQLVKVESWVDGEEGHVHNGVSARFGSVLPDKPDNSVRTPAIFANPIDCCSNSTSKLSGSVALCVRGGCDFTDNAYFAQSGAASAILVINDWSIHFV

SEQ ID NO: 159332 - protein, 80 aa, Glycine max
  Clone ID: PAT_MRT3847_114898C.1.pep
SQPEMENSETPSHHLKEEVTVKALTSPCGVVGGNWRTQDAHEILRRGKMVGLIRRHGIISGWCWEVTRFTLHTVKERTRG

SEQ ID NO: 159333 - protein, 97 aa, Glycine max
  Clone ID: PAT_MRT3847_114899C.1.pep
GGGPSPFPRGAPPLCQGFLEPGFPSPLAALFSPKRVPGRKVWGIKRGEHPGAGGPPHPVFWAAPEGRGPPNLGPLAPPPPFFKPPPIFWGAPRFGGF

SEQ ID NO: 159334 - protein, 78 aa, Glycine max
  Clone ID: PAT_MRT3847_11489C.1.pep
FKWDSEPVNKNPAGPLLELWANLSGPSCHCSLGIVAPRRFSSTFPLFIRRSFFYGSWMCTSIWKNPRQSLILFWKKHK

SEQ ID NO: 159335 - protein, 50 aa, Glycine max
  unsure (1)..(50): unsure at all Xaa locations
  Clone ID: PAT_MRT3847_1148C.1.pep
NALLVXLXSKEXXNKKKGNFWIYNXXXKNKFVTLDQKGGQGMRPFYXXTI

SEQ ID NO: 159336 - protein, 421 aa, Glycine max
  Clone ID: PAT_MRT3847_114900C.1.pep
MNDEEISIMNAVMNKLLGKQKVSNAKKLGEEKGSFESPDALHSDECEDSATDEDDLIINVETKKNKPALTGDEELQRILETQESWLNKTKIAKEEPNKSMPPVQKRSNSNHDKNKKRKSLPKLEVSTTPGSKSNMQMLPDEVGSGAQPTELEDDFGEKVSWSQKSSWRELLGDKGNTSFSASLILPKLDSGESQQRSDDQSTPVSTNSVRENMEWDGHLGSKPTNPHVIEELVEAQPTNKQVIEDVTNNKHNVAVAPNKTGRGSSWLQKQSWTQMVSQNNNSFSISNIFPGITFPEPMATEPIVEPAISNDCKHNGVAKDTVNVVCDGFNSRETIPGKSQHTSANDIASASVGEEKGETSPREKSTENVEIGETCSFMRSAASLKEWAKAKAAMSGSLKRKHGEKGEKEDRKVPIRRKYDG

SEQ ID NO: 159337 - protein, 300 aa, Glycine max
  Clone ID: PAT_MRT3847_114901C.1.pep
MAAEPTRPVKIIAAADDFGTPLKDALVAHLRTLNIQVEDLGTSSYYSAGAEVGRRVSQSSSSDIRGLVACGTGAGVSIFANKYPGVYAATCLSPSDAVNARSINNSNVLAVSGKYTSPEAAVEVLDAWLNTPFKSACPANDDKPWPQEIHSFLEHSLVEMPEIGKEGAFDTCAVCCLVKNRELNPIDLIPGGSMKILRETPTSAFVRFKAGSVEPAHHHTFGHDLVVIEGKKSVWNLTKEQRYDLTVGDYLFTPPGDVHRVKYHEDTEFFIKWDGHWDMFFDEDLDTAKNAIDKELGLAK

SEQ ID NO: 159338 - protein, 66 aa, Glycine max
  Clone ID: PAT_MRT3847_114902C.1.pep
PPIDSNDFLLITYLIYVLGLTLVALGYLSTHQKRTCPFNDPMKLYFSMIISSSSTNHWMNFTFTIV

SEQ ID NO: 159339 - protein, 90 aa, Glycine max
  Clone ID: PAT_MRT3847_114903C.1.pep
TQTPVLALLLLTLMVALGVVIWPKRTFQGRTRRCITLWKNRGRVWRGTRCGRPKMSKCTSLATMGGVFNVPRVFKRRVVMLAKRDTRDRW

SEQ ID NO: 159340 - protein, 63 aa, Glycine max
  Clone ID: PAT_MRT3847_114904C.1.pep
YPEASLSAAFKFITTHIWKQCVYVDSHHNFQMRHSFVIRPVSWELPPRREKLMAAQSQGSLFL

SEQ ID NO: 159341 - protein, 36 aa, Glycine max
  Clone ID: PAT_MRT3847_114905C.1.pep
IRYFYFKLSLVNQTKTNDIELNLYITIKMITFIRMN

SEQ ID NO: 159342 - protein, 81 aa, Glycine max
  Clone ID: PAT_MRT3847_114906C.1.pep
VTIMCYINILINHKANSSCKCSVANRSLFSSHSNCREFFVTEHKRMHALKSATLLLLVFTKAIYMLHMMMMMMIMHEQHHL

SEQ ID NO: 159343 - protein, 138 aa, Glycine max
  Clone ID: PAT_MRT3847_114907C.1.pep
QVVRLVLLPPPKSPFWKTLLFLCSTSLLLPDADAVQPIIPNPSSSSTTGTIPAFPEQAEAAGCPLNLSDDHYEAIKSACGSNKPDDDDLHRSRCCPVLAAWLYSAYSATALSASQGHTTSYDMPLLPDDSETCVSDLG

SEQ ID NO: 159344 - protein, 73 aa, Glycine max
  Clone ID: PAT_MRT3847_114908C.1.pep
RCHTGAQMNELNDRSSHTHTNTGRGHTSCTWKISGKRRNDFHQRDAAHRRKTPWEALPVCAIMANDVYILHRL

SEQ ID NO: 159345 - protein, 85 aa, Glycine max
  Clone ID: PAT_MRT3847_114909C.1.pep
PHTKWEEYSWLPLAQMLFKMEHTEVPLTYYTGFLGMPVATVFACLFEVGCFKKGQNVQVSAVSGAHQQLGGQCRQLNGCYVAGSA

SEQ ID NO: 159346 - protein, 117 aa, Glycine max
  Clone ID: PAT_MRT3847_11490C.1.pep
LCALAMFEDSVKKLKSPKTSPGPALSKDQVNSALDLLFDWFYETCGSVSLSMLEHRKFQAFLSQVGLPNNLRREISGERLDARFGEAKAESEARIKDAMFFQLASDGWKEGDWLNFD

SEQ ID NO: 159347 - protein, 43 aa, Glycine max
  Clone ID: PAT_MRT3847_114910C.1.pep
YKCFYFLLFTFWFSKKKSKELDTGIWNNIMILIFMNIIKNCKV

SEQ ID NO: 159348 - protein, 57 aa, Glycine max
  Clone ID: PAT_MRT3847_114911C.1.pep
LNTDKGTPFISVLEVRHFDHSSYRTNSKLLSLYKRFDIGSTTNEIVRLVSYLLAKPV

SEQ ID NO: 159349 - protein, 53 aa, Glycine max
  Clone ID: PAT_MRT3847_114912C.1.pep
DPQQQKLWKPSSMSLNESVLSLRPHLIMQPQSHRMVVLHLQAKTHQQANSHSP

SEQ ID NO: 159350 - protein, 61 aa, Glycine max
  Clone ID: PAT_MRT3847_114913C.1.pep
FYIGKIITYNFNPSYRGNKGHVLETLFFQERVPISERSCWTFLSIWHLEFENALMNLYETP

SEQ ID NO: 159351 - protein, 100 aa, Glycine max
  unsure (1)..(100): unsure at all Xaa locations
  Clone ID: PAT_MRT3847_114914C.1.pep
GIGLFLAFIGLQSNQGIGLIGYSASTLXXLGACPTSSRASLAPVLTAANGTVSLLPGGTVSGDILCLXDRMESPTLWLGLVGFIIIAYCLAKNIKGAMIY

SEQ ID NO: 159352 - protein, 78 aa, Glycine max
  Clone ID: PAT_MRT3847_114915C.1.pep
EENLPPPGEGHPLGCKAAICPRPGPPLGIGEIIEAPPIPRDPRIRVRSSFLCTSDVTFGKMEGIPSMFFLFERVKTLF

SEQ ID NO: 159353 - protein, 87 aa, Glycine max
  Clone ID: PAT_MRT3847_114916C.1.pep
SLKNEYANLGAMPPGQKDLSIENWMRGTKLCMVYQARRPWIVITKGFNYVCVTTESLCLSGRRLDVQWEQLWELHNEFVLLYMGLNG

SEQ ID NO: 159354 - protein, 184 aa, Glycine max
  unsure (1)..(184): unsure at all Xaa locations
  Clone ID: PAT_MRT3847_114917C.1.pep
ALPPFTGFISIDCGLEDEPNYTDETTSIYYSSDVNFTNSGVSHSISSKYKASLDRQFWNVRSFPDGTRNCYTLVVPQVSSKKYLVRARFAYGNYDGKDSLPEFDIYLGGSWWGSVVFQDASSVVTKXEIIYAASSNYAHVCLFTTATGTPLRPVIEHRGRHREAWEVRDGEHWGRADAGLEAGE

SEQ ID NO: 159355 - protein, 63 aa, Glycine max
  Clone ID: PAT_MRT3847_114918C.1.pep
GLMCGVFRQGFIFRDKDMFLVVIVPCTSCSRVIIAATKPYQIGLDLLGNSLLNYKSRAQGFNL

SEQ ID NO: 159356 - protein, 87 aa, Glycine max
  unsure (1)..(87): unsure at all Xaa locations
  Clone ID: PAT_MRT3847_114919C.1.pep
GPDRGEAGMVWLVKIQDRRFLREWQWSSVTGESLTQTGAAAAAQKGGFRRRXXRPVSGKVWLGSLFFLRSLFSIISFGSAPFCRSYR

SEQ ID NO: 159357 - protein, 76 aa, Glycine max
  Clone ID: PAT_MRT3847_11491C.1.pep
WEAGDVLHSNTLLYFWVHVLFRLVSSHSTYFFFFSPFTNVLLMCGKSTRYYLILSKFMWFTLLSMFHSMYFTYPIK

SEQ ID NO: 159358 - protein, 80 aa, Glycine max
  Clone ID: PAT_MRT3847_114920C.1.pep
YQLPCKVHSHASLYSRLDFKLDGTDSSQTNDAVLERRSNHGEENGIAQISPDQTQHEPEQPECLTNESNSFLVACFGLSR

SEQ ID NO: 159359 - protein, 130 aa, Glycine max
  Clone ID: PAT_MRT3847_114921C.1.pep
MMVDKQRYPTIEQKLAGQLHLRSNSNLSPHVGTCYERLKRPALFQQRFSLKNHSNAGLLCPLVPAWKATSHLHSVASAASPVLVPSPSEKNFASFATDFRVAGPSPAGSETPPAPCVRLLLLLHQPGALP

SEQ ID NO: 159360 - protein, 86 aa, Glycine max
  Clone ID: PAT_MRT3847_114922C.1.pep
FFFFFFFFFFFFFFFFFFFFFFFFFFWAKKNGKKLNPFPLVKKKKAKLSLRGGAGTYSLKKGPGKKRRAFGNNPPYENINQKQGFY

SEQ ID NO: 159361 - protein, 91 aa, Glycine max
  Clone ID: PAT_MRT3847_114923C.1.pep
MMVDKQRYPTIEQKLAGQLHLRSNSNLSPHVGTCYERLKRPALFQQRFSLKNHSNAGLLCPLVPAWKATSHLHSVASAASPVLVPSPSEKN

SEQ ID NO: 159362 - protein, 100 aa, Glycine max
  Clone ID: PAT_MRT3847_114924C.1.pep
GVLMNWSIIGTVVTPNFRPLVSENNYMDPLLLYKNHTGVGGNGPFFITSPGSLKPIRCFNKRLSYRSRCVFSRAQSPVCLKKSFSLNQTSQIYPPGAAPP

SEQ ID NO: 159363 - protein, 95 aa, Glycine max
  Clone ID: PAT_MRT3847_114925C.1.pep
SSKELRLSIPNWSFILLTNYPMIFKTQTIPPTDSIDLVEGISLLKTPTGMMFVLLFKILSNLVSHLFFNALPVTLSGSCIFKFIILGTVPSRNKN

SEQ ID NO: 159364 - protein, 81 aa, Glycine max
  Clone ID: PAT_MRT3847_114926C.1.pep
VLVSAKPQGKHPPGPINRGPKKSFPFAGKGFFSKKPFFFSGKQGRPPFSSQGGLRPPPPAKKTFKRGGLAPGQNFNEMKGP

SEQ ID NO: 159365 - protein, 190 aa, Glycine max
  Clone ID: PAT_MRT3847_114927C.1.pep
GLVGFCNNLAVENLAGIKFVVTSNMMLERRFLMAFLVFFVSNLVLTVFACTITALIAPTATGSGIPEVKAYLNGVDAPGIFTVQTLLVQIIGSITAVSSSLLIGKAGPMVHTGACVAALLGQGGSKRYGLTWKWLKFFKNDRDRRDLIICGSAAGIAAAFRAPVGGVLFALEGMSSWLVCHLLNITNFLL

SEQ ID NO: 159366 - protein, 55 aa, Glycine max
  unsure (1)..(55): unsure at all Xaa locations
  Clone ID: PAT_MRT3847_114928C.1.pep
YRVGKKVGIINXRPLVCLAHRFPVPVNPMVPQPLSGLVGKRPNNSPEDDGQRPSP

SEQ ID NO: 159367 - protein, 177 aa, Glycine max
  unsure (1)..(177): unsure at all Xaa locations
  Clone ID: PAT_MRT3847_114929C.1.pep
ARGKGSSRKTISYEDKPFNWRSRDPIYTNKLGKQFETTLERNPQLFDLDVHLSVVDMNEGALFLPHSNSKAIXVLVINEGEANIELVGIKEQQQGQEQEEQPLEVRKYRAEASEQDIFAIAAGRPAGVNATSDLHPFAWGMNAQNNQRNFLRRSKDHAISHIPSQAQELGCPRANKN

SEQ ID NO: 159368 - protein, 66 aa, Glycine max
  Clone ID: PAT_MRT3847_11492C.1.pep
PTYMFWLVLLAAGHMIPLCDITQFFASRGHHVTIITTPSNAQILHQSKNLRVHTFEFPSQEAGLPD

SEQ ID NO: 159369 - protein, 59 aa, Glycine max
  Clone ID: PAT_MRT3847_114930C.1.pep
ITNTINICCSEQENTSLNFFFFNLSILFGRRFRYLTAIYFYKSLTKWVPRITPHPYNNG

SEQ ID NO: 159370 - protein, 88 aa, Glycine max
  unsure (1)..(88): unsure at all Xaa locations
  Clone ID: PAT_MRT3847_114931C.1.pep
TDXXKRRIXLNXXXGXIPGXKAXQTSRAXLRSVSPLXXHVPNCTTEDXXRICHQXFAARGRGAXPTXGGSLPTCTLXGGGLLSSKLLL

SEQ ID NO: 159371 - protein, 39 aa, Glycine max
  Clone ID: PAT_MRT3847_114932C.1.pep
KKKKKKKKKKKIKKKKKKKKKKKKKKKKKKKKKKKYPHF

SEQ ID NO: 159372 - protein, 128 aa, Glycine max
  Clone ID: PAT_MRT3847_114933C.1.pep
MAFLDVRKKIMGRVWTWTMALMLCLMAASVRSEDPYIYYTWKVTYGTIAPMGVPQQGILINGQFPGPEINSTSNNNVVINVFNNLDEPLLFTWHGVQHRKNSWQDGTLGVQCPIAPGTNYTYHFQVKD

SEQ ID NO: 159373 - protein, 116 aa, Glycine max
  unsure (1)..(116): unsure at all Xaa locations
  Clone ID: PAT_MRT3847_114934C.1.pep
TTSSNYTNLFLSLQTRLLANHPKHIYXNNPLYVNPKLLQINPXFYTSXNYTKLSVQHLLSNSYSHPYSILHHQLKLLEITLKKNFNSYSTFHNKKCVLNKTHSFIHNEILLLNCFQ

SEQ ID NO: 159374 - protein, 221 aa, Glycine max
  Clone ID: PAT_MRT3847_114935C.1.pep
MSQLNGAYYGPSIPPPKTSYHRPGRGGGLGCCCGCLFSLIFKLILTVIIIIGIAVFLFWLIVRPNVVKFHVTEATLTQFNYTPNNTLHYDLALNITVRNPNKRLGIYYDRIEARAMFHDARFDSQFPEPFYQGHKSTNVLNPVFKGQQLVPLNADQSAELKKENATGVYEIDVKMYLRVRFKLGVFKTKTLKPKVSCDLRVPLKGSAGAGVFQTTKCDWDR

SEQ ID NO: 159375 - protein, 62 aa, Glycine max
  Clone ID: PAT_MRT3847_114936C.1.pep
CDENISLCVLLRYKFGAGQCHAYEQCSLRFLTDYKVPILNVLCADYGHVVGVHINTRVSTTL

SEQ ID NO: 159376 - protein, 203 aa, Glycine max
  Clone ID: PAT_MRT3847_114937C.1.pep
GGSIFYYYTQWTFTSITIYFGLGSLLSIYGCYQHHKKATGDKVGNVDGDAEQGMYDASALPQSSNPFDPEKSLGDPEEVLVRQHAGIWGYTFQIIFQINAGAVMLTDCVFWFIIVPFLTIKDYNLNFLIVIMHSINAVFLIGDTALNCLRFPWFRIGYFCLWTITYVLFQWIVHACIYLWYKVFNSVVILKFIILSRHLIHLI

SEQ ID NO: 159377 - protein, 58 aa, Glycine max
  Clone ID: PAT_MRT3847_114938C.1.pep
EEEKKKGCHLGQSKRRVSDRDNSNLYKTKMLFFHGFTHLIIKLSCTVFNIYRSLSITP

SEQ ID NO: 159378 - protein, 200 aa, Glycine max
  unsure (1)..(200): unsure at all Xaa locations
  Clone ID: PAT_MRT3847_114939C.1.pep
HALSNAKHDSTVAVTDYPVKGVKVKXRCDFSAVCVVELVGAETLNKNQSSSKFILVKRPEEGLLAGLWEFPSVLLDGEAVPLARREAMDRFLEKNLKIDIRKTCNIVLREDIGEFVHIFSHIRLKLYVELLVLQLKGVDDLFKSPDNKTTWKCVYSNALSSMGLTTSVRKVYNMVQNFKQKTLPSSHVPTKKRTRTTTRN

SEQ ID NO: 159379 - protein, 156 aa, Glycine max
  Clone ID: PAT_MRT3847_11493C.1.pep
KKKSGNDGMGLHPHYRYRTQNFSPRFIIFSMKEHTYTPFTQDPQRSPWDFYSPNPRKKRRGGKPPPPKRKGLYKIRGPNPRGKKKISKNLVSPTKGGKNTFNPTGTTGRGGGPLGNLDTRGEPRALEDLAPSSRGFKGTPKAIGGSGETKRGGKET

SEQ ID NO: 159380 - protein, 77 aa, Glycine max
  Clone ID: PAT_MRT3847_114940C.1.pep
FLQYSSLHSTIINYYDLLILPTNINTYLILKYLDKNNNLILTILYNQYLAKLAQFAHYQAHFQKNLMYLASIAYDQP

SEQ ID NO: 159381 - protein, 278 aa, Glycine max
  Clone ID: PAT_MRT3847_114941C.1.pep
MHMNTYSEATTSQPMPPTMDEDLENNTEDCNNAMTPMVRKKSELVVVTNNDSRFQMLRNFMTNLQEVIFGTKLVVLFPAVPLAVVANFYSFGRPWIFAFSLLGLAPLAERVSFLTEQIAYFTGPTVGGLLNATCGNATEMIIALLALHQNKVHVVKLSLLGSILSNLLLVLGSSLLCGGLANLKREQRYDRKQADVNSLLLLLGLLCHLLPLLFKYALGGGNHSIATSTLQLSRASSIVMLLAYVAYIFFVLKTNTEPRLKDQLQRWTFLFMVEIMCL

SEQ ID NO: 159382 - protein, 244 aa, Glycine max
  Clone ID: PAT_MRT3847_114942C.1.pep
NSARVGLLCHLLPLLFKYALGGGDHSIATSTLQLSRASSVVMLLAYAAYIFFQLKTHRKLFDAQEVDEDEEKAVIGFWSAFTWLVGMTLVISLLSEYVVGTIEAASDSWGISVSFISIILLPIVGNAAEHAGSIIFAYKNKLDISLGVAMGSATQISMFVVPLSVVVAWIMGIRMDLDFSLLETGCLAFTIIITAFTLQDGTSHYMKGVILTLCYIVIGACFFVLKTPLIGQSPKASFGAKTIL

SEQ ID NO: 159383 - protein, 71 aa, Glycine max
  unsure (1)..(71): unsure at all Xaa locations
  Clone ID: PAT_MRT3847_114943C.1.pep
KAGNSVRARSVKRFPLAIGGGAGAKMATHKNMPNAALSMRRCXVGDLFFETHKTTSHYIKCTTYNFIASWN

SEQ ID NO: 159384 - protein, 227 aa, Glycine max
  Clone ID: PAT_MRT3847_114944C.1.pep
MEFKGSVFIKLLLLLHFFSVLCASQDFDFFYFVQQWPGSYCDTQKSCCYPTKGKPAADFGIHGLWPNYNDGKYPSYCDPNNPFDPSGISDLTSSLESNWPTLACPSGDGIEFWTHEWDIHGTCSESVLKQHDYFEAALNLKQKANLLQALTSAGIQADGQSYSLSEIKGAIEGAIGFTPFIECNVDSSGNSQLYQVYLCVNTSGSDFIECPVFPRGKCGSDIEFPSF

SEQ ID NO: 159385 - protein, 146 aa, Glycine max
  unsure (1)..(146): unsure at all Xaa locations
  Clone ID: PAT_MRT3847_114945C.1.pep
QHAIGYVTGDQYYGSKASINVWAPLVENPYEFSLSQMWVISGSFGDDLNTIEAGWQXPELYGDSYPRFFTYWTTDAYQATGCYNLLCSGFVQTNSKIAIGAAISPTSSYSGGQFDISLLIWKDPKHGNWWLEFGSGILVGYWPSFL

SEQ ID NO: 159386 - protein, 57 aa, Glycine max
  Clone ID: PAT_MRT3847_114946C.1.pep
TAEIQQAFYSLPLHNNQTPTPDLTWRVFGFPVERAPTYVQRNNPFFIFALNVHLEGL

SEQ ID NO: 159387 - protein, 124 aa, Glycine max
  unsure (1)..(124): unsure at all Xaa locations
  Clone ID: PAT_MRT3847_114947C.1.pep
LLRLFWINGIQRFIYARRACIYPEIRQWATNGSXNEPDAWSADPQEAYGLEKTATEESCKHYNTDPGIECRIGRIHNIYCPFGTWKGGRENAAAACXLNVITHSDRWEMRGDRQHTRSVTYIDE

SEQ ID NO: 159388 - protein, 108 aa, Glycine max
  unsure (1)..(108): unsure at all Xaa locations
  Clone ID: PAT_MRT3847_114948C.1.pep
LEGVVLVHPFFWGEESFGCEANRPEQAKKMHDLWRFVXPIVNPSKDPKLGKVACERLLLCVAEKDLVRDRGLFYKELLEKNGCSGVAEXVETKDEDHVFHLLLCFIFV

SEQ ID NO: 159389 - protein, 64 aa, Glycine max
  Clone ID: PAT_MRT3847_114949C.1.pep
IHNLFNRHSYRLLTVRLGLLAFWGLDSFRSDVMADLVTSVYARLTTALTEFASLFSGKTRYAVL

SEQ ID NO: 159390 - protein, 69 aa, Glycine max
  Clone ID: PAT_MRT3847_11494C.1.pep
ANFGLIVLKNLLRESSNISYSQQHLKLIIKCLYHYQNHVPAARIFPALRSCKVGYHVECKIVHLRVLNN

SEQ ID NO: 159391 - protein, 57 aa, Glycine max
  Clone ID: PAT_MRT3847_114950C.1.pep
LIGANGWKLPTTTTPASVTSAPTRSSYTSSAKAAGSPLDAMFFASLIPYYVLRFMWI

SEQ ID NO: 159392 - protein, 442 aa, Glycine max
  unsure (1)..(442): unsure at all Xaa locations
  Clone ID: PAT_MRT3847_114951C.1.pep
MASDADMEDYGFEYSDEEQEEQDVDIENQYYNSKGLVESDPEGALAGFAEVVRMEXEKAEWGFKALKQTVKLYYRLGRYKEMMEAYREMLTYMIKSAVTRNXSEKCINTHYGLCQTSGSASQNFGLLQEFYQTTLKALEEAKNERLWFKTNLKLCKIFFDIGEYGRMSKILKELHKSCQREDGTDDHKKGTQLLEVYAIEIQMYTEMKHNKKLKQLYQKALTIKSAIPHPRIMGIIHECGGKMHMAERQWAEAATDFFEAFKNYDEAGNHSRIQCLKYLVLGNMLMESEVNPFDGQEAKPYKNDPEILAMTNLIAAYQRNEILEFEKILKSNRRTIMDDPFIRNYXEDLLKNIRTQVLLKLIKPYTRIRIPFISKELNVPEHDVEQLLVSLILDNRIQGHIDQVNRLLERSDRSKGMKKYTAVDKWNTQLKSLYQTISNRVG

SEQ ID NO: 159393 - protein, 79 aa, Glycine max
  unsure (1)..(79): unsure at all Xaa locations
  Clone ID: PAT_MRT3847_114952C.1.pep
KFTYAILISFLHLIPLNLYQIKQGMTRLAXYYIPLYDFXKHKVQYHVHPLDYNTYPKYTNYVXSRTHKIIYKRKSDVFL

SEQ ID NO: 159394 - protein, 138 aa, Glycine max
  Clone ID: PAT_MRT3847_114953C.1.pep
LATIIYAARFVECETGCSLLSTRTEKDRCCSRRILLAPDIRITRIPVPQKKSLRIRDANERMMLALTILLGHDEERRLSSEVRGGPLKCDHLLRNCFRAGPAQGVQLEDHTMQIYNLLLVAHGPLMCPDGNATQIKER

SEQ ID NO: 159395 - protein, 96 aa, Glycine max
  Clone ID: PAT_MRT3847_114954C.1.pep
FKAPRKRLSAEMDPTTLIRIFKSININMFCKDALHNVYIIHQAKIQLHKLSQSLHQMLHFISYLAVLHIEETLFIIEMSHIFECLSLNLMRRFQCF

SEQ ID NO: 159396 - protein, 64 aa, Glycine max
  Clone ID: PAT_MRT3847_114955C.1.pep
TNHIKIIIFLLPMKTWFLLFSYSKVFLSHTNKTSKPNSLFSLSLSSLEHNKTGLFKLSRRNKCY

SEQ ID NO: 159397 - protein, 79 aa, Glycine max
  Clone ID: PAT_MRT3847_114956C.1.pep
LTISCTFLYIFILQADVLKVFPDEVTIVLFYNVTSTVMSTLVALFAVPNANAWKVGLNISLISIICTVRYLSKLTAAAL

SEQ ID NO: 159398 - protein, 66 aa, Glycine max
  Clone ID: PAT_MRT3847_114957C.1.pep
FSWFILHTIFLLHFTHFYIFHSILLGGFLTGKTYHTLYKKTTSILPHHISQYTLSPLILFFNTLYT

SEQ ID NO: 159399 - protein, 51 aa, Glycine max
  Clone ID: PAT_MRT3847_114958C.1.pep
DLVYHPMGMSMMITIVCNPSIKSGINSEKMDSHCLICTQAFQNPVAYEYFQ

SEQ ID NO: 159400 - protein, 131 aa, Glycine max
  Clone ID: PAT_MRT3847_114959C.1.pep
QLPSKRKNAGESGFLDSDGDLRLVGRIKELINRGGEKISPIEVEAVLLSHPDIAQAVAFGVPDDKYGEQINCAIIPKEGSNIDEAEVQRFSKKNLAAFKVPKKVFFTDSLPKTATGKILRRLVAEHFVSQT

SEQ ID NO: 159401 - protein, 64 aa, Glycine max
  unsure (1)..(64): unsure at all Xaa locations
  Clone ID: PAT_MRT3847_11495C.1.pep
LNDLVKVGESLLKKPVSKINLQTGVHEPVNSHETXNGEALKRFAERLSKQRRFRKSQMSANGNL

SEQ ID NO: 159402 - protein, 299 aa, Glycine max
  unsure (1)..(299): unsure at all Xaa locations
  Clone ID: PAT_MRT3847_114960C.1.pep
MELEMEKKKKKNKMLGGEKEIFMPSTKEKKSRGASSGVALKNLVPCLVEALGSEDWATNNGAAEALNXLASVEKDLLPEFKGGCLKVFENRRFDKVKLVREVMNEMLEAWKQIPDVSDEFSPPPQSQLSSKENACDGRYPPVSQNSCSPGSVMSKLRKKSSQVSKSTPPDTSAVRNAKRSALSGDRMSSGVLQKLNHNHWDVRIAVSNVSDCGERQQKDEDVLERRKKDRSRFFKPETKRALFDKNSDDKMHKFGGSKAGSRVVPCSEESQDSDPVCNVTKDLHRNDKESEELSLIRAH

SEQ ID NO: 159403 - protein, 66 aa, Glycine max
  Clone ID: PAT_MRT3847_114961C.1.pep
GARRAAHSNSLPPGPHRLESPTTTSTRRSGPPDYATSLWLRPDPMLPSLNHTQAEVDLADLSSRGA

SEQ ID NO: 159404 - protein, 45 aa, Glycine max
  Clone ID: PAT_MRT3847_114962C.1.pep
FFRMPVRHASWGSLIEASLGATPDDRVIFWSRGFLLARRLMGKKT

SEQ ID NO: 159405 - protein, 78 aa, Glycine max
  Clone ID: PAT_MRT3847_114963C.1.pep
RFIAVLVAQTKLSWFSSSIGAEGIYPISTKSPSRSIWKVFVHLPEMGTLLALVNSATVVCLLPRVMVYVHFNIIASFL

SEQ ID NO: 159406 - protein, 50 aa, Glycine max
  Clone ID: PAT_MRT3847_114964C.1.pep
NAAREELICDVPYFVYKFKFLTITPIFGYDYFSLYEKGTLQFVLNSQNFD

SEQ ID NO: 159407 - protein, 73 aa, Glycine max
  Clone ID: PAT_MRT3847_114965C.1.pep
MGSTRIVFLCLLWQGLITLVVVVEFIIGIVKMHNLCSCSMVWNQSSSLKEWVTYHSFLGEERRFIYKLSIQDF

SEQ ID NO: 159408 - protein, 65 aa, Glycine max
  unsure (1)..(65): unsure at all Xaa locations
  Clone ID: PAT_MRT3847_114966C.1.pep
VRXIPXVDPRVRKVTVSLFTLHSSLIHSLCCELCEHQHGVSDSVMFLFYRVDRWGVSDPVCRGCR

SEQ ID NO: 159409 - protein, 75 aa, Glycine max
  unsure (1)..(75): unsure at all Xaa locations
  Clone ID: PAT_MRT3847_114967C.1.pep
KKKAISLIYTKQPGMGQGIKKPGTLPAKTINLEQTIQFNRQLWAFLRPTTQRVWEKKLKIFGGGGAKPNPTFELX

SEQ ID NO: 159410 - protein, 158 aa, Glycine max
  Clone ID: PAT_MRT3847_114968C.1.pep
NGGRTSLPFSLCVWVGRGSRTMRSDAALEAIAKASEDRVPNIVLYNYPSFSGAFSALFAHLFHTRHNLPSLILPFSAVPLLALRVEDLCFEGLETCYLLDFIPPKEFLSDLSRKSKCKIIGFDHRKLVLRHIPPANDCPDNIMINVNLEKSSSSAVYE

SEQ ID NO: 159411 - protein, 38 aa, Glycine max
  Clone ID: PAT_MRT3847_114969C.1.pep
KHPILQSFCRTNQNSPSKLSPYPILVLPIKLSTQLKGP

SEQ ID NO: 159412 - protein, 144 aa, Glycine max
  Clone ID: PAT_MRT3847_11496C.1.pep
MEAPPKGAAGRRGDRKKSVSKSIKAGLQFPVSRVARYLKKGRYSRRLGTGAPIYLAAVLEYLAAEVLELAGNAARDNKKNRINPRHVLLAVRNDDELGKLLQGVTIASGGVLPNINPVLLPKKSTTAPSEKSSTPKSPKSPKKK

SEQ ID NO: 159413 - protein, 69 aa, Glycine max
  Clone ID: PAT_MRT3847_114970C.1.pep
LCLLDMTMLQDSCSCGSLSGYSIWINWHDEDAHANTENDMEKDTDRRLHSEIMEILLSEYIILCQRPVT

SEQ ID NO: 159414 - protein, 121 aa, Glycine max
  unsure (1)..(121): unsure at all Xaa locations
  Clone ID: PAT_MRT3847_114971C.1.pep
MRGWERMQSVYLNKNKTDRDIXNLAHSVENKSLCNEQLACRTYVGNEYGINSMHSYFLDDGXTHTEELRYPSKKKRDGWVSPPADSLPSNERDINGPLSRKNISNLLADQTSAHTQEVINK

SEQ ID NO: 159415 - protein, 141 aa, Glycine max
  Clone ID: PAT_MRT3847_114972C.1.pep
FHKLYCLELDYCLYFLLHLILKLKSSKDFHVAPLLFNLLNLLNISNLQTKTHVCLITNYCPGGELFLLLDRQPTKVLKEDAVRFYAAEVVIALEYLHCQGIIYRDLKPENVLLKSNGHVSLTDFDLSCLTFSKPQLIISAP

SEQ ID NO: 159416 - protein, 40 aa, Glycine max
  Clone ID: PAT_MRT3847_114973C.1.pep
LLSRSTNCSNYDKQDKLVNKLYCDTWLAESLVKSTHTVKT

SEQ ID NO: 159417 - protein, 96 aa, Glycine max
  Clone ID: PAT_MRT3847_114974C.1.pep
KKSSNKNANEGLFARLIRVFVCVIIAPTKEAAPIGSFFFFCPIFGSMLLAFHLAVLGGGGFSPPPPAFFVSCVVSKPPQFFFFSYANTKNNKKKKN

SEQ ID NO: 159418 - protein, 55 aa, Glycine max
  Clone ID: PAT_MRT3847_114975C.1.pep
FLPKPIFFLWLECLTILSLAPWDLFFGSYSPLTNSFTTVVNVFFKFRLWFNILVL

SEQ ID NO: 159419 - protein, 69 aa, Glycine max
  Clone ID: PAT_MRT3847_114976C.1.pep
KYLYCTKINICKCITSIIKINLQILLHQRHSLRQIYCRGPVLKIIYGLGSVLKVLTEGVCYLGGICHSH

SEQ ID NO: 159420 - protein, 49 aa, Glycine max
  unsure (1)..(49): unsure at all Xaa locations
  Clone ID: PAT_MRT3847_114977C.1.pep
NLKNYLSXKVLMCSTTLIREIIFKLYLWELVLKRGSTFPKGEQRWSQNW

SEQ ID NO: 159421 - protein, 84 aa, Glycine max
  unsure (1)..(84): unsure at all Xaa locations
  Clone ID: PAT_MRT3847_114978C.1.pep
TTYRTTIQGAVSASSFVNMILMCIKTCXNLTTEVSPIIIIPLESNDSLLLSARIXPLVAQCVQIALPMLILLYITQQHLSLLHH

SEQ ID NO: 159422 - protein, 199 aa, Glycine max
  Clone ID: PAT_MRT3847_114979C.1.pep
MVGGVSVAVESQSCPRWCVDALPTTPSMSVLCLKRKHLLSLTTSFVQSHSVNTIFNKHCRHKEKTKRLTIVNELGGQYEDTFHDVKKQILNYFTYKAVRTVLQQLYEMNPPQYRWFYNFVATNDPADGKHFIRSLAKEQHQLAERVMITRLHLYGKWIKKCNHAEIYQEISDENLELMRERLMETVIWPSDDTNTEKIG

SEQ ID NO: 159423 - protein, 48 aa, Glycine max
  Clone ID: PAT_MRT3847_11497C.1.pep
RGSRGRWRAGVGDYIIGSTGSGGLTGLRWRHFRGQSGGGGGGGGGGGR

SEQ ID NO: 159424 - protein, 106 aa, Glycine max
  Clone ID: PAT_MRT3847_114980C.1.pep
QHFCSNTPRASPAFSILFSFILIALHQNLPTPQLFIYLSHFFSHTFSQTHGVLTPSLHSSLNNPTKFASNLNHGPRNAPREGQNRHIKQHRLGPAEAPEEEAFFQS

SEQ ID NO: 159425 - protein, 47 aa, Glycine max
  Clone ID: PAT_MRT3847_114981C.1.pep
QSSVAGISWSISLMTTSQTITRGIRIQRPVLAMSDIIEVTIYKTSLP

SEQ ID NO: 159426 - protein, 90 aa, Glycine max
  Clone ID: PAT_MRT3847_114982C.1.pep
GLDSRAIVQVSKTIGEPEPMTVLANTYAPGKIPAKAILSIVKESFTFGRGIYPFNLDLKTGGNGRFLKNPAFANFGRDVPHFPWEVVKPL

SEQ ID NO: 159427 - protein, 54 aa, Glycine max
  Clone ID: PAT_MRT3847_114983C.1.pep
LFLLLCNPQLQSSNCPRLSFFLLFFRGVGTQFLVYLLNNGLAFLVSLKSKLKFF

SEQ ID NO: 159428 - protein, 223 aa, Glycine max
  Clone ID: PAT_MRT3847_114984C.1.pep
IRLEAHRLGQTKDVTVYRLICKETVEEKILLRASQKSTVQNLVMTGGSVGGDLLAPEDVVSLLLDDVQLEQKLKEIPLQVKDKQKKKQPMRGIRVNEDGDASMEDLTSSVAQGTSDNDLSMDPEGSKSSNKKRKAFSDKPTSRPMNSQKMSEFSTTPMDDELDVVDPVGQKPKRPKRIKKNVNEKFEDAFTGIAALIPEQTQFPPPPSDFSAGGSKAESGQDN

SEQ ID NO: 159429 - protein, 313 aa, Glycine max
  unsure (1)..(313): unsure at all Xaa locations
  Clone ID: PAT_MRT3847_114985C.1.pep
MEDGEIEEGSIGGVEEEEQSPEPHKSEESPYEMLRNSKASVESIVADMLSIKKEGKPKQLLRDLVTQMFLHFITLRQANRSILLEEDRVKTETERAKAPVDFTTLQLHNLMYEKSHYVKAIKACNDFKSKYPDIDLVPEEDFFRDAPQDIQDSVLSNDAAHNLMLRRLNFELFQRKELCKLHEKLEQQKKILLETIANRKKFLTSLPSHLKSLKKASLPVQNQLGLHHTKKLKQHHSAELLPPGLYVIYSQLLAQKEAFGEPIDLEIIGSLKDAQAAVPQQAHKDTDIADKXETQRPPDDAPDEEKPVRRGDY

SEQ ID NO: 159430 - protein, 144 aa, Glycine max
  Clone ID: PAT_MRT3847_114986C.1.pep
RSLRSFTFPVLAFILLYSKLPHKELRFIISSVPIFNLSASIASNRIYNNKKKMVWNLLFLILLGLLLMSLAGTVTSFMASYWNYPSGHALKKLHGIGFHNDTDERWVHIDTFSAMNGISRFCESDFPWRYILLLSLQANDASSW

SEQ ID NO: 159431 - protein, 108 aa, Glycine max
  unsure (1)..(108): unsure at all Xaa locations
  Clone ID: PAT_MRT3847_114987C.1.pep
VLNRMAGKLTLTQGTSRXVKRMRLSIRGGAAALIVSVIXMPKADLSLWIYIVQELVYVANNNTCPYIRXSVSLFIEFVNMAEDTINFEAPSHKVVLFGENQEKAGLKF

SEQ ID NO: 159432 - protein, 400 aa, Glycine max
  unsure (1)..(400): unsure at all Xaa locations
  Clone ID: PAT_MRT3847_114988C.1.pep
FGSRKAGILELDKIIGFKLSPDCLEVRARMFIALKDYGSAIKDIRALLTLEPNYITSNEKISGKYLVHLLSHVVQQKSQAECWMQLYEQWSSVDDVGSLAIIHQMLENEPGKSLLEFRQSLLLLRLNCQKAAMRSLRMARNHSSSLQERLIYEGWILYDTGYRDEALARVDRSITIQRSFEAYFLKAYVLADTSMDPESASYVIELLEEALKCPSXCLRNGQVLDMGSSGSIYVDCGNLDLAEACYENALAIRHTRAHQGLARVYHQKNQRKAAYDEMTKLIEKAESNASAYEKRSEYCDREMAKVDLDVATQLDPLKTYPYRYRAAVMMDEQKESEAVDELTKAINFKPDLQMLHLRAAFYEAXSELSSALQDCQAALCLDPNHTDTLDLYQRARKLSF

SEQ ID NO: 159433 - protein, 43 aa, Glycine max
  Clone ID: PAT_MRT3847_114989C.1.pep
VFFRHCHNLNWQKRQHITMAKYTRFTASHHALEVLTINTSVPP

SEQ ID NO: 159434 - protein, 43 aa, Glycine max
  Clone ID: PAT_MRT3847_11498C.1.pep
FRPGLKWRPEITKTANSWLPPSNLKTQICIQGSLPVQKIYIYL

SEQ ID NO: 159435 - protein, 91 aa, Glycine max
  Clone ID: PAT_MRT3847_114990C.1.pep
TRPLFITFSNLLHFISSFLSLSFGTPLFSLPRLVFHHLIVLSPFSLISLHFLFSFFQIRASFSHVRNKGFVFGLVCKYDGISSHKVRPFCS

SEQ ID NO: 159436 - protein, 77 aa, Glycine max
  Clone ID: PAT_MRT3847_114991C.1.pep
GHPPVTFAIAACETQNVNVSGLPCCGLSDGSSTTAKGMWSKMVKDGQFYQENFNSGPSMPSSPGETLCAAVAASMWV

SEQ ID NO: 159437 - protein, 85 aa, Glycine max
  Clone ID: PAT_MRT3847_114992C.1.pep
LTTLLSSFFFLFEKYAKSYTGAWGCLDHSYIYKFLTNIFIHITYIYYIFSIKHHFINTLISKLIILSILLHCYIKLSKSHMYTNS

SEQ ID NO: 159438 - protein, 44 aa, Glycine max
  Clone ID: PAT_MRT3847_114993C.1.pep
KKGKLWAQLYSRLAKGEKPFFTLKGAKNPKFKEGGPGSFTFGFF

SEQ ID NO: 159439 - protein, 93 aa, Glycine max
  Clone ID: PAT_MRT3847_114994C.1.pep
HVSGQKRTHIPSNCSCNMRCVVPTVVLKCVVDEWSNQSSGPLSFCIGDPVHSAVLIIFLGNSEHFENAGHNVKEAGYVLKDIVRSSEQAGSYA

SEQ ID NO: 159440 - protein, 71 aa, Glycine max
  Clone ID: PAT_MRT3847_114995C.1.pep
VFPTALDTFTHNITFLLNKWYAITLSELFWLSIIQLNSDAVAKPRFYGFLGAHLRKHPQRYFKIADSRNVL

SEQ ID NO: 159441 - protein, 60 aa, Glycine max
  Clone ID: PAT_MRT3847_114996C.1.pep
LFAWGLPRTALEPWCTGQRRLWSMDTTEGPETRRSDRQDIPRMRSCRLCNRMIIHKFSTT

SEQ ID NO: 159442 - protein, 201 aa, Glycine max
  Clone ID: PAT_MRT3847_114997C.1.pep
ADPEEMGLKDLVKPHVYDILTPLACAIVSSHGNDHVNSYVLADSSLFVYGYNTIILTCVTTKLLLAIPPILKVAEVLSLNVRSVNYTARTYIFPGAHAYPHLNYSDEVAILDGYYGKIMAGSNAYIMCGQYSAPNWYVYSASADSATPSYNADTLKKSMTGLYREQAPASDNKPAASAVIMTVNYGNIRNLPYAESCDSDY

SEQ ID NO: 159443 - protein, 61 aa, Glycine max
  Clone ID: PAT_MRT3847_114998C.1.pep
SLMLGLLHYWGLLITSNFVILLYGCFRDFAIQLVSLGRCRTFSGEIVTLFGQGNLNTQEVF

SEQ ID NO: 159444 - protein, 84 aa, Glycine max
  Clone ID: PAT_MRT3847_114999C.1.pep
LPMEAAATATATVLTPPSAPPRPSVFLGRPSALAFRSNLRFSTKLSTSVSFSKQGHARHRVGSKRGFVVRAASFTPESSEPSSK

SEQ ID NO: 159445 - protein, 104 aa, Glycine max
  Clone ID: PAT_MRT3847_11499C.1.pep
GLVGVNQDWEKDFPKDPSGSFDQFKNFIRSNYEMCKWVGLSLVSVQGLSLLLAMILKALGPRHYYDSDDEYAPDRVPLLKNAPPHYVVDPGYAHGNDTWRRQEK

SEQ ID NO: 159446 - protein, 79 aa, Glycine max
  unsure (1)..(79): unsure at all Xaa locations
  Clone ID: PAT_MRT3847_1149C.1.pep
FNAEASHTSEIYFPHWIHNRIEKGEYLRHNXVMAPENNLIVNRISVVGLWCVRSFLKDRXTMIRVVDMLEGKINSLVIP

SEQ ID NO: 159447 - protein, 351 aa, Glycine max
  Clone ID: PAT_MRT3847_114C.1.pep
KTYFNILIKPETLAKDVRLLILEYSRWSMIDKYQALMDGLSLDSLLNFVKEFKSQLFVEGLVQGNVTSTESMDFLKYVVDKLNFAPLEREMPVQFQVVELPSGHHLCKVRALNKGDANSEVTVYYQSGTRSLREYTLMELLVMHMEEPCFDFLRTKQTLGYHVYPTCRNTSGILGFSVTVGTQATKYNSETVDKKIEEFLSSFEEKIENLTEDAFNTQVTALIKLKECEDTHLGEEVDRNWNEVVTQQYLFDRLAHEIEALKSFSKSDLVSWFKAHRGPGSKMLSVHVVGYGKYELEEDGAPFGEDSNSREGMQLTYLPPSPVLAESTTPITDIRAFTATLSLFPYHKIVK

SEQ ID NO: 159448 - protein, 61 aa, Glycine max
  unsure (1)..(61): unsure at all Xaa locations
  Clone ID: PAT_MRT3847_115000C.1.pep
XXXYCTISITTNXXLIMXXFTXSYNXSXLDPEWYIYTXLXNAIAXDKILLPXSILXGESAQ

SEQ ID NO: 159449 - protein, 100 aa, Glycine max
  unsure (1)..(100): unsure at all Xaa locations
  Clone ID: PAT_MRT3847_115001C.1.pep
MVAGRFVNAYSRNDWMLGXLAFRASLLSQGLAGIQPVDVSGIQNVDVTDHIEGHSSYLWATEQVLDELELDTYYPVYNNIPKKHTVSLSSESGSPTISQR

SEQ ID NO: 159450 - protein, 38 aa, Glycine max
  Clone ID: PAT_MRT3847_115002C.1.pep
VADALAGEHAHHELVIGPAIEPPLEIAEDALAMCVDVA

SEQ ID NO: 159451 - protein, 77 aa, Glycine max
  Clone ID: PAT_MRT3847_115003C.1.pep
SHLLTKGPTHILEYRMIIIKGLAWQLLLVCQAIKVQEAPMVHSCLSLLMCPYFLIDNPNMAPTLVILSVLLGKILHL

SEQ ID NO: 159452 - protein, 51 aa, Glycine max
  Clone ID: PAT_MRT3847_115004C.1.pep
SHQVLITNLFTTKTHVHNFTSHYVTINHLMFTCISQFTTFNFALKLNLHNN

SEQ ID NO: 159453 - protein, 72 aa, Glycine max
  Clone ID: PAT_MRT3847_115005C.1.pep
ITFYFFNLKDSYWWCLNHSTKGRSHKWSRRQVHLMRPTLDTNQLINLLHSLNLVKVELNRLENEVRVCENEN

SEQ ID NO: 159454 - protein, 133 aa, Glycine max
  Clone ID: PAT_MRT3847_115006C.1.pep
MKNTERIANLAVAGLTLAPLIVKVDSNVNVILTACLTVYVGCYRSVKPTPPTETMSNEHAMRFPFVGSAMLLSLFLLFKFLSKDLVNAVLTGYFFLLGIVALSATLLSSVKRFLPKHWNEDPIVWRFPYFSSL

SEQ ID NO: 159455 - protein, 73 aa, Glycine max
  Clone ID: PAT_MRT3847_115007C.1.pep
GAKHWNFGGIIKKPLYGKGSGGLHWRQHHFKKRKMGNGFFNGFTCGKISKITGRGDFHLTNPGQKGPNLDFLG

SEQ ID NO: 159456 - protein, 106 aa, Glycine max
  Clone ID: PAT_MRT3847_115008C.1.pep
RTSSAFFLAAFLNRGLSRHHPRGLSVLSTLGKVACLQVLYLGTFTHLILMFRRASSYVTYHLFTRLKPVTNFACIFINLKSLLYITTLPPIGAVKRRVDMPHGEQP

SEQ ID NO: 159457 - protein, 55 aa, Glycine max
  Clone ID: PAT_MRT3847_115009C.1.pep
QLTIRGRWLLIRDLLGWEAQGKIVSFPYESPPPKDAFYFSDNVAEIRIPFTRPSV

SEQ ID NO: 159458 - protein, 50 aa, Glycine max
  unsure (1)..(50): unsure at all Xaa locations
  Clone ID: PAT_MRT3847_11500C.1.pep
SWGHKWEEXGYSNLCRGHGMCVITPRVSVARVPQPQTPPSKNYAFYELGP

SEQ ID NO: 159459 - protein, 181 aa, Glycine max
  Clone ID: PAT_MRT3847_115010C.1.pep
SNKFPTDYIPTVFDNFSANVVVENTTVNLGLWDTAGQEDYNRLRPLSYRGADVFVLAFSLVSHASYENVLKKWVPELQHFAPGVPVVLVGTKLDLREDKHYLADHPGLAPVTSEQGEELRKLVGATYYIECSSKTQQNVKSVFDAAIKVVIEPPQKHEKKKKPRRGCLLNVICGRNIVRFK

SEQ ID NO: 159460 - protein, 391 aa, Glycine max
  Clone ID: PAT_MRT3847_115011C.1.pep
MRTRRGACYPGVVSRMCSNVRVTKKKSKDLHMHMHVPAGDSIIYSRKKQKKTPEKLAAGRYDFFESLPDDLVISIFCKLSSTATKPSDFVNVLITSKRLNRLALHSLVLSKASPRTFTIKAKYWCDSAHKFLKHCADAGNVEACYTLGMIRFYCLQNRGSGASFMAKAAINSHARALYALAVIQFNGSGGTKSDKDLRAGVALCARAAFLGHVDALRELGHCLQDGYGVRQNIAEGRRFLVQANARELAAVLSTGAAARTLLSWNLQPQQLRQGSGCPLLSDFGCNVPAPDVMAEWFVARGGSPGPGLRLCSHAGLCSNAGCGRPETRKHEFRRCSVCGEVNYCSRACQALDWKFRHKAECAPVERWLDEDGEDVGNDDGDGEVEVVMVDS

SEQ ID NO: 159461 - protein, 119 aa, Glycine max
  Clone ID: PAT_MRT3847_115012C.1.pep
MHMHVPAGDSIIYSRKKQKKTPEKLAAGRYDFFESLPDDLVISIFCKLSSTATKPSDFVNVLITSKRLNRLALHSLVLSKASPRTFTIKAKYWCDSAHKFLKHCADAGNIEACYTLGMI

SEQ ID NO: 159462 - protein, 106 aa, Glycine max
  unsure (1)..(106): unsure at all Xaa locations
  Clone ID: PAT_MRT3847_115013C.1.pep
YLRSVIKEFLRMLPPAPLLLSRKAKTDEQVWDYTVPQGTQILISXRAIGRNPAISEDAQMLSPEXILDYDIDDKDHHFKLTPIGSGRRISPGSTLGVRMLHNMLGT

SEQ ID NO: 159463 - protein, 215 aa, Glycine max
  Clone ID: PAT_MRT3847_115014C.1.pep
MADTQPRPNDAVPSKERLGTRCCHCLCQTFWILLVLIITIVMLAILVLYIIITPRSFRFTLIDANLTQFDYTANNSTLYYDLVLNITAHNPNKRLKIYYDVVRAHALYRRVEFSAADVNMPWNGYLQDKKGTNFFGAVFSGQRVMGLNRDQIAEDKKDGMFPIDLKIHFTMRFRLDDFQLGHYYPRGTCELKVPLTSNNGNKVASFHPAMCEIDF

SEQ ID NO: 159464 - protein, 63 aa, Glycine max
  Clone ID: PAT_MRT3847_115015C.1.pep
PILPIPMLNGRTLSRNHHVQLKICAYYNPYPKNIVGKNNTDMQFTTKKEKESNSVKKFLNDLM

SEQ ID NO: 159465 - protein, 262 aa, Glycine max
  unsure (1)..(262): unsure at all Xaa locations
  Clone ID: PAT_MRT3847_115016C.1.pep
LEQKAFVEEVMELVELTPLSGALKMHGLTTEQXQRLTIAVEXSPNPFIVFMDEPTSGLDARAAAIVMRTVRNIVNTGRTIVCTIHQPSIDIFESFDEFGSRKRGGELIYAGPLGPKSCELISYFEAIEGVPKIRSGYNPATWMLEATSSVEENRLGVDFAEIYRKSSLYQYNLELVERLSKPSGNSKELHFPTKYCRSSFEQFLTCLWKQNLCYWRNPQYTAVRFFYTVIISLMLGSICWRFGAKRSFSIHFSFLLWIFNFK

SEQ ID NO: 159466 - protein, 55 aa, Glycine max
  Clone ID: PAT_MRT3847_115017C.1.pep
LFNYQLVSTSAYFWLLICLGLVKKEEKKATSLSFGTAFVCNRKGTFFWLQLRILN

SEQ ID NO: 159467 - protein, 97 aa, Glycine max
  unsure (1)..(97): unsure at all Xaa locations
  Clone ID: PAT_MRT3847_115018C.1.pep
EMGLSFTKLFIRLFANNDICIHMVGHDAAGKIMILYKLNLGYIVTSILTIGFXVYTVHYENIIFTVWDVGGHDKMRPLWIHYFHNTHGAIPGGGYHL

SEQ ID NO: 159468 - protein, 106 aa, Glycine max
  unsure (1)..(106): unsure at all Xaa locations
  Clone ID: PAT_MRT3847_115019C.1.pep
FKHKLNKWPSSLRFFFLRETFLXKQKHTCFLINVGFGCNTRETSNALSKNFTFLVKEKKKNKNYKFSIFFAKKFYYIMECVCEKLKKNEGKGSQKQHFWKRADGHI

SEQ ID NO: 159469 - protein, 68 aa, Glycine max
  unsure (1)..(68): unsure at all Xaa locations
  Clone ID: PAT_MRT3847_11501C.1.pep
RTLFAKITQVQSEVRVARSLRALRASKIQHVRKTSFQYVXENESLRDILGEWGARASPVERALGADRI

SEQ ID NO: 159470 - protein, 80 aa, Glycine max
  unsure (1)..(80): unsure at all Xaa locations
  Clone ID: PAT_MRT3847_115020C.1.pep
EKKPAEKKPEADNAPAEKTTAXKNIPKDATSGEKKKKMTKNSMETYKIYIFKVAQQFTLRLYLHKARVIMQSLMNEIFEK

SEQ ID NO: 159471 - protein, 61 aa, Glycine max
  unsure (1)..(61): unsure at all Xaa locations
  Clone ID: PAT_MRT3847_115021C.1.pep
SRAVLLFAMCVLPAMVVAIRPAKNPFCVNGRVYXDPCRARFETSATTYIAGAEIMLQCRSR

SEQ ID NO: 159472 - protein, 99 aa, Glycine max
  Clone ID: PAT_MRT3847_115022C.1.pep
QAKSSKVGSFFLAIGGFTLLIWTAYPIVWGFADGARHMSVDQEIIAYAVLDILAKPVFGAWLLYTHARIPETNIELDGFWSKGLGGEGALRVGDDDEGA

SEQ ID NO: 159473 - protein, 54 aa, Glycine max
  Clone ID: PAT_MRT3847_115023C.1.pep
QHKAAPLFDRLVFDKTKLALGGRVRILLSGAAPLPRHVEEFMRVTSGSTLSQGF

SEQ ID NO: 159474 - protein, 49 aa, Glycine max
  Clone ID: PAT_MRT3847_115024C.1.pep
STLDASPVDEYLWLVESSAHHAKVFMHITCWTSGAKGSHRRPLIHRCGI

SEQ ID NO: 159475 - protein, 54 aa, Glycine max
  Clone ID: PAT_MRT3847_115025C.1.pep
ITREKPYPTNFIMGMAYLWAEPQNGNLRWEPRKLKPLVTTFLRVPPFFSSKYLG

SEQ ID NO: 159476 - protein, 48 aa, Glycine max
  Clone ID: PAT_MRT3847_115026C.1.pep
GASLSFREISRDWFSNSTKVLFVVLFCPTWNSKTTLVTKEFLCSLEEC

SEQ ID NO: 159477 - protein, 34 aa, Glycine max
  Clone ID: PAT_MRT3847_115027C.1.pep
KQTDYVDDFLSLSLYKDLVTPKWLEYGSGLFTLI

SEQ ID NO: 159478 - protein, 91 aa, Glycine max
  Clone ID: PAT_MRT3847_115028C.1.pep
MDTISVQAMRSLSDSDSLSSATYASEEDMKIKKGPWTEEEDSVLINYVNFQGEGQWNSLARSACLKRTGKSCRLTWLNYLLPNVLRGNITL

SEQ ID NO: 159479 - protein, 121 aa, Glycine max
  unsure (1)..(121): unsure at all Xaa locations
  Clone ID: PAT_MRT3847_115029C.1.pep
MGIKVLAFVVATILLACQCHAYDMFTVRMNTGYGAPTPXEVKCRXWKLAVEAHNIFCFETNPEKCDASSNEYIHGKQYTSYFQTVNQQAYFYAIDLEIHSKDTFVFSIYCTVLSNITYYEK

SEQ ID NO: 159480 - protein, 60 aa, Glycine max
  Clone ID: PAT_MRT3847_11502C.1.pep
MSGSHDQIPTSFYPFANPNAHDSGAESNEYVHIPVHQRNGMKSLTTVHGFKKEFTYNINT

SEQ ID NO: 159481 - protein, 89 aa, Glycine max
  Clone ID: PAT_MRT3847_115030C.1.pep
YHTLQDETVPTSNIPIIPYPSRPLHFGECCYKYYWPENQNLHKFYSSTLSILLSADKLKNVNRPLQALDFLLGDVSSGRLTIFKTFVLN

SEQ ID NO: 159482 - protein, 46 aa, Glycine max
  unsure (1)..(46): unsure at all Xaa locations
  Clone ID: PAT_MRT3847_115031C.1.pep
SLQMCVLFPCFKXXXIMXXSLGRGFFYCSKHYLKHFKNKKNKTHIL

SEQ ID NO: 159483 - protein, 317 aa, Glycine max
  Clone ID: PAT_MRT3847_115032C.1.pep
MGKVFNGVEEFSESRNVFKTVPALVLYLGAIHFNLALILWATVFLPLSKGLLVFGLLLVFVLIPVDENSIFGHKLSKYICKHICSYFPITLHVEEAKAFRPDQAYVFGYEPHSVFPIGIVALGDSTGFMPLAKTKFLASSAVFYIPFLRHIWTWLGFTPVTKQNFISSLEAGYSCILVPGGVRETFFMEPGCEIAFLKQRRGFVRIALQMGLPLVPVFCFGQTKAYKWWKPPGRLMQNLARFLKIIPLFFWGIYGSPIPFKNPLYIVVGRPIELEKNPEPTMEQVAKVHSQFVEALQDLFDRHKAHAGYTNLELKIF

SEQ ID NO: 159484 - protein, 115 aa, Glycine max
  Clone ID: PAT_MRT3847_115033C.1.pep
KKKKKKGYPPPFKKIKTPGRKTKAPGNPPPFFKEKKRGKGGKPPPLGQGDPQKKFPPPPNGPQKQKKKGGKKPGFFGGPGQIPHPTKPPKKLGPKKRGPKKRDPRPPPPGGPFFF

SEQ ID NO: 159485 - protein, 186 aa, Glycine max
  Clone ID: PAT_MRT3847_115034C.1.pep
MALTLDKKSVGTFFMLFLTCICRASSRTLSESSIATQHEEWMAMHDRVYADSAEKDRRQQIFKENLEFIEKHNNEGKKRYNLSLNSFADLTNEEFVASHTGALYKPPTQLGSFKINHSLGFHKMSVGDIEASLDWRKRGAVNDIKNQGRCGSCWAFSAVAAGEGINQIKNGQLVSLSEQNLVDCAN

SEQ ID NO: 159486 - protein, 129 aa, Glycine max
  Clone ID: PAT_MRT3847_115035C.1.pep
PAGAETILSGNGLPRTEPIDPWGHAYYTGPYTQRSTEDTENNVRGGVGGVPPHHITRRPPYVRLTSRTPFPVALTEPPLQTEFWQQPPSNGSTRDSLWSASSRFYHQLAPLLSHPQLLLRLASKLPLPS

SEQ ID NO: 159487 - protein, 112 aa, Glycine max
  Clone ID: PAT_MRT3847_115036C.1.pep
MVKGRQGERVRLYVRGSILGYKRSKSNQYPSTSLIQIENVNSKEEVAWYCGKRMAYIYKAKVKKNGSHYRCIWGKVTRPHGNSGIVRAKFKSNLPPRSMGARVRVFMYPSNI

SEQ ID NO: 159488 - protein, 38 aa, Glycine max
  Clone ID: PAT_MRT3847_115037C.1.pep
LKNPCEKRCLDYRPPNTRHVILGHNPFCRLLAAVRTRG

SEQ ID NO: 159489 - protein, 36 aa, Glycine max
  Clone ID: PAT_MRT3847_115038C.1.pep
YFLSIVIIGNEIQFISQGKRSIPLSTTIHCHSAATL

SEQ ID NO: 159490 - protein, 126 aa, Glycine max
  Clone ID: PAT_MRT3847_115039C.1.pep
MSNIGINGFGRIGRLVLRASLERGAQVVAINDPFIGLDYMIYLFKYDSTHGRFKGEVKAEGDFLVVNGKKIHVFSERDPKAIPWAKAGAEYVVESTGVFTTIDKASAHLEGGAKKVIISAPSADAP

SEQ ID NO: 159491 - protein, 77 aa, Glycine max
  unsure (1)..(77): unsure at all Xaa locations
  Clone ID: PAT_MRT3847_11503C.1.pep
WAPAKAEXKPAEKXPAAXKAPAYKKPKGXKKISXEGGSXXXXXXXXXSLETYKIYIFXVLKQVXPDIGIPARPGHHE

SEQ ID NO: 159492 - protein, 98 aa, Glycine max
  unsure (1)..(98): unsure at all Xaa locations
  Clone ID: PAT_MRT3847_115040C.1.pep
MFRTRGMWAFKAENGGRLTFSEPXKHRPDTAGEKPPHFYPAEHIKKPLVNTHERKPDQHRASVTPGTEXILLGGRLNGKKRSPIKHPPSGLYFDTGTF

SEQ ID NO: 159493 - protein, 96 aa, Glycine max
  Clone ID: PAT_MRT3847_115041C.1.pep
LHIWSPSLKISQLSSLPPQHRTEATTEMKKGVHPQKQWISYVTQTGRLMHVMMTKIHPVGKVYHFRAKRQMAESLGQIAKFRRRFGLENSEGNEKK

SEQ ID NO: 159494 - protein, 120 aa, Glycine max
  unsure (1)..(120): unsure at all Xaa locations
  Clone ID: PAT_MRT3847_115042C.1.pep
LRGAAKLFNFWNKMAERRLNINAPLMSVRRSAATPPSLTEAKKKILEKRHTLPYYKSDTFSDQVTEPVAVPFNXEHIPGRRKGNGGSEPQPPKGTFIXSSPRLPPXKSIXATXTPLXKEK

SEQ ID NO: 159495 - protein, 64 aa, Glycine max
  unsure (1)..(64): unsure at all Xaa locations
  Clone ID: PAT_MRT3847_115043C.1.pep
KHSIVNESSSSILGGVTSGMAASXTTXMSSPTISLVHDRLSTEXTRLPFSLSNNLTHWILVRVF

SEQ ID NO: 159496 - protein, 50 aa, Glycine max
  Clone ID: PAT_MRT3847_115044C.1.pep
GTHHELDRETTRPNEQKFWYFSYEERVNFNPKLIMVHWFNFFPSERKKTL

SEQ ID NO: 159497 - protein, 534 aa, Glycine max
  unsure (1)..(534): unsure at all Xaa locations
  Clone ID: PAT_MRT3847_115045C.1.pep
MIQLGGYQPRLSLHSSLFKALVSNPGILSKNYLKQAEFIYHHLVTTGLDVHKEIYGGLIWLHSYQDSIDKERIAELREAMLRAGFEEDREVLLSILRACAREGEVDEAEKTWVKLLKFESEPPALAFVYKMEARAKVGMPMKSLDIFREMQSKLGRTDVAAYNQIIEILCKAQESELAESIMEDFVRSGLKPVTPSYVYLLSMYFTLELHDKLEEAFYQCLEKCRPNCTLYSIYLNSLVKIGNIDKAEDIFNQMNRDATIGVNARSCNIILSGYLSSGNHLKAEKVYDFMCXKKYEIKSPLMEKLDYILSLKRKVVKRPISLKLSKEQREILVGVLLGGLQIDSDDQRRNHIIRFDFDRNSGSHYVLKSHIYHQFYEWLHPTCKPGDNSENIPDKFCTIASSHFGFYADQFWSKGEPTIPKLVHRWLSPCVLAYWYMYGGHRNSSGDILLKIKGSREGVENIVRKFKAMSMDCKVKRKGRVFWIGILGSNSTWFWKLVEPYIKEDEEFSEAGDETKEQDTEKTEDINFNSDSDE

SEQ ID NO: 159498 - protein, 108 aa, Glycine max
  Clone ID: PAT_MRT3847_115046C.1.pep
MKKIVLKVDLHDDRIKRKAMKTASGLSGVQSVSVDINDKKMTLLGDVDPVSAVSKLRKWCHTEIVSVGPAKEEKEKEKVEPAKEPVPLKLYDAYPFYYHMTPPLYLYS

SEQ ID NO: 159499 - protein, 55 aa, Glycine max
  Clone ID: PAT_MRT3847_115047C.1.pep
QKIVLKVDLHDDRIKRKAMKTASGLSGVQSVSVDINDKKMTLLGDVDPVSAVSKL

SEQ ID NO: 159500 - protein, 116 aa, Glycine max
  Clone ID: PAT_MRT3847_115048C.1.pep
SYHLQSWAVSSKPSFNKTKTMLKKQSVLSLSLVMLISFMYSTTTLAQLSPASAPLKPPQPAPTIPAAAPQQPLVPSLPQSPSDSTPESTPALDIVGILRKAKSFNILIRLMKTTQL

SEQ ID NO: 159501 - protein, 71 aa, Glycine max
  Clone ID: PAT_MRT3847_115049C.1.pep
LKLLITNYEEFKCSSQFKHESTFKQDPERCSSQFLAKETPNQIVGVNVDAYNPYELSLTMFTGVVKKNVTS

SEQ ID NO: 159502 - protein, 59 aa, Glycine max
  Clone ID: PAT_MRT3847_11504C.1.pep
GCCNMYPNLSYTDATTTDTVVMGGAPVKVHFDGAEMGVPASNYGCQCGPNCCCNPCTCK

SEQ ID NO: 159503 - protein, 53 aa, Glycine max
  Clone ID: PAT_MRT3847_115050C.1.pep
SAVFIGGDSVGGLESLVALHVSGHLVPKLVQVGPSGCDNNIIIIIITIIIIIS

SEQ ID NO: 159504 - protein, 32 aa, Glycine max
  Clone ID: PAT_MRT3847_115051C.1.pep
SGDPYCLLRCQTCESESYFNAKQHSLLIRFFP

SEQ ID NO: 159505 - protein, 42 aa, Glycine max
  Clone ID: PAT_MRT3847_115052C.1.pep
GAFILIKVFFKLSYKPPACFLFHAPYSQLPHKGPTLSIFIMN

SEQ ID NO: 159506 - protein, 78 aa, Glycine max
  Clone ID: PAT_MRT3847_115053C.1.pep
EMVNIATAAAEGYASRPCGPCASAKAMSSSRSSLTCSGGRKCTDSPLDSCRQVLDRELTGSCRKWMLWPVSREHRAPD

SEQ ID NO: 159507 - protein, 83 aa, Glycine max
  unsure (1)..(83): unsure at all Xaa locations
  Clone ID: PAT_MRT3847_115054C.1.pep
GRFEILSLSGSFMPTDNQGSRSRSGGMSVSLSSPDGRVVGGGXAGLLVAAGPVQVNIPLSTLRSYSQLNYVCDREHGLGGEGL

SEQ ID NO: 159508 - protein, 75 aa, Glycine max
  Clone ID: PAT_MRT3847_115055C.1.pep
WSSFFFFFFFFSIFFFAMSRIFLYNLTYINKPNSLETDNQNIISTEQNKKQAQTHIESTAQNGYSQKPYSPKIKR

SEQ ID NO: 159509 - protein, 119 aa, Glycine max
  Clone ID: PAT_MRT3847_115056C.1.pep
ITCCNYDFLILFFTEAIFYCGVGVFLYLLDHVRRPLLVDTVANNSDTLPPQLGQRVSSVATLVLSLVIPMVTMGLVWPWTGPAASATLAPYLVGIVVQFAFEQYARYRKSPSWSAIPLI

SEQ ID NO: 159510 - protein, 64 aa, Glycine max
  Clone ID: PAT_MRT3847_115057C.1.pep
GWLRKLPIKPSAVTVTNLKFPWFCPLGLQRLRLVLPPSEAMSATAMAEKLTKSECYCDGGETDQ

SEQ ID NO: 159511 - protein, 62 aa, Glycine max
  unsure (1)..(62): unsure at all Xaa locations
  Clone ID: PAT_MRT3847_115058C.1.pep
AFPGTAWQRREQSRVRVVNVMSVQLRDVTXYSSVSYQTVSCVVRQASQVSEMTRHKVEWKMP

SEQ ID NO: 159512 - protein, 43 aa, Glycine max
  Clone ID: PAT_MRT3847_115059C.1.pep
RLAEDQEGGLLPTSSTDCLAGSYPFPRPCIGRLQRLSLSPTKL

SEQ ID NO: 159513 - protein, 47 aa, Glycine max
  Clone ID: PAT_MRT3847_11505C.1.pep
GVSNFARTSALIQHEWRAKSFFTKVVEVDTKAIQKSAKVVLGLVLEP

SEQ ID NO: 159514 - protein, 58 aa, Glycine max
  Clone ID: PAT_MRT3847_115060C.1.pep
NAFFPTPNNLILFDPKFFPLTITFFFAKKKETFFHPIGHRFIPFYLNQGNPWIHFFLP

SEQ ID NO: 159515 - protein, 266 aa, Glycine max
  Clone ID: PAT_MRT3847_115061C.1.pep
MNVDHDQPPSATKAQALQTLTAGPLSSSVAKLAASSRCIPSDKDFHFYRNFEEFKVPVEEIARESRSMLEAFGAAAAHAAFPDNDVDDDAAYDWLVNANDDVLERFDASADEFRKVRQEEEETGRPAMHPMEEDGFQLVTGKKKKGGKGNVTPAATGSEVAAVAPPGVTVATKDKKTMGPKSKVPFHIPTIRRPQDEYNIVVNNANMPFEHVWLQRSDDGLSFIHPLEKLSVLNFADTNLGDVVPVKPPSIESTPFKLVEEVKDLK

SEQ ID NO: 159516 - protein, 112 aa, Glycine max
  unsure (1)..(112): unsure at all Xaa locations
  Clone ID: PAT_MRT3847_115062C.1.pep
SWPLFLACPLAFASVGFWLLPVFSPSVSAYFSAGMCFGPNQHGCFFLFLGLLWSPVRALGALDLGVIASPFFCPPFVFESPLPRPLYTFFCSSPVLPGPLWTSXVAFAGLLL

SEQ ID NO: 159517 - protein, 181 aa, Glycine max
  Clone ID: PAT_MRT3847_115063C.1.pep
MSQTNWEADKMLDVYIHDYLVKRDLKASAQAFQAEGKVSSDPVAIDAPGGFLFEWWSVFWDIFIARTNEKHSEVAASYIETQLIKAREQQQQQQQQQQQQQQGQQQPQPQKLQHQQQQQQQQHMQMQQILLQRAQQQQQQQQQQQQQQQQPQQQQQQQQPQQQHQQQQQPQQQGRDRAHLL

SEQ ID NO: 159518 - protein, 57 aa, Glycine max
  Clone ID: PAT_MRT3847_115064C.1.pep
FYIRKCVMVGELILYICQTSTPFNLFIAGKPFPNKSFGWVDVKDVANAHILAYEIAS

SEQ ID NO: 159519 - protein, 62 aa, Glycine max
  Clone ID: PAT_MRT3847_115065C.1.pep
PRVRGLQKNNRRGVFFLVFRGGVNFFLWPFNFQLPMASLWAPETGLTNNPPIYNGFNFCSNP

SEQ ID NO: 159520 - protein, 107 aa, Glycine max
  unsure (1)..(107): unsure at all Xaa locations
  Clone ID: PAT_MRT3847_115066C.1.pep
GPRFIWNSPLFGTFELENLFLKAGLPMYFSXVWKKSWGAPAREDFKVXNFGDWINPPVGFWENQKVRLGSRPGPFNVLDDGGESFPPQGGGFLKPCYRGGLPCGFHV

SEQ ID NO: 159521 - protein, 130 aa, Glycine max
  unsure (1)..(130): unsure at all Xaa locations
  Clone ID: PAT_MRT3847_115067C.1.pep
IADADATIDYRAGALVHTSFTGLKAMAGFPTMRTNNDITSIASNRGRVQCMQDWPPFGKKMSVTLSYLPDLDDAQLAKEVQYLLMNGWILWLXEFGAEHGFXYRERNRSPGIYHGRYWTMCTLTMTGCTD

SEQ ID NO: 159522 - protein, 47 aa, Glycine max
  Clone ID: PAT_MRT3847_115068C.1.pep
SFLISPPNAIPIMLLISTYVTHVSKILFTWPNGWWKYNYPSAPCSNN

SEQ ID NO: 159523 - protein, 83 aa, Glycine max
  Clone ID: PAT_MRT3847_115069C.1.pep
LAKGGLGTAYKAVLDDGNVGAGKRLKDAQITGKREFGQHMVLLGMVIHTNVVSLTAYYLTREEKLMVYEYMPNDTLIWFLNGN

SEQ ID NO: 159524 - protein, 72 aa, Glycine max
  Clone ID: PAT_MRT3847_11506C.1.pep
TILATSFVFFGFYRVVPSQTILSDYGTIPMATSFLYFSTSGTIYLFNLLSLLTKKKSSFRNISDNYLAAIPE

SEQ ID NO: 159525 - protein, 41 aa, Glycine max
  Clone ID: PAT_MRT3847_115070C.1.pep
IFSSSLHFYPPHGFDSSSLKPVCTAVCKRSVLINANLFVSP

SEQ ID NO: 159526 - protein, 61 aa, Glycine max
  Clone ID: PAT_MRT3847_115071C.1.pep
ICNSINSNDQYMETIKTLPTFQQVLPKDGDFVRMSLVESMAIQIAVMMPPRNMRSSFHHVV

SEQ ID NO: 159527 - protein, 479 aa, Glycine max
  Clone ID: PAT_MRT3847_115072C.1.pep
MYISGDFLRVASLLSAVCALGLFPGNQNQNQGNFYRIRSAFKYGARKLGWILRLPEDRIAEELIRFFANTLERHGSTQGNVDKSFLSLSTASGKDRKPGNQHNFESRDERERYVVQDAGEFFDSSRDGNAVTSFKLGEDSKDIATSGVLDRTSTNGWSYCSNEQFENNISDSEPALNSVINDEKEKQVMAGNSPRSHTDEKHMAVSEASKSLLDLTGDYDSHIGNLQYGHMCNGYPVSLVVPSPPRSPKFPNRNPWETVHQCVPINHSIRSQANSNCVMGQQVYVINHPTLPMTSFGSEEKRKVRGTGAYFPNMTSRPYRDNRPIPGRGRGQAPGTHGHLQRHSRNNGFALAPQETNLSVDGTFEHALEGYSGFGSTKTRSSETYFPQPSTWGSHYANGFLHSSEKPESGPASPQLRVVPRNEMSNYPESGISTPRDTVPNTEEVTEEKSDSLSAVDSKRIEEQAYRLKNDDDFPPLSH

SEQ ID NO: 159528 - protein, 81 aa, Glycine max
  Clone ID: PAT_MRT3847_115073C.1.pep
ISTRGCLVPLRADVILWPPIISPLLLSSSFLAFLPFPISTTQLEVFSFSGRFFASCPGCPSHCLLRMHHQFLSLSLLLGLC

SEQ ID NO: 159529 - protein, 138 aa, Glycine max
  Clone ID: PAT_MRT3847_115074C.1.pep
MAKKKEKKVNVSGKPKHSLDVNRSNDAKKESRSAATVRRLKMYNTRPVRDRKGKVVSHELQSKELPSTRIQPDRRWFGNTRVVNQKELEFFREELQSRMSSNYNVILKEKKLPLSLLNDHQKQARVHLLDREPLPDAF

SEQ ID NO: 159530 - protein, 99 aa, Glycine max
  Clone ID: PAT_MRT3847_115075C.1.pep
HSHCFCQTRQDRTALGKGNGIVFLTRVDPFPVALLAVLFGVKNEILSSIATNPMLTRLLKTGKSLKYLVKSSFCICIQYVIFYSLNYSALLCAMSVFRY

SEQ ID NO: 159531 - protein, 55 aa, Glycine max
  Clone ID: PAT_MRT3847_115076C.1.pep
ARDHIMRDVRRVDWLSSYQLLIFTDIESGISVLITFGLQIIHTHTEDIIRHFTTA

SEQ ID NO: 159532 - protein, 44 aa, Glycine max
  unsure (1)..(44): unsure at all Xaa locations
  Clone ID: PAT_MRT3847_115077C.1.pep
FSPQKHKXRLFLSGSPQTPYSRAMKGRLKGLNLLPKLDRLHXHK

SEQ ID NO: 159533 - protein, 75 aa, Glycine max
  Clone ID: PAT_MRT3847_115078C.1.pep
KKKKFLKFKKKKKKKKKKKKKKKKKKKKKKKKKKKKKKKKKKRGALFKEPNFTTPGFQGIIFFFGPLKLNSLPAF

SEQ ID NO: 159534 - protein, 62 aa, Glycine max
  Clone ID: PAT_MRT3847_115079C.1.pep
LRLGVHAIHILTLTPTCPQMRLRYNYLPVGRLTADLKTAGLYPARRWRISSQDLGMWTKGTS

SEQ ID NO: 159535 - protein, 118 aa, Glycine max
  Clone ID: PAT_MRT3847_11507C.1.pep
MARSLVMIHPLPSISHIGFTVMSLMVCAIALLMCASHSRKWPKWISCYAFVEEPVIEFNNEAVMNTCDERQEDGSLWQKNILMGGKCQLPDFSGVIIYDSDGNIVNPARTSPPLLTWK

SEQ ID NO: 159536 - protein, 91 aa, Glycine max
  Clone ID: PAT_MRT3847_115080C.1.pep
EDDRRGGKKKLKADNGPGTVPYSYESIYLSNPLYLYRFKITPVSPEFHLYPSYCLSLVLLPSSFSPHPFLSLFPTYPKSAIRTGTHTQPRD

SEQ ID NO: 159537 - protein, 99 aa, Glycine max
  Clone ID: PAT_MRT3847_115081C.1.pep
DLTSLVLPTDGWTRLNANVGVLVYRLTAIHAVLDSRQSHQSKQDAVLILVPINKHPTCVHHNRSLLHESTGTYTSRSTCSIAKKLRSSCNITVGGDHIS

SEQ ID NO: 159538 - protein, 117 aa, Glycine max
  unsure (1)..(117): unsure at all Xaa locations
  Clone ID: PAT_MRT3847_115082C.1.pep
KEEERNXPFLLGXLAGHETEAEEMQWGASGIWSRIKLSNFHFLDLGFPKVWGIENFGWLVVXEKVGFGFFNAXXGKVGXRPXAQLXPLVGPXQEIPKGKRIIFHXFXFLPKEDHGGG

SEQ ID NO: 159539 - protein, 188 aa, Glycine max
  unsure (1)..(188): unsure at all Xaa locations
  Clone ID: PAT_MRT3847_115083C.1.pep
CATIVSSLPELNELSACDYNNFEXIISSDVDEAXQHSNVRAHFPQFSLNLGSINIENCSKLKTFFSATTVTSLPKLQQLVVKDCNKWEEIIFLDSDQAGQFRNLYPLSNPDCFAKPRSVQIERCNSLKTIFITTIVTSLPELLVKDCDKWMEIISLDLVEARQVGNQSASSKQICFPKLQRIQIRTRG

SEQ ID NO: 159540 - protein, 120 aa, Glycine max
  unsure (1)..(120): unsure at all Xaa locations
  Clone ID: PAT_MRT3847_115084C.1.pep
RCRLTRVKWHVITACGDYPKAAGAAESPALIKENYAVXHWDLASLYSVRRFGDDYIRPEMPADCLGCNAAVHSPAADEPTLTAEGFELRVGTIDVEHFLLSCLMLEDLQESDDPSQRLSI

SEQ ID NO: 159541 - protein, 63 aa, Glycine max
  Clone ID: PAT_MRT3847_115085C.1.pep
LLKVSNINRCCFDPKNTTNTKNTTIFQKLHLHLHLHNLQRQTHQPYRRRYRYRHHLVIQNPYL

SEQ ID NO: 159542 - protein, 236 aa, Glycine max
  Clone ID: PAT_MRT3847_115086C.1.pep
PRVRFFRLWPSLPAIVEYTGTYTYEGSGFKATAAQQYGASPFLSGLKSLSSKPFHKVCSHIIRTVAGFEMCYAAKTWHGGFLGMMIFGASEVSRNVDLGDETTTMLCKFVVDSSITKEIGSDLQGWLDDLTDGGAEYMPEDEVKVAAAERLRISMERIALLKAAQPRPKTPKSDDEDEEEEYDNNKEKKDGEEDEKPKGPSTLSKLTAEEAEHQALQAAVLQEWHMICKDRTTEVN

SEQ ID NO: 159543 - protein, 133 aa, Glycine max
  Clone ID: PAT_MRT3847_115087C.1.pep
EQTILCHAGVLEKLTSLLDSSLSQRDASLESLAAIIRDNPAAVSEFVELHGGRALHSVAELTKDRYPRTRLLACLCLISVKNSSTCYLQDIGIKTKLVYILLELLDDSGQVGDEASFAFSSLIAEKEDLQKLA

SEQ ID NO: 159544 - protein, 36 aa, Glycine max
  Clone ID: PAT_MRT3847_115088C.1.pep
VLRFDRIWSLCPHARLNLTLRLLINFPCWSITHLQD

SEQ ID NO: 159545 - protein, 76 aa, Glycine max
  Clone ID: PAT_MRT3847_115089C.1.pep
MMHLITYRRFSAVYIIFPFNRQGDSYIINGTKWCTGGAMDPICPIVIVMRTPDFRAVKHKQLSMTLVPRLTPVVHI

SEQ ID NO: 159546 - protein, 80 aa, Glycine max
  Clone ID: PAT_MRT3847_11508C.1.pep
LELQTLPPSYPYHHPFHSFTPSPLHPPSNSPHPHHHHHHHHPPSPSPIPSPSHHNYPTTPSPTNPSTHHHHHHPPSPFNP

SEQ ID NO: 159547 - protein, 95 aa, Glycine max
  Clone ID: PAT_MRT3847_115090C.1.pep
EENDADLESESLKALLNMRRNAKEKELEALLSGEQDSWSCYIEGQAGAGGTESMDWAAMVMQMYKSWAQQRGYKVTVVDEMPGEIAGIKRATIKV

SEQ ID NO: 159548 - protein, 159 aa, Glycine max
  unsure (1)..(159): unsure at all Xaa locations
  Clone ID: PAT_MRT3847_115091C.1.pep
MLHTEPHGRPKCSHQQNSWTLVHMKAEVILCGDNRGTETTIITCRDPDIXLVIXTIATQLRKFLLDYIRWHLLTXKMYMVPSFITAEMKVEHNLNKIHLAGLFYDGRNRLWTXHDKNFALTAKEKMVVLKNKGITADVIAKRAHEFEKHVAHESLKDQT

SEQ ID NO: 159549 - protein, 135 aa, Glycine max
  Clone ID: PAT_MRT3847_115092C.1.pep
DKYSAKAGLPGYGSSPRTPTHAREDASNFWEFSSDDQSDDLLLNDLNPCLTPCAVKSRSREFEGRGSGSMHDESLSDEDDAKVYPGMKFSSHDRKFSKSSDCCHNSSKISVATKAGRRSDESKLAYGGRMNHKFA

SEQ ID NO: 159550 - protein, 65 aa, Glycine max
  Clone ID: PAT_MRT3847_115093C.1.pep
GSRSNDMGVPFLGNVPLDPQLCKAAEEGSSCFAKKDCVVSAPALNKIIEQLIETNGWSMLVSNGV

SEQ ID NO: 159551 - protein, 355 aa, Glycine max
  Clone ID: PAT_MRT3847_115094C.1.pep
MENADIPENANEHCPGPQSESAGKSDACEGCPNQQICATAPKGPDPDLVAIAERMATVKHKILVLSGKGGVGKSTFSAQLAFALAARDFQVGLLDVDICGPSIPKMLGLEGQEIHQSNLGWSPVYVESNLGVMSIGFMLPNPDEAVIWRGPRKNALIKQFLKDVYWGELDFLIVDAPPGTSDEHISLVQFLDATGVDGAIIVTTPQQISLIDVRKEVNFCKKVGVKVLGVVENMSGLCLPITDFKFMKLTDNGEQKDVTQWVWEYMREKAPEMLNLLACTEVFDSSGGGAVKMSNDMGVPFLGNVPLDPQLCKAAEEGSSCFAKKDCVVSAPALNKIIEQLIETNGWSMLVSNGV

SEQ ID NO: 159552 - protein, 41 aa, Glycine max
  unsure (1)..(41): unsure at all Xaa locations
  Clone ID: PAT_MRT3847_115095C.1.pep
XLHFCWMTIRTNPIKLVXLFNXRIXGXLEVYPSHCLKXSIG

SEQ ID NO: 159553 - protein, 82 aa, Glycine max
  Clone ID: PAT_MRT3847_115096C.1.pep
EFYVLFVFLSVLEENSMCWCENSTYCLFSRNAKAVEFAVNLKLYVLFVFLYMNLITWDLCLCENSATAFKPPIFSNSFYKIL

SEQ ID NO: 159554 - protein, 80 aa, Glycine max
  Clone ID: PAT_MRT3847_115097C.1.pep
RAICGCSCMNFFNMRSIFMIFCDYRCSIWIQVLQGYQGAHLYWGVFTCKADSSSILSLGGESVKMLITGLDQISLIPVAE

SEQ ID NO: 159555 - protein, 93 aa, Glycine max
  unsure (1)..(93): unsure at all Xaa locations
  Clone ID: PAT_MRT3847_115098C.1.pep
MSTKTVREPLEEILALIPSDKDGKPIFCVDQLLIYFNDTXIHVTEQLEKETLVHMIRKMIVKGDIHTSAAYPTXLADTDVAAXCKELGITALX

SEQ ID NO: 159556 - protein, 72 aa, Glycine max
  Clone ID: PAT_MRT3847_115099C.1.pep
RMSLRQQFHHHSHAWGSDHTTSLPSPSGLPSPAPASRQQSSSIQRSSTVFSLTSWGQSNLEPNSELTYACMR

SEQ ID NO: 159557 - protein, 52 aa, Glycine max
  unsure (1)..(52): unsure at all Xaa locations
  Clone ID: PAT_MRT3847_11509C.1.pep
PPLTFGPPVVNWTWPHPWILWAGPFIGGGNPGPVXKGVFFTPPPEQVPPPGF

SEQ ID NO: 159558 - protein, 94 aa, Glycine max
  unsure (1)..(94): unsure at all Xaa locations
  Clone ID: PAT_MRT3847_1150C.1.pep
LNVGKWIRRSWVNLHSQFNIVIASFDRCGGGTISLAGMEMKPAMKLAESERSDSATXVSTQVXRAMIDSMLERLVLALQVMEGEMRCAFQPFPT

SEQ ID NO: 159559 - protein, 72 aa, Glycine max
  Clone ID: PAT_MRT3847_115100C.1.pep
GARDRQKNQNQQIPSKHAAAKKDNSYIKNCFNFLKLKALTQKTLYQSKSIVQMWGGLNRSPITNMPTLKPKG

SEQ ID NO: 159560 - protein, 49 aa, Glycine max
  Clone ID: PAT_MRT3847_115101C.1.pep
LLLIEHFFCKFFFSKLCLITSHLFSAKIHFALCNCSLILLLEKVVYFIV

SEQ ID NO: 159561 - protein, 107 aa, Glycine max
  Clone ID: PAT_MRT3847_115102C.1.pep
GAGKKLLILAIPKGEEKGQACLMVFCPKKKWLLNPKLGPKKGRNFGKKEQSWLRGRGKPPPLGEPGMVLGPQGFGEKGGSVSCHGWGAGRHCGQVAPLWGGPMKVGP

SEQ ID NO: 159562 - protein, 53 aa, Glycine max
  Clone ID: PAT_MRT3847_115103C.1.pep
GGVPKLGLGLRVKRGTRAKEKAKENLKGQVRAWGNSPRIPNNLLNSNPNKVWT

SEQ ID NO: 159563 - protein, 69 aa, Glycine max
  Clone ID: PAT_MRT3847_115104C.1.pep
YPHLYNKPTVSLYYPLNLTPSFHFIAHVSHHLYSISLTVAFNNITPKTLTLPNLKDKPHTPHSSKAFLT

SEQ ID NO: 159564 - protein, 54 aa, Glycine max
  Clone ID: PAT_MRT3847_115105C.1.pep
RMKKFWEAFFTKYSFLKVLKNTIVPSLLLHDTSIQGSKKQKSVAFNYKTKRTLA

SEQ ID NO: 159565 - protein, 56 aa, Glycine max
  unsure (1)..(56): unsure at all Xaa locations
  Clone ID: PAT_MRT3847_115106C.1.pep
KRNQAREYLQKGDGPHKPRTKHEKNPAXTEEEKTEANRNRGTPAEAPAKRAXEPEK

SEQ ID NO: 159566 - protein, 85 aa, Glycine max
  unsure (1)..(85): unsure at all Xaa locations
  Clone ID: PAT_MRT3847_115107C.1.pep
PLICSXQRLTHGVLLEGYGPRGLSIIRLGFSPLWIIKVSWGQKGGQEASFKLCRGHGLCRKTSMVXSAAMGPRPPPTLTKNYGSY

SEQ ID NO: 159567 - protein, 144 aa, Glycine max
  unsure (1)..(144): unsure at all Xaa locations
  Clone ID: PAT_MRT3847_115108C.1.pep
ECDLWENTVCQPRLQTRGHTLNWERTILQSLVTHGCIGTGHGIGSGVLEQPVIEKVTLGPECVLDLKKSRKSVPXYRVIMLNDKLNKPEYLVQVLMKDMTGMTLDYAVNIMQDVHYNGXLVVIMSLPAVAEDHCLHLRCLGLFN

SEQ ID NO: 159568 - protein, 97 aa, Glycine max
  Clone ID: PAT_MRT3847_115109C.1.pep
TKTMLVPAISHSLESLLALQLHVLPSCVEDLWPTNLLSEVHKTSVGPPHSDGLRPMILKERKSADCLSIRPCINSLGRLQHKGGATVAMAFSSHWLR

SEQ ID NO: 159569 - protein, 98 aa, Glycine max
  unsure (1)..(98): unsure at all Xaa locations
  Clone ID: PAT_MRT3847_11510C.1.pep
FLDERXWKMKSGNFGXXRQXTESPRXRRPKYXFLLQHQXGNXKIQIXSXVDXSKRNECLKTXHLHRXCHLPICGGLVDFLHXLPXSXLXRPGALPPEC

SEQ ID NO: 159570 - protein, 114 aa, Glycine max
  unsure (1)..(114): unsure at all Xaa locations
  Clone ID: PAT_MRT3847_115110C.1.pep
ANNAEARYIFSVCGITAIHIGETIAXKIYGKPLPSIXAEQPTVKMSISINTSPFVSLEGKFVSTMNLRDRLYHELDRNLAMKVENDETAYTFVAIEPPTLHITILIXNMRREGS

SEQ ID NO: 159571 - protein, 90 aa, Glycine max
  Clone ID: PAT_MRT3847_115111C.1.pep
RTSLDAKGEKHMERIAAHGECNQRPMTGHAETAVMGGGLWVFFDRGAYVAVGRYTGQAWNGSLEDRRPAANMDPYVAPYMHADTTILRNP

SEQ ID NO: 159572 - protein, 85 aa, Glycine max
  Clone ID: PAT_MRT3847_115112C.1.pep
VSSLAILDFPFRSTHFSISGFFIKEFASLHSTSEFVIFQSACHILGLFCLPYICLAFHVNAMKQSSANAMKFTLQPPKIFKIQIT

SEQ ID NO: 159573 - protein, 539 aa, Glycine max
  Clone ID: PAT_MRT3847_115113C.1.pep
KGPVDPIHNTFTHRRSSNSVSGINIRYLGRIAKRTLATPVVMDLCVREMVARAAKYIFAGHLRSTETFHISNSIAHFLNCFIGSSANGGAAAIQAPQPLRPKLKKNGKSKVKEPVPSAAPFTLTRTALWNEIVALVKEKFAYDLAFDYEVSRPTVFLRSFCLKVGIQVAARDYDFTKVDPFVPADILDLFPVVKHINPRSMDGQDLQEAGRSLTLQGRLHMAQELLSEALAIVQQVHGPLHPDSATCESNLAMVLYNSNDLQMAISHQARAVVINERVLGLDHQDTAHAYGNLGLFCHQANKTKEALAFMSRAMYLANLVAGETHAEHGATYTNIGLMLSELNKPDLAIGYLQAALKSNEAIFGDSPVTAGTLHHLAMANSKSLNFKEAMQQQKRNYAMLSATVGENDTRTKESRLWLNRFTASAVAKQKELNQINAMLPKTAPRRPEPAPAATTTRLLPTQATPSSMGNLPLSEVLRYINSDSRREKRGIVKLSTSAGKKDKKREEAIDQEEPTVASTSAAPKDKSGKKKKKKSKKVA

SEQ ID NO: 159574 - protein, 142 aa, Glycine max
  Clone ID: PAT_MRT3847_115114C.1.pep
MAAGKKGHIVMIPFMAQGHIIPFLALARQIQQRTTSFTITIANTPLNIQYLRSSLSSPNEIHLAELPFNSTQHGLPPNIENTEKLPLTHIAKLFLSTLSLEAPLRSLISQITEQEGHPPLCIISDVFLGWVNNVAKTVGIRN

SEQ ID NO: 159575 - protein, 69 aa, Glycine max
  Clone ID: PAT_MRT3847_115115C.1.pep
RDTFTTNRDMRDGLILRKHLLLLTLVQLFTCVNKVPCYLDYALLRFIIRAEMTMRDHSRMVYKLCLPYF

SEQ ID NO: 159576 - protein, 159 aa, Glycine max
  Clone ID: PAT_MRT3847_115116C.1.pep
FSIIIIIENDSITLRHGWNNISICIGGTKPPEDVPFAREGARLRSRLSNPETHTEATTLVTLINLKRKPKNEREHHKIEEENQRRSELEARNERRDYELDFAPYFAMEKTNSPEMETSSLEKVREVLGEGASMTTKKCETCERLRVSIFPLSKWVKQSR

SEQ ID NO: 159577 - protein, 69 aa, Glycine max
  Clone ID: PAT_MRT3847_115117C.1.pep
GGQYRIQRTDYKKGNPRFNNLNAQHTSQKRPFSFPFHPKTPALIQGTHRISSVLLASHHLHNMTFQHTP

SEQ ID NO: 159578 - protein, 175 aa, Glycine max
  unsure (1)..(175): unsure at all Xaa locations
  Clone ID: PAT_MRT3847_115118C.1.pep
PIAQNIIKLXGNLSFSAFAPPALIFTVIAITYHPPDPWLESTPALTNLFTQSQNATFRIDSSPPLTEAVIEKSEQQIANSTANSTADSTDSTDAALPSTPACDGTINCSNPRVRIAIQRFNLRAFKSIAFFDYQPPVNGSVAGECDVPWRFRNMRERSWRKYRDFRRFKTQSPTT

SEQ ID NO: 159579 - protein, 265 aa, Glycine max
  unsure (1)..(265): unsure at all Xaa locations
  Clone ID: PAT_MRT3847_115119C.1.pep
MSSNSSRTEPIAQNIIKLISNLCFSVFVFSVLIFTVIAITYHPPDPWLESTPALTNLFTQSQNATFRIDSSVLKTGEDLAPSPQDPPLPSPPPSASAVTEAVIEKSEQQIANSTANSTADSTDSTDAALPSPPACDGTINCSNPRVRIAIQRFNLRAFKSIAFFDYQPPVNGSVAGECDVAWRFRNKRERSWRKYRDFRRFKIAVTDDCRYKVVHAGGWHSGANARRNMTRSGAARGXRPLPPRASSRDDEINDTIPTLGSETNF

SEQ ID NO: 159580 - protein, 134 aa, Glycine max
  Clone ID: PAT_MRT3847_11511C.1.pep
MAPFSGDETAPAFGILGAASGLVFSSMGAAYGTPNSGEGVASMAVMRPELEMQSIGPVVMEGVWGIYGRMIAVIIRTAIDARALAYYLGDGCAHLSSGHACGLGGLSARVGMGIDRDAGVRANAQHPKLFVGMN

SEQ ID NO: 159581 - protein, 267 aa, Glycine max
  Clone ID: PAT_MRT3847_115120C.1.pep
MASQSPQKQATTNAKPNSAPNYNVPGRQRSMKRVGGSSSTVSDPSQGNFSNPPPPPPPPPFPVYQLPPPIGPFAKPIGFPEFYYYQPVTVEQFTGMPFFAHSPPPTPFFSAAESPLSNMIVYQIEYYFSDANLVKDAFLRSKMDEQGWVPVTLIADFPRVKNLTTNIQLILDSLRTSTVVEVQGDKLKRLNEWMRWLPSAQRGSNSGAKTPRGTTQMNLEAPKSTNSVEETRGEEGASRALEVDAPPCSRYSIRSGLLLSWKCKVTS

SEQ ID NO: 159582 - protein, 76 aa, Glycine max
  Clone ID: PAT_MRT3847_115121C.1.pep
GVVLFSVATTFFPVLLWLKKTKPINLLFGGEFLLSPGKKASNSPQNEAQPVGETKLNNLNPIFFFIKNHPKNPLLF

SEQ ID NO: 159583 - protein, 78 aa, Glycine max
  unsure (1)..(78): unsure at all Xaa locations
  Clone ID: PAT_MRT3847_115122C.1.pep
XXXXXXXXXXWXXXXXAXLXXTSXXXXXXLXXRXXXXXXXXXEXXXXXXXXXLSXXXLXXVXGXXVXXDXGXSXXAXV

SEQ ID NO: 159584 - protein, 46 aa, Glycine max
  Clone ID: PAT_MRT3847_115123C.1.pep
DRVYLKDLFLLLVKLVFLSSNLFFRFDLVLYFFFQFDPLIFKIGSI

SEQ ID NO: 159585 - protein, 30 aa, Glycine max
  Clone ID: PAT_MRT3847_115124C.1.pep
DYRFCYPDCSYVIPNLRFQYVKGSVSDLNL

SEQ ID NO: 159586 - protein, 97 aa, Glycine max
  Clone ID: PAT_MRT3847_115125C.1.pep
KKLRNLKIKNTPFGNSALLMRVGKYKPMRPLWMSSCNVPIGARKALPKKMPGQNVEVFNGNKKVVRYVANAQKVKKRYLYKPLVGKRKTPPKHVWPR

SEQ ID NO: 159587 - protein, 82 aa, Glycine max
  Clone ID: PAT_MRT3847_115126C.1.pep
YTAMLNIYGSQGDVDKAMKLFDEMCKLGVELNVMGFTCLIQCLGRAMEFDDLVRVFDISVERGIKPDDRLCGCLLSVVSLSQ

SEQ ID NO: 159588 - protein, 274 aa, Glycine max
  unsure (1)..(274): unsure at all Xaa locations
  Clone ID: PAT_MRT3847_115127C.1.pep
SNSRRPTRPVANQLPIRXQRRPDGNRSCWSFGWDENALLQLKDGLGDDDIEVIYVGCLKEEVHPSEQDEVSQTLLETFKCIPTFLPADQFTKYYHGFCKQQLWPLFHYMLPLSPELGGRFNRSLWQAYVSVNKIFADRIMEVINPEDDYVWIHDYHLMVLPTFLRKRFNRVKLGFFLHSPFPSSEIYKTLPVREEILRALLNSDLIGFHTFDYARHFLSCCSRMLGLTYESKRGYIGIEYYGRTVSIKILPVGIHLGQLQSVLRMPQTEEKVCP

SEQ ID NO: 159589 - protein, 291 aa, Glycine max
  unsure (1)..(291): unsure at all Xaa locations
  Clone ID: PAT_MRT3847_115128C.1.pep
MGKKRKHSETTHDEAQPQKEDVAPGRPARTLLGWKDKNEVTDEVEDNSPIFRNREKVLVTCSRRINYRYRHLMLNVVSLLPHCKKENKVESKETKGATLNELVELKNCSSCLFFECRKQKDLYLWIAKCPNGPSVKFLVSAVHTMEELKLTGNHLQGSRPILTFSANFEKDAHWKLLKEMLLQIFETPKDHRKAKPFHDHVFVFSIVDDHIWFRNYQISAHHNESDKLPRGGLDKMTLIEVGPRFCLNPIKIFGGSFGGPTLYENPLYVSPNQIRALEKXKKVWKFAKKVK

SEQ ID NO: 159590 - protein, 62 aa, Glycine max
  Clone ID: PAT_MRT3847_115129C.1.pep
YHFDCKTRPARIEGGESTLCAYRAVQDIANTVLTTTHPIMLGLALNSSVFDYDILISTARAC

SEQ ID NO: 159591 - protein, 71 aa, Glycine max
  unsure (1)..(71): unsure at all Xaa locations
  Clone ID: PAT_MRT3847_11512C.1.pep
IEFTWYTIPFYFEMHQCINRDXIKWHYSSHLVYGRQDLSKXKVLYRPYKWDHESXIQRFIWWFDSSQKRDW

SEQ ID NO: 159592 - protein, 100 aa, Glycine max
  Clone ID: PAT_MRT3847_115130C.1.pep
MGKKRKHSETTQSVAQPKKEDAAPERPARTLLGWKDKNQVEDNNNADSPIFRNKEKLLVTCSRRINYRYRHLMLNLVTLLPHCKKDNKVESKETKGATLN

SEQ ID NO: 159593 - protein, 525 aa, Glycine max
  Clone ID: PAT_MRT3847_115131C.1.pep
MRIRSMSDKGRTLLLGVDDMDIFKGISLKLLAMEQLLIQHPEYREKVVLVQIANPARGRGKDVKEVQAETKATVKRINETFGKPGYDPVILIEEPLKFYERVAYYVVAECCLVTAVRDGMNLIPYEYIISRQGNETLDKVLGLASSPKKKSMLVVSEFIGCSPSLSGAIRVNPWNIDAVADAMDSALEMADLEKELRHEKHYRYVSTHDVGYWARSFLQDLERTCSDHVRRRWWGIGFGLSFRVVALDPNFKKLSMEHIISAYKRTATRAILLDYDGTLMPQSSTIDKSPSSKSIEILSSLCRDKNNMVFLVSARSRKMLSEWFCPCENLGVAAEHGYFLRMKRDEEWETHVAATDTSWKQIAEPVMKLYTETTDGSTIEDKETALVWCYEDADPDFGSCQAKELLDHLESVLANEPVTVKSGQSNVEVKPQGVSKGLVATRLLSAMEEKGMCPDFVLCIGDDRSDEDMFEVITSSMGSPIAAKAEVFACTVCRKPSKAKYYLDDTTEIVRLLQGLACVSEQIDK

SEQ ID NO: 159594 - protein, 128 aa, Glycine max
  unsure (1)..(128): unsure at all Xaa locations
  Clone ID: PAT_MRT3847_115132C.1.pep
KTVSFINNFYPIYDLHLCSSDTWFATWYPEPQEIQKWCLSTGLTVFCLLVKILLYFFKLSPFWLVNPLDDTCLHSPSDTPIKHMVHHMPLCLFSPCLKGTMNTEFYTWFLVPLXFDWDFESYFSRYIR

SEQ ID NO: 159595 - protein, 81 aa, Glycine max
  unsure (1)..(81): unsure at all Xaa locations
  Clone ID: PAT_MRT3847_115133C.1.pep
RGGGFFVKKVPLFISGVGXISFNPQRDKLLPKGQYEPLPPPLFGVKIARGFPRGVAFTPMVFGSRFLAYLFLGGGKLLAGN

SEQ ID NO: 159596 - protein, 180 aa, Glycine max
  Clone ID: PAT_MRT3847_115134C.1.pep
MNRLCVPFGVAEGLAFLHHVAIIHLDISSGNVLLDANSKPLVAEIEISKLLDPTKGTASISAVAGSFGYIPPEYAYTMQVTAPGNVYSYGVVLLEILTTRLPVDEDFGEGVDLVKWVHSAPVRGDTPEQILDAKLSTVSFGWRKEMLAALKVAMLCTDNTPAKRPKMKNVVEMLREITEN

SEQ ID NO: 159597 - protein, 66 aa, Glycine max
  unsure (1)..(66): unsure at all Xaa locations
  Clone ID: PAT_MRT3847_115135C.1.pep
RECISIHIGQAGIQVGNAGWELYCLKPRIGPRGQMPSGQPFGGGDEAFKSFFKRXGAGKPVPLPGL

SEQ ID NO: 159598 - protein, 60 aa, Glycine max
  Clone ID: PAT_MRT3847_115136C.1.pep
GIRHEVKTKSLLYLLHLQFSFHTPTCHHGFRFLLGVITEPPRSSPKPFLRSLLATNATPR

SEQ ID NO: 159599 - protein, 71 aa, Glycine max
  Clone ID: PAT_MRT3847_115137C.1.pep
FGPIGLAANTLSLQTIHKTFFCSLVREPFGKKARQSLMLFFIALSGVSLHDCLCSTLTFPLSTFFTWTSKN

SEQ ID NO: 159600 - protein, 46 aa, Glycine max
  unsure (1)..(46): unsure at all Xaa locations
  Clone ID: PAT_MRT3847_115138C.1.pep
IRRMSDKVSINRSKSNKVFYVVYNNRINKRMIKFIMTTLLGLYXYI

SEQ ID NO: 159601 - protein, 159 aa, Glycine max
  unsure (1)..(159): unsure at all Xaa locations
  Clone ID: PAT_MRT3847_115139C.1.pep
MQMLPTTAAILTLTLDYIDYNNDHDIRVLIFIDASIADTDLNDILTIKSTTQDTELALTGFTDMDANRKQLDVEEXANRNGYVREGKSMIYDLDKASAXYIKCLWRHETVQFTKMDMVPSANVHSCDHTIEYVNANANGTDNYDRELEDVIDKLIGECD

SEQ ID NO: 159602 - protein, 87 aa, Glycine max
  Clone ID: PAT_MRT3847_11513C.1.pep
ALVSFCGVVLVSRAIVVRSGFLILIHMPRRNEYGSGAAPPIGTFCIYRTIPIAWRSRCQTLLFRDLAQPSWLSLVPPPPPKKEDVIQ

SEQ ID NO: 159603 - protein, 49 aa, Glycine max
  Clone ID: PAT_MRT3847_115140C.1.pep
VLLLSSLVVHLFLLVFRKDHGCCVSLRCWHTSHLSRTCHIALLTEIHIL

SEQ ID NO: 159604 - protein, 123 aa, Glycine max
  Clone ID: PAT_MRT3847_115141C.1.pep
PNGRNFNIIQNQLDHVVSYDLEWTNGTSFVYTLDPSDPTCKVVDFGVGILRPNWLDGATYLGQQHVDNFLCNVWAKVDFIVYYEEVLTRRPVRWDFSSGTTHTSILKLLILQEIFTSNGPLSS

SEQ ID NO: 159605 - protein, 63 aa, Glycine max
  Clone ID: PAT_MRT3847_115142C.1.pep
GRSRLRLKFRSKGFFPSRSPDAPPPKRYDKRTFVPRSRFRSSFASGQKGLVFYGDARPDFGSR

SEQ ID NO: 159606 - protein, 145 aa, Glycine max
  Clone ID: PAT_MRT3847_115143C.1.pep
PKSLHCFGLEVLPQRFLAVFVSNQHFAYQHSPRSLCRALRCASSARRSNTSRSVEHCLASSPFQGSAAEHRSSHPYRSDPVYSLQSYVTERSRSSVQCVARPMLECPVRTVQVRAFDHVTNTHYHVRVSYRYLVVQYHGPFRLEP

SEQ ID NO: 159607 - protein, 51 aa, Glycine max
  Clone ID: PAT_MRT3847_115144C.1.pep
WAAAMVTWVTQTNRNDCFCFRVCVCVCFRERERERERVLICFFFFFFKLIN

SEQ ID NO: 159608 - protein, 62 aa, Glycine max
  Clone ID: PAT_MRT3847_115145C.1.pep
MDNGRTGRDVSTYDLTIAYAFMLTTSSMMELSNWINVPISAKHKELARYDHVSLYVTTFWMA

SEQ ID NO: 159609 - protein, 49 aa, Glycine max
  Clone ID: PAT_MRT3847_115146C.1.pep
KDCGSTDCNHHISLSMKFKAHSYRVQLKTQSMTREHPPLSTKKGGKRMN

SEQ ID NO: 159610 - protein, 83 aa, Glycine max
  Clone ID: PAT_MRT3847_115147C.1.pep
SCKKCFSFIFFLDQINTFCKIHIFSPKDPRFAICKVRAFPSIQPNPTNIFSSDNQDFTKSPPLSSSRSSKIFKPQIIKKIRFL

SEQ ID NO: 159611 - protein, 86 aa, Glycine max
  Clone ID: PAT_MRT3847_115148C.1.pep
NQGLQHPFSHPPLGSGVAFVETTVAEGGAASAKAFTFPLLLVLLDSGLLVAAGASPSFPESITTGYCSSFVVCNVEIVTGVYIEDA

SEQ ID NO: 159612 - protein, 47 aa, Glycine max
  Clone ID: PAT_MRT3847_115149C.1.pep
KLGTFWAARFFFFIPFFFLDKNFLIDSIVNATDRSMLWHFRVGPTSN

SEQ ID NO: 159613 - protein, 79 aa, Glycine max
  Clone ID: PAT_MRT3847_11514C.1.pep
QVSLPRHLLLIRVLLVPSNSENLTTNYYCVLKSDICPYPTIQQKIEILRRFPFGYGSTWTITYGFILHNHSPKCVGVAD

SEQ ID NO: 159614 - protein, 78 aa, Glycine max
  unsure (1)..(78): unsure at all Xaa locations
  Clone ID: PAT_MRT3847_115150C.1.pep
PSDATDAAKETTDYAAQKTKDYASDAPDAAKSTKDCAAHSTNGYASSGAQSTKDCATGAAHXTKDYASNAXARGKDHA

SEQ ID NO: 159615 - protein, 61 aa, Glycine max
  Clone ID: PAT_MRT3847_115151C.1.pep
TEMNEMGAVSASKSHNLGHAKRLKIQVHVNQVTQPNKKISNFRIAELARSHDFTNKISSIC

SEQ ID NO: 159616 - protein, 61 aa, Glycine max
  Clone ID: PAT_MRT3847_115152C.1.pep
SISVIPTDTVMLTICLDMHSRSILQFVTYLKILLTDTFGIQLPSKKKKKTFGIQLPCFEND

SEQ ID NO: 159617 - protein, 98 aa, Glycine max
  Clone ID: PAT_MRT3847_115153C.1.pep
MNILLCLSLSLSLSRSLTHSLCHASCYDMFLSFSFYATSGVLHSLSYLSLTFLTLRGCEDGFGVWTRWIRRRQTSSPVARQRYRFFDFVAVNHGGGWF

SEQ ID NO: 159618 - protein, 170 aa, Glycine max
  unsure (1)..(170): unsure at all Xaa locations
  Clone ID: PAT_MRT3847_115154C.1.pep
LRARHPRTALFSLVVAVITSVLIGVLLAIVLMISRNEYPSLFSNDTEVQDLVKDLTPFLCFCIVINNVLXVLSGVAIGAGWQALVAYVNIACYYLFGIPVGLVLGYKLDWGVKGIWLGMISGTILQTCVLLVLIYKTNWNEEASLAEDRIRTWGGHKKATVNDTENTQET

SEQ ID NO: 159619 - protein, 198 aa, Glycine max
  unsure (1)..(198): unsure at all Xaa locations
  Clone ID: PAT_MRT3847_115155C.1.pep
LLRALXXSXXXMNPIPQRIVHXXXIEILXTIXPSVILMFIAIPSXALLYSMDDIVVDPAITIKAIGHQWYWTYEYSDYNNSDEQSLAFDSYMIPEDDLELGQLRLLEVDNRVVVPAKTHLRVIITSADVLHSWAVPSLGVKCDAVPGRLNQISTFIQREGVYYGQCSEICGTNHAFMPIVIEAVSTKDYGSWVSSQVN

SEQ ID NO: 159620 - protein, 168 aa, Glycine max
  Clone ID: PAT_MRT3847_115156C.1.pep
MDAETESPAPETSPAVIHPAVAPISYLLGTWRGQGEGGFPTINSFSYGEELHFSHSPNKPVIGYTQKTWKLSSGEPMHAESGYWRPKPDGTIEVVIAQSNGLVEVQKGTYSAEEKVIQLQSEIVGNASKVKEIRRCFQLVDGNLCYDVQMATNKITLQPHLKASLKKL

SEQ ID NO: 159621 - protein, 105 aa, Glycine max
  Clone ID: PAT_MRT3847_115157C.1.pep
ARALPTSTFGMQLYLTILTVMTITLDAESSDTIDILQVKIHDTDRMPPDHHRLTFAVMQLDDCRTLADYNIQKERTLQLMLRLRGGMQDIANTLTGTTMTLQVES

SEQ ID NO: 159622 - protein, 76 aa, Glycine max
  unsure (1)..(76): unsure at all Xaa locations
  Clone ID: PAT_MRT3847_115158C.1.pep
QLDSLFATYASTFPAIASHCEIHELSIXLAMSCMSDXSSHFYHSAHKXLSYHCALITRGITLADMDYVLAIESCIP

SEQ ID NO: 159623 - protein, 144 aa, Glycine max
  Clone ID: PAT_MRT3847_115159C.1.pep
KIFIFVKSQGDSILGANPMNRRFLVGCGPNSPKRGPHRGASIVLYKKKKGFIGGPQGYYNWYGSRAPNPNVLVGALVGGPYGKTIFWGKRNIFLRFGGGPNNTAPLVGVFAKFLQKKPQKGVHDCNSHWVAPFKKKSPSKKKGN

SEQ ID NO: 159624 - protein, 136 aa, Glycine max
  Clone ID: PAT_MRT3847_11515C.1.pep
IPTPLLAPRVTMSDVKLKGYDIPAKTMVYINAWAMQRDPKFWERPEEFLPERFENSKVDFKGQEYFQFIPFGFGRRGCPGMNFGIASVEYLLASLLYWFDWKLPETDTQDVDMSEIFGLVVSKKVPLLLKPKTFSF

SEQ ID NO: 159625 - protein, 151 aa, Glycine max
  Clone ID: PAT_MRT3847_115160C.1.pep
GRLTAQLCGYKGLKYTSPTLASALSNLIPAFTFILAIIFRMEKVALRSPSTMAKILGSLVSISGALIVVLYKGPIILSTSSPQPSPTTDSPMDSTSQTNWVLGGSLLAIEFLLVPIWYIVQTNIMKQYPAEFIVVFLYNLTGTLISTPIWL

SEQ ID NO: 159626 - protein, 61 aa, Glycine max
  Clone ID: PAT_MRT3847_115161C.1.pep
SQITKQKCYMSCAPLPQIRYMSCAPLPQIPDLDVSFDSICVIIFLFFKKKKKKKKKKKKGR

SEQ ID NO: 159627 - protein, 320 aa, Glycine max
  unsure (1)..(320): unsure at all Xaa locations
  Clone ID: PAT_MRT3847_115162C.1.pep
MRRNHSNSGNYRNPCLTMHQPWASLLVYGIKRVEGRSWPAPITXKVPEESTIKAMEYFYKEIYALNGITDIQFPQHYPVSRLLGCVEVVGCLTRDELACWEMVPEGVRVEAQTDYCWLCERPQKLLIPFEMRGYQGVYNLEKKIYEAAVRGLSPVNSPWPVKFPLPDPQNPFSLKPGSISALTSNLKATEVDKSSSISLAIAGAQAAATQFSKKDQNSHSTAQNNAPTNMNANNEDTEVATSYNLRSQGRSMEKGNISSTKLSKTFDDLTLPSYHEEKSSRNRSEGSSKQNRSPGAEADLRQFPQPPSKIFAAALKGLRH

SEQ ID NO: 159628 - protein, 136 aa, Glycine max
  Clone ID: PAT_MRT3847_115163C.1.pep
PHWRGGWIGSSRLNTGLHTALTHAGTEKGEEECCFALSLSQQSHYQFPFNDSLTEAVAMIDDITLNSALINAYIKAHHHIQHLTTHTSPDSVASPGGKARHKGLQIPLHIRLLCEPLSVPALTFGLISIHELLQQL

SEQ ID NO: 159629 - protein, 165 aa, Glycine max
  Clone ID: PAT_MRT3847_115164C.1.pep
MICWCEKEGELKIRFWGEEKRSEAMRRNHSNSGNYRNPCLTMHQPWASLLVYGIKRVEGRSWPAPITGRLWIHSASKVPEESTIKAMEYFYKEIYALNGITDIQFPQHYPVSRLLGCVEVVGCLTRDELACCEMVPERVRVEAQTDYCWLCERPQKLLIPFEMPG

SEQ ID NO: 159630 - protein, 124 aa, Glycine max
  unsure (1)..(124): unsure at all Xaa locations
  Clone ID: PAT_MRT3847_115165C.1.pep
MLICLHRCTFQNGDFGILIRSXGFSIPTALFVHFLSALEALAATALALLSSKDTGQSCMIEGHTAXASIYIALSVVLAPLISRGNTTLINTVVQMIFLTMVMAVALGIALVERMKCGLFKTRMP

SEQ ID NO: 159631 - protein, 415 aa, Glycine max
  unsure (1)..(415): unsure at all Xaa locations
  Clone ID: PAT_MRT3847_115166C.1.pep
MNSLTASFTARICATRRDLLLPIRHRSLHPFTTRRVATKLTPPRIVCMAEPYLITKLESAEKTWKELSVKLADPDVVSDPKEYQKLAQSVSELDEVVSTYRRFKDCEKVLEETKALAKDDGNDEDMVEMISFEIDTLSKQLAELEEKIKVLLLPSDPMDARNILLEVRAGTGGDEAGIWAGDLVRMYERYSERNSWKYSLVSSSAAEKGGYKTYVMEIKGNRVYSKLKYESGVHRVQRVPLTETQGRVHTSTATVAIMPEADEVEVVIDPKDIELTTARSGGAGGQNVNKVETAIDLFHKPTGIRIFCTEERTQLKNRNRAFQLLRAKLYEIKVREQQESLRNQRKLQVGTGARSEKIRTYNYKDNRVTDHRLKINYELTSFLDGDIEDAXTSCVTMEQKELLEELAESVGAPAG

SEQ ID NO: 159632 - protein, 107 aa, Glycine max
  Clone ID: PAT_MRT3847_115167C.1.pep
MMVIMHLAHKIMQNKQFRASTQADDEYDFEDGPSRKSRKKQGGDDHKSIQKKTNRFLTQQERCLFCLENPNRPMHLVVSIANFTYLMLPKWQPVVPGHCCILPIQVT

SEQ ID NO: 159633 - protein, 81 aa, Glycine max
  unsure (1)..(81): unsure at all Xaa locations
  Clone ID: PAT_MRT3847_115168C.1.pep
SGKLTTSITIMITLPSTGLIMSXLSLLCTFNPLYTISLPRINSHSKVFIATSSPLTTSTINLPQTLFERFTXKTIKVIILS

SEQ ID NO: 159634 - protein, 100 aa, Glycine max
  Clone ID: PAT_MRT3847_115169C.1.pep
MHMNMMKKVCGGFALIVLVALVLLVIPPKAEAVTCSPVELSPCLGAITSSSPPSTTCCQKVREQRPCLCGYLQNPSLRQYVNSPGSRRVASSCGVPFPTC

SEQ ID NO: 159635 - protein, 82 aa, Glycine max
  Clone ID: PAT_MRT3847_11516C.1.pep
QTGQLDLLILDALEKTGSSNVHFCLPQTIETVKWLCPKQTLLIGMNHKFDHHKDNEFLMEWSRREGLSMQLAHDGLRVPINL

SEQ ID NO: 159636 - protein, 41 aa, Glycine max
  Clone ID: PAT_MRT3847_115170C.1.pep
PSWLWTLFTLSKGRAGPYQVLMDTNLGSGVGFLVTFGDYRC

SEQ ID NO: 159637 - protein, 40 aa, Glycine max
  Clone ID: PAT_MRT3847_115171C.1.pep
KFEIFSELSVCVITLKIHYLQHQIPNLKNQWILLWGYEKA

SEQ ID NO: 159638 - protein, 63 aa, Glycine max
  Clone ID: PAT_MRT3847_115172C.1.pep
LEQQAKFQGHALASNNNKYICTYYITEFGYNKKEYVIICFIILRFLTVQLSVLICSGIIFHFI

SEQ ID NO: 159639 - protein, 84 aa, Glycine max
  unsure (1)..(84): unsure at all Xaa locations
  Clone ID: PAT_MRT3847_115173C.1.pep
MRCLSPDPALXHPMRGWAMKLESQGDGRVRIARGETVWFDVFEMDVTSLSSVLSVKACCVGLVEGRGRGGRVVAASSDGARXFA

SEQ ID NO: 159640 - protein, 274 aa, Glycine max
  Clone ID: PAT_MRT3847_115174C.1.pep
GGSGITPFISIIRSLIFKANTEGSKTPRVLLVCAFKKSIDLTTIDLILPVSATCTAFDISRLQLQIEAYVTREKQPDMNDKKLIQTLWFKPNALDEPVSAVLGQNSWLYLSIIISSSFMLFLLLIAILTRYYIYPIDHNTDMIYPYFSRSSLSMLFICISIAFVATSAFLWNKKQNKDLGQIKNIYTSNSSTSPGSGYYNADRELGSLPLQSLVQTAKVHYGERPNIKKILSGCNGSSIGVLVSGPRKMRHEVGSLCTSCSTDDLHFESLSFSW

SEQ ID NO: 159641 - protein, 60 aa, Glycine max
  Clone ID: PAT_MRT3847_115175C.1.pep
IRIWKSMVHSHQHQPHFHVRSQLSWVLPKRPHHSPKFLVVITIPSLSKGKGFLESRSVRR

SEQ ID NO: 159642 - protein, 198 aa, Glycine max
  Clone ID: PAT_MRT3847_115176C.1.pep
MVLPKFSPFSRLLLSSLVILLISYPVKCDDDEEDNLYQGINKYRASLNLKALTRNDNANCLAEKIADQFKKQPCTNTTGANTVPGTEPQFSNYPDLLSKCDLAISNTRDGNVMPACVPGLVPSLVLANFTKSLYSDSLNDTKYTGIGIGSEDNWIVVVLTTNTPSGTFAPYSSDGANLISKSGLIYCSVLFLGYIFLL

SEQ ID NO: 159643 - protein, 48 aa, Glycine max
  Clone ID: PAT_MRT3847_115177C.1.pep
FWTQIVGGMDDQFLTGHRHSREPMAKGLIHEKALKAQIFCHNGCHEFF

SEQ ID NO: 159644 - protein, 61 aa, Glycine max
  Clone ID: PAT_MRT3847_115178C.1.pep
YELIKSRFPPNNTNLSWDALTKVDKKKLYMYGSIYSPISALYDSFLYTSYSPLKCLLSNHI

SEQ ID NO: 159645 - protein, 80 aa, Glycine max
  Clone ID: PAT_MRT3847_115179C.1.pep
MPQEFTKAFFHKKRLLPSSAPSTKNEPKAVHSNVYFMNNDIHPHFYQQSNVYCNGHLELTTYNTHKQYLMVLYTLNHPFY

SEQ ID NO: 159646 - protein, 243 aa, Glycine max
  unsure (1)..(243): unsure at all Xaa locations
  Clone ID: PAT_MRT3847_11517C.1.pep
MDPETALELVKHGVTLLLLDVPQYTLVAVDTQMFSVGPAFKGIKMIPPGVHFVYYSSSSRDGKEFSSIIGFFIDAGPSEVIVRKWDQQEERLIKLSEEEEERYSQAVKNLEFDRQLGPYNLSHYEDWKQLSNFITKSVIERLEPIGGEITVECENEIVRNATKMPMEDALGKQLKVGNSATSVGKSRRKGCYYTSIPHVVKCKGISGQELTSLNLDKTHLLETLLTKXYGDSEDLLLGDCSLH

SEQ ID NO: 159647 - protein, 46 aa, Glycine max
  Clone ID: PAT_MRT3847_115180C.1.pep
SNVRCIVAKVSSYARGEFTNMVVAGPHCPHRADDIAIIGCAIQYVS

SEQ ID NO: 159648 - protein, 102 aa, Glycine max
  Clone ID: PAT_MRT3847_115181C.1.pep
TTTTTTRFVFSTASSSAASTSTTKDSRRTPLPPSSSPQRTPFRCRFFQYTTLLFIVIILFCHSFFLTMAFIQVVAFCSYVTASRGLKRRRPWCHAKCVCERL

SEQ ID NO: 159649 - protein, 110 aa, Glycine max
  unsure (1)..(110): unsure at all Xaa locations
  Clone ID: PAT_MRT3847_115182C.1.pep
LHSRIPLVCTSXELTVRRPRKRPXGPVPNPSPDRLSTPRSLXVSSSTRQRTTAGLGTWTPVPSPQSQSFSLGYGSIIPTSLAYIVPSTRVCSPRRHYAVIRTKRRRRHSV

SEQ ID NO: 159650 - protein, 83 aa, Glycine max
  Clone ID: PAT_MRT3847_115183C.1.pep
NPGNWPFYKHLGGVHWGPWPVPGFGGNLGPNCGVKKRGGGRISFFLGAPKLNCPAGVVPPLDGENPGGTQFNCLGGKTPFTGG

SEQ ID NO: 159651 - protein, 100 aa, Glycine max
  unsure (1)..(100): unsure at all Xaa locations
  Clone ID: PAT_MRT3847_115184C.1.pep
NTKPCPQLYLYSTADKVVPCQSIETLIEEQRKMGKRVRSFNFGLSPHVDHXNKSKVAQSSEKFLSPNVDHNRTFPDLYLSQLSEFLNECFATSKQRTHKC

SEQ ID NO: 159652 - protein, 538 aa, Glycine max
  unsure (1)..(538): unsure at all Xaa locations
  Clone ID: PAT_MRT3847_115185C.1.pep
SISKFPRFEFLVLASSVLNELGSSEYYPYFIKRLVSMAMDRHDKEKEMASVLLSALYGGGGGGYIFLYLXILALFLRAVVDDILPPAFLARARKALPESSKGVQVIQTAEKSYLSAPHHAELVERRWGGSTHITVEEVKKKIGDLLREYVDSGDTLEACRCIRELXSFFHHVLALILAILLKEAAEEGLVSSSQMVKGFSRLAESLDDLALDIPSAKALFQSFVPKAISEGWLDASLTKPATEDGEIQEDEKVRKYKKESVTIIHEYFLSDDIPELIRSLEDLGAPEYNPIFLKKLITLAMDRKNREKEMASVLLSALHIEIFSTEDIVNGFVLLLESAEDTALDILDASNELALFLARAVIDDVLAPLNLEEIGSRLPPKCSGSETVRMARSLIAARHAGERLLRCWGGGTGWAVEDAKDKIMKLLEEYESGGVVSKACQCIRDLGMPFFNHEVVKKALIMAMEKKNDHMLDLLQECFSEGLITINQMTKGFTRIKDGLDDLALDIPNAKEKFGFYVEHAQSKGWLLPLFDSPATDA

SEQ ID NO: 159653 - protein, 231 aa, Glycine max
  Clone ID: PAT_MRT3847_115186C.1.pep
MEGLKVSKANLTVYIHPSKSNQVSQAVLRQLSSLLFTFSEIFDGVVLAYDVNSFDTCAKILSGVHPYFGVKLKVNLLLFSPKPNMLLGKVVKVTQESIHVVVLGFSSAIISEKDIREEFVCKTKRGQEVYVSRSHKRHVIKVGTMIRFLVKSFDEEILHVYGSLVPDHTGSIYWLDKNLEVDSHSDRSEKKRRIVPERIMLEQDAVDGELSTLNIGQKSKKSKKQKHQEES

SEQ ID NO: 159654 - protein, 182 aa, Glycine max
  Clone ID: PAT_MRT3847_115187C.1.pep
VELASSDLRELGSSEYYPYFIKRLVSMAMDRHDKEKEMASVLLSALYADVISPAQIRDGFFMLIESSDDLAVDILDAVDILALFLARAVVDDILPPAFLARARKALPESSKGVQVIQTAEKSYLSAPHHAELVERRWGGSTHITVEEVKKKIGDLLREYVDSGDTLEACRCIRELGVSFFHH

SEQ ID NO: 159655 - protein, 411 aa, Glycine max
  Clone ID: PAT_MRT3847_115188C.1.pep
MKKSSGSSQKLGSFLSPGAPNYSEKSIGSQKGWSSERVLLQPSSSNIRNASVANLTPFNSGRTIPSKWDDAERWICSPVSGYSNNKTNSYAQLQQRRPKSKSGPIMPPGTGYYSNYSPTIPLRQGLVVKNFMMGGSPFSTGVLAPDAISLHHYYSHEAVFGHRYDFDNSMQCSSPLLNENSVALPSVSSAPMWSELLCDPSSPNSQDEKRKETKNADDVTSLSKCDKGTQMSPPETENDAPKSSPNSTMDQQNYLSAKLEVRDVEIDREATTVRWSKSHVPKLSLLPGIHSRKSSRTEAKASGLDIADSTLDSSKIQREEAKIVAWESLQKAKAEAEIRKLEMKLEKKKSSSMDKILNKLRRAQMKAEKMRNQITVQEGQQVSNTRKVFSFHKYAQIWSPRSCFGTHALHD

SEQ ID NO: 159656 - protein, 681 aa, Glycine max
  unsure (1)..(681): unsure at all Xaa locations
  Clone ID: PAT_MRT3847_115189C.1.pep
MASSEGFLTDGQREILKIASQNVENLSSSPKSPSSLLAEHHHHVRAPSGGGKAQTAGHAARNVRRSHSGKYGRAKKDGAGGKRTGGKLFKRGGESRIDKVIHAKDKIMKLLEEYESGGVVSXACQCIRDLGMPFFNHEVVKKALIMAMEKKNDRMLDLLQECFSEGLITINQMTKGFTRIKDGLDDLALDIPNAKEKFGFYQLFEDVCVLLFLSCVLSFSSLFQNLLREVQVIHTAEKSYLSAPHHAELVERRWGGSTHITVEDVKKRIADLLREYVDSGDTLEACRCIRELGVSFFHHEVVKRALVLAMEIHSAEPQLLKLLKEAAEEGLISSSQMVNGFSRLEEVLDDLALDIPSAKTQFQSLVPKAISEGWLDASFLKPSSEDGDIVVEDEKVRKYKKEVVTIIHEYFLSDDIPELIRSLEDLGAPEYNPIFLKKLITLAMDRKNKEKEMASVLLSALHIEIFSTEDIVNGFVMLLESAEDTALDILDASNELALFLARAVIDDVLAPLNLEEISSKLPPKCSGSETVRMARSLVAARHAGERLLRCWGGGTGWAVEDAKDKIMKLLEEYESGGVVSEACQCIRDLGMPFFNHEVVKKALVMAMEKKNDRMLDLLQECFSEGLITINQMTKGFTRIKDGLDDLALDIPNANEKFSFYLEHALKKGWLLPSFDSTATDV

SEQ ID NO: 159657 - protein, 379 aa, Glycine max
  unsure (1)..(379): unsure at all Xaa locations
  Clone ID: PAT_MRT3847_11518C.1.pep
MVIVALSSSLPAGRNLFSSIPPTPPPPTTVSATPQPPIPIPKYPPPRKNPNHXPPQNPALKHHRRSKYHRPVPRDGGIIASDGADRAVVIGESGVSYLLPGAPFEFQFSYSETPKAKPIAIREPAFLPFAPPTMPRPWTGKAPLKGKKSKKVPLFDSFNPPPAGTKGVKLVEMPGPFPMGQFPLEGKSREEILGEPLKKWEIHMLVKPMMSYNRQVNLGRDGLTHNMLELIHSHWKRRRVCKIRCLGVPTVDMDNVCHHIEEKTGGKIIHRVGGVVYLFRGRNYNYSTRPQYPVMLWKPAAPVYPKLIQDAPGGLTKDEADELRMKGKSLLPICKLAKNGVYTSLVKDVRDAFEGSILVKINCKGLDPSDYKKIGAKLK

SEQ ID NO: 159658 - protein, 94 aa, Glycine max
  Clone ID: PAT_MRT3847_115190C.1.pep
MKKSSGTSQKLGSFLSPGAPNYREKSIGSQKGWSSERVLLQPSSNSIRNASVANLTPFNSGRTIPSKWDDAERWICSPVSGYANNKTNSYTQLQ

SEQ ID NO: 159659 - protein, 296 aa, Glycine max
  Clone ID: PAT_MRT3847_115191C.1.pep
MAAVAEIPADANKMDSKPKAESEFSVQKLVDMFTKLNPLAKEFFPSSYSPNHDNRFQGFNQLSPTHFLVSTKPSADENFPNNRRRRNSFNQGRRKVSGRSLKAQREDSIRRTVYVSEIDQHVTEERLAALFSSCGQVIDCRICGDPHSVLRFAFVEFADEYGARTALNLGGTVLGYYPVRVLPSKTAILPVNPTFLPRSDDEREMCARTVYCTNIDKKVSQAEVKNFFESACGEVMRLRLLGDHVHSTRIAFVEFAMAESAIIALNCSGMLLGTQPIRVSPSKTPVRPRVTRPASH

SEQ ID NO: 159660 - protein, 56 aa, Glycine max
  Clone ID: PAT_MRT3847_115192C.1.pep
IVLRLCYGPVNGCYRHPWGRSAYLLVSHTDLKTHAYSEFFICVNQSNFRLEDQRQV

SEQ ID NO: 159661 - protein, 69 aa, Glycine max
  Clone ID: PAT_MRT3847_115193C.1.pep
SCLGEYKEGKNSFAKRFNFVNMSTSFCTLNSDSALGFESILLASAGISATAAMENQSHHPTKTLNNLQH

SEQ ID NO: 159662 - protein, 119 aa, Glycine max
  Clone ID: PAT_MRT3847_115194C.1.pep
KPCNQWKKSIVLTDTQFQVYPAVKRNFPADYCCEEVGKTTVWVLLTSPMEENLYTGPLARTKDTELKVKLGLYLLHAEMNGHRGPLTGPWRVRPRTLTYLLHNLCGPDLQARKRRDLPF

SEQ ID NO: 159663 - protein, 210 aa, Glycine max
  unsure (1)..(210): unsure at all Xaa locations
  Clone ID: PAT_MRT3847_115195C.1.pep
GRRVSGRSLKAQREDSIRRTVYVSEIDQHSFFLVXVTEERLAALFSSCGQVIDCRICGDPHSVLRFAFVEFADEYGARTALNLGGTVLGYYPVRVLPSKTAILPVNPTFLPRSDDEREMCARTIYCTNIDKKVSQAEVKNFFESACGEVMRLRLLGDQVHSTRIAFVEFAMAESAIIALNCSGMLLGTQPIRVSPSKTPVRPRVPRPASH

SEQ ID NO: 159664 - protein, 63 aa, Glycine max
  Clone ID: PAT_MRT3847_115196C.1.pep
DQGTDIKLVNDGAIVHLCGPPPAALSYQVPITLTAGRSLTKSHQECPRQQLEQTWPRFTRTRR

SEQ ID NO: 159665 - protein, 101 aa, Glycine max
  Clone ID: PAT_MRT3847_115197C.1.pep
MSRNSVTIMNVLVFFAAKILEAWQCHAYHMFPLRMNTGYGARTPVVKCASWMLAVVAHNIVGFGTIPEKCVESTDAYIHGEDYRSDSKPVKQHTYFYARDL

SEQ ID NO: 159666 - protein, 98 aa, Glycine max
  unsure (1)..(98): unsure at all Xaa locations
  Clone ID: PAT_MRT3847_115198C.1.pep
MATIDSMRARQMFHRRGNPTGEADSTRSDGTLARAACPSGAPTGRAEARESRDGRPDHQGKGASKAVDNVNTXLAPALNATDPTEQTAPDNGTDQQQD

SEQ ID NO: 159667 - protein, 64 aa, Glycine max
  Clone ID: PAT_MRT3847_115199C.1.pep
GSVYHLSDNPCQYPITLFLLQVQVQLIRGINSHTPCQFLTALSLRLSFAVKTRETFVSKWDLFF

SEQ ID NO: 159668 - protein, 139 aa, Glycine max
  Clone ID: PAT_MRT3847_11519C.1.pep
RVSLLLLLDVPQYTLVAVDTQIGNATLFFFSMFSVGPAFKGIKMIPPGVHFVYYSSSSRDGKEFSSIIGFFIDAGPSEVIVRKWDQQEERLIKLSEEEEERYSQAVKNLEFDRQLGPYNLSHYEDWKQLSKFITKSVIE

SEQ ID NO: 159669 - protein, 57 aa, Glycine max
  Clone ID: PAT_MRT3847_1151C.1.pep
KTGEKEENVLQTKGDKLCVRKGPLKRYKGRRIDDLSRVYGQHESLTYSCSFKKKNTG

SEQ ID NO: 159670 - protein, 90 aa, Glycine max
  Clone ID: PAT_MRT3847_115200C.1.pep
LQAWFLLQIFRLLVAPPLLVLIFFSLLNFPFCRDFFPGNCLKKTLFSFSPFFFFFPLGGAPVFFFENPFRAFLFWLALQTNVWGFLDNPP

SEQ ID NO: 159671 - protein, 53 aa, Glycine max
  Clone ID: PAT_MRT3847_115201C.1.pep
FSDEESRSLLETPCSCLVFETLSLPRYYVLVSVDLCCTCIELGCSNRGLSTLK

SEQ ID NO: 159672 - protein, 90 aa, Glycine max
  Clone ID: PAT_MRT3847_115202C.1.pep
PPAESESEFEGSLFEFSDDDNFESKRSSSSINENGSDYNNEIINNNNNGANNVNYHNNNFNNNNGDNNGFHENQDATTDTIYSSDEGFDI

SEQ ID NO: 159673 - protein, 74 aa, Glycine max
  unsure (1)..(74): unsure at all Xaa locations
  Clone ID: PAT_MRT3847_115203C.1.pep
SXARVRKXGIRXEDCPLHLPLFXXKXXXKXXKXIXXLFLXXLWXSLXVNXRXXQXFXKXXPLXXXXKVKXGXQK

SEQ ID NO: 159674 - protein, 131 aa, Glycine max
  Clone ID: PAT_MRT3847_115204C.1.pep
MEAGEDCCVKVAVHVRPLIADEKLQGCKDCVTIVSGKPQVQIGAHSFTFDHVYGSTGSPSSSMFEECVAPLIDGLFQGYNATVLAYGQTGSGKTYTMGTGFKDGCQTGIVPQVMNVLFSKIGTLKHQIDFQ

SEQ ID NO: 159675 - protein, 118 aa, Glycine max
  Clone ID: PAT_MRT3847_115205C.1.pep
GRVGVTEVWENMVDKKFYPSVSTYSVMIHGFCKKKGKLEEACKYFEMMIDEGIPPYVTTVEMLRNRLLGLGFIDHIEVLAAKMRQSTSYAIQELANIMIGNRTAHNTLGRDEMDIESD

SEQ ID NO: 159676 - protein, 84 aa, Glycine max
  Clone ID: PAT_MRT3847_115206C.1.pep
KKRNGRGPINNNRGTFGTFFFLSFPLFVDIYIYIYMGTIFSIAQHSTLPFFSRDQFLPRNNGFGLIDPPSKRGGGEIEIGLQLT

SEQ ID NO: 159677 - protein, 96 aa, Glycine max
  unsure (1)..(96): unsure at all Xaa locations
  Clone ID: PAT_MRT3847_115207C.1.pep
WFFWVGPFXGXAXXAFXXRFXLXXXXAXALXXFXXPPPVFLFAVLWGLWVWLLALLRFFAPLVFVCSPPLPGRLPFPLWCSSLCVLFLFWVFSSCL

SEQ ID NO: 159678 - protein, 62 aa, Glycine max
  unsure (1)..(62): unsure at all Xaa locations
  Clone ID: PAT_MRT3847_115208C.1.pep
DLVCLTLKAISVCLTLXCLLKQSLFDYTLASSXSCIHIFIFSLFYDNNHYXSKFFLASSNLA

SEQ ID NO: 159679 - protein, 78 aa, Glycine max
  Clone ID: PAT_MRT3847_115209C.1.pep
GLYIHSQEEQGFTIRAVKVSRAASINANEYLSNASSFRSLLTFCGPINHSLCGPFRCDIGEAVFSKIYYDRSHLYYWP

SEQ ID NO: 159680 - protein, 35 aa, Glycine max
  Clone ID: PAT_MRT3847_11520C.1.pep
LTTLINYYAHPNENIMKLASCREFLGKRKRIVDNK

SEQ ID NO: 159681 - protein, 67 aa, Glycine max
  Clone ID: PAT_MRT3847_115210C.1.pep
KQLEKFKLGNPRKKRVKVAIAYMYNQLWVMKIVLQSFCSHTSSFLVCGRTKCQGWVESSLTNKSKRE

SEQ ID NO: 159682 - protein, 196 aa, Glycine max
  unsure (1)..(196): unsure at all Xaa locations
  Clone ID: PAT_MRT3847_115211C.1.pep
RIRSSMMKSTKSALMRSQTGDFDHNRWLFETKGTYGYGNAIWPKEGGFGNEKEDDVVQPTELMSRPWRPLTRKLKIPAAVLSPYRLIIFIRLVVLALFLAWRIKHQNSDAVWLWGMSVVCEIWFAFSWLLDQLPKLCPVNRSTDLNVLKEKFETPNPNNPTGKSDLPGIDIFVSTADPEKEPXLVTANTILSILAA

SEQ ID NO: 159683 - protein, 97 aa, Glycine max
  unsure (1)..(97): unsure at all Xaa locations
  Clone ID: PAT_MRT3847_115212C.1.pep
GNCYPTVRADYQNAAQKAKKNLRGFIAEKRCSPLMLRLTWHSAGTFDKGTHTGGPFGTIXHSAELAHSANNRLDITVKLLEPLKAVFPIMSYTDSYQ

SEQ ID NO: 159684 - protein, 73 aa, Glycine max
  Clone ID: PAT_MRT3847_115213C.1.pep
PSVHCMNKQVVLGAYSNISILYFISISIKALGLITGIAYSAPVPHSDTTKIFLATCHRSTAMRQHVRPFVHQV

SEQ ID NO: 159685 - protein, 64 aa, Glycine max
  Clone ID: PAT_MRT3847_115214C.1.pep
TRKRRVFLENSPLAGHGFPGKHQLTARLPAERKRSTRLGHIDLHLRLQIYEALTYNQSLWGISN

SEQ ID NO: 159686 - protein, 61 aa, Glycine max
  Clone ID: PAT_MRT3847_115215C.1.pep
KFQFDFVQSSYWLRWVDMCRLIFIIQILIAGDLGWTKVEDDKRAFVAKLLHYGCEDHNTYC

SEQ ID NO: 159687 - protein, 53 aa, Glycine max
  Clone ID: PAT_MRT3847_115216C.1.pep
MLAEISDLKMSASKFSKFISVGDSAVDKTCLLSSYTSSNFPTYYVPTVFENFN

SEQ ID NO: 159688 - protein, 166 aa, Glycine max
  Clone ID: PAT_MRT3847_115217C.1.pep
MDSLRGSHKGLKNVFQSYLCEEWKERHSNVVDDVSSKFLHLRFISLELPQQENLYDCGLFLLHYVERFLEEAPMNFNPFMITKSSNFLSSNWFPPPEASLKRSHIQNLIYDIFENNSLHAPPTDCLDKGHPSEDPSIIVNPKVEEDSLRGLLSSLVAWEKSFEFLY

SEQ ID NO: 159689 - protein, 240 aa, Glycine max
  Clone ID: PAT_MRT3847_115218C.1.pep
FLLGFFSPLIFLLWLETFQSHWKGYLARKESKEQLLDLRLRMQKSARNVDDSKRLINRLLAALSELLNMKSLSNILHTCSTLDMATGHSKKCCEELVAAGAINTLLQLIQTVSRSIPDQEVLKHALSTLRNLARYPHLLQVLILRRSSVQIIVLELLRNKNEGYFVASELLKKICSTRVGLETIFKSPALLKRLHSLVEDLTRKGIYEKRNPRAPSLAIRKNRERRLKEAAEILKLITSA

SEQ ID NO: 159690 - protein, 478 aa, Glycine max
  Clone ID: PAT_MRT3847_115219C.1.pep
MASSDSKLPLKPIPGSYGLPFFGPMSDRHDYFYNQGRDKFFAERIKKYNSTVIRTNMPPGPFISSNPRVIALLDGVSFPILFDNSKVDKRDVLDGTFMPSTSFTGGYRACAFQDTTEPSHALLKRFYLNFLASKHETFLPLFRNNLSDHFSDLEDKLAGKSGKASFNSSVGSATFNFLFRLLSDKDPSETIIGSDGPSLVQTWLAAQLAPLATLGLPRIFNYVEDFLIRSIPFPAWTVKSSYKKLYEGLSTAGTAILDEAERVGIKRDEACHNLVFMLSFNAQGGLVNQFPILIKWLGLAGEGLHKQLAEEIRTVVKDEGGVSLRALDQMTLTKSVVYEVLRIEPAVPFQYAKAREDLVVESHDAAYEIKKGEMIFGYQPFATKDPKIFENAEDFVAHRFLGHDGEKLLRHVLWSNGPQTEEPTPDDKQCPAKNLVVLMCRLYLVEFFLRYDTFTFDFKPVVLGPDVTIKSLAKASSF

SEQ ID NO: 159691 - protein, 46 aa, Glycine max
  Clone ID: PAT_MRT3847_11521C.1.pep
PVVFFLFFFFFFFFFFFFFFFFFFFLMKTINVLCVEQSDHPSFFFF

SEQ ID NO: 159692 - protein, 198 aa, Glycine max
  unsure (1)..(198): unsure at all Xaa locations
  Clone ID: PAT_MRT3847_115220C.1.pep
MSHIPTAGYGTLAGATPTGTTTTTTTTTTTLVTPRPWREFLAPSAAPGXDLSALSRPYSYDDAMIRVRRNLSYFRFNYAAVTLLIVFLSLLWHPISMIVFLLVLVAWYYFYFSRDVPLVVFNQTLDDRTVLCVLGLLTVVSLVSTHVGLNVLLSLIVSVVLVGLHAAFRVTEDLFLDEESSLLSVVGTQPIRTNYTPI

SEQ ID NO: 159693 - protein, 72 aa, Glycine max
  Clone ID: PAT_MRT3847_115221C.1.pep
SESRTALDYCASFRSISNPIFTRCHPNLKRACSEIFHCNYRCLTLWTAGYYHTLGLTPTPQLERHSVLPTNH

SEQ ID NO: 159694 - protein, 230 aa, Glycine max
  Clone ID: PAT_MRT3847_115222C.1.pep
MGTVTRSSSEVYSSDSEKGFAMNHSTSTSPELDAGAKFVLVSRGSWLHCGYHLTTSIVAPVLLTLPFSFTLLGWVGGVLWLTLAAVITFYSYNLLSVVLEYHAQLGRRQLRFRDMARDILGPGWAKYFVGPLQFAICFGTVIGGPLVGGKSLKFIYQLYNPEGSMKLYQFIIICGVITLILAQLPSFHSLRHVNMISLILSVLDATCVTIGSIYIGHSKKRHQALFCKKF

SEQ ID NO: 159695 - protein, 63 aa, Glycine max
  Clone ID: PAT_MRT3847_115223C.1.pep
CLLSHSLHSIEKVGCNGMLVDEEDQLTLPDLVKELGHRLVYYNLTANCLPVNPNWSKFCNSLL

SEQ ID NO: 159696 - protein, 49 aa, Glycine max
  unsure (1)..(49): unsure at all Xaa locations
  Clone ID: PAT_MRT3847_115224C.1.pep
VFLSTKETGTGXRPGISDNRFWKSIGLGFKTPRETLERTYIDEMCPFTG

SEQ ID NO: 159697 - protein, 116 aa, Glycine max
  unsure (1)..(116): unsure at all Xaa locations
  Clone ID: PAT_MRT3847_115225C.1.pep
TLSVWHVLTLSPPIRKTNEDGGAYSCHDANCGYTLLISLDELVKDGVLTKDEXLPEPVDHDHVVFSTVADIKDPLIAKAAERLIQSDGXLKDSLENFVXDPEISNWLEKTTYFAAI

SEQ ID NO: 159698 - protein, 42 aa, Glycine max
  Clone ID: PAT_MRT3847_115226C.1.pep
NSSLRKVGWLGGGRRYSHSPPIIIIIIHSNLPLFFFFNFTPI

SEQ ID NO: 159699 - protein, 74 aa, Glycine max
  Clone ID: PAT_MRT3847_115227C.1.pep
ETPQRCLLDPLLGLGLIPPFWWELWVPQLLCGVISSSHLTKRRIAFWASSKGTGPTKWAGGIPDWGRNQNGRCI

SEQ ID NO: 159700 - protein, 266 aa, Glycine max
  Clone ID: PAT_MRT3847_115228C.1.pep
VKKFESKLARWKQRTLSMGGRITLINSVLSALPIYLLSFFRIPKKVVQKIVSIQRYFLWGGHQEASKIPWVKWDKVCLPKNKGGLGIKDLSLFNAALLGKWGWQLANNRDQPWSRILISKYGGWKELISGGRRNFTSQWWQDLKSIFQQQHNECLIDNLSWKVGSGSSISFWKDNWMEDNCNLQGKYPQLYLISKQQNSSINSMGDFVEGRWEWKLSWRRDFFDHEIQLAADFLAEIDSVHIHQTSRDLLGGSPTLRSFYNKICLQ

SEQ ID NO: 159701 - protein, 83 aa, Glycine max
  Clone ID: PAT_MRT3847_115229C.1.pep
PKTPWPNVDAHSEVLLTHFGLTQENFYTVLFGVSRALGVLSALVWDRALGFPIERPKSVTTEWIKKNFHGKEAPPKKAGGSEE

SEQ ID NO: 159702 - protein, 58 aa, Glycine max
  unsure (1)..(58): unsure at all Xaa locations
  Clone ID: PAT_MRT3847_11522C.1.pep
QRYSHEKRGIXSSPSKKEEVIAPCFRPFFTSYRSSQQHLGQNGEEIMCSNPLQQEGVP

SEQ ID NO: 159703 - protein, 294 aa, Glycine max
  Clone ID: PAT_MRT3847_115230C.1.pep
MYTFSIKKKKKNSREFSMVSQSLSEYNCGTSNTTYLPTTMRSHSFPSVLNDAPGGSMMPSSDLNECQLWVQPGDLNGLKGQLVRLLELSGGCLPLARVPAEYQKLYGRPLYVSEYGAIKLVNLFKKMGDTMAVEGKGNRKFVYLGNWRTGPSAPPLSLAKKDKKGKGAQEENMNIVTGGCSSDEFSDEERVVIEEPDESSCIGKGNQGRAAKCEVDDHFIEQFKYELQEILVSYSCRIFLGCFEAIYQQRYKKQLEYQRFGVDKLEDLFEKVSDVVVLHEEPVSKKKFLAAVGG

SEQ ID NO: 159704 - protein, 73 aa, Glycine max
  Clone ID: PAT_MRT3847_115231C.1.pep
HLIMSQPPFQCLGVSPKLTHVHLCTYTQSQYQYYNFKAPCYPAIHHIFNLSLIHNFNHNFMIPIQLFIMLILS

SEQ ID NO: 159705 - protein, 42 aa, Glycine max
  Clone ID: PAT_MRT3847_115232C.1.pep
TLGPTGVTPNLTLKLPRALTPAPYTRVPTYLPTSPGLPTKTQ

SEQ ID NO: 159706 - protein, 44 aa, Glycine max
  Clone ID: PAT_MRT3847_115233C.1.pep
SNAFLKCFPPFFEGVGRFFLNCNRFLVFKLYVNSTFPAGRSVIG

SEQ ID NO: 159707 - protein, 64 aa, Glycine max
  Clone ID: PAT_MRT3847_115234C.1.pep
NYNPGLINRWIILKFGHQLWNSIPYIPTIGIYKIITVEREMSPHTKIVKLRLQSLLLLVNAWKP

SEQ ID NO: 159708 - protein, 88 aa, Glycine max
  Clone ID: PAT_MRT3847_115235C.1.pep
MGPGGSSFDGHSFGSWVACSSGLDGAPWVRMFCGGSRPVIVALTASADEDLWVSCMRVGIYGVFRKPVLLHGIASDLRRFLCRGIIVL

SEQ ID NO: 159709 - protein, 42 aa, Glycine max
  Clone ID: PAT_MRT3847_115236C.1.pep
HKIKATAASMHTNAVDVNSVTSVGGIIAHRLNLVGSTLDTLT

SEQ ID NO: 159710 - protein, 55 aa, Glycine max
  unsure (1)..(55): unsure at all Xaa locations
  Clone ID: PAT_MRT3847_115237C.1.pep
CNPFYSLPXSSALTNXRSNRGKPTANPAXITEAAEIXGFXXIXXSRIXSLRTXAX

SEQ ID NO: 159711 - protein, 57 aa, Glycine max
  unsure (1)..(57): unsure at all Xaa locations
  Clone ID: PAT_MRT3847_115238C.1.pep
TTNIAKECYLQPIPSMIVTDYGHVDDLYYALSXLLHCVKHLXWGLNTSYXLWYLYYV

SEQ ID NO: 159712 - protein, 76 aa, Glycine max
  Clone ID: PAT_MRT3847_115239C.1.pep
CKCFPGIKIPCPKKAQLFEHKGMHKIRSLATKDAKVSVVCEGKKSYCNIKGYNMHTAIDEIKLVSAAFLLGKKKYK

SEQ ID NO: 159713 - protein, 73 aa, Glycine max
  Clone ID: PAT_MRT3847_11523C.1.pep
MRSHSGPISLPLTYMIMLLTSYRCKKTLTDKGVTCARDRLIRPQLFSIPNYTIIVLLSKNLPSLDSLCFIRKT

SEQ ID NO: 159714 - protein, 607 aa, Glycine max
  Clone ID: PAT_MRT3847_115240C.1.pep
CIAEEDIGRHGIPVPSAMGNATASRGLEVAVANLQDYCNELENRLLSRFDAASQKRELTTMAECAKILSQFNRGTSAMQHYVATRPMFIDVEIMNADTKLVLGDQAAQASPSNVARGLSSLYKEITDTVRKEAATITAVFPSPSEVMSILVQRVLEQRITALLDKLLEKPSLVNLPSVEEGGLLLYLRMLAVAYEKTQELARDLQAVGCGDLDVEGLTESLFSSHKDEYPEYEQASLRQLYKVKMEELRAESQQISDASGSIGRSKGASVVSSQQQISVTVVTEFVRWNEEAISRCNLFASQPATLATHVKAVFTCLLDQVSQYIADGLERARDSLTEAANLRERFVLGTSVTRRVAAAAASAAEAAAAAGESSFRSFMIAVQRSGSSVAIIQQYFANSISRLLLPVDGAHAAACEEMATAMSSAEAAAYKGLQQCIETVMAEVERLLSAEQKATDYRSPDDGMAPDHRATSACTRVVAYLSRVLESAFTALEGLNKQAFLTELGNRLHKVLLNHWQKYESLWSGGLRLKRDITEYGEFLRSFNAPSVDEKFELLGIMANVFIVAPESLSTLFEGTPSIRKDAQRFIQLRDDYKAAKLASKLSSLWS

SEQ ID NO: 159715 - protein, 122 aa, Glycine max
  unsure (1)..(122): unsure at all Xaa locations
  Clone ID: PAT_MRT3847_115241C.1.pep
GSQKDRGIMVAYLGGMTNEAHNLYQPQKKEXVEGNCSFAIKSSSILXKVSSTKAQWGRVKTSYYETLGAGSHSSGDFAVKEDHXKPIRTDTRLRHRHDPQCNAVHSHMETELVNLALDDMTS

SEQ ID NO: 159716 - protein, 51 aa, Glycine max
  Clone ID: PAT_MRT3847_115242C.1.pep
DVVGTVNMCATVIQGVNSTKVSAPQTCEAPLISHQTIGNNFTEGLLCMIYK

SEQ ID NO: 159717 - protein, 134 aa, Glycine max
  Clone ID: PAT_MRT3847_115243C.1.pep
PICWKGAKFFESLNDVKKYFKPLALSFKKIMNLQMPLPPEFILIITIDGNVCLGILDGTEVGLENLNIIGDITLQDKMVIYDNEKQQIGWVSSNCDRLPNVDRDLEGDFPHPYATNLGIFGDRCPASYEETGCE

SEQ ID NO: 159718 - protein, 46 aa, Glycine max
  Clone ID: PAT_MRT3847_115244C.1.pep
KAKEEDRRIRHSGKSERFKAKERLSLSILALVIKEGVHKIRNAESL

SEQ ID NO: 159719 - protein, 58 aa, Glycine max
  Clone ID: PAT_MRT3847_115245C.1.pep
GPCILMFWELQVKAYATVDLGPTYRDLKTRGRSCRLLTDNITDERDLEFSEWKGGNSC

SEQ ID NO: 159720 - protein, 51 aa, Glycine max
  Clone ID: PAT_MRT3847_115246C.1.pep
NCYESKVLCLSMYLSFILVRYERTASYKWFLLCRIRKCILLSSGGVGGGVG

SEQ ID NO: 159721 - protein, 98 aa, Glycine max
  Clone ID: PAT_MRT3847_115247C.1.pep
QRHFGRIDRLVRSTFLLDYILSGMSVIEPQVQPTESKAELLLQSEIDIPDKENGIEKKDHTHEITASKKRKSNKSKHGSHKKVKNVAYNKVESIQLQA

SEQ ID NO: 159722 - protein, 385 aa, Glycine max
  Clone ID: PAT_MRT3847_115248C.1.pep
ADAWADAWVNSVAVAPNDSLVCSGSQDRTACVWRLPDLVSVVVFKGHKRGIWSVEFSPVDQCVVTASGDKTIRIWAISDGSCLKTFEGHTSSVLRALFVTRGTQIVSCGADGLVKLWTVKTNECVATYDHHEDKVWALAVGRKTEKLATGGGDAVVNLWFDSTAADKEEAFRKEEEGVVKGQELENAVSDADYTKAIQIAFELRRPHRLFELFAELCRKREAEDHMDRALKGLDSEELRILFNYVREWNTKPKLCYVSQFVLFRVFCIFPPTDIVQIKGIGEYLEGLIPYSQRHFGRIDRLVRSTFLLDYILSGMSVIEPQAQLTESKTELLLQSEIGIPDPDKENDTNEITASKKRKSNKSKHGSHKKVKNVAYNKVESIQLQA

SEQ ID NO: 159723 - protein, 95 aa, Glycine max
  unsure (1)..(95): unsure at all Xaa locations
  Clone ID: PAT_MRT3847_115249C.1.pep
QGAFEKNALLGFVLPTYTWLGXEGLGGPLSLPWGLYVLLCQRAPKKPWLNDVPQVGTWRKALVANAIFRVVWTLVPVGDELPKELGIGLVTAFLR

SEQ ID NO: 159724 - protein, 102 aa, Glycine max
  Clone ID: PAT_MRT3847_11524C.1.pep
HKNLTMKVALPLLWAVPPHCKTLHMVFKRCVEIVLKCYFRWDLLSTYSVGLPSLNPSLSSLYIKLYLSVYAHKNIKFIVHLYVGNYLTSLVYPIDRSLSRFI

SEQ ID NO: 159725 - protein, 123 aa, Glycine max
  Clone ID: PAT_MRT3847_115250C.1.pep
MALRFAAAASASVSRISRPQNPPFFSLQHRNNGTLKFHSPPFHHPLPTPSKRCNVRAISEVAVEPEISKKEQNESPKDWKIKMLYDGDCPLCMREVNMLRERNKSYGTIKFVDIGSDEYSPEE

SEQ ID NO: 159726 - protein, 43 aa, Glycine max
  unsure (1)..(43): unsure at all Xaa locations
  Clone ID: PAT_MRT3847_115251C.1.pep
XFRSXXLIXKFXATTKRLLVTAIXRXXXXIDXNXKXVXXXYYI

SEQ ID NO: 159727 - protein, 66 aa, Glycine max
  unsure (1)..(66): unsure at all Xaa locations
  Clone ID: PAT_MRT3847_115252C.1.pep
MNVLDFFACSIQVSGQGHAYQIFHSSSEHXQGASTPEVKCASWKHAVAVYRNFDFHINPDYCIDPK

SEQ ID NO: 159728 - protein, 111 aa, Glycine max
  Clone ID: PAT_MRT3847_115253C.1.pep
VSHRFNFMDSVTSGADETEFAIVSAGGVTIRAHQCCAKPVFLAASVIWGYNSLPHDWTDGDRPRRVSVLSVVPREQISTSIRTSDVALCNHVLEDQRLRIRREEVRKLFYI

SEQ ID NO: 159729 - protein, 80 aa, Glycine max
  Clone ID: PAT_MRT3847_115254C.1.pep
AWNLWADLCACLCACSTFSTISVVVNPHRLLMVLVDAEPCRPGGGSVRAIGNDVSEKVPLTHGDTAELKATNDCDIERLK

SEQ ID NO: 159730 - protein, 324 aa, Glycine max
  Clone ID: PAT_MRT3847_115255C.1.pep
YRDEEPKLEFEDPTLYHYAIFSDNVIAVSVVVRSVVKNAVEPWKHVFHVVTNRMNVGAMKVWFKMRPIDGGAFLEVKSVEEFTFLNSSYVPILRQLESAKMKQRFLENQADNATNGANLKNTKSLSMLDHLRFYLPEMYPNLYKILLLDDDVVVQKDLTGLWKIDLDGKVNGAVEICFGSFHRYAQYLNFSHPLIKESFNPKSCAWAYGMNIFNLDAWRREKCTDNYHYWQNLNEDQTLWKAGTLSPGLITFYSTTKSLDKSWHVLGLGYNPSISMDEISNAAVIHYNGDMKPWLDIALNQYKNLWTKYVDNDMEFVQMCNFGL

SEQ ID NO: 159731 - protein, 47 aa, Glycine max
  unsure (1)..(47): unsure at all Xaa locations
  Clone ID: PAT_MRT3847_115256C.1.pep
XAKXPXCHXXHXXVHSHXMVXXXEAXXKDSXLRIPQSEAGXXRLLXX

SEQ ID NO: 159732 - protein, 568 aa, Glycine max
  Clone ID: PAT_MRT3847_115257C.1.pep
MASSTLICDTQQWKELKAHAEDVEKTHLRDLLSDDERSQSMVVEFDGILLDYSRQQATLETREKLFKLAEVASLKQKINQMYNGEYINSTENRSVLHVALRAPRDAVIQSDGNNVVPEVWKVLDKIQEFSEQIRNGSWVGATGKALKDVVAIGIGGSFLGPLFVHTALQTDPEAVESARGRQLRFLANVDPIDVARNITGLNPETTLVVVVSKTFTTAETMLNARTLREWISSALGPSAVAKHMVAVSTNLTLVEKFGIDPKNAFAFWDWVGGRYSVCSAVGVLPLSLQYGFSVIEKFLKGASSIDQHMYSQPFERNLPVLLGMLSVWNVSFLGYPARAILPYSQALEKFAPHIQQVSMESNGKGVSIDGVPLPFEAGEIDFGEPGTNGQHSFYQLIHQGRVIPCDFIGVVKSQQPVFLKGEVVSNHDELMSNYFAQSDALAYGKTAEQLQKENVSPHLIPHKTFRGNRPSLSLLLPSLNAYNIGQLLAIYEHRIAVEGFIWGINSFDQWGVELGKSLATQVRKQLNASRTKGEPVQGFNFSTTAMLTRYLQASADVPADLPTRLPQI

SEQ ID NO: 159733 - protein, 129 aa, Glycine max
  Clone ID: PAT_MRT3847_115258C.1.pep
PHAYGKAAEQLQKENVSPHLIPHKTFSGNRPSLSLLLPSLNAYNIGQLLAIYEHRIAVEGFIWGINSFDQWGVELGKSLATQVRKQLNASRTKGEPIQGFNFSTTTMLTRYLQASSDVPADLSTVLPKI

SEQ ID NO: 159734 - protein, 60 aa, Glycine max
  Clone ID: PAT_MRT3847_115259C.1.pep
CIRLIVYVQIDLAPCIVSSTGNFQDYVAHHILFTKYSIALYPLFSHLRSVRSYSTCTSCL

SEQ ID NO: 159735 - protein, 365 aa, Glycine max
  Clone ID: PAT_MRT3847_11525C.1.pep
RTKERISRLFPRLKKKHNKNEGSQHRTESEEVSQVLKDMGIVSVEALKRELMDANESRDAALVEVSEMRSSLGELKQKLEYLESYCEELKKALRQAILTRETTFSEKLNSPPQRGTPPFDGNGENLMPVGEDVMVEGFLQIVSESRLSVKQFCKTLICQIEETDHSLMDNLNLLLQPYKLSLNSKYSKAVLYHFEAFINQSFYQDFENSVFQKNGCTKFLDPRQDRQAQFSSFVALRNLSWSEVLRKGTKYYSEEFSKFCDQKMSCIITTLNWTRPWPEQLLQAFFVAAKCIWLLHLLAFSFNPPLGILRVEENRSFDPHYMEDLVTDRQRSQGPSRVKIVVVPGFYVQDMILRCRVICRHKSAP

SEQ ID NO: 159736 - protein, 114 aa, Glycine max
  Clone ID: PAT_MRT3847_115260C.1.pep
MTCKMSQLERNIETIINTFHQYSVKLGHPDTLNQGEFKELVRKDLQNFLKKENKNEKVIEHIMEDLDTNADKQLSFEEFIMLMARLTWASHEKMHEGDEGPGHHHKPGLGEGTP

SEQ ID NO: 159737 - protein, 568 aa, Glycine max
  Clone ID: PAT_MRT3847_115261C.1.pep
MASSALISDTQQWKDLKAHVEDINKTHLRDLLSDDKRCQSMLVEFDDILLDYSRQQATPETIQKLFELAEAASLKEKIIRMYSGEHINSTENRSVLHVALRASRDAVIQSDGQNVVPEVWKVLDKIQEFSEQIRNGSWVGATGKALKDVVAIGIGGSFLGPLFVHTALQTDPEAVESARGRQLRFLANVDPIDVARNITGLNPETTLVVVVSKTFTTAETMLNARTLREWISSALGPSAVAKHMVAVSTNLTLVEKFGIDPKNAFAFWDWVGGRYSVCSAVGILPLSLQYGFSVIEKFLRGASSIDQHFYSQPFESNIPVLLGLLSIWNVTFLGYPARAILPYSQALEKFAPHIQQVSMESNGKGVSIDGVPLPFEAGEIDFGEPGTNGQHSFYQLIHQGRVIPCDFIGVVKSQQPVFLKGEVVSNHDELMSNYFAQSDALAYGKTAEQLQKENVSPHLIPHKTFSGNRPSLSLLLPSLNAYNIGQLLAIYEHRIAVEGFIWGINSFDQWGVELGKSLATQVRKQLNASRTKGEPVQGFNFSTTTMLTRYLQASSDVPADLPTVLPKI

SEQ ID NO: 159738 - protein, 135 aa, Glycine max
  Clone ID: PAT_MRT3847_115262C.1.pep
MLRAPWGVTPPPPGFMGPFRGGSPCPSGWATFWKGPPGGAFWFFPHWGKGGFLPSALSGVPPGFSRPPGVKPRARDLILGAPLKRFFLACPGTVTWVPLRGPPLFFFFFFFFFFFFFFFFFFFFFFFFFFFFFFF

SEQ ID NO: 159739 - protein, 52 aa, Glycine max
  Clone ID: PAT_MRT3847_115263C.1.pep
FQKLFGGPKTGGIGEGKIFLVPVSDGIKIWAGERGEQATRKTGGPRDMLFSG

SEQ ID NO: 159740 - protein, 88 aa, Glycine max
  Clone ID: PAT_MRT3847_115264C.1.pep
LYKSVCMCKKSPCLFMGCLQLPCTFSTPTFVGVGACVRHGLRRGQEFQQSPVCFSLDITNCALCPVDVKKFHMVVFGSHPPTGKGWVC

SEQ ID NO: 159741 - protein, 50 aa, Glycine max
  Clone ID: PAT_MRT3847_115265C.1.pep
LDSSYFTMRRLHGFGDCLNHFVVARSDLVCLYDRYKYPVQGNVDQEYFHA

SEQ ID NO: 159742 - protein, 49 aa, Glycine max
  Clone ID: PAT_MRT3847_115266C.1.pep
ILLFQHHISGAHIPNPDSIQLITSIFFSSPYNHMQIHSSFAIARTAYRI

SEQ ID NO: 159743 - protein, 59 aa, Glycine max
  Clone ID: PAT_MRT3847_115267C.1.pep
GCCCIYRDSSALIGISYSIANLILDKPVMLIPPLLRENAPYSSLPFYQTHIYPLDENDF

SEQ ID NO: 159744 - protein, 41 aa, Glycine max
  unsure (1)..(41): unsure at all Xaa locations
  Clone ID: PAT_MRT3847_115268C.1.pep
SLGRAYXDPPPAPLIEAEEVKGGFYRVYWEIFDFALPLHLL

SEQ ID NO: 159745 - protein, 52 aa, Glycine max
  Clone ID: PAT_MRT3847_115269C.1.pep
VEAWDVNRSSSDITQLPNNRFLKKTSASLSFMHWIALVVKAPFMSGSFNQSL

SEQ ID NO: 159746 - protein, 79 aa, Glycine max
  Clone ID: PAT_MRT3847_11526C.1.pep
IGRYISRFVLRCLSSSSTRKFLLRAITISLSSSSSSHLVFSNWNCTLFRPFLHISFRPFPSSFSFALIHTMSTSNVKSV

SEQ ID NO: 159747 - protein, 54 aa, Glycine max
  unsure (1)..(54): unsure at all Xaa locations
  Clone ID: PAT_MRT3847_115270C.1.pep
DSRFLKVNILSWYTRFYSFNFFLTASINFLFRFWCQFVYRXFLSVPIFSVVITT

SEQ ID NO: 159748 - protein, 44 aa, Glycine max
  Clone ID: PAT_MRT3847_115271C.1.pep
NCNSIAFSINVQLHLQSDTFSQKSFYSHRLIHYNTFLMYKINST

SEQ ID NO: 159749 - protein, 56 aa, Glycine max
  unsure (1)..(56): unsure at all Xaa locations
  Clone ID: PAT_MRT3847_115272C.1.pep
RIRKYVYGYFHTMHFDCLWCXVCVLKVLASXXRVVRFLLXLSFACAFLFGRVVVCG

SEQ ID NO: 159750 - protein, 85 aa, Glycine max
  Clone ID: PAT_MRT3847_115273C.1.pep
VSTGENVEPGELEEAAMRSSLIHQIVVIGQDKRRLGAVIVPNKEEVLKAARESSIIDSNSSYACRRKVTSLIYNELRTWAFQVAP

SEQ ID NO: 159751 - protein, 65 aa, Glycine max
  Clone ID: PAT_MRT3847_115274C.1.pep
HALLLLPNPGVTLQGNQQTFSVMPFSKRRIVLAYQTPGGCELHGGRLHISCPSIMLPGGFAWDLR

SEQ ID NO: 159752 - protein, 77 aa, Glycine max
  Clone ID: PAT_MRT3847_115275C.1.pep
PGKKRSEVRNLRNINNCSLTVWPRLNSQYNLQKKKSLIQDSACSNQEKHKYVFKHSWRKFSNSRYDRKKERLIFHIY

SEQ ID NO: 159753 - protein, 72 aa, Glycine max
  Clone ID: PAT_MRT3847_115276C.1.pep
ENQCPQEPDARTIRRHLRQQISQVHTIRESLLLKVVPQHRLKYASSWKRSPFDPSMTRKETIAVDGKIQKRT

SEQ ID NO: 159754 - protein, 91 aa, Glycine max
  unsure (1)..(91): unsure at all Xaa locations
  Clone ID: PAT_MRT3847_115277C.1.pep
ARNSARXYSLRCAAEEKCLASTAYAPEATDYDLRVLLRFPQRVKNQGTADFLPNRPRHTWEWHSCHQHYHSMDEFSXYDLLXASTXKKLRE

SEQ ID NO: 159755 - protein, 50 aa, Glycine max
  unsure (1)..(50): unsure at all Xaa locations
  Clone ID: PAT_MRT3847_115278C.1.pep
IPLITLAVANFYXXSMAXADXEFRCFVWXACVGHRQXCPXEXXFNLRRIV

SEQ ID NO: 159756 - protein, 331 aa, Glycine max
  Clone ID: PAT_MRT3847_115279C.1.pep
MEVERIQTLSLNQLKELPPQFIRPANERPENTKAIEGVIVPLISLSQSHHLLVKEIAEAASEWGFFVITDHGMSQTLIQRLQEVGKEFFALPQEEKEAYANDSSEGKFEGYGTKMTKNLEEKVEWVDYFFHLMAPPSKVNYDMWPKHPSSYREVTQEYNKEMLRVTNKVLELLSEGLGLERKVLKSRLGDEEIELEMKINMYPPCPQPHLALGVEPHTDMSALTILVPNEVPGLQVWKENSWVAVNYLQNALMVHVGDQLEVLSNGKYKSVLHRSLVNKERNRMSWAVFVAPPHQAVIGPLPSLINDQNPPKFSTKTYAEYRYRKFNKLSQ

SEQ ID NO: 159757 - protein, 91 aa, Glycine max
  Clone ID: PAT_MRT3847_11527C.1.pep
IPNPSLMRKGKPPRILADGWRDIRANQSWLFTRVATITLKRAVNPPEGFRPPWEPGQIKCPDPTNAITVPCPEEAGVSVFKPNTYSSCLDC

SEQ ID NO: 159758 - protein, 221 aa, Glycine max
  Clone ID: PAT_MRT3847_115280C.1.pep
MVLGVREISCSGEPVLDSDNGEELMQVQPGIDIVLGDLPRQSPGTLYITNKQVIWVSDLDKTKGYAVDFLSISLHAVSRDPEAYPLPCLYTQIDTGEADDDHSDSESIHIPQDLSNIAEMRLIPSDPTQLDSLFAIFCQCAELNPEPNDGEGEEHGWVFSADQMGDEEAEEEGYIFHNPANSIGHSNGNHDLTRTTLELQINDQRFEDAEEMEDNGDGNHY

SEQ ID NO: 159759 - protein, 221 aa, Glycine max
  Clone ID: PAT_MRT3847_115281C.1.pep
MVSGVREISCSGEPVLDSDSGEELMQVQAGIDIVLGDLPRQSPGTLYITNKQVIWLSDLDKTKGYAVDFLSISLHAVSRDPEAYPLPCLYTQIDTGEADDDHTDSESIHIPQDLSNIAEMRLIPSDPTQLDSLFAIFCQCAELNPEPNDGEGEEHGWFFSADQMGDEEAEEEGYISHHPANFIGHSNGNHDLARTILELQINDQRFEDAEEMEDNGDGPNR

SEQ ID NO: 159760 - protein, 49 aa, Glycine max
  Clone ID: PAT_MRT3847_115282C.1.pep
FIMHRRLRFPLVSLTHPEYPHISRHQIASASGSRAPLRHISDLFIIHHG

SEQ ID NO: 159761 - protein, 67 aa, Glycine max
  Clone ID: PAT_MRT3847_115283C.1.pep
FMLMTMLSESHHSNTYRTTCEGVINHGENLDQDITRHDYYDNNNCTSYVLQMSPSHMVIMARSTRHL

SEQ ID NO: 159762 - protein, 53 aa, Glycine max
  Clone ID: PAT_MRT3847_115284C.1.pep
GLTGLKSQRDVRCIPYLSMQQVFSILLSFSIYISCITHLYIMLGVRYSTENYF

SEQ ID NO: 159763 - protein, 81 aa, Glycine max
  Clone ID: PAT_MRT3847_115285C.1.pep
AGIGRGTGERHAEASRGSAAEMPPPTEQLTAQNRGAERNRAQGGKKPEDQDLKANGGGWIIMDHHEDWKGWKEFGVRGGSP

SEQ ID NO: 159764 - protein, 63 aa, Glycine max
  Clone ID: PAT_MRT3847_115286C.1.pep
PRVRLFQVDGSGDVGLVKTILDLYSQTYPVAKSYGHRNCIGSNHTDSATVNSATAYVPLPQLR

SEQ ID NO: 159765 - protein, 94 aa, Glycine max
  Clone ID: PAT_MRT3847_115287C.1.pep
AINVKYCLITLMLEVGQPVVERDRDEGSRFEVQVCETIWAYMRLELSSQGSTLHSETIRCTLNKVHHTPSNHISSSFTGIAFDKGHSRPPLERP

SEQ ID NO: 159766 - protein, 101 aa, Glycine max
  unsure (1)..(101): unsure at all Xaa locations
  Clone ID: PAT_MRT3847_115288C.1.pep
VAGIFFSGSFCAIFWLRKRGLMPWLTFSYELIFHHQRLHCDFSXLLYSLLRQKLTEERVTXIVRYAVDIERECVCDATACALVEMNGDLISQYIEFVANRL

SEQ ID NO: 159767 - protein, 154 aa, Glycine max
  unsure (1)..(154): unsure at all Xaa locations
  Clone ID: PAT_MRT3847_115289C.1.pep
RLELEPNRLEETVTTTMSDEAKERISERLSCLENLYFPRALESTVTLPSQRKAIFRDLLSRDVALFLERYGSKLTCSELSEFDSMKDDYEINWHIKRLRSIMSPTSEELRMRSVTVKNRRRAYLDKLVCQGHYFSEEAMREREXYLHHEFVGGF

SEQ ID NO: 159768 - protein, 76 aa, Glycine max
  Clone ID: PAT_MRT3847_11528C.1.pep
EFVVSYKLVYREENMKLFVFFVAAVVLVACPCHGACFQKFPLPMKTGYCERSSEVKCASFKLAVEAHNIPTFKTIP

SEQ ID NO: 159769 - protein, 157 aa, Glycine max
  Clone ID: PAT_MRT3847_115290C.1.pep
QKSSIVQQVAEPVITRTQPSMSITGEAVDDIDFEMQVQSKVKSQARDNGLEVLAFGSVKLFEFLEKDPQWKDTSIVGLLSLLRDKKNTLFFQVSDLETLDALFLLRVPDEKLEYEETSPYFHKFSMTGGYNAFAFFNEDEAKHVFDVICQLFESKYS

SEQ ID NO: 159770 - protein, 288 aa, Glycine max
  Clone ID: PAT_MRT3847_115291C.1.pep
MAGRYDSNPFDEEEVNPFYNPGSVPAATNSRLSPLKPEPVDYNYGFGATVDIPLDSSTDLKKKEKELQAKETELRKREQEVRRREEAASRAGIVLEEKNWPPFFPIIHHDIANEIPIHLQKLQYVAFTTLLGLVLCLFWNVIAVTAAWIKGEGVKIWFLAIIYFIAGVPGAYVLWYRPLYRAFRNESALKFGWFFMFYLLHIGFCILAAVAPPIVFKGKSLTGILAAIDVLGDHALIGIFYFIGFGLFCIETLISIWVIQQVYMYFRGSGKAAEMKREAARGALRAAI

SEQ ID NO: 159771 - protein, 64 aa, Glycine max
  Clone ID: PAT_MRT3847_115292C.1.pep
FNHISFTVTVISPTLAWLFLTKMINTKDRNWLLARCLSRYLKLMPRIDWTEEVFEAQLITYEDF

SEQ ID NO: 159772 - protein, 79 aa, Glycine max
  unsure (1)..(79): unsure at all Xaa locations
  Clone ID: PAT_MRT3847_115293C.1.pep
PCKTLGNLLVSTKPAXLKGCTLLXSXEVXVLLQLIQXLXDFESSSQNLVXWLLCHIRSRVTQNLHXLDLARPWVIXQTP

SEQ ID NO: 159773 - protein, 66 aa, Glycine max
  Clone ID: PAT_MRT3847_115294C.1.pep
ELHAYRCTIEALHASGPLSWAQEALMPTLRLLFPISNDGPLMGLKNFISFENSIPLKWQDFFSFSN

SEQ ID NO: 159774 - protein, 26 aa, Glycine max
  Clone ID: PAT_MRT3847_115295C.1.pep
LTDNPSHFISDHISDGVGDLDLLERC

SEQ ID NO: 159775 - protein, 43 aa, Glycine max
  Clone ID: PAT_MRT3847_115296C.1.pep
HLCSSFSSLNVWYSEFKQIHTSNRQCLKLNIGYVLGSRYKKNW

SEQ ID NO: 159776 - protein, 74 aa, Glycine max
  Clone ID: PAT_MRT3847_115297C.1.pep
LMFYRTTFKFSQLTREKLTTVKVLKKWSANSDLSRNIKVSNCPRLHWLHLASICHDIKKNTTKPRCHCDQYLKP

SEQ ID NO: 159777 - protein, 60 aa, Glycine max
  Clone ID: PAT_MRT3847_115298C.1.pep
QVPGKCQWIVAGSTVVVIHRSTLKRQQPLEASISNSKSAQVAYQPAVVVVQTFAASQVKG

SEQ ID NO: 159778 - protein, 60 aa, Glycine max
  Clone ID: PAT_MRT3847_115299C.1.pep
MKTAIQILFDRKTQRISYINYGATMCFKIHREILRWFNSSPRGIPLWPHKFIHLSFFQFI

SEQ ID NO: 159779 - protein, 75 aa, Glycine max
  Clone ID: PAT_MRT3847_11529C.1.pep
PYARSCLKSNLPCALFSRALRWKNQKCFLLRFRAPLSWYIQPWLLRRLSQTAEIAPRPPKTHPRWGYAVLRPVYC

SEQ ID NO: 159780 - protein, 54 aa, Glycine max
  Clone ID: PAT_MRT3847_1152C.1.pep
RPLVRSGFIANICSYFYISVYVHMLQKFCKIQYTVRLTCILIANYFSLICTSLI

SEQ ID NO: 159781 - protein, 70 aa, Glycine max
  Clone ID: PAT_MRT3847_115300C.1.pep
CYDRGQANVSSVVTAIMVSRLCFLHNVTIIMIVIEAVNGHFKFWLFRLKHSLSWDNHEEEYNKNWAGADL

SEQ ID NO: 159782 - protein, 237 aa, Glycine max
  Clone ID: PAT_MRT3847_115301C.1.pep
PRVRPRFRGRVGEAEGLKYIIACLYNIAVVLYRNRQLKKTSKVLNLCCKASWLCIKYHCANLSEAALKEFVMEACTRSAFLLDIIYDVNNLKINKKMIDILKNWFTANYLFDRLPAPIPVVKQWVKIVCRRATQVDETIDSLTLYSLLSSSTELSKRNNAMILEQELTAYEEMGFKYPEFCQKMQMKITDILLQDIYITPDSRFQKAQTLVRKGKAIKVKGIGGLRDCIQCLSETIT

SEQ ID NO: 159783 - protein, 85 aa, Glycine max
  Clone ID: PAT_MRT3847_115302C.1.pep
PPPFSRAGPRFPPYTVGLSGVGMETYKWVFGLAFCSKHLGVPLFGARVLYFFSSLLAPPLGGGGFFFPPWWRLFFSYFWRGFPFF

SEQ ID NO: 159784 - protein, 52 aa, Glycine max
  Clone ID: PAT_MRT3847_115303C.1.pep
KYACPMPTRHLNMKVLNTTLAFVDSGSWSRFNFFASVCVTQVGPLYHLAGLH

SEQ ID NO: 159785 - protein, 162 aa, Glycine max
  Clone ID: PAT_MRT3847_115304C.1.pep
MSFLSITFITLFLLSHHYIHHPQANTPVDRFTINCGASVISSDGERTWMGDTDSMLLSSQDSTVFAKPTSQSPSTNHVPFTTARMSRSQFNYSFPVTPGPKFLRLFFYPAVYASFPHTDFCLKVQCNQFLLLDSFNASLNVDAVKKETIFREYIVYVGDNQM

SEQ ID NO: 159786 - protein, 56 aa, Glycine max
  Clone ID: PAT_MRT3847_115305C.1.pep
LRLPRDPDDRLISKFSSISNSFAVFGLSLSLSLLRFFFFIQKLYHYLVSTFSVLVV

SEQ ID NO: 159787 - protein, 112 aa, Glycine max
  Clone ID: PAT_MRT3847_115306C.1.pep
KKVKWPRLIKVIGPKGIKSCFNIIKGVFFGLDKPGFFQRSFGVEGGLGILTGLGLLELAPFVLNKRSCVAPHLEIKPFDGDTLKLFGDLSNKGLPFLKKLLFPGLFLLALFF

SEQ ID NO: 159788 - protein, 174 aa, Glycine max
  Clone ID: PAT_MRT3847_115307C.1.pep
MNLSLITISFSFNFLIAEEKMENSEEQQKYRVRRLEISDKGKGFIELLQQLSVCDSVSDKEFEDRFRDLSVLGDEHVIGVIEDEASGKIIATGSVFIEKKFLRNCGKVGHIEDVVVDSSIRGKHLGKRMIEFLTEHARDMGCYKVILDCSVENKAFYEKCGFQQKSVQMAMYFA

SEQ ID NO: 159789 - protein, 103 aa, Glycine max
  unsure (1)..(103): unsure at all Xaa locations
  Clone ID: PAT_MRT3847_115308C.1.pep
LTLQFNTLPLSLLIITLKNNTHRTYINXRNNITLLTLIISYHNHFNITLQNIINIFTYFPNTDKRNKKAHTFNNYILINKIFLRLNSIIIALTNPKSYTIINL

SEQ ID NO: 159790 - protein, 57 aa, Glycine max
  unsure (1)..(57): unsure at all Xaa locations
  Clone ID: PAT_MRT3847_115309C.1.pep
PYCSVAXHVPKNRMPEAFSLLRELKLPVSGYAMDIALVQFSPVREIFSFVLGNNVDS

SEQ ID NO: 159791 - protein, 76 aa, Glycine max
  Clone ID: PAT_MRT3847_11530C.1.pep
EGKQKGSGYYTLYTYGSIRCMMSPPEELGAVVQHLMGWLPRPNQTDTESYATIPALRPHARGYQARTGRDQAALPL

SEQ ID NO: 159792 - protein, 44 aa, Glycine max
  unsure (1)..(44): unsure at all Xaa locations
  Clone ID: PAT_MRT3847_115310C.1.pep
MRDLKTHSXAGGVXSTLWFGAKTGLLGGINAVFTHALIFPFFSF

SEQ ID NO: 159793 - protein, 38 aa, Glycine max
  Clone ID: PAT_MRT3847_115311C.1.pep
MCGLFLQMPFFLNLLTSLTQAMISACVCHLGEAVVNED

SEQ ID NO: 159794 - protein, 71 aa, Glycine max
  Clone ID: PAT_MRT3847_115312C.1.pep
MKDTIVLYPNVLRGHLVSMVELGKLILTHHPSLSITILILTPTTTSSTTSVSCNSNARYIATVTATTPIIT

SEQ ID NO: 159795 - protein, 90 aa, Glycine max
  Clone ID: PAT_MRT3847_115313C.1.pep
KIFSRNLKTWTKSQVFFQALMDYSKTPLPVFPSSSPITCKELKIDSLIQQRVIIFTKAKSRFYFFFLSYNSIVGPAKCNESRKCCKCGPW

SEQ ID NO: 159796 - protein, 75 aa, Glycine max
  Clone ID: PAT_MRT3847_115314C.1.pep
SNIIGTKAFPLIKVRKFANAHFNWLEYLDKRPGFYQLSLKPRKGFLGFTHCSGQSPGKFWIPPKIKKAQGKHKCG

SEQ ID NO: 159797 - protein, 105 aa, Glycine max
  Clone ID: PAT_MRT3847_115315C.1.pep
DSSIAVSSSLVSSSTAFTNAIPFFENKWLGLSKLKAKGQKETAKGKGGKKLDKKQKRTIAKQSRDEQSAESKVTLVWPWCGYYSNTVIRRHSQLHICSGYVRTRG

SEQ ID NO: 159798 - protein, 39 aa, Glycine max
  unsure (1)..(39): unsure at all Xaa locations
  Clone ID: PAT_MRT3847_115316C.1.pep
XXSIEKSYTKKXEXIVEXLETQVTIAXXSXXKXRQXSXR

SEQ ID NO: 159799 - protein, 98 aa, Glycine max
  Clone ID: PAT_MRT3847_115317C.1.pep
PFYLFISSWCMLAGLCYFWRFLALLRVFPPSYRTSSCHLVGINAGLLSTPWYTCAPSYSTSVPPWCPVPMNFFPPPRPPKRQDGSSIARDRSGKPSLE

SEQ ID NO: 159800 - protein, 47 aa, Glycine max
  unsure (1)..(47): unsure at all Xaa locations
  Clone ID: PAT_MRT3847_115318C.1.pep
XGVSEXNSXXLXXXNLXXRRRPIHRRXYXLEXRRVNXYXAXTLXFXP

SEQ ID NO: 159801 - protein, 67 aa, Glycine max
  Clone ID: PAT_MRT3847_115319C.1.pep
LFYENPKLFLILSGPKEKFFRFPLNYTCNSELFKLLHMYPMFLKLLHIYLICFTNNTRTPYVLQILT

SEQ ID NO: 159802 - protein, 60 aa, Glycine max
  Clone ID: PAT_MRT3847_11531C.1.pep
SVRSLVRLSMAAQSTMSLSSSFPHLIAHKLDDSTFLLCCQQVEPDIKSHCLQCFVVNPLV

SEQ ID NO: 159803 - protein, 40 aa, Glycine max
  Clone ID: PAT_MRT3847_115320C.1.pep
ACKSTPTNNPINISLVSYLPLSIGIRKKDHVIALHHPSIN

SEQ ID NO: 159804 - protein, 95 aa, Glycine max
  unsure (1)..(95): unsure at all Xaa locations
  Clone ID: PAT_MRT3847_115321C.1.pep
VSQFSDXYQXEHXIXXVXPXMXXVRXLPKEXXSLDLEAXXSXVTDXDMXKXAKXSFYLKXIXPIILKNQXVHXVXFGNRLAXDPXAXEXQMFCPI

SEQ ID NO: 159805 - protein, 318 aa, Glycine max
  unsure (1)..(318): unsure at all Xaa locations
  Clone ID: PAT_MRT3847_115322C.1.pep
MAAKKVCVTGAGGFVASWLVKLLLSKGYIVHGTVRDPEPATQKYEHLLKLHGASENLTLFKADLLNYESLRSAISGCTAVFHLACPVPSISVPNPQVEMIEPAVKGTTNVLEASLEAKVQRLVFVSSLAAISNSPNLPKDKVIDESYWSDKDYCKTTQNWYCFSKTEAEEQXLDFAKRTGLXVVSICPSLHFESLSTVNASSLALLKLLKGVNSMENKIRWIVDVRDVADAILLAYEKLEAEGRYICHSHTIKTRDMLEKLKSIYPNYKYPAKYTEVDDYISFSSEKLQRLGWKYRSLEETLVDSVESYREAGHLQSE

SEQ ID NO: 159806 - protein, 195 aa, Glycine max
  Clone ID: PAT_MRT3847_115323C.1.pep
SSPSLTGLSANYLSSQSPIAIDQASQFNSGSLLGQSFNHQPLGQGVHASQSAVSQPPKDKFETKSTVWADTLSRGLVNLNISGPKLNPLAYIGVDFDAINRREKRMEKPTTTTVTSTVTMGKAMGSGSGMGRAGVGALRPPSNPMMGMGMGSYGGVNAPMGMGQMPPPPSRFPPGNYNSMMGRSGYPQHPYGGYR

SEQ ID NO: 159807 - protein, 90 aa, Glycine max
  Clone ID: PAT_MRT3847_115324C.1.pep
KKKKFKKNLKKKKKKKKKKKKKKKKKKKKKKKKKKKKKKKKKKKGGPFLKNQILLPRHCKVKIFFWGPQIKIHCPFFKNAGMGKTLGFPN

SEQ ID NO: 159808 - protein, 78 aa, Glycine max
  unsure (1)..(78): unsure at all Xaa locations
  Clone ID: PAT_MRT3847_115325C.1.pep
LFFPLFKYYFLSVNSNIALCSISLFIFMDFFCFIFFLSFFIFFFLILIYFWVLVCLFFLYFLFYXFSYLYYYFIFFDF

SEQ ID NO: 159809 - protein, 424 aa, Glycine max
  Clone ID: PAT_MRT3847_115326C.1.pep
MHRKLSPLKPQILKDITGLTETERMKRNSVYPSALNCDDILHEILLRIPPPTISKLIIVSKIWLRVICSPSFRQCYLRQWGQSFRLLGFFVCNFLYLGRPRDGYRRPRWEPALPILSTCKDGDDLKLSGILKHLGYFIDSSKGIILSGFHPKTYYVYNTVTKQKYELPEPQQFYKVLCMALIVEEYLDSDICYKVIRARCECKLKERNTVSIETYSSKTRQWKQSTLMCSTTFALCPRTAAMVVGGVVHWFAMWGKLAIYDPRLGDRYIALIKLPTGVLTHEHEESVLGESSDGLLQYGQSNNLGLEIWILEKESGANSSIYCNCTHLKYKWILRWRLNFKVLWKQMPSLSTHSKETQILSFLPQNSTSIFIRSGWNILLCDLETKTVEIVNYQGRGGTISWESSKVVPYFLPAWPHTSSVSVS

SEQ ID NO: 159810 - protein, 44 aa, Glycine max
  Clone ID: PAT_MRT3847_115327C.1.pep
FQSWGQLRNQFTQQLQCRERELCLWPFWKKWNESKERRYLRRRR

SEQ ID NO: 159811 - protein, 30 aa, Glycine max
  unsure (1)..(30): unsure at all Xaa locations
  Clone ID: PAT_MRT3847_115328C.1.pep
FLEIMLYKNISHQGXRMRYDLRKYLGLLGY

SEQ ID NO: 159812 - protein, 77 aa, Glycine max
  unsure (1)..(77): unsure at all Xaa locations
  Clone ID: PAT_MRT3847_115329C.1.pep
VPPFNTLFLXTKIFSFKSTPCPPQRGRVLLLGEGGGPNKPFGFFRAPVISPFLGGGRWGSPVMFPRGRFLTRPPPPF

SEQ ID NO: 159813 - protein, 58 aa, Glycine max
  Clone ID: PAT_MRT3847_11532C.1.pep
SIWDIWNFQQLSLVRSLFELIEDLSTFFFRTCKSRNLSSLNRPLGPARCHSILSPGYL

SEQ ID NO: 159814 - protein, 137 aa, Glycine max
  unsure (1)..(137): unsure at all Xaa locations
  Clone ID: PAT_MRT3847_115330C.1.pep
RAEPLLAAPPGFGPLKATLFLGQGRGANANVFRVVVSMGPGKSTMAIVWGFGPTRGKYLGPFXLKPFXYLKGEFLGDFGWATVGXFVAPKPFAKTRVFEVIHGQWAMLGALGCLTPKVLKKWLKVDLREPGWLKVGA

SEQ ID NO: 159815 - protein, 117 aa, Glycine max
  unsure (1)..(117): unsure at all Xaa locations
  Clone ID: PAT_MRT3847_115331C.1.pep
ASDRAVPQAIVYGAGLASFLGTTRWKLGLCYKEAGKGGGQVGNVHQVLTTLRVLEAXWHKPNDYEVYHNSYRRGPMKGIAGADGQMSXDQSGDWMVCQRKARRRRGNSEAQILMGTG

SEQ ID NO: 159816 - protein, 360 aa, Glycine max
  unsure (1)..(360): unsure at all Xaa locations
  Clone ID: PAT_MRT3847_115332C.1.pep
MVEQLVTGTRVWFDLKVSSMADLKKNGFLTYAYILLHNIVSIGQIFNKLAAEQKKKKKVIVVRWFARMGNTFCFFCGCVAQSSVGVVEQWGRFHRLAQPGFHFFNPLAGECLSGILSTRISSLDVRIETKTKDNVFVQLLCSIQYRVIKENADDAFYELQNPQEQIQAYVFDVTRAIVPRMNLDELFEQKGEVARSXVLEELEKVMGEYGYSIEHILMVDIIPDPAVRKAMNEINAAQRMQLASQYKGEAEKILLVKKAEAEAEAKYLGGVGVARQRQAITDGLRENILNFSHKVEGTNAKEVMDLIMITQYFDTIKDLGNSSKNTTVFIPHGPGHVRDIGEQIRNGLMEAASAQVNVEE

SEQ ID NO: 159817 - protein, 116 aa, Glycine max
  Clone ID: PAT_MRT3847_115333C.1.pep
DPCCKSRKTLISDPQFAKDHLHLRASIADPNMTHLLLVSPKYSDPSKILSFSVQSLFQNPSTPAEGRCFRLRRSCQILGSCNGLLCLFNVHTRYVKLWNPFTRLTSFQRLSIWLYS

SEQ ID NO: 159818 - protein, 48 aa, Glycine max
  Clone ID: PAT_MRT3847_115334C.1.pep
ATFLCEDIKFSFNLPPIIPQPLISTYSSELSSPHRNPPLKLCSIPGEK

SEQ ID NO: 159819 - protein, 81 aa, Glycine max
  Clone ID: PAT_MRT3847_115335C.1.pep
IRLELIAKNCNHFTDEVCQQLTGKPIPAWVNRLARVGEDSLCLIILIPDKLYFVFTMNSTCPCNVHNYVPFRCVPTPLFMF

SEQ ID NO: 159820 - protein, 99 aa, Glycine max
  unsure (1)..(99): unsure at all Xaa locations
  Clone ID: PAT_MRT3847_115336C.1.pep
PVFISFFSSFKPEISIISDEFRQGGILKYLIFVLKTPLFYYYYLFIYLFLLFFIFSYYFLLFFSFYXVFFFIISVFFIINIFISIFFSFFYLFIFLFSR

SEQ ID NO: 159821 - protein, 52 aa, Glycine max
  Clone ID: PAT_MRT3847_115337C.1.pep
VPQLSHLIFSKDIIGFPNPQEIHGAFDFSIAIICYHEIRLLMVLHKYLISLT

SEQ ID NO: 159822 - protein, 58 aa, Glycine max
  Clone ID: PAT_MRT3847_115338C.1.pep
NQFFVLCGPKQFNQFFPSFKSAFSEVQYIKGFCSTGDIYKEPLWFCSIVQRELLFQKK

SEQ ID NO: 159823 - protein, 64 aa, Glycine max
  Clone ID: PAT_MRT3847_115339C.1.pep
GFICPCEASNNTVLLNDNQSLKLLFLEKKNQMTPNCHITVAFNNSKVLMYFPIMMKCTQSFSNR

SEQ ID NO: 159824 - protein, 269 aa, Glycine max
  unsure (1)..(269): unsure at all Xaa locations
  Clone ID: PAT_MRT3847_11533C.1.pep
HASGESSKESWKRRQPSNTDKDSKNEEGAFDDNRDWELPRHGYERMDNERPHGRFGGRKDASRGEAVKTSTKFGISNDNYDVIEIQTKFYDYGKSESVSNHTKRTETHQQYNAKSGANDEEWAYHQDERGRKSDLSGSGTPGEDLKERYADDDYDFYGGRGRGQKGGVSARVTGGQSSSTGGSQPQYGNSESGSFNRAGPQGIKGNRVGRGGRIRPTXRDNQQVGIPLPMMGSPYGPLXMPXPGPMQPLSHGMSPAPGPPISPGVFMSP

SEQ ID NO: 159825 - protein, 108 aa, Glycine max
  unsure (1)..(108): unsure at all Xaa locations
  Clone ID: PAT_MRT3847_115340C.1.pep
ECFIIRGREGAPVCLSVAAKVVFKSPSGRRLDRLSPLPKGFCALLVPDSGIPPEEKAKHAPNEDEVXEEEEDYXEDGEYDDDDDHDADEEEEEEGEEVNKKGDSQRRE

SEQ ID NO: 159826 - protein, 53 aa, Glycine max
  Clone ID: PAT_MRT3847_115341C.1.pep
SLIHTQNSLLPTQLSTQYSCIQYIFNTHPQAGAHKLNAPSLEHELKHKKDSFF

SEQ ID NO: 159827 - protein, 89 aa, Glycine max
  Clone ID: PAT_MRT3847_115342C.1.pep
PVFSVGIAISHGPRTLQVVRRTRSALCPLQRATASSLSSAEKRKWLLRAQASPRRDFSEWVLASLAGEVRIEDRCLPRDNLRTDLPQQP

SEQ ID NO: 159828 - protein, 50 aa, Glycine max
  Clone ID: PAT_MRT3847_115343C.1.pep
RFSMGNNQLATQELQSGTMLTTALMRNQLMTTRSLRTFPKVLFGLKGGQG

SEQ ID NO: 159829 - protein, 42 aa, Glycine max
  Clone ID: PAT_MRT3847_115344C.1.pep
FFFFFFFFFFFFFFFFFFFFFFFFFFLNNKNIGLDVIKHDDN

SEQ ID NO: 159830 - protein, 41 aa, Glycine max
  Clone ID: PAT_MRT3847_115345C.1.pep
FHPTDHNLVLHYLCRLCASQSIDVPLITEIYLYIYYTWNLP

SEQ ID NO: 159831 - protein, 93 aa, Glycine max
  Clone ID: PAT_MRT3847_115346C.1.pep
SFFDDEFCQGLMKKVLPHFHFPSLLQVQKWLGSILLLIRVGRGAKTQAPGSVSTPEDFAVATKEDLPGKAKVRVVGCHHYNRGPSLRGYSLPQ

SEQ ID NO: 159832 - protein, 44 aa, Glycine max
  Clone ID: PAT_MRT3847_115347C.1.pep
IKMKRTILDENHLSHTLNLRRHLDNISNVLQDIVSLRTTNNEIC

SEQ ID NO: 159833 - protein, 53 aa, Glycine max
  Clone ID: PAT_MRT3847_115348C.1.pep
ICPRIRRILPYPQQANYRRPTIHTGCSSLNPQLTALSVTYEAHKVIHRLSQSW

SEQ ID NO: 159834 - protein, 150 aa, Glycine max
  unsure (1)..(150): unsure at all Xaa locations
  Clone ID: PAT_MRT3847_115349C.1.pep
PRRGLGFGSVSSGCGPMPNPXGSYLAVSVLSRTILLSGSPCLVLGXHRFAFVSVSYVAPGTPLGLAVFFKIPGVFRVGSLSDRPSGGGIYLDSSVLHTDYRSFVDFVFLLXEDFIHSYHLDGYSFFVVGLAGXQWTPAVLNTYNLRDXVS

SEQ ID NO: 159835 - protein, 956 aa, Glycine max
  unsure (1)..(956): unsure at all Xaa locations
  Clone ID: PAT_MRT3847_11534C.1.pep
EVDVGSVRTVQAGRVGVGGGVRGGSRVREGGGAARSEHGESKTSGGGDRVVKSTSKEDRRGDSERGKSKGKSDSGDVGREERVEKPRHHRAAAGYDVAETWDRSLNAEEDGHVRVRDKSTRESGNSNRSRTPEKSGKRHQDLENSEVDYERSSSFKRKEHEGDGYKDDRSKGKDDTWNDRRKDRESSKESWKRRQPSNTDKDSKNEESAFDDNRDWELPRHGYERMDNERPHGRFGGRKDVSRGEAVKTSTKFGISNDNYDDIDPETKFYDYGKSQSMSNHTKRTETHQQYIAKSGANDEEWAYHQDESGGKRDLSATGTPDDVLKVRYADDDYDWRLELFGEDHNIRAGWLTVGKELSSSNFNKEAYVKSFADKDGKVWQGGGGRNPPPEAPHLVVTTPDIEVGRPLPMMGSPYGPLGMPPPGAMQPLFXGLSPAPGPPISPGVFMSPFTPGVWPGARGVDMNIIGVPPAVSPVPPGPRFNAANIGNPPNPVMYYNQSGPGRGIPPSISTPGFNPTGSMGRGAPPDKTPGGWAPPKSSGTLGKAPSRGEQNDYSQNFVDTGMRPQNFIRELELTNVVEDYPKLRELILKKDEIVEKSASAPMYYKSDLKEFELSPEFFGTKFDVILVDPPWEEYVHRAPGVADHMEYWTFEEIMNLKIEAIADTPSFIFLWVGDGVGLEQGRQCLKKWGFRRCEDICWVKTNKSNATPGLRHDSHTLFQHSKEHCLMGIKGTVRRSTDGHIIHANIDTDVIIAEEPPYGSTQKPEDMYRIIEHFALGRRRLELFGEDHNIRAGWLTVGKELSSSNFNKEAYVKSFADKDGKVWQGGGGRNPPPEAPHLVVTTPDIEALRPKSPMKNQQQLQQQNSVSISLTSASASNRRPAGNSPQNTTALGVNQDASSSNPSTPAPWGSPLEGFKGREGSVLPSDDKVMDMYGFHGPASANYLDFESYRQMNLL

SEQ ID NO: 159836 - protein, 61 aa, Glycine max
  Clone ID: PAT_MRT3847_115350C.1.pep
VGSYTKPVAGATPGYASEVIFADGTFIDGSTSELSCDGPLREPFTVFCQGGTHWTQWGLVL

SEQ ID NO: 159837 - protein, 98 aa, Glycine max
  Clone ID: PAT_MRT3847_115351C.1.pep
DGLYLESILHCLIYTYINDAAYYVSITIFHIGTKFYLHKICNITLHKTQKNTREHMTLKVPFLTYTTEAKMSYMIITLKRHMNDYINLSYHVTTKVTL

SEQ ID NO: 159838 - protein, 94 aa, Glycine max
  unsure (1)..(94): unsure at all Xaa locations
  Clone ID: PAT_MRT3847_115352C.1.pep
RAVPRAAFLSPLLPLLLGFLLLSAPHGGSGLHTKGALPLDTVTFYKVIPKXKFVLVKFDTQYPYGEKQDEFKRLAENSASSDDLLVAEVGISDY

SEQ ID NO: 159839 - protein, 336 aa, Glycine max
  unsure (1)..(336): unsure at all Xaa locations
  Clone ID: PAT_MRT3847_115353C.1.pep
MGNDGHGGGGRNTTTSSSTMWRWSAYGLYGQTVKYTFLITNVLSVVFSLITFSYGAWLYHNRSQYYELLAPSLYVDVCLIMMVISSLVVANSVIAVYSVLKELRCLIYSFSTASVILCFSLLIGGIMGLVFRQKLVQTPLHLKMNTSLKELYGLSDMTAITLAWDXLQREFRCCGVNGTEDFTIWRTSKWHMHHREPKPAFPQSCCVPERLAECVERSITMDKEMSNGIRPSMEQLAAEAAPTSAEAEASVVGGGEHVAQNQQQLPADSSSSSSTIFMTNFTGSEAAAFYTNTCYMPFRTDLLSVVHVAAWLSISCSFYLLVPAFFATFFAKLVKK

SEQ ID NO: 159840 - protein, 220 aa, Glycine max
  Clone ID: PAT_MRT3847_115354C.1.pep
MRRKSRGKRRRAASATTLSPSSLSAIPILWDAYDTICIHCNNKGEEAKEDGLLICSGMGCPVAVHATCLATGPKFDGSGNFCCPYCWYKRAVDTCRRLREKALEAKGDLSRFLDNHDHARAAAHVDLVVQDSEELMEETGTQAQSKDNKDEEGEARVNQVHDREESETEPEENKEKEGKVRDDEELVEERERKTVTEAQSQENKDEEDKFQDDSEELVVE

SEQ ID NO: 159841 - protein, 47 aa, Glycine max
  Clone ID: PAT_MRT3847_115355C.1.pep
PRVRKKKKKKKKKKKKKKKKKKKKKKKKKKKKKKKKKKKKKKKGGPF

SEQ ID NO: 159842 - protein, 63 aa, Glycine max
  unsure (1)..(63): unsure at all Xaa locations
  Clone ID: PAT_MRT3847_115356C.1.pep
MTSYLTYNTLIYIGRTGRGYYATYGKSXYGPRGLYLMYRAKDARRALAKMSKSDEDISPSLDG

SEQ ID NO: 159843 - protein, 64 aa, Glycine max
  Clone ID: PAT_MRT3847_115357C.1.pep
VSTHEWCIGLCRAPELLLGAKEYSTSIDMWSVGCIMAELIVKEPLFRGKSELEQLDKVRLLLLK

SEQ ID NO: 159844 - protein, 113 aa, Glycine max
  Clone ID: PAT_MRT3847_115358C.1.pep
LARPFFIIILSFFPAYNNNLTFFSHYSSLFPPTYRFNIHYRKTLRICKDKKPTFVCSFSPFVKLKFIGFLFFLDIKEFVRNFSHTAFSFLSFLTYSCKIKFLETTQGKHFVHS

SEQ ID NO: 159845 - protein, 65 aa, Glycine max
  Clone ID: PAT_MRT3847_115359C.1.pep
RDQADAHGKGIVGKDTFLEGINTSLPTLGAGESAFIFILDWTGTLGFPGPFSLRTSFQVESFLRS

SEQ ID NO: 159846 - protein, 74 aa, Glycine max
  unsure (1)..(74): unsure at all Xaa locations
  Clone ID: PAT_MRT3847_11535C.1.pep
KGIRTKKKKKKKKKKRGGRFKGSKFTIAGLQQNTFFLGSPKLNXTGRGLXRGDWKNLGFTKLNGLEKNSLFASW

SEQ ID NO: 159847 - protein, 202 aa, Glycine max
  Clone ID: PAT_MRT3847_115360C.1.pep
MEGTVFTPALQEIEHVKSDQGEILSKPFLDACKHILPVIDKFGAAMALVKSDIGGNISRLETMYSSNPSRFNYLYSLVQVEVETKTAKSSSSCTNGLLWLTRAMDFLVALFRNLIEHEDWPMSQACTDSYNKTLKKWHGWLASSSFTVVMKLAPDRKKFMDVIGGTGNISADIEKFCTTFSPLLEENHKFLARFGLDDMKAS

SEQ ID NO: 159848 - protein, 69 aa, Glycine max
  unsure (1)..(69): unsure at all Xaa locations
  Clone ID: PAT_MRT3847_115361C.1.pep
SVIRDSLLQDGEFSMDLRTKSTGGAPTFNVTVTKTDKTLVLLMGKESXHGGLINKKCYEMASHLRRSQY

SEQ ID NO: 159849 - protein, 250 aa, Glycine max
  Clone ID: PAT_MRT3847_115362C.1.pep
TAARRRQKGEDYRGKRRKDEEYLRREHIDKEEVLHGYREIASSRRRRERDEVLDPRKRDDLQRARDNPDDQYATRQKDEAWVLKERGDRQRDREEWYRMKQSHEEHLPKREREGRSSVRSGRGAEHKLSEKEYQSREAMRHNDQLKRRDRIQDESPHHKGRDDASARGNQYTTEERRSRLERSSSRSDRVANVSDNQKVKHREGSRKSKERDVSDLNSLGLSKRSQENQSGPTNEKVCTLACKNVKLSGE

SEQ ID NO: 159850 - protein, 52 aa, Glycine max
  Clone ID: PAT_MRT3847_115363C.1.pep
LDSHQEGPSYCGAVAGRNCANRLWSNTQLYRISIGIKAQKGLLMEGLAIKTK

SEQ ID NO: 159851 - protein, 77 aa, Glycine max
  unsure (1)..(77): unsure at all Xaa locations
  Clone ID: PAT_MRT3847_115364C.1.pep
MQAQRDFPLYEEHISCITDCQKHTKYCLQSSYVEMAHNTHISDTFQKMIQEACHDYHLNTVRNTXDRGTRSKLAVQR

SEQ ID NO: 159852 - protein, 60 aa, Glycine max
  Clone ID: PAT_MRT3847_115365C.1.pep
TVALYPLHLRELQTAFHTGSPPPATLLWDGDLTDGYNMCCLHYTGIPLPTSNCQLAHCSP

SEQ ID NO: 159853 - protein, 152 aa, Glycine max
  Clone ID: PAT_MRT3847_115366C.1.pep
MKMEEFSEEEDDDVGFLNGSESELGEESEGLIDELDWDSDDLEDELLGEDDNEKLELDGFTPAGVGYGNITEEYLERVKKKKVSKAEKKRMAKEADKEKEEATVCARCHSLRNYGQVKNQTVENLIPDFDFDRLISTRLMNPSGSGSATVVV

SEQ ID NO: 159854 - protein, 115 aa, Glycine max
  Clone ID: PAT_MRT3847_115367C.1.pep
TTLIFSLSLCCNAINNVTMMDAESGKRSASTFSPSSSSSYSSSSCLRLDRLVDSEEIEAAETLAQLANCNTHSSDKWCTKQDTTRVMRESPTLRHSDLSLGPGVSSQMKKYPLHL

SEQ ID NO: 159855 - protein, 31 aa, Glycine max
  unsure (1)..(31): unsure at all Xaa locations
  Clone ID: PAT_MRT3847_115368C.1.pep
HWIFXVGPFIGASLATRYHQVVIRAIPFKSK

SEQ ID NO: 159856 - protein, 91 aa, Glycine max
  Clone ID: PAT_MRT3847_115369C.1.pep
LREDDRRGSNKPKTQVATILIKSVPTTPTFMAPPQADLWKIGAEGFALIDKFYGPSRGNSANDAFHGPRGEHCWVVYNVSNDVMEESAVDP

SEQ ID NO: 159857 - protein, 47 aa, Glycine max
  unsure (1)..(47): unsure at all Xaa locations
  Clone ID: PAT_MRT3847_11536C.1.pep
SRISWMQLVFEIDXSPLHKVAMITVTSCLEXIRRGIWNFFRLENEHE

SEQ ID NO: 159858 - protein, 50 aa, Glycine max
  Clone ID: PAT_MRT3847_115370C.1.pep
NLTSGLSMNYCRNNVYLCFLSSSGVQYLFHQVIKWMTLTSCKRRNILCKI

SEQ ID NO: 159859 - protein, 63 aa, Glycine max
  Clone ID: PAT_MRT3847_115371C.1.pep
LNDSNGHKYVHDTCGLFIWIYIQMSSGERKIQGLSLGNTFLVALYYIYVFFLLVLGVYNLLCD

SEQ ID NO: 159860 - protein, 67 aa, Glycine max
  Clone ID: PAT_MRT3847_115372C.1.pep
YITIGLVKGGRQNPQKLTNLEPNGLFLPTIYWAPQKEILRLYLMLFPFHQPQLLHYLHSQAFFLHRH

SEQ ID NO: 159861 - protein, 93 aa, Glycine max
  Clone ID: PAT_MRT3847_115373C.1.pep
ILTHNYIQLSSKMAPYHYKRTFYLFTINHKFHASIGSTFHINPSPKPPQQFFTGNHRLQKLPWTSTCPGEIPWWLVLVRILKGLHFSKKNSTS

SEQ ID NO: 159862 - protein, 176 aa, Glycine max
  Clone ID: PAT_MRT3847_115374C.1.pep
EEFTELESTINTHHKFEASPEICSSIIAQRIDAPAHTVWPLVRSFENPQKYKHFVKSCNMRSGDGGVGSIREVTVVSGLPASTSTERLEILDDDKHLLSFRVVGGEHRLHNYRSVTSVNEFKNPDNGKVYTIVLESYVVDIPEGNTGVDTKMFVDTVVKLNLQKLGEVAMATTTLH

SEQ ID NO: 159863 - protein, 87 aa, Glycine max
  Clone ID: PAT_MRT3847_115375C.1.pep
KKSFYPKRGGKKKKSGGCLLKEPPPNGKKKPPSSGVRIVAFPRVPTREDIGFPFNEFGLTDPHHLLYRIIIYSPIKILFFLNKINPN

SEQ ID NO: 159864 - protein, 245 aa, Glycine max
  Clone ID: PAT_MRT3847_115376C.1.pep
VITAADFVLLYGLYVPEWQFDVSASTSSLPPIGGGDIYMVNSPERGDLGPACNSAGMIDRYILGLDHLYRKPVYRNLKGCNMSANGLVSVGSPSSCHAPSVPGGFLSSITAAVSCIIGLQYGHVLAHLQDHKGRLYNWMCFSLSFLALGLFLALIGIPLNKSLYTVSYMLLTSAASGLTFIALYFLVDVHGHRRLTALLEWMGKHSLSIFVIVSSNLAVIAVQGFYWTKPENNIINWIVTRFDHT

SEQ ID NO: 159865 - protein, 54 aa, Glycine max
  Clone ID: PAT_MRT3847_115377C.1.pep
APGKMHILMIENSTYRQVTYSILPNGLFNNANELTDLCDANGAMIMLSRTGKLQ

SEQ ID NO: 159866 - protein, 49 aa, Glycine max
  Clone ID: PAT_MRT3847_115378C.1.pep
FCHLSHWPWRLTCAYINSQNVISDTSLSYCYRLALATFSFWYHNWIWFV

SEQ ID NO: 159867 - protein, 242 aa, Glycine max
  Clone ID: PAT_MRT3847_115379C.1.pep
MSSFSGAIQRPLVAAAAVAVASFSADLSDKLPSRDCSTSDLAHSTPCSNIQESDSSWVSHISDSKLANLSFVTQIPVPVPNVQFRVPSLGQNCVSNLYHSSVASSPLLRNLYHSADLPRVSRSAAYSHGISNSTSEAEVMYKWHLPELNALDDSSCSLTKSRTVVVLLGWLGARQRHLKKYAEWYTLRGFHVVTFTFPMGEILSYQPGGKAEQNVHLLVDHLAEWLEGESDKNLVFHTFSNT

SEQ ID NO: 159868 - protein, 50 aa, Glycine max
  Clone ID: PAT_MRT3847_11537C.1.pep
TTTRTISATYVFGTGYHISYAPPDRVILSQTHNCRANIATVSYSHPTMQP

SEQ ID NO: 159869 - protein, 74 aa, Glycine max
  unsure (1)..(74): unsure at all Xaa locations
  Clone ID: PAT_MRT3847_115380C.1.pep
RDVSTRYKESISKSTRGRKERWLYRNNNMSGIGSEVRREVNAGIATVSRKMERXLETSDNNRGMAILPPVMWRK

SEQ ID NO: 159870 - protein, 79 aa, Glycine max
  Clone ID: PAT_MRT3847_115381C.1.pep
VEGFGSLMLKLVHHWILPPVLVSRFPCFANSSEAAILKKAPFKIQRTYHWRSVCFSLELFVFLHLILLAGGYLSPWTSY

SEQ ID NO: 159871 - protein, 342 aa, Glycine max
  Clone ID: PAT_MRT3847_115382C.1.pep
LGNSASRKEQAELARANFSTLRKEAQSILNLVVKDATHGSEPGKTISLYVLDALINIDHERFFLSQLQSRGFLRSCFTAISNVCNQDGSLSLDSLQRACTFEAELALLLRISHKYGKSGAQILFSMGILEHLASGRAINLQGSLRWVETRLRRDMAVDVDRQRMIITPVLRLVFSLTSLVDTSDFLEVKNKIVREVIDFIKGHQSLFDQVLRLDIAEADELRTEQVNLVVGILSKVWPYEESNEYGFVQGLFGLMHALFSRDSKIPSFAQSRVSPENQRNSELQMFNLCYSLSSYLYFLVTKKSLRLQPSDACSSYAASVELQQPTLNLLNSLLFSVTTAFE

SEQ ID NO: 159872 - protein, 200 aa, Glycine max
  unsure (1)..(200): unsure at all Xaa locations
  Clone ID: PAT_MRT3847_115383C.1.pep
MKDSNSSSSSNRTEPIAQNIIKLISNLCFSLFVFSVLIFTVIAITYQPPDPWLQSTPALTNLFTQSENATFRIDSSVLRTGEDLSPSPQDPPLPPPPPSEPLIDITQQQIANSTVNSTADSTAYSTDAQPPSLPACDETLNCSNPRVLIAVQRFNLRAFKSIGFFDYQPPMNGSVPGECDVAWRXRNKREXLWRKYRDFR

SEQ ID NO: 159873 - protein, 127 aa, Glycine max
  unsure (1)..(127): unsure at all Xaa locations
  Clone ID: PAT_MRT3847_115384C.1.pep
LELFSPIFPPGGGLPFHSAHPFFFYVLSVVTISQSRSQPLHTSLVFFFPPSPFWKEWGFIPKLKTFXSPSKKQTPINXFLLLSLFPPYNPLHPSPFIIHQPSXIYXFLFLPPIFFFFSPXNXHKFFS

SEQ ID NO: 159874 - protein, 80 aa, Glycine max
  Clone ID: PAT_MRT3847_115385C.1.pep
MTAVTAIDTSGIDTLCNVIKVASVIVLSKVGEKRFQRVQILLNVMEKLHQSNILDSFGLKGVYLSVGEAVADISSWKAQP

SEQ ID NO: 159875 - protein, 123 aa, Glycine max
  Clone ID: PAT_MRT3847_115386C.1.pep
HGVRPFSPFNSHFHSSSVALPMALGGLVSNRNFTCFIGPGSVYQLGKDLSPQRGGISCAFVARYGGQIAKDPFSRCWHGMCFHAKEPLNEKVSKPIPTFHDEVQHCSPLSQKSIHCMNMKLNA

SEQ ID NO: 159876 - protein, 103 aa, Glycine max
  unsure (1)..(103): unsure at all Xaa locations
  Clone ID: PAT_MRT3847_115387C.1.pep
DKKLEVLKEGSFTINHIEVAEVDWNVPDGWNTLEYERSESSLSGGGYNMAKCKRSVTEPMLVSHFGEAIIEXVFNRFQEILADSMFKEKTGFNNVTILLTRKL

SEQ ID NO: 159877 - protein, 60 aa, Glycine max
  Clone ID: PAT_MRT3847_115388C.1.pep
ILLVTHTTYFLLLLKIQHTSFATNLYISHVIRIASNIVILSVYYLFIYKRVLTIYSLTPP

SEQ ID NO: 159878 - protein, 61 aa, Glycine max
  Clone ID: PAT_MRT3847_115389C.1.pep
MVSAGAPETNSKWGRGCRGYPHHGAPLWSCKTDIDSGGPPGFSCRSFSLTSTYKLGGGFRV

SEQ ID NO: 159879 - protein, 31 aa, Glycine max
  unsure (1)..(31): unsure at all Xaa locations
  Clone ID: PAT_MRT3847_11538C.1.pep
GFFSIANNLVLKRVLFQLLGFPXLIHISTIY

SEQ ID NO: 159880 - protein, 53 aa, Glycine max
  Clone ID: PAT_MRT3847_115390C.1.pep
PAYLRPPGPSSAGQASIPSTHASDGKCLKTRRVTYHQSNPKTIQPITIKLTAS

SEQ ID NO: 159881 - protein, 110 aa, Glycine max
  unsure (1)..(110): unsure at all Xaa locations
  Clone ID: PAT_MRT3847_115391C.1.pep
GANRFYYVDPCNERHFKPRGPRHWFQNSRHIFVAEMVGRVLITEFFGNLETVPYTKRTHLILLSKAMEMKLGECQXEQIKADFEGKILPPIHPESVRVTMIANEIIDALL

SEQ ID NO: 159882 - protein, 643 aa, Glycine max
  unsure (1)..(643): unsure at all Xaa locations
  Clone ID: PAT_MRT3847_115392C.1.pep
MKRARDDMYPASQFKRPFASSRADSYGQNQVPGSGGGGGGGNGGVVGGGANTSQKLTTNDALSYLKEVKDMFQDQREKYDMFLEVMKDFKAQRTDTAGVIKRVKELFKGHNNLIFGFNTFLPKGYEITLDEDEAPPKKTVEFEEAISFVNKIKKRFQNDELVYKSFLDILNMYRKGVRDIGEVYSEVATLFKDHRDLLEEFTRFLPDTSAAPSTQHAPYIRNSLHRFNERGSMAPMIRQMPADKAQRYRRDRLPSHDRDHDMSAERPELDDDKTMMNIHKEQRKRESRERRMRDQDEREHDLDNNRDLNLQRFPDKKKSVKKAEGMYSQAFSFCEKVKEKLSSSDDYQTFLKCLHIFSNGIIKRNDLQNLVTDLLGKHSDLMDEFNDFLERCENIDGFLAGVMSKKSLSTDAHLSRSSKLEEKDKEHKRDMDGAKEKERYREKYMGKSIQELDLSDCKRCTPSYRLLPADYPIPTASQRSELGAQVLNDHWVSVTSGSEDYSFKHMRXYEESSDVDDRYELXMLLESVSSAAKKAEELYNSINENKISVETLNRIEDHFTVLNLRCIERLYGDHGLDVIDILRKNPTHALPVILTRLKQKQEEWSKCRSDFNKVWAEIYAKNHYKSLDHRSFYFKQQKTCSLL

SEQ ID NO: 159883 - protein, 31 aa, Glycine max
  Clone ID: PAT_MRT3847_115393C.1.pep
TIILTEDSMARSSSSVKVLPNSGYHGTSFSP

SEQ ID NO: 159884 - protein, 43 aa, Glycine max
  Clone ID: PAT_MRT3847_115394C.1.pep
CSHVGTITNMLINTNEPLCLNLLFRNTKGLQIYMFDIHLLSDP

SEQ ID NO: 159885 - protein, 108 aa, Glycine max
  Clone ID: PAT_MRT3847_115395C.1.pep
PVIPGPRPTLLRDEDQIVESSEHRQVSPSSPSETKAKEANIFVKAKEEIKAIIHHDKSEHHHHKETHGRNDDINDNTPTDEVKGPNVFERVKEEFEAVFQAIHPKKES

SEQ ID NO: 159886 - protein, 61 aa, Glycine max
  Clone ID: PAT_MRT3847_115396C.1.pep
TRPYVFILFYFCILFKEVKNNLNKNYDLIVSHSFTGVSHIVPVLEYLTQIFSLFIILRVAK

SEQ ID NO: 159887 - protein, 106 aa, Glycine max
  unsure (1)..(106): unsure at all Xaa locations
  Clone ID: PAT_MRT3847_115397C.1.pep
XXXXXSRSMXXXXXXTXXXXXSLXXTXXXSXLXDXXPXRXCXXXXDXCRVRHIXLPRXWNXFXXXIXHXXXXXYXPSFLWLXXILXMKRXPXSXXIPSXTXXCXQX

SEQ ID NO: 159888 - protein, 32 aa, Glycine max
  Clone ID: PAT_MRT3847_115398C.1.pep
LDQPFHACINVRDRATANINITSYFDIRPYMQ

SEQ ID NO: 159889 - protein, 192 aa, Glycine max
  Clone ID: PAT_MRT3847_115399C.1.pep
FIYQQRKKRYPNPKLHTNASSANNSEKKQETVSRQDAEARTITPSLPCSCLTIKEEETSEATSSDSDRESNTAVDIMAAQNGNLPRHGTLVTVDGETNLELETLLKASAYILGNSHFSIVYKAVLEDGRSFAVRRIGECGIERRKDFENQVRAIAKLRHPNLVTVRGFCWGQEDKLLICDYVPHGSLATIDH

SEQ ID NO: 159890 - protein, 73 aa, Glycine max
  Clone ID: PAT_MRT3847_11539C.1.pep
LLPLVVECGMLQLSRGAGKGTAQDKLITLMEASDTGDKSFANIAAEMLEEYLLMATDQYYAYISSESIWLFHY

SEQ ID NO: 159891 - protein, 55 aa, Glycine max
  Clone ID: PAT_MRT3847_1153C.1.pep
GVSSPSVPANSESSDAAASKSPIQEQVSGTKEYKVIFPVSYNQHVMKYRRGNHTG

SEQ ID NO: 159892 - protein, 211 aa, Glycine max
  Clone ID: PAT_MRT3847_115400C.1.pep
MDIKIESDDSQNEENEERLPLLRNSEVPEAERNLIQKAISQTFQSTAHLGNLLPTGTVLAFQLLSPIFTNVGNCDSVSKAMTAALVSLCGASCFMSCLTDSFRDSKGSICYGFATLRGLWVIDGSTTLPPQLAAKYRLKLIDFMHAVMSVLVFAAIALFDQNVVNCFFPAPSTETQEILTALPVGIGVLGSMFFVAFPTQRHGIGFPLSTD

SEQ ID NO: 159893 - protein, 54 aa, Glycine max
  Clone ID: PAT_MRT3847_115401C.1.pep
KTRKSGVGEGGLLNREITYPKGNLLPNSKIGDPKGFPIQPTIYRDTTATFNYPY

SEQ ID NO: 159894 - protein, 56 aa, Glycine max
  Clone ID: PAT_MRT3847_115402C.1.pep
ITSETHSIVISNKFEFLINSESNNVFDSVSNFRYQISSAIYTSSIQNFQFYQEKNL

SEQ ID NO: 159895 - protein, 107 aa, Glycine max
  Clone ID: PAT_MRT3847_115403C.1.pep
VFFFFFFFYLFFFFFFFFFLAQKNLEALAMVTKFLFQNSKRAGKKKNLLYTFSNIFFLTLLLGGHFLLGLTLFTHKLARGGKNIWAGFRPIPHWKKFSLKWAVDPAV

SEQ ID NO: 159896 - protein, 32 aa, Glycine max
  Clone ID: PAT_MRT3847_115404C.1.pep
LVVNTRNLRELDLQESEVEDLSGHWLSHFPDS

SEQ ID NO: 159897 - protein, 70 aa, Glycine max
  Clone ID: PAT_MRT3847_115405C.1.pep
SGRCVFTCGFFIDFSLSFFSSVMGNQEKAFFALNIFYSRTPLLHIRVYVCIFFFFFCILHCFGLFKLVNG

SEQ ID NO: 159898 - protein, 304 aa, Glycine max
  Clone ID: PAT_MRT3847_115406C.1.pep
PEKPSSVFTKRSSQTATLQHKKPASSVDAEIVGGSTISSQAMLKQEVSTASSKGTTLKEGDRVKFVGNFPSAVSSLPNYPSRGPSYGSRGKVLLAFEDNRSSKIGVRFDKSIPDGNDLGGLCEEDRGFFCSANHLLRVDGSGGDDADKVAISDIFAASANQSKSGPLVLFIKDIEKAMVGNYEVLKNKFESLPPNVVVIGSHTLLDNRKEKTQPGGLLFTKFGSNQTALLDLAFPDNFGRLHDRSKETPKVMKQLGRLFPNKVTIQLPQDEAILSDWKQQLERDIETMKAQSNIVSIRTVLNKI

SEQ ID NO: 159899 - protein, 113 aa, Glycine max
  Clone ID: PAT_MRT3847_115407C.1.pep
TKNCKQKNSDLWFPNSSWLTCIRSPQFCTLQMLGGIYNSTACTNFNGLYNIYTFADKKKVTQCRLQHNIKTTSIYCSELYEERKLIQFIDAYFNQNMSSCKNLQVHFHRGHHH

SEQ ID NO: 159900 - protein, 72 aa, Glycine max
  unsure (1)..(72): unsure at all Xaa locations
  Clone ID: PAT_MRT3847_115408C.1.pep
MXKGXGXXSXIGKKXRDLXFKDYHSXXKFTIXTXSXTGVAITSSGXKXGXXFVSDVNTQLKXKXIXTDIKVX

SEQ ID NO: 159901 - protein, 472 aa, Glycine max
  unsure (1)..(472): unsure at all Xaa locations
  Clone ID: PAT_MRT3847_115409C.1.pep
MHSRLPYFPADSLWTAQEAYRVTNDRMSRSTAECIDQAMTHAADTKVKFVSVNLSVEAQLHDXPAGTEADLCGGYRHPASTYRDGIQEVARSGHDSDIEWVQVVXKADPGVGMEDIEDQAPRRRKEHRRVPSTVAIEDEXVGASAAAKGEAPLGLPLKGAVHQAIYAPPRSYGIIPKASDALSGELFEVKKERIRKASIHGNLPGWDLRSVIVKSGDDCRQEHLAVQLISHFYDIFQEAGLPLWLRPYEVLCTSSYTALIETIPDTASLHSIKSRYPNISSLREFFIAKYQENSPSFKLAQRNFVESMAGYSLVCYLLQVKDRHNGNLLMDEEGHIIHIDFGFMLSNSPGGVNFESAPFKLTRELLEVMDSDAEGIPSEFFDYFKVLCIQGFLTCRKHAERIILLVEMLQDSGFPCFKGGARTIQNLRKRFHLSLTEELILWIRMLRAFPASSLIISRFYAFKASLLAVMLS

SEQ ID NO: 159902 - protein, 66 aa, Glycine max
  Clone ID: PAT_MRT3847_11540C.1.pep
MCLVFVCGEDERVVSRQPAPGACPYCRGMIQAMDVESQWNFCFLPLYSKTKRRYYCTMCTRKLVLQ

SEQ ID NO: 159903 - protein, 388 aa, Glycine max
  Clone ID: PAT_MRT3847_115410C.1.pep
MPYNEFGPPLSNVTKLTFEGRTDVSDLGLQYISKLCVSLRHLNIKGCISVTDIGISDLISTCKKLNSIVVCDTLFGIYSVQALCSAISGSGNFPSLHSRDKRLKSVVSNFEMLHMGGCRGISESSLLELMSQAQVLKSLCLRWTDLVDQALYNFVGSSLEMLDVISDMIVMNFVTSLKYLQVLALCYCFGDISMSSFKFPMQNLRKLRLERITPWMTNDDLVVLAQNCRNLLELSLLGCPLLDPDSLQIITCGWPGLVSIHLEDCGEVTANGASALLDCKALEDILLRHNGPGLPRNFICYAASEMPLLRKLSLDICDASEGDFDIPNQYADKYFLSTLKIARCKSQRCAFNLPAPAPGVHRRSVHVETLVLVWNSRDLIRTVVKERL

SEQ ID NO: 159904 - protein, 309 aa, Glycine max
  unsure (1)..(309): unsure at all Xaa locations
  Clone ID: PAT_MRT3847_115411C.1.pep
MDESKNRHNDNLGVNKMGKNIRKSPLHQPNYGNNNNSSMNGGRQQQQQPQPQVYNISKNDFRDIVQQLTGSPSQSQDHPQSKPPQNQNNSPKPQSMRLQKIRPPPLPYVRPPLHTTLPAARPAHFRQQPSPNPNNIAESPISAYMRYLEHSITDPTSRGAQFQPHRHPASSALLPNPPMMPLNATNPLPPPPAIAAVPSPQPNGPPILPLPSPTSQFLLPSPNGYMNFLSPQSGYPPLLSPGCQFPPPFSPNFPFSPFAQSGHLGPGPHPPLSPGLSPVFXGSGPQPPLSPGLFPLSPSGFFPMTSPRW

SEQ ID NO: 159905 - protein, 53 aa, Glycine max
  Clone ID: PAT_MRT3847_115412C.1.pep
IFFSICSFKSQIFINIGFKFKYSIYNYIKCILNIRKNIFIDYNDSTKNLVTYL

SEQ ID NO: 159906 - protein, 325 aa, Glycine max
  Clone ID: PAT_MRT3847_115413C.1.pep
MSSGAGKVVCVTGASGYIASWIVKFLLNRGYTVKATVRDTSDPKKINHLVGLDGAKERLHLYKANLLEEGSFNSVVQGCHAVFHTASPFYHNVKDPQAELLDPALKGTLNVLKSCVNLPTLERVVLTSSVAAVAYNGKPRTPDVVVDETWFSDPGFCRESQMWYTLSKTLAEDAAWKFVKENNIDMVTINPAMVIGPLLQPVLNTSAASILNVINGAQTFPNASFGWVNVKDVANAHILAYENASANGRYCLVERVAHYSEIVKILRDLYPTLQLPEKCADDNPYVPIYQVSKEKAKSLGIEYTPLEVSLKETVDSLKEKKFTNF

SEQ ID NO: 159907 - protein, 103 aa, Glycine max
  Clone ID: PAT_MRT3847_115414C.1.pep
QYVVHPSSIKSLPTCNIKHLHIILSTKSHHQNQKKESKLMTLSISISPPSHYSLTRTRLQNCPSNTTHTLSEECHYLAANFPTKKSQLLLKGISFLMSKRRKC

SEQ ID NO: 159908 - protein, 119 aa, Glycine max
  unsure (1)..(119): unsure at all Xaa locations
  Clone ID: PAT_MRT3847_115415C.1.pep
DKRTEFHXNIIRNTGWTATPMQDVHVTTDWVISYEEXLPRTYRGLKPQNPFELNKRTGKLTSTQGTAHSEKRMPLSIRGGAGAKNASLMNMPNAFLSMWRNSRGDLVTKVSKKTIPYIK

SEQ ID NO: 159909 - protein, 43 aa, Glycine max
  Clone ID: PAT_MRT3847_115416C.1.pep
AGVTVAHGGGLPNITPVLLPKNSDRSHKDLKSPSKGTESPKKA

SEQ ID NO: 159910 - protein, 140 aa, Glycine max
  unsure (1)..(140): unsure at all Xaa locations
  Clone ID: PAT_MRT3847_115417C.1.pep
IIISFSEKLSQTTIIAFPNGSNSNLNNLLLKTMMGRLQLRAPINNPLVTQSLEDFLLTDLGDDDDDNDGEETFEGQSELAREEAKLEREVIKIILSGNGESVLMPNSGQAVXVRDHHICVGFQDEEGSGYRMWEWHGHIM

SEQ ID NO: 159911 - protein, 61 aa, Glycine max
  Clone ID: PAT_MRT3847_115418C.1.pep
EAVLKESQNLRKHSSASATYHAYMNYMFFYLFCERIWCLEVETERKALYKDPYTHEMNFEL

SEQ ID NO: 159912 - protein, 216 aa, Glycine max
  Clone ID: PAT_MRT3847_115419C.1.pep
PSLVAHTHTLRSLFSFCNSIVVLFTLTMRILVVLSLATLLLFSSLFLTLCDDLTDDEDLGFLDEPSAAPEHGHYHDDDANFGDFEEDPEAYKQPEVDEKDVVILKEKNFTDTVKSNRFVMVEFYAPWCGHCQALAPEYAAAATELKGEDVILAKVDATEENELAQQYDVQGFPTVYFFVDGIHKPYNGQRTKDAIMTWIKKKIGPGIYNLTTVEDA

SEQ ID NO: 159913 - protein, 55 aa, Glycine max
  Clone ID: PAT_MRT3847_11541C.1.pep
RSHYLLNNLKITYLNTDKGIRRKKICKPPISSFWICHACELLVTSCYLICHITKQ

SEQ ID NO: 159914 - protein, 582 aa, Glycine max
  Clone ID: PAT_MRT3847_115420C.1.pep
VSQHTQISLLFLQFHCCLVPFTLTMRILVLLSLATLLLFSSFSPTFCDHLADDEDLSFLDEPSAAPEHDHHYGADDSNFGDFEDFEEDDAEAYKQPEVDEKDVVVLKEKNFTDAVKNNRFVMVEFYAPWCGHSQALAPEYAAAATEVKGDDVILANVDATEENELAQQYDVQGFPTVHFFVDGIHKPYNGQRTKDAIVTWIRKKIGPGIYNLTTVEEAQRILTNETKVVLGFLNSLVGPESEELAAASKLEDDVNFYQTVNPDVAKLFHIDPGVKRPALILIKKEEEKFNHFDGQFEKAEIADFVISNKLPLVTIFTRESAPLIFENQIKKQLLLFVTSNDTETFVPVFKEAAKIFKGKLIFVYVELDNEDVGKPVADYFGITGNGPKVLAYTGNDDGRKFLLDGEVTIDTITAFGNDFLEDKLKPFLKSDPVPESNDGDVKIVVGNNFDEIVLDESKDVLLEIYAPWCGHCQSLEPIYNKLAKHLRNIDSLVIAKMDGTTNEHPRAKPDGFPTLLFFPAGNKSFDPITVDTDRTVVAFYKFLKKHASIPFKLQKPTSTSESDSKGSSDAKESQSSDVKDEL

SEQ ID NO: 159915 - protein, 67 aa, Glycine max
  Clone ID: PAT_MRT3847_115421C.1.pep
CNQNISFLCQEISYIWKIPSSTLLSWKKEKLAIIHSRLCSEHYLGCYADCEAGTYCSEYRAKYYYFQ

SEQ ID NO: 159916 - protein, 80 aa, Glycine max
  Clone ID: PAT_MRT3847_115422C.1.pep
CLDAPLFRTRHHIKFKLSSAIGVGTLPSRLQSFFLVGYFAVNIGFCVWKIDYSIFSSGAGELLSRSGIMAVINMIPLFLL

SEQ ID NO: 159917 - protein, 84 aa, Glycine max
  Clone ID: PAT_MRT3847_115423C.1.pep
PPLQSSKLPFLVLVCILFIFPAFLCFKLFFFFCLNFPSVFFSDSKFELFLWGYLELCRTSVFYVKFYSSSSMGWCSYFYMDFSF

SEQ ID NO: 159918 - protein, 218 aa, Glycine max
  unsure (1)..(218): unsure at all Xaa locations
  Clone ID: PAT_MRT3847_115424C.1.pep
AGHRTGQIPNLPLPEHSSLIPNHALGGLISKLRXPSXPSHQLVANSTTLPTLISTLTSPSSPLASKLHALHHLTRLSHSDSLFRRRLFNSPALVPALLTFLQHISAADLRHRALSLLLHLSLDDDAKVGLVAEGLLSPLISLLLSSAAPSDCRALAATLLTSLAVLHVNKATIGAFPGSINALVTLLRDGKGRERKEAATALYALCSFPDNRRKAVEC

SEQ ID NO: 159919 - protein, 90 aa, Glycine max
  unsure (1)..(90): unsure at all Xaa locations
  Clone ID: PAT_MRT3847_115425C.1.pep
VMIAMFANAAVKRSEWVLLVQVFLTNNYIAXYFYACKWTKSEPHSWELILSIEVCNSNNCLEMWSTYWSYQTLWNLSFLIDNAKLSTVFD

SEQ ID NO: 159920 - protein, 181 aa, Glycine max
  Clone ID: PAT_MRT3847_115426C.1.pep
MAAEAELPEYLKCPISLEIMSDPVILSSGHTFDRSSIQRWLDAGHRTCPITKLPLPEHSSLIPNHALRSLISNYAPINPLINSSNSHPQTLISTLTSPSSPLPSKLHALHHLTRLSHSDSLFRRRLFNSPALVPALLTFLQHISACDLRHRALSLLLHLSLDDDALLSLVAEGTLSPLISP

SEQ ID NO: 159921 - protein, 57 aa, Glycine max
  Clone ID: PAT_MRT3847_115427C.1.pep
LINLPPNKCKLNFLTTYSNMPPTDRYIDPNPDAKDLAAMTCRPMITPKQENRKSSDD

SEQ ID NO: 159922 - protein, 68 aa, Glycine max
  Clone ID: PAT_MRT3847_115428C.1.pep
FSPFELIFGIELGLNSYSKIVPGHRVLNSYSEIKYKIFHLYYFSSLYQTYCKGVVFLTLQRSARRFLL

SEQ ID NO: 159923 - protein, 37 aa, Glycine max
  Clone ID: PAT_MRT3847_115429C.1.pep
FRFCCWLMVSNSKCLFSLALTKFTCLIQSYGGFKWKR

SEQ ID NO: 159924 - protein, 83 aa, Glycine max
  unsure (1)..(83): unsure at all Xaa locations
  Clone ID: PAT_MRT3847_11542C.1.pep
CSFFFQRKNSRSLIRKVEVFQLLLEYLRDSQSGSSCLPPTTVLXLKELYLLLYRSKILLDYCAQSSKLWLLLQTHSISGHFHD

SEQ ID NO: 159925 - protein, 33 aa, Glycine max
  Clone ID: PAT_MRT3847_115430C.1.pep
MIFGFSKISLKEKLKELPISYALHPFVINHCSC

SEQ ID NO: 159926 - protein, 96 aa, Glycine max
  Clone ID: PAT_MRT3847_115431C.1.pep
VSKENPTPPYPYYLRTGQKKNKLPSKKRSLESENNFMDLLLWAKPTLPNLAMNSCPKNTSQFKTNPLLKQMVFLSLHFYFKKSLIPFLLKKKFFFK

SEQ ID NO: 159927 - protein, 427 aa, Glycine max
  unsure (1)..(427): unsure at all Xaa locations
  Clone ID: PAT_MRT3847_115432C.1.pep
MPRTLLYWPIPTVFATVFVGLYVLVHIWLAAPSTIQGLEFGGLDLPDSIGEFVVCIALVLQGERVLGIISRFIKARAQKGSDHGIKAQGDGWLLTVALIEGSSLASVDSSGLSDPYVVFTCNGKTRTSSIKFQKSNLTWNEIFEFDAMDDPPSVLDVVVYDFDGPFDEXAASLGHAEINFLKANIADLADIWVPLEGKLALACQSKLHLRIFLDNTRGGNVAKDYLSRMEKEVGKKINLRSPQANSAFQKLFGLPPEEFLINDFTCHLKRKMPLQGRLFLSARIIGFHANLFGNKTKFFFLWEDIEDIQVIPPTFSSMGSPIIVITLRKGRGVDARHGAKTQDEQGRLRFHFQSFVSFNVAHRXDKGHYITSDELISYISATRMKISXSKSLISDESGSFLGLDDVSMSEIYSCSLLIPVISLSYHA

SEQ ID NO: 159928 - protein, 45 aa, Glycine max
  unsure (1)..(45): unsure at all Xaa locations
  Clone ID: PAT_MRT3847_115433C.1.pep
VSPFRASGGGCSWRRVVCSAPEYCPVASRVFGPILTLXXRVGGLP

SEQ ID NO: 159929 - protein, 72 aa, Glycine max
  Clone ID: PAT_MRT3847_115434C.1.pep
ITFIFKDQILLYTDIQLKTVPSSVVWGPHFLFLKLLGTCISCAHYEMRNSIYNLHPTTLGFGQNLPAIHHEA

SEQ ID NO: 159930 - protein, 157 aa, Glycine max
  unsure (1)..(157): unsure at all Xaa locations
  Clone ID: PAT_MRT3847_115435C.1.pep
MASALRLSSAFRAAAPLRTTAFNGLRCYSSKTQSLKETFANKLPGEIEKIKKLRKEHGNTVVGEVTLDQVYGGARGIKSLVWEGSVLDSEEGIRSRGKTIPECQELLPKAPGGQEPLPEGLFWLLLTGEVPSEQQVRDLSAEWAGRSDXXKFVEELI

SEQ ID NO: 159931 - protein, 36 aa, Glycine max
  Clone ID: PAT_MRT3847_115436C.1.pep
MPKPKDFFDMTIAGQPAGRIVIELYVDVTPITAENF

SEQ ID NO: 159932 - protein, 46 aa, Glycine max
  Clone ID: PAT_MRT3847_115438C.1.pep
LMQLEEFGIFINKFIFAIFPVLLKMCKDSSYSTRGKGSTFRKKKKK

SEQ ID NO: 159933 - protein, 149 aa, Glycine max
  Clone ID: PAT_MRT3847_115439C.1.pep
RTTKNDEEFPHNRLRKRYRSTSTRFFFTKTCFLPKIAEMHSQGVFNILKQLPPSPIYRKKGRCLPPRDLMKKISKRTRITKFTPFSYFTEKLRKPYGSVSDLIFIFFLFPFTNVKWNMLTQGFRKFYEALRKQRKPRKPFFKNVEELAA

SEQ ID NO: 159934 - protein, 56 aa, Glycine max
  Clone ID: PAT_MRT3847_11543C.1.pep
HLLADNFQLTLQPNYTYTNTLDPLFFFERTLPSYNTGNNNTPWACDLSAFFFSSFL

SEQ ID NO: 159935 - protein, 131 aa, Glycine max
  unsure (1)..(131): unsure at all Xaa locations
  Clone ID: PAT_MRT3847_115440C.1.pep
NIIFFVPEDKANIAAQIHYVGGNNLQMHEAYLVNXINVSRELFLLIPYKSRQLKRKALSRFEWLQKADVPTISQIEKFHSMQKMKNAPDSNDNLDLLLIIDLXLDLQRACEAFPNKIDFNDKLALPYTHKF

SEQ ID NO: 159936 - protein, 65 aa, Glycine max
  Clone ID: PAT_MRT3847_115441C.1.pep
MARAASPPPQLNDLKSSAQEQLEYMLTEDDDAPLLTADDNIKLEVKECVNKLPHNFQLTQYLTSP

SEQ ID NO: 159937 - protein, 79 aa, Glycine max
  Clone ID: PAT_MRT3847_115442C.1.pep
HALGNDSTQNASSSSVNGDLWRKLWKIPTAPKCLNLAWRACQNILSNRVNLKRRGVDVDIFCPRCGQESETELHALLLC

SEQ ID NO: 159938 - protein, 132 aa, Glycine max
  unsure (1)..(132): unsure at all Xaa locations
  Clone ID: PAT_MRT3847_115443C.1.pep
NIXLCVFFAAGMFLVAWPCHGPGYQRXPFLMKTGYGERSSEVKLPCSRLADXAHNIRTFXTIPEECVEPTRDYINGEXIYNXSKTCNRSXISYASEREVHRTDIVVSGIHNTXVISTLPYYNXYGYGVEEYH

SEQ ID NO: 159939 - protein, 74 aa, Glycine max
  unsure (1)..(74): unsure at all Xaa locations
  Clone ID: PAT_MRT3847_115444C.1.pep
QVYIYLLALIKMLKLGTTGVPMXMMGLMLXNYDTXYTLRVRDVFSMPXSATGASVKASYHGTKTNTLDMLKQTG

SEQ ID NO: 159940 - protein, 179 aa, Glycine max
  Clone ID: PAT_MRT3847_115445C.1.pep
KTRRNLDLNQPRFELHVIAKMSVMYSPVLNYSDVEYQLWENQDMDSSIGHPQQHCHQSNSGLLRYCSAPSSMLASLIDNTIHGCVNEEPFTSENQQQQQHYLPSTSSEMETMLSKMPPSNIGWSNSEPLQEFGGKPVKQEIGQSVPQGPPKQNGYSYGGSQLIYQCEGIRGLPNGGCIA

SEQ ID NO: 159941 - protein, 153 aa, Glycine max
  Clone ID: PAT_MRT3847_115446C.1.pep
MANSNLPRRIIKETQRLLSEPAPGISASPSEDNMRYFNVMILGPTQSPYEGGVFKLELFLPEEYPMAAPKVRFLTKIYHPNIDKLGRICLDILKDKWSPALGIRTVLLSIQALLSAPNPDDPLSENIAKHWKSNEAEAVETAKEWTRLYASGA

SEQ ID NO: 159942 - protein, 75 aa, Glycine max
  Clone ID: PAT_MRT3847_115447C.1.pep
EFPGRTNRSANRSVRLAKKQQKGAPHQSPIFFYFLSNMGFTGIPTPKAPRLKKAGAAKGWTLKNGPPRPTSKSRS

SEQ ID NO: 159943 - protein, 72 aa, Glycine max
  Clone ID: PAT_MRT3847_115448C.1.pep
DYKYLSTVIFIQLWYKHCTIPLVEPKSISAPVDSHVLFSPATKNFLHLISFTTSLLEFFQKKRALSSHFHHF

SEQ ID NO: 159944 - protein, 289 aa, Glycine max
  Clone ID: PAT_MRT3847_115449C.1.pep
FYSSLIHNLPITHGIKCNDLYAFIIGSYVIWTAVAGVRYSIEQIRKRRSSVLFGQLWKWCGILVKSSALLSIWIFVIPVLIGLLFELLVIVPMRVPVDESPVFLLYQDWALGLIFLKIWTRLVMLDHMMPLVDESWRVKFERVREDGFSRLQGLWVLREIVLPIIMKLLTALCVPYVLAKGVFPVLGYPLVINSAVYRFAWLGCLSFSFVCFCAKRFHVWFTNLHNSIRDDRYLIGRRLHNFGEHAEKANVAETSTGEQEAILLGTGLNQQDHEADVGLRLRHVNQQVG

SEQ ID NO: 159945 - protein, 75 aa, Glycine max
  Clone ID: PAT_MRT3847_11544C.1.pep
PSEFASYFHYCRSLRFDDKPDYAYLKRLLRDLFIREGFQFDYVFDWTILKYQQSSSVTAPARAIVSDSMLSYCIS

SEQ ID NO: 159946 - protein, 178 aa, Glycine max
  Clone ID: PAT_MRT3847_115450C.1.pep
EYAIFAGVSNYSEKRLREAYEKLKKRGIPLATNQVNYSLIYRVPEENGVKAACDELGITIIAYSPIAQGALTGKYTPDKPPSGPRGRIYTPEFLTRLQPLLNKISEIGEKYDKTPTQVSLNWLVAQGNVVPIPGAKTAEQAEEFIGALGWRLTDEEVAELRSLASEIKPVIGFPVEKL

SEQ ID NO: 159947 - protein, 41 aa, Glycine max
  unsure (1)..(41): unsure at all Xaa locations
  Clone ID: PAT_MRT3847_115451C.1.pep
CQRGPLXCMLXIILPVLRGDTSHLLVAEHLHLDVSPPTSLR

SEQ ID NO: 159948 - protein, 107 aa, Glycine max
  Clone ID: PAT_MRT3847_115452C.1.pep
SILSSSHLFNLHKYILLRINHLIMEESGENWPSDSYLDDFVNDDLGFDDEEFGSEDDSFSGMGETDRKKRQRELTERFLALSATIPGFKKTDKTSILANASSYVKQL

SEQ ID NO: 159949 - protein, 96 aa, Glycine max
  unsure (1)..(96): unsure at all Xaa locations
  Clone ID: PAT_MRT3847_115453C.1.pep
XXXSXXXXXFXXXLGXSXXXXSVXXXXAXRXECXCXXKXXXVXXXXXXPXAXXVXCXGSQLXLKVXXXXXTTXXXFXXVRXCXSXXXAIRXPXXRX

SEQ ID NO: 159950 - protein, 151 aa, Glycine max
  Clone ID: PAT_MRT3847_115454C.1.pep
LGCLGGRVGGRVGGRVGFEDNLTPWMEGFLQLLELKLPELEAKSVDLEPNEHDKLRCEICEIATLFSQRFEECFIPYTERFIASVWNLLVMTDSRIRFDSLVSAALRYLAAICQRPHYASHFRSEGVLKAICENVVVKNMMLRSDDVVIYE

SEQ ID NO: 159951 - protein, 97 aa, Glycine max
  Clone ID: PAT_MRT3847_115455C.1.pep
AKKQIFKREGAISQSPGLNKVSRPNPPQWGGSRPHHKRFGNKKTLREPLLTPSPFYSAQKIPTPKKIFFFFISKEFYFPPHNKKLRGGILILTHPPQ

SEQ ID NO: 159952 - protein, 88 aa, Glycine max
  Clone ID: PAT_MRT3847_115456C.1.pep
LFFFFFFFFFTLLHLIRPFEVNLTYSKSPFSLCYKKGTLQAGGAANSKRNLGHGCYQHRSLTLHIVLKTRHIFSVSKSRGKKERAQDA

SEQ ID NO: 159953 - protein, 107 aa, Glycine max
  unsure (1)..(107): unsure at all Xaa locations
  Clone ID: PAT_MRT3847_115457C.1.pep
FSTRPRSLPSVETLGCTSAICSDKTGTLTTNQMYESKMFVVEHAHGDQNTFGEFTNYGSTYEPTGQIMYNGVQKNCATIPHKALTELDTIWSLXKDFCLDYNQFKHS

SEQ ID NO: 159954 - protein, 214 aa, Glycine max
  unsure (1)..(214): unsure at all Xaa locations
  Clone ID: PAT_MRT3847_115458C.1.pep
TRPRLSYFLFLSSLPSFYYFLLFSDIYFSMSMAEEEPSITSPPARTLHKFLSRSGKTVIAAQPLAVVRATTSTGGARVLAAPPNSNDDPTPPQEEEGEGETGFDASHHHERILLQRELTVSFDEFLEVTNTKVATEEEALKSVMAPLEEETEEGEEAESSQAQSAQPVQPVPRGPQLFRPVQKKKAVTGDDVEVVEVRKPVEKKTXRIFRISRT

SEQ ID NO: 159955 - protein, 79 aa, Glycine max
  Clone ID: PAT_MRT3847_115459C.1.pep
PNRPQELVNLCRNKQTCQIQVESTKIWLTCMVDPQPNTSLELLEKISMWYSTELLEKFLGYMHFAMYWLIYNKLKSNLN

SEQ ID NO: 159956 - protein, 125 aa, Glycine max
  Clone ID: PAT_MRT3847_11545C.1.pep
SGNRGKPPGKPNEGNPPPKRGGYTRFFPPHTRGPPKRITPPINQGGKTKGGGHGAGLFPPGGGAFFFLAGGGKNPYGWDNRPMGGEHTPPKWFSWGKNPPKRKGGPPPPKKNPPFRGGRGVVGGG

SEQ ID NO: 159957 - protein, 61 aa, Glycine max
  unsure (1)..(61): unsure at all Xaa locations
  Clone ID: PAT_MRT3847_115460C.1.pep
RAEXYSKDLKGVISALPESWSFIKSISSKNHSCTINIFHSSLNKNFIYMTHQHFMLLAKTF

SEQ ID NO: 159958 - protein, 240 aa, Glycine max
  Clone ID: PAT_MRT3847_115461C.1.pep
MKTPISGFYRNPVKFRMPTAENLVPIRLDIEIEGQRYKDAFTWNPSDPDSEVVVFAKRTVKDLKLPPAFVTQIAQSIQSQLSEFRSYEGQDMYAGEKIVPIKLDLRVNHTLVKDQFLWDLNNFESDPEEFARIFCKDTGIEDPEVGPAIAFAIREQLYEIAIQSVVSARESRMSKKGRRGAEYTPVSKGGAAAVDLVKLFGPKSSVVRKRKEWDVYEPIVDLLSNEEVDALEAKEERNFR

SEQ ID NO: 159959 - protein, 92 aa, Glycine max
  Clone ID: PAT_MRT3847_115462C.1.pep
ALSPPFRLCLSTSHSPNWRIMKTVVNSKFAQINYGKEYEKHDHMHHDIDHNRPLDEHTDMLSTQAKFKRLNITYIKNDLNSVPSQNHLYNNI

SEQ ID NO: 159960 - protein, 51 aa, Glycine max
  Clone ID: PAT_MRT3847_115463C.1.pep
MRRRSIVICLSYISDIKMSAYFGCFTMVAFSPCIYGLRLLWNKLNKVRVRT

SEQ ID NO: 159961 - protein, 53 aa, Glycine max
  Clone ID: PAT_MRT3847_115464C.1.pep
PLIFILKNLHATTSYSKYFHKPSQVELSAITTNWYTDFSIAVKDKVNCSGHHY

SEQ ID NO: 159962 - protein, 73 aa, Glycine max
  Clone ID: PAT_MRT3847_115465C.1.pep
RRLSAPINSAQFPLANAQKTQFEPNIMKLMSVCEAFTNGLDPLKPQVRKVFRKIMACQIKGVDSLGKSSHTDQ

SEQ ID NO: 159963 - protein, 153 aa, Glycine max
  Clone ID: PAT_MRT3847_115466C.1.pep
PPPLPPPHGYPPPGFPPPGGYPPPAFPPLGGYPPSGSFPSKYPPAYPPPGGFPPPVFPLSGFLPPVFPPPQGFPPVAPPFLGGGGAGMGEFLPGGFSSPPPPFGAPPRAPGFPRFGPGASFGLGKFQPGKFAHPWNPARFGFAHPKPGWKRWK

SEQ ID NO: 159964 - protein, 173 aa, Glycine max
  Clone ID: PAT_MRT3847_115467C.1.pep
MPTLLQPEQGQQAQAQQAQGSDGAQISRQSSAQGEASGSGAAAAASGSKQSGGERRAAEGRTGEADDGETSDGGGIMDRAATIASSARELLGGWWYGDGQGPAAGAASGGQGQGQGRGMRGSVLAGFSGGFGGAGNARAGDTTGQAAPGDAPAPAQGTSRGPWGRHRRGASLG

SEQ ID NO: 159965 - protein, 124 aa, Glycine max
  Clone ID: PAT_MRT3847_115468C.1.pep
KLERQIFVVLVLKTTEGWFNHPWVTCPIIPVLRMSVRRCFDFIYIFLIFLRVYYMQELSNINRKNLFDKNIYLGVHFCVCFHGLILHTIFYFNCPCFPFSLLPIQNTYYMVNSLFGYFRMQWRK

SEQ ID NO: 159966 - protein, 138 aa, Glycine max
  unsure (1)..(138): unsure at all Xaa locations
  Clone ID: PAT_MRT3847_115469C.1.pep
MACCYKYQFLFLHSHSFWRKLPFPRHVTASGFTCNLQTPSLLLSSRSRALLSKSYFXSPGAVPATPRSAAASGTLIPEAGIGIGTGTAQALQSGSAGNAELVTNAEPLNGRVMIIDGTSIIHRAYYKLLGTFRFLCNF

SEQ ID NO: 159967 - protein, 201 aa, Glycine max
  Clone ID: PAT_MRT3847_11546C.1.pep
MSNMKLLNSVLQVNQFAIDVEVVGQGKPQNGLKGGNEALDFLDVEKLHSLSQNELLECFHSLGDQLIYLWKIFLKFHRDNKSRILGFLRDAWVKDRKAEWSIWMLYSKVEMPHHYINSKSEESSHRGVHRRVSSLWKLPDDPLQTAATRAELHRRSIEQMRINNRSVQDMQIFGDLLHTPIVIVEHVMNVPRRCPSANSLL

SEQ ID NO: 159968 - protein, 52 aa, Glycine max
  Clone ID: PAT_MRT3847_115470C.1.pep
PFTTWDDMQVIKYSSAWTMLSGAQSNEPILKVSEQKLNRRNKKMVRNNYSDP

SEQ ID NO: 159969 - protein, 391 aa, Glycine max
  Clone ID: PAT_MRT3847_115471C.1.pep
MLGGLYGDLPPPSSAEEDNKPTPNVWSSSTKMAPATLRKPASLFAPPQTLLRAQPKPRPTTTTIPKPILSSSPAPPPDDALLQPALVGVQSTVLEEYDPTRPNDYEDYRRDRKRKAREAEMLRELERRRHEEEEEEKEREKERERERERDHSNNNDSSSSRLNVSGEEAWRRRAAMSGAGSGSGAVLVPRSPSPPPGNVDGFTPPKSPTRPGVGAGGQMTAAQRMMAKMGWKEGQGLGKQEQGITTPLMAKKTDRRAGVIVNASDNNNSSSSKKVKSVNFNGVPTRVLLLRNMVGPGEVDDELEDEVGSECAKYGTVTRVLIFEITEPNFPVHEAVRIFVQFERSEETTKALVDLDGRYFGGRVVRASFYDEEKFSKNELAPMPGEIPGFT

SEQ ID NO: 159970 - protein, 151 aa, Glycine max
  unsure (1)..(151): unsure at all Xaa locations
  Clone ID: PAT_MRT3847_115472C.1.pep
MADPYSNFFSPGSFFHHYPSPNPSPHHHPYAHNFLNQNGSNINNHNTFFHFHHFQTTIWSSSPPSPPLREALPLLTLSPRNEEEQEEDDQDQDQEILQENICTAMDVEENYNNRTLHLHPKGEEQDQEDTDESVTVALHIGXLPSPSAAEI

SEQ ID NO: 159971 - protein, 249 aa, Glycine max
  Clone ID: PAT_MRT3847_115473C.1.pep
MLGGLYGDLPPPSSAEEDNKPTPNVWSSSTKMAPATLRKPASLFAPPQTLLRAHPKPKPTAKPVLSSTTPALPPEDSPLQPALVGVQSTVLEEYDPARPNDYEEYRRDLERKAREAEMLRELERRRQEEEEEEKEREKEREKERERDYNNNNDSSSSRLNVSGEEAWRRRAAMSGAAAGAPPRSPSPPLPGNSDGFSIGKSETGGLGVGAGGQMTAAQRMMAKMGWKEGQGLGKQEQGITTPLMAKKTD

SEQ ID NO: 159972 - protein, 57 aa, Glycine max
  Clone ID: PAT_MRT3847_115474C.1.pep
HASVFVQFERSEETTKALVDLDGRYFGGRVVRATFYDEEKFSKNELAPMPGEIPGFT

SEQ ID NO: 159973 - protein, 52 aa, Glycine max
  unsure (1)..(52): unsure at all Xaa locations
  Clone ID: PAT_MRT3847_115475C.1.pep
LRNLVPSISHLFXARFSTFAXXGSLGGXXVGXSSXGXSLLXXWXXAFRARQS

SEQ ID NO: 159974 - protein, 84 aa, Glycine max
  Clone ID: PAT_MRT3847_115476C.1.pep
FSINTLAVNSIKMPLKFFLILISIFPLFTILISLQKETLSMAWSSFSRIFSYPFYKVCPTNLPTNIHFVVEITIHPTLVHGNPA

SEQ ID NO: 159975 - protein, 137 aa, Glycine max
  Clone ID: PAT_MRT3847_115477C.1.pep
MADKAVTIRTRKFMTNRLLSRKQFVVDVLHPGRANVSKAELKEKLARMYDVKDPNTVFVFKFRTHFGGGKSTGFGLIYDTVENAKKYEPKYRLIRNGLDTKVEKSRKQMKERKNRAKKIRGVKKTKASDAAKAGKKK

SEQ ID NO: 159976 - protein, 137 aa, Glycine max
  Clone ID: PAT_MRT3847_115478C.1.pep
MADKAVTIRTRKFMTNRLLSRKQFVVDVLHPGRANVSKAELKEKLARMYEVKDPNTVFVFKFRTHFGGGKSTGFGLIYDTVENAKKYEPKYRLIRNGLDTKVEKSRKQMKERKNRAKKIRGVKKTKASDAAKAGKKK

SEQ ID NO: 159977 - protein, 42 aa, Glycine max
  Clone ID: PAT_MRT3847_115479C.1.pep
NFLCSFYNQRQGPPRKFGPVPARDPSLLKMRHLKLQRIYGST

SEQ ID NO: 159978 - protein, 403 aa, Glycine max
  Clone ID: PAT_MRT3847_11547C.1.pep
MTHLVTRTQLARVTQLSHRPKPLFFTPKPTLYRSQTLSLPQLSTLSSATFRRRTHPLLRPTMDPQPPEPSAPAASAEDFVHVTDLKMESLSESMVRIDEPSEADAAPSAPDSDRRPATLSPELSRNVLVLSCESAAEGGVCDVYLVGTAHVSEESSREVQAIVNFLKPQVVFLELCSSRVAVLTLQNLKVPTMGEMVTMLKKKHNMFEVLYGWFLAKIASKLEVFPGSEFRVAYEEAIKYGGRVILGDRPVQITLRRTWSKMPLWHKTKFLYSLLFQAVFLSNADDLNKMLNEMDDSDMLTLVIQEMSKEFPTLMETLVHERDQYMSSTLLKVASENSSVVAVVGKGHLQGIKKHWKQPVVMKDLMTVPSPKPAVSATRIVTSIGVAVAGVAIISGIYLSCKK

SEQ ID NO: 159979 - protein, 124 aa, Glycine max
  Clone ID: PAT_MRT3847_115480C.1.pep
NYYTRYDVFIEAEADEAAGKAENASIDSHIEFYKNEGLTPYTEAKLPVISDVTEGCAIGREHVPINNLFTCLWINEVDRVTSRDQIRFSTGRDKILDRVDSHFNMYLDWERRSYSVHKYHKDLL

SEQ ID NO: 159980 - protein, 596 aa, Glycine max
  Clone ID: PAT_MRT3847_115481C.1.pep
MESTLKALRDGESVLDLSPRSTVSGGVEDIYGEDRATEDQLVTPWIFSVASGYSLLRDPQYNKGLSFTEKERDAHYLRGLLPPTVSTQQLQEKKLMNSIRQYQVPLQKYVAMMDLQERNERLFYKLLIDNVEELLPVVYTPTVGEACQKYGSIFRRPQGLYISLKEKGKILEVLKNWPEKSIQVIVVTDGERILGLGDLGCQGMGIPVGKLALYTALGGVRPSACLPITIDVGTNNEKLLNDEFYIGLRQKRATGQEYSELLHEFMTAVKQNYGEKVLVQFEDFANHNAFELLAKYGTTHLVFNDDIQGTASVVLAGVVAALKLIGGTLADHTFLFLGAGEAGTGIAELIALEMSKQTKTPIEETRKKIWLVDSKGLIVGSRKASLQHFKQPWAHEHEPVGSLLEALEMLHLQVIKPTVLIGSSGVGKTFTKEVIEAVTSINEKPLVLALSNPTSQSECTAEEAYQWSEGRAIFASGSPFDPVEYKGKVYYSGQANNAYIFPGFGLGLVISGAIRVHDDMLLAASEALAKLVSNENYEKGLIYPPFSNIREISANIAASVAGKAYELGLATRLPRPQNLVKYAESCMYSPVYRNYR

SEQ ID NO: 159981 - protein, 126 aa, Glycine max
  Clone ID: PAT_MRT3847_115482C.1.pep
PVFLFEFAPQLSLAEKCFSRGDFYLKPPGVLIPPRIKKIGPQGLPGAVLQQPRGPSAFGPLEGEGWVFYPGKLGGSLFFFNPFFSPFVPKIVFAGVLALPPPPFSPFGFLFLPRVAPRAHGSLFFF

SEQ ID NO: 159982 - protein, 153 aa, Glycine max
  unsure (1)..(153): unsure at all Xaa locations
  Clone ID: PAT_MRT3847_115483C.1.pep
TNNEPNLVCLYLNTWAFANKRGVPYFLISQPSPRREHFFGITKICSDSKEPLKWGGPPICSRWAFNFPFSTFPTHPNPFEQQFSPNSTFKLFLAPKPKFGGKNFLLHLLPAWNKLPPNFLGSTLLFXSRVCVVPVGADSFLQGSHWATTLAPP

SEQ ID NO: 159983 - protein, 102 aa, Glycine max
  unsure (1)..(102): unsure at all Xaa locations
  Clone ID: PAT_MRT3847_115484C.1.pep
SQFGSSTQLLSSARNDQHYVGVALTNRGSLNTTGGKAPMKQLXANAARKSAPTXGGLNKPHPYRPATVALTEIRKPPKSTELLIRKLAFQRVVPEIAHDFKT

SEQ ID NO: 159984 - protein, 60 aa, Glycine max
  Clone ID: PAT_MRT3847_115485C.1.pep
YTSWPFLIFIFRCNTVLRKMDGNSRGSGESCNPSSLWLWLERQQQNCAYEIMGMQANFHL

SEQ ID NO: 159985 - protein, 100 aa, Glycine max
  Clone ID: PAT_MRT3847_115486C.1.pep
DSPCDLYVLQAISGAKMLGATKIIGIDKNEMKREKGEAFGMTDFIKAGDSAKSVSELVKEMSGGMGVDYSFECSGVAPLLTESVEATKVVSFTSWSSFVI

SEQ ID NO: 159986 - protein, 51 aa, Glycine max
  unsure (1)..(51): unsure at all Xaa locations
  Clone ID: PAT_MRT3847_115487C.1.pep
SCKTLSSHHPLRAKTPFNPHSRFLYIPVXLLYLGLFGPCLSALYPPCXSRF

SEQ ID NO: 159987 - protein, 128 aa, Glycine max
  Clone ID: PAT_MRT3847_115488C.1.pep
RKRRQQNPQSICEERVIKRKEVKTKQIQSRGSSILPSKPNTRILSSQESGFSLSPFVNRISSTSSFVSHWMIDPREKGAWHGREGKRVLRGVYELKKKLEDITDLFSPGSSFVKIIGQFRFIFKIVSV

SEQ ID NO: 159988 - protein, 46 aa, Glycine max
  Clone ID: PAT_MRT3847_115489C.1.pep
YLFTPLSCFVNAFAMHLGRCMLWKLATTSKNSFKNIWTIMPDKIYL

SEQ ID NO: 159989 - protein, 46 aa, Glycine max
  unsure (1)..(46): unsure at all Xaa locations
  Clone ID: PAT_MRT3847_11548C.1.pep
GIWRPPSQISVLPQRVIDTPVQGWVLLVGGRKAXKKKKKRAASADC

SEQ ID NO: 159990 - protein, 90 aa, Glycine max
  Clone ID: PAT_MRT3847_115490C.1.pep
LAEPAQLNTSKEISIGTSQPEESASASSHPIRPKQGNTTIQEIKKHIAKETRPKPNPNSPEPIENKPLSNENLTKVEIMGKPPKPLSHTS

SEQ ID NO: 159991 - protein, 39 aa, Glycine max
  Clone ID: PAT_MRT3847_115491C.1.pep
IEAQVKGTMTSNIIIYICIRSNFFVEVGEVKSCLFYFIM

SEQ ID NO: 159992 - protein, 193 aa, Glycine max
  Clone ID: PAT_MRT3847_115492C.1.pep
QLSETCSISESFSAATTATTATAVTATTTTVTVADKREEDEATSKIHKWDRSPSRKRPYAADGNLAGVRYRRLKSPARRQEPSPEKKIKGGPRPIRGREILDSGTAANRKRNVGPAALRRDSGEGSGRRSRSPACARNGKVGAGGGRKEVAPAKEVEKETKSECEEVGEKNDVVSKEECLENPHVSMECFIFL

SEQ ID NO: 159993 - protein, 149 aa, Glycine max
  Clone ID: PAT_MRT3847_115493C.1.pep
QIMRGYLNDQEATERTIDKGGWLHTGDIGYIDDNDELFIVDRLKELIKYKGFQVAPAELEAMLVAHPNISDAAVVSMKDEVAGEVPVAFVVRSNGSMISEDEIKQYISKQVVFYKRISRVFFVGSIPKAPSGKIFRKDLRAWLATDLAI

SEQ ID NO: 159994 - protein, 81 aa, Glycine max
  unsure (1)..(81): unsure at all Xaa locations
  Clone ID: PAT_MRT3847_115494C.1.pep
VDVMFQEXGVNHVVHKIDHDHEGTXMEKALLRLXCNAPVPAVFXGGKLRGSXHVIMSLPLSGSLTPVPTPYQALSWKEALE

SEQ ID NO: 159995 - protein, 80 aa, Glycine max
  Clone ID: PAT_MRT3847_115495C.1.pep
GRVGAPPSILCNHHTSVKPVPPLHFRPSFATTKGLHRLIIFVASERQSTKRKERKHKVEGTEARVWFFSLETKLIWYHEF

SEQ ID NO: 159996 - protein, 57 aa, Glycine max
  Clone ID: PAT_MRT3847_115496C.1.pep
RLMSVLAEESHSCRPISSPHRSLPSSIIGVPPHTPDMLYQAGQALAKVQWHSNLASS

SEQ ID NO: 159997 - protein, 322 aa, Glycine max
  Clone ID: PAT_MRT3847_115497C.1.pep
MGSSGVWMTTPIFKIRFFLFLCFIGISSSQLSSDFYSTTCPNALSTIKSAVDSAVSNEARMGASLLRLHFHDCFVQGCDASVLLNDTSSFTGEQTAAGNVNSIRGFGVIDNIKSQVESLCPGVVSCADILTVAARDSVVALGGPSWTVQLGRRDSTTASLSSANSDLPRFDLSLQQLSDNFQNKGLTTAEMVALSGGHTIGQAKCSTFRTRIYNETNIDSSFATSLQANCPSVGGDSNLAPLDSSQNTFDNAYFKDLQSQKGLLHTDQVLFNGGSTDSQVNGYASDPSSFNTDFANAMVKMGNISPLTGSSGEIRTNCWKTN

SEQ ID NO: 159998 - protein, 340 aa, Glycine max
  Clone ID: PAT_MRT3847_115498C.1.pep
MRLHYLTLFLLLVPLELSTIYGLSTQGNVPKKSSIKPLLPPPEALLSIGHYHTTCPDAEGIISQKVAAWVKKDPTLAPAIIRLHFHDCAVMGCDASILLNHPESERTALESRTLRGFQLIDDIKSELEKKCPRTVSCADILTAAARDATLLAGGPFWEVPFGRKGGKISLAREANLVPHGHENITALITFFQERGLDILDLVTLSGSHTIGRSTCSSIMDRIYNFNGTKKPDPSLNVFFLKLLRKRCKRVMDLVHLDVITPRTFDTTYYTNLMRKVGLLSTDQSLFSDARTAPFVEAFATQPFLFTSQFSVSMVKLGNVQVLTRPNEGEIRVNCNYVNTV

SEQ ID NO: 159999 - protein, 132 aa, Glycine max
  Clone ID: PAT_MRT3847_115499C.1.pep
HRTCRGRAGRVRQSLRRRHDWRFLVWGLGISNLGVLELDSRNVKALYRRAQAYLHLVDLDLAEMDIKKALEIEPNNRDVKMEYKILKQKVREHNKKDAQFYGSIFAKMNKLEQARTATAKQEPVPMTIDSKA

SEQ ID NO: 160000 - protein, 369 aa, Glycine max
  unsure (1)..(369): unsure at all Xaa locations
  Clone ID: PAT_MRT3847_11549C.1.pep
LKEVKLRDGYYVMDPEKAVEMVDENTICVAAILGSTLNGELEDVKLLNDLLVEKNKETGWDTPIHVDAASWGFIAPFLDPEHEWDFRMTIVKIMIVRGTKSGXKFNSKLLVYLGFIRRPSCEHQVKISAPVLVIKMVCSNRAARQPSVSKGCPXKLVMQWNQCFPFNYSVQLYMFNDQPYGLPSHCFLXIINSVSGQVIAQYYQLIRLGYEGYKMVMENCNDNMAVLKEGLEKTGRFEIISKDIGVPLVAFTLKDHTHFNEFQISDMLRRYGWIVPAYTMPPDAQHVTVLRVVIREDFSRTHAERLVIDVTKVVHELDLLPAMVISTNTLMVTVKAGXENDKNVLFTKKNKLDKHRDIPKAWKKFVMDR

SEQ ID NO: 160001 - protein, 81 aa, Glycine max
  unsure (1)..(81): unsure at all Xaa locations
  Clone ID: PAT_MRT3847_1154C.1.pep
SLGGSYGHLSKIFYCQQSTRWSIQVSEPEHRISYKVYFSRRSHCNDRCWYLTNIWKRVTQRGERHLNSKRLMPRAHQEXXN

SEQ ID NO: 160002 - protein, 505 aa, Glycine max
  Clone ID: PAT_MRT3847_115500C.1.pep
MDEDFEFPSAGNMEMPEEEEIESPILKVGEEKEIGKMGLKKKLLKEGEGWDIPDCGDQVEVHYTGTLLDGTKFDSSRDRGTPFKFRLGQGQVIKGWDEGIKTMKKGENALFTIPPELAYGESGSPPTIPPNATLQFDVELLSWTSVKDICKDGGILKNIITEGEKWDNPKDLDEVFVKYEARLEDGIVISKSDGVEFTVEEGYFCPALAKAVKTMKKGEKVLLNVKPQYAFGESGRPASGDEGAVPPNASLQVDLELVSWKTVSDITNDRKVLKKTLKEGEGYERPNDGAVVQVKLIGKLQDGTVFIKKGYDDQQPFEFKIDEEQVTDGLDQAVKSMKKGEIALLIIQPEYAFGPSGSSQELANVPPNSTVYYEVELLSFIKEKESWDLNTQEKIEAAGKKKEEGNALFKVGKYERASKRYEKAIKFVEYDSSFSDEEKQKTKALKITCNLNNAACKLKLKDYKQAEKMCTKVLELDSRKVKDLDGKIQAYIHSVELSQDEMDTN

SEQ ID NO: 160003 - protein, 900 aa, Glycine max
  unsure (1)..(900): unsure at all Xaa locations
  Clone ID: PAT_MRT3847_115501C.1.pep
VFETLSSKLRNLEVLDISFNPLTNDILPSLGGFTSLKELYLSYIDLDSDLHIQGLCSSLRNLEILDLSSNNFNNSDITSALSGLSSLKFLDLSICQLTSRSIFNISRFTSLKILDLSYNKLDKSIQXHQDFHDLSNLEHLILDYNNLENEFLKNIGELTSLKVLSLQQCDINGTLPPTDWFKLKKLEELYLSRNEFEGPLPSSFVNMTSLRNLEISGNHFIGNFDSNLASLTSLEYFDFTGNQFEVPVSFTPFANLSKIKFIYGEGNRVVLDSQHSLQTWIPKFKLQKLIVSSTTETKSLPLPNFLLYQNNLTYIDLSGWKLEGDFPHWLLENNTKMTDALFRNCSFTGTFQLPMSPLPNIQTIDVSDNTVNGQIPSNNISSIYPNLQYLNLSGNNIQGSIPSELGQMSLLYLLDLSENQLSGKIPENILADGHPLQFLKLSTNMLEGPILNIPNGLETLILSHNRFTGRLPSNIFNSSVVLLDVSNNHLVGKIPSLIKNLSRLNGLYMSNNHFEGSIPLELGELEYLTSLDLSQNNFIGLVPSFTNSSVAFIHLNNNRLSGLSKRMFHGNSSLVMLDLSYNEISNNLKDLIHNLSYKRLNILLLKGNHFMGDIPKQLCQLIDLNMLDLSHNNFSGVIPKCLGKMPFENKNPKDLLARFSIFDPDLHIHAAALSPSNVQEKVNFTTKERTDTYIGRVLVYMSGIDLSHNKLKGNIPFELGYLTKIRALNLSHNDLTGQIPVTFSLLAQIESLDLSFNMLNSQIPPQLSMLTSLEVFSVAHNNLSGPTPDFKGQFSTFDENSYEGNPFLCGLPLPKSCNPPPTIIPNDSNTDGDNDSLLDMYVFCVSFAVSCTSALLVTAAALYINPYWRQAWFYYMELVSMNCYYFIKDNLSKVFKIGNM

SEQ ID NO: 160004 - protein, 80 aa, Glycine max
  unsure (1)..(80): unsure at all Xaa locations
  Clone ID: PAT_MRT3847_115502C.1.pep
MIIALIAISMLQTMVMASSCDDVGAPLHMTTKKYGAWLFSKAFQCPSQCSRRCGKTQYHKPCMSFXQKCCMKCLCVPPGY

SEQ ID NO: 160005 - protein, 94 aa, Glycine max
  Clone ID: PAT_MRT3847_115503C.1.pep
CMRIRFFTNINYSSVSPPLSKRKQKRICRATPVSYEVRTLQSLTVSSVRVFDMRLCPCQCPTPTQHPYYVLYFEHYRCPHVRICVDIRIGISAS

SEQ ID NO: 160006 - protein, 44 aa, Glycine max
  Clone ID: PAT_MRT3847_115504C.1.pep
PSRIPGSTHASAFKQIKSLITHFLKKKQAKQQGYKVYRVWLDQS

SEQ ID NO: 160007 - protein, 173 aa, Glycine max
  Clone ID: PAT_MRT3847_115505C.1.pep
GIQHEVVMYSTIIDGLCKDKLVNEAYDLYSEMDARGIFPNVITYSTLIYGFCLAGQLMEAFGLLNEMILKNINPNVYTYTILMDALCKEGKVKEAKNLLPVMTKEGAEPNVASYNTLMDGYCLVGEVQNAKQIFHAMVQMGVNPNVYSYNIMINGLCKCIMVDEAMNLLIEML

SEQ ID NO: 160008 - protein, 63 aa, Glycine max
  Clone ID: PAT_MRT3847_115506C.1.pep
LQYSFLMNSLLLTPAFFRPLFFLFAVHVTIFPCLPYKSVPSILDSFPFIKQMYYCSKMVCFSL

SEQ ID NO: 160009 - protein, 60 aa, Glycine max
  Clone ID: PAT_MRT3847_115507C.1.pep
IVLQCRSLYIHKRAEAAAKADDKELGQVTEHLETDNSVLLLIINYHRSQEDQHDRRVTTS

SEQ ID NO: 160010 - protein, 506 aa, Glycine max
  unsure (1)..(506): unsure at all Xaa locations
  Clone ID: PAT_MRT3847_115508C.1.pep
KQKVAATKQYIENHYKEQMKNLQERKERRTILEKKLADADVSEEDQNNLLKFLEKKETEYMRLQRHKMGVDDFELLTMIGKGAFGEVRVCREKTSGHVYAMKKLKKSEMLRRGQVEHVKAERNLLAEVDSNCIVKLYLSFXDDEHLYLIMEYLPGGDMMTLLMRKDILTEDEARFYVGETVLAIESIHKHNYIHRDIKPDNLLLDRYGHLKLSDFGLCKPLDCSTLEENDFSVGQNVNGSTQSSTPKRSQQEQLQHWQINRRTLAYSTVGTPDYIAPEVLLKKGYGMECDWWSLGAIMYEMLVGYPPFYSDDPMLTCRKIVNWKTYLKFPEEARLSPEAKDLISKLLCNVNQRLGSKGADEIKAHPFFKGVEWNKLYQMEAAFIPEVNDELDTQNFEKFDESDSQTQSSSRSGPWRKMLSSKKDLNFVGYTYKNFEIVNDYQVPGIAELKKKQSKPKRPTIKSLFEXPEASDTSANDQPAQGSFLKLLPPQLEVSPHRDKNLPPRS

SEQ ID NO: 160011 - protein, 77 aa, Glycine max
  Clone ID: PAT_MRT3847_115509C.1.pep
CLQGWSAGRICWPSLFIQAKNHERSLAHIQEITLQWKAERKMLTKNTSYMAAANVNIAASTQDKWKSSKNDLAGSGT

SEQ ID NO: 160012 - protein, 65 aa, Glycine max
  Clone ID: PAT_MRT3847_11550C.1.pep
GVVVVDDDDADVNVHIMCFLFSHSGAKTSVGNMVLRIGSSSAVVVGPVPPFFRYGGRRPLFRTRG

SEQ ID NO: 160013 - protein, 129 aa, Glycine max
  Clone ID: PAT_MRT3847_115510C.1.pep
RYCARTSKGITKYFCLNLDVHFDGLDKQTQHIVEGPYRLSFMASSLPTLNTTHYDIESNGCNSTERCEAHAAPSVVLDNPDDRKAPTPERTTNRIKSPMRTAVWTMDQCRRSNAAKWIRNLLKRIVSEG

SEQ ID NO: 160014 - protein, 29 aa, Glycine max
  Clone ID: PAT_MRT3847_115511C.1.pep
RIRVLFRELKKFRMGLGKGSGGLGEGGRP

SEQ ID NO: 160015 - protein, 61 aa, Glycine max
  unsure (1)..(61): unsure at all Xaa locations
  Clone ID: PAT_MRT3847_115512C.1.pep
HKXRXPXXNRNFSXTIPKCTXXLADXXLXLXTYAXYXXTXXLXSMXXXXXIXELXYXSXRL

SEQ ID NO: 160016 - protein, 202 aa, Glycine max
  Clone ID: PAT_MRT3847_115513C.1.pep
MEFGARGKVHPQALNSSTTCKQETFTLWMKSLVLNGKGCTVFDSNGQIAYRVDNYNCRHRDEVHLMDQNGDILFTMLKKQYKLSRFWEGYRFPVPGTRNDHKGPCFRVSKTYKISRGGSTYEVELGLDKNQPYTHKIERNTCNSACKISNELGVVVAELRRKKSPCGVDLGDDVFTMVVEPNIDLSLIMGLVVAYNLINCKI

SEQ ID NO: 160017 - protein, 75 aa, Glycine max
  unsure (1)..(75): unsure at all Xaa locations
  Clone ID: PAT_MRT3847_115514C.1.pep
KTGAQDPVVSFQPPLWYWKEQRGPVLHPGFGAPLKAIKGPLXCDGANPKTVQARVNYPPPHCSPPGVSPGANPPW

SEQ ID NO: 160018 - protein, 139 aa, Glycine max
  unsure (1)..(139): unsure at all Xaa locations
  Clone ID: PAT_MRT3847_115515C.1.pep
AGPRVFLPRSLCAVACPFFVPFVLSLSVAVSCLHFFWSLLQSSVFFFPCVLCGSLFARRPFPLRRVIKLGGFSLRFCGPAWLARCTLVLCPSGFLFSFFCPSLDCYVCIFLVRHRVVPCGSVDPLVPIPFPGSLFWPCX

SEQ ID NO: 160019 - protein, 87 aa, Glycine max
  unsure (1)..(87): unsure at all Xaa locations
  Clone ID: PAT_MRT3847_115516C.1.pep
KNETIEGGVSQTRIPRVIIRELXEDYSTFXLLDNDATITNTLLRLMITEVPTVAIDLVEIYVRTSVRTHQFIAHTHGLIHLTNERAM

SEQ ID NO: 160020 - protein, 71 aa, Glycine max
  Clone ID: PAT_MRT3847_115517C.1.pep
MNIVCEIPTEPSVKFTADNETEFNDPKIYWRFEEKLSNLTVIWSDIIFPASFISHFMSSPYTTCSEALTHK

SEQ ID NO: 160021 - protein, 114 aa, Glycine max
  Clone ID: PAT_MRT3847_115518C.1.pep
FVKINYKGTNNKDLDILLFPLGTCKMPFLKEEPVTPMMDLWSLHWIWWVPCCFMLFFLKKLYFMFLRQWRIKSLTIKHAKEVSRKLSGKSVNLWNQCFIPKKFHFNIQSSIINS

SEQ ID NO: 160022 - protein, 86 aa, Glycine max
  unsure (1)..(86): unsure at all Xaa locations
  Clone ID: PAT_MRT3847_115519C.1.pep
MNLNDLMKDTDNFGKSNIIGTGRSGTVYKAVLHDXESLMVKRLQESQHSEKGFLSGMNIQGXVKHRYLVPHLEFCVAKKERFLAYK

SEQ ID NO: 160023 - protein, 72 aa, Glycine max
  unsure (1)..(72): unsure at all Xaa locations
  Clone ID: PAT_MRT3847_11551C.1.pep
LQAMHIAKLVVDMLIERHKAENGGTSTETLALALLSTDPIKSYGXSLPHVLWMKAVEPLADTFGLGNRVEPV

SEQ ID NO: 160024 - protein, 263 aa, Glycine max
  unsure (1)..(263): unsure at all Xaa locations
  Clone ID: PAT_MRT3847_115520C.1.pep
SENQSVVYILVYVDDIIIXGNNTLIHSLVSKLNSVFSLKDLGDLDYLLGIEVQRQNDGSLILTQSKXIRDLLAKTKMDESNPISSPMVGGCKLTKFGSEDFPDPTLHRSIFGALQYATITRPEISFSVNKVCQFMSEPSEQHWLAAKRILRYLISTVSWGLHFQSASLRHPFPLHAYYDADWVSDPDDRRSTSGAAIFLGPELISWWSKKQSVVARSSTEAEYRSMALIAAEVTCIQSLLSELQVAYTTPIILCDNTSTVSSS

SEQ ID NO: 160025 - protein, 109 aa, Glycine max
  Clone ID: PAT_MRT3847_115521C.1.pep
HTRSKLFTKLTIPHLILNLRDILLPLAMEAFSVQSLITVTIPSSLSCREATEKPFASHVNLSHFTRYPCTSRATKHKIRCTNAQASGVICFLILSVIAVCSFVFKLILR

SEQ ID NO: 160026 - protein, 75 aa, Glycine max
  Clone ID: PAT_MRT3847_115522C.1.pep
TFRETWHLHRNYMLCPCLMHPFVFSSNFLLCLSPPKSRFELLAKQNAGYKLYRKGSTYSITFYWINLSQFTIVII

SEQ ID NO: 160027 - protein, 111 aa, Glycine max
  unsure (1)..(111): unsure at all Xaa locations
  Clone ID: PAT_MRT3847_115523C.1.pep
TGLTTEVKFVEMHHECVTEAHTEGNVGFNVXNVDRNDXKRGYVGXNSQDDPAKEGGTCTAQVMIMNHPEXIGNGYALVLDCHTVYIVVKIAELMTXVDXRSGLELEKELSF

SEQ ID NO: 160028 - protein, 139 aa, Glycine max
  unsure (1)..(139): unsure at all Xaa locations
  Clone ID: PAT_MRT3847_115524C.1.pep
YFVGDLVFEASKMTSIYIECTVYVSIAFGTXADDTINFDAFAHKLVQSGEIQEKVVLTVSHEEYLTAWSPHVRTATALLADGCPYVYAVVHDYSMSTILGDLVIVVELTAINNMCAYGLHPINRCSRLSCPIAQFITQR

SEQ ID NO: 160029 - protein, 98 aa, Glycine max
  Clone ID: PAT_MRT3847_115525C.1.pep
ELESLFLLPPALRHFQVRSLTTLPKTLKTVTFFFVSDGRWHRHVPRRHYEALSRRRSLSLPIHGCSQPGQNDVVSHYAGKAKEHGCISRNGFGGVKCG

SEQ ID NO: 160030 - protein, 232 aa, Glycine max
  unsure (1)..(232): unsure at all Xaa locations
  Clone ID: PAT_MRT3847_115526C.1.pep
MDFTAEKKESESNTENAHPTTLDSSSQLASALDSSNKEIEERQARELKAGLHPLKHKFVFWYTRRTPGVRNQTSYEDNIKKIVXFSTVEGFWVCYCHLARPASLPSPTDLHLFKEGIRPLWEDSANCNGGKWIIRFKKVVSGRFWEDLQVLAKCEHQLYYGDNICGAVLSIRFNEDILSVWNRNASDHQAVMALRDSIKRHLKLPHSYVMEYKPHDASLRDNSSYRNTWLRG

SEQ ID NO: 160031 - protein, 207 aa, Glycine max
  Clone ID: PAT_MRT3847_115527C.1.pep
TRPLDSSNKEIEERQARELKAGLHPLKHKFVFWYTRRTPGVRNQTSYEDNIKKIVEFSTVEGFWVCYCHLARPASLPSPTDLHLFKEGIRPLWEDSANCNGGKWIIRFKKVVSGRFWGRFWEDLVLALVGDQLDYGDNICGAVLSIRFNEDILSVWNRNASDHQAVMALRDSIKRHLKLPHSYVMEYKPHDASLRDNSSYRNTWLRG

SEQ ID NO: 160032 - protein, 138 aa, Glycine max
  unsure (1)..(138): unsure at all Xaa locations
  Clone ID: PAT_MRT3847_115528C.1.pep
MPPAEGSDSVRALLNGICCYVPLPTKTNXMETPKEWQLDLPWDKIPRGLTSTGERLVGTKXEGFNLFLVGIKNYAIPLMPLIEKIFFKVAQDLVEEWLDGVVEEDSLEEVLLRADLNGVEGWAFLEGFLLATFEGFPN

SEQ ID NO: 160033 - protein, 48 aa, Glycine max
  Clone ID: PAT_MRT3847_115529C.1.pep
GAPAVESDDLTPEVVSCLTIPKLNTSLSAQSQTSVSTATISYEAEVRI

SEQ ID NO: 160034 - protein, 81 aa, Glycine max
  Clone ID: PAT_MRT3847_11552C.1.pep
TWTMSNRVFAYERENGPVDPLAYEQMSHTQNNCIPVIERDVYVATHGHEFLSDKGWGEIESAYIEYEREWCSSISRTGNIA

SEQ ID NO: 160035 - protein, 179 aa, Glycine max
  Clone ID: PAT_MRT3847_115530C.1.pep
TAADSSAPPSHPLLSNSLLDMTQKILLRSPPVTRRRERRRVGEVAGNATAECAAVCCCVPLTVMDMVVLATYKLPAGLLKKAMHKRKGRLLQKRKKKTEALLDHGPVKADNSGHGLGLGLGLGSTLEERLAKEVAEEKLEASRLEDEMWAQFNGTGFWRSASQRHHQQQTDGESCQELQ

SEQ ID NO: 160036 - protein, 71 aa, Glycine max
  Clone ID: PAT_MRT3847_115531C.1.pep
RLREDDRRAIQNYYVPSIEHQMVYSFNPLSLLLMMQFCITITRQSGFLGYSFIIPNPIRFDIPLNGIHESR

SEQ ID NO: 160037 - protein, 92 aa, Glycine max
  Clone ID: PAT_MRT3847_115532C.1.pep
RVGIGVLVCSIYLERVGIIRFVSFRGLFHCFRMNGLRSERAPLLEAERAVSLFLFSSWPICTVPFIGAHLQLLLLQQFGHTQTIFVFCQLIV

SEQ ID NO: 160038 - protein, 116 aa, Glycine max
  Clone ID: PAT_MRT3847_115533C.1.pep
LSPLSFFFFFFFFFLSSNNNLFKTQIQRYRGYQQKTPLRDSSLELSLESQKPRHDLVYQNLSHPHQPNNFHHTTQCLFLFIFPPNKPTAKYRLFMYIQGNRKRHSEYFTHSASATE

SEQ ID NO: 160039 - protein, 35 aa, Glycine max
  Clone ID: PAT_MRT3847_115534C.1.pep
GSLVQPSKMTLLMQRQTDRVDAPRDTEVNSDKAFD

SEQ ID NO: 160040 - protein, 102 aa, Glycine max
  Clone ID: PAT_MRT3847_115535C.1.pep
MASIYFCIFIPQAPLKLIPAIKGSREKHGGSQVKLNVKWAADVYDPVPTLLSHTVRSNKKQQKSRKKKPEKKNGKKGQKGNSSRGAANSSLVYICDLSETLF

SEQ ID NO: 160041 - protein, 257 aa, Glycine max
  Clone ID: PAT_MRT3847_115536C.1.pep
MLLMDTCSNTNVVHDDNFISNLGRTFSESLHIQDAQKSLLASEGSDIYNVNEEKICKAMKDQATKVNMACLKKSATFPIPNTMLPSSSSDKEADTSVTEPLYEHSAHQTYSRSVSLPAPLKLIPAIKGSREKHGGSQVKLNVKWAADVYDPMPTLLSHTVRSNKKQQKSRKKKPEKKNGKKGQKGNSSRGGSSKDKQFRKLGGTSGLCYKSMDSCDKVLGVATELDALDVRSQDSYCGTSFLKKSVTELHYSVAEAL

SEQ ID NO: 160042 - protein, 152 aa, Glycine max
  Clone ID: PAT_MRT3847_115537C.1.pep
YLIQLMDTCSNTNVVHDDNFISNLGRTFSESLHIQDAQKSLLASEGSDIYNVNEEKICKAMKDQATKVNMACLKKSATFPIPNTMLPSSSSDKEADTSVTEPLYEHSAHQTYSRSVSLPVSYLIYITWLLVKFEGIVCKQCMLLLNEKILKF

SEQ ID NO: 160043 - protein, 55 aa, Glycine max
  Clone ID: PAT_MRT3847_115538C.1.pep
PCLHMVSGEATQVGEGTCLTKRGFYTLGNVLLLYYGLRIISPLKYSVMFRFAYSL

SEQ ID NO: 160044 - protein, 42 aa, Glycine max
  Clone ID: PAT_MRT3847_115539C.1.pep
FFFFFFFFFFFFFFFFFFFFFIPLQFSSFHFIPSRSINSKMH

SEQ ID NO: 160045 - protein, 42 aa, Glycine max
  Clone ID: PAT_MRT3847_11553C.1.pep
EVGSHGKAIGIDRFAARAPAGKIYMEFGVTKEAVIAAATYLS

SEQ ID NO: 160046 - protein, 146 aa, Glycine max
  Clone ID: PAT_MRT3847_115540C.1.pep
MTTTEALEQKTKRAQKEEWGKNKFQGALWGNNNDLKLRRDERDELRVKSMILEDKLKACKEDEHAKVVALQAEREARESVIESLHREAVKWMDRFTLTLNRSQELPRLLARAKEMADVYPALEEVHGLLDYCQHMFELMSLIIRNH

SEQ ID NO: 160047 - protein, 34 aa, Glycine max
  unsure (1)..(34): unsure at all Xaa locations
  Clone ID: PAT_MRT3847_115541C.1.pep
SNVKKXQLFSLLPFRAFKNVGYHVGVISQLDQSW

SEQ ID NO: 160048 - protein, 78 aa, Glycine max
  Clone ID: PAT_MRT3847_115542C.1.pep
SPFCEYFKFQISQLKLLSKAGLSGRESDGGTAFFLLKLDLKIYLFSVHGLQCMWVRAGLRLVIDQMGCLLSGEGSITQ

SEQ ID NO: 160049 - protein, 114 aa, Glycine max
  unsure (1)..(114): unsure at all Xaa locations
  Clone ID: PAT_MRT3847_115543C.1.pep
WHGELRASQQCPNLIGSYITVGFQCLRTLTDTNNGGRYSXYAHTYAYLRDNGYSFGAAADESCARQLPMAYCRXSVEDDFVSHYGGGKAVTAAVNSLDEESGPPLKEHMQLCGD

SEQ ID NO: 160050 - protein, 103 aa, Glycine max
  unsure (1)..(103): unsure at all Xaa locations
  Clone ID: PAT_MRT3847_115544C.1.pep
STKHGKTHYWQSELLKARPXLWNLVLQNESVDEELEPFEDVIETDNEPNSLSNNQNNDIGVVQNGEDANSDTSSSESEDDLPASSEDDDSDDDASEDADFLLA

SEQ ID NO: 160051 - protein, 68 aa, Glycine max
  Clone ID: PAT_MRT3847_115545C.1.pep
MGNFFASYPYLGHTGIFFRVKPLFCGAQFFPQGTSLFFPPLIVIPPPPPPPPPPPPPPPPPPPPPPPP

SEQ ID NO: 160052 - protein, 50 aa, Glycine max
  unsure (1)..(50): unsure at all Xaa locations
  Clone ID: PAT_MRT3847_115546C.1.pep
HLAVITLCAGMPTECAIVEREGLQAVILSXRDIVDGWSNYERVFREYKTY

SEQ ID NO: 160053 - protein, 111 aa, Glycine max
  Clone ID: PAT_MRT3847_115547C.1.pep
KIEVPEPVFENQGVATPNNLAAVAATAPVAVKLVPTLLLQILWCSRTSSRRRASGRLSRRPLKPNSKSCRSENCLQLPVLTGFSFSNLRGVGGKLQIDSRKEEWRRRLEER

SEQ ID NO: 160054 - protein, 116 aa, Glycine max
  Clone ID: PAT_MRT3847_115548C.1.pep
IASFFFFSRLALTHNLDVIIGIYSTISSLPAFIYACESIAYNIGECYLRPPGSLDSKSFLWLFMTIPSLSSYPYQISEFLGLAPVHFTLSTLVHLHGALFTSIVTVVSCNSSSVLG

SEQ ID NO: 160055 - protein, 135 aa, Glycine max
  Clone ID: PAT_MRT3847_115549C.1.pep
CTLNLIYYYLLLCLNLRVEIGLFVVEGVETVKADSDAGKVTVTGKVDPTKVRDNLAEKIRKKVELVSPQPKKEQENEKENKDAKANNKSENNKTQDKKTKDKEVGSSLVPNLCPLCLFNLFYFLCHCQSGIFFFF

SEQ ID NO: 160056 - protein, 71 aa, Glycine max
  Clone ID: PAT_MRT3847_11554C.1.pep
DLGPDLGFIYILYKNWNKKGNMKGNRMDDEDDTEDLKEYHKDYEKDEENAKDVAEPGTEGDKRGHGGIYRE

SEQ ID NO: 160057 - protein, 57 aa, Glycine max
  unsure (1)..(57): unsure at all Xaa locations
  Clone ID: PAT_MRT3847_115550C.1.pep
EDASQSIRRAQQKAXXAIKKXYSSLPKDXIKSLEKEVDDLXKKKKNIKTAEDVCKVK

SEQ ID NO: 160058 - protein, 171 aa, Glycine max
  unsure (1)..(171): unsure at all Xaa locations
  Clone ID: PAT_MRT3847_115551C.1.pep
LSVANXPRKTILALSLLLAHIMEACTKHEVPSSGHTSPESGAXAGIEQANNNLSGNNVLDLXHYHRLCASFFSPEHYPLLTXVDRSLQRPELHSNDLPAEEEVRAESAVVMSRDSTESMLAAYWSANPESMISPVYNNLLLLYYPCIRAWDEIEDTLFGQHNMMIPLPCVF

SEQ ID NO: 160059 - protein, 110 aa, Glycine max
  Clone ID: PAT_MRT3847_115552C.1.pep
GELYWPNREWYLECVQRQLPWRYRRIFWNLRWMFGHRNRHAYRIHHHGQGSAHHDQGGLQLDQDRHQHRHGQDNRYRHGQDDRHSHGLGNPFHSLHRDIWHAPLHELSFL

SEQ ID NO: 160060 - protein, 98 aa, Glycine max
  unsure (1)..(98): unsure at all Xaa locations
  Clone ID: PAT_MRT3847_115553C.1.pep
QPSTPSAPSNLPTTTPNALSTLSTTTTYAPSTLPSTTPNAPSTIATTNPNAPFTMSFPNPSXPQTFPTTTSNSPLTLSTSNPTAPFTLPTTTFPFFIK

SEQ ID NO: 160061 - protein, 57 aa, Glycine max
  Clone ID: PAT_MRT3847_115554C.1.pep
HRFIRSYFGKENSPTGFIPVPFLKFPPGLLKVVLAIKGQPFHSLIAFSWNPKVTTFS

SEQ ID NO: 160062 - protein, 165 aa, Glycine max
  Clone ID: PAT_MRT3847_115555C.1.pep
EIGDQKLLLDLFRFLDRTEELALSHYREHLNIQDPDKRKEFLKTCVGLPFSAEDSAHIQDHYTLLERQIIIEANDRHLESAGQTEIFRKHPRKACILNMPLVTTLFYSCFYHYTEAEGTFSSPVNLKKTFKIPDKQYVLTALAARAKLRAWNDVDALFTTKNWLG

SEQ ID NO: 160063 - protein, 480 aa, Glycine max
  unsure (1)..(480): unsure at all Xaa locations
  Clone ID: PAT_MRT3847_115556C.1.pep
LPDFALVVGTNDCDRECFSNDSCTAYANVNGLGCMVWHGDLVDIQHLESGGNTLYIRLAHSDLDDGGKTNRIVIISTVVAGLICLGIFVWLVWRFKAKLKVLPTVSSVSCCKSSNVLPVFDENKSREMSAEFSGSADLTLEGNQLSGPEFPVFNFSCISIATNNFSEENKLGQGGFGPVYKGKLPGGEQIAVKRLSRRSGQGLEEFKNEMMLIAKLQHRNLVRLMGCSIQGEEKLLVYEYMPNKSLDCFLFDPVKQTQLPWTRRFEIIESIARALLYLHRDSRLRXIHRDLKASNILLDENMNPKISDFGLARIFGGNQNEANTNRVVGTYGYMAPEYAMEGLFSVKSDVYSFGVLLLEILSGRRNTSFRHSDDSSLIGYAWHLWNEHRAMELLDPCIRDSSPRNKALRCIHIGMLCVQDSAAHRPNMSAVVLMLESEATTLPMPTQPLITSMRRTEDRQFYMDGLDVSNDLTVTMVVGR

SEQ ID NO: 160064 - protein, 71 aa, Glycine max
  unsure (1)..(71): unsure at all Xaa locations
  Clone ID: PAT_MRT3847_115557C.1.pep
TRHGGPPFIYFLWRLAKIQHAFCRGGSMAAGTHQVLVSMVFSXREEPHFXXKTHKCTRRTAWXDPGVFRXR

SEQ ID NO: 160065 - protein, 84 aa, Glycine max
  Clone ID: PAT_MRT3847_115558C.1.pep
SAQDKEKKHFSTGSIIQYQIQICSIHEMTWQNELQIRGDSVLHSIKATDEKWAKRKYIPQVTVFQLSTLTKNIARYPKSQESSK

SEQ ID NO: 160066 - protein, 147 aa, Glycine max
  unsure (1)..(147): unsure at all Xaa locations
  Clone ID: PAT_MRT3847_115559C.1.pep
LSHERADDTNNHEGCAHKLVHVGVIQDXVALPFSQEVLITVGCSXVRTTTTLLGGGRPYQYGMLHERSMSTIPGESVIDAMPPAIHNRCANGLNHGPLGSLLWGTLLHTILHRTDXDYNGSERTPSYFEARTHSLXQCFIDLLXGGI

SEQ ID NO: 160067 - protein, 78 aa, Glycine max
  Clone ID: PAT_MRT3847_11555C.1.pep
MDPYKHRPSSAFNSPFWDTNSGAPNWNNNSSLTVGARSPILLEDYQPVEKPANFDRERFPKRVVQGKGASSKGFLEVT

SEQ ID NO: 160068 - protein, 83 aa, Glycine max
  Clone ID: PAT_MRT3847_115560C.1.pep
GPQGSPPGQIFFIFRGRLGPPLRPPMFKKKDPFPGSFRKAGPSRIRGIPLTRSGSFISGFPRVRNRDWFKTPEGWCFPPPFFC

SEQ ID NO: 160069 - protein, 1003 aa, Glycine max
  unsure (1)..(1003): unsure at all Xaa locations
  Clone ID: PAT_MRT3847_115561C.1.pep
MMNRLVVEVVEASDLMPKDGEGSASPFVEVKLDEQQHSTETKHKDLNPCWNEKLVFNINNPRDLAHKTIEVVVYNQSQRSEPXNFLGRVRLSGASIPLSESQARVERYPLEKRGLFSNIRGDIALRCYAVHDHADAEEHHHPQVDTPAAEEAYQGTPFQEINPNINMVLDEESAVGGGDKNKKKKMQKKEKEVRTFYSIPAAPAMETTQRRVDFAKAGPPNVMLMQQIPKQNPEYSLVETSPPLAARLRYRGGRDKISTTYDLVEQMNYLYVNVVKARDLPVKDITGSLDPYVEVKLGNYKGLTKHLDKNQNPVWKQIFAFSKDRLQSNLLEVTVKDKDIGKDDFVGRVMFDLTEVPLRVPPDSPLAPHWYRLQVQKGQKIHNNGEIMLAVWMGTQADESFPEAWHSDAHNVSHSNLSNTRSKVYFSPKLYYLRVQVIEAQDLVPSEKGRPPDSLVRVQLGNQMRFTRPSQIRGTNPVWNDELMFVAAEPFEDFIIVTVEDKVGPNVEILGREIISVRSVLPRHESSKKLPDSRWFNLHRPNAVGEEETQKKKEKFSSKIHLRVCLEAGYHVLDESTHFSSDLQPSSKHLRKKNIGILELGILSARNLLPMKAREGRTTDAYCVAKYGNKWVRTRTLLDTLSPRWNEQYTWEVHDPCTVITVGVFDNHHINGSSDARDQRIGKVRIRLSTLETDRVYTHFYPLLVLQPNGLKKNGELHLAVRFTCTAWVNMVAQYGRPLLPKMHYVQPIPVRHIDWLRHQAMQIVAARLSRAEPPLRREAVEYMLDVDYHMWSLRRSKANFQRIMSLLKGVTAICKWFDDICTWRNPITTCLVHVLFLILVCYPELILPTIFLYLFVIGIWNYRFRPRHPPHMDARLSQAEAAHPDELDEEFDTFPTTKPSDIVRMRYDRLRSVAGRVQTVVGDLATQGERAQAILGWRDSRATSIFIIFSLIWAVFIYITPFQVVAILVGLYMLRHPRFRSKMPSVPVNFFKRLPSKSDMLI

SEQ ID NO: 160070 - protein, 39 aa, Glycine max
  Clone ID: PAT_MRT3847_115562C.1.pep
TQQFVDVIAWNLILLVLFHFKVICGLLEVERITNYNVRV

SEQ ID NO: 160071 - protein, 105 aa, Glycine max
  Clone ID: PAT_MRT3847_115563C.1.pep
MMNKLVVEVVEASDLMPKDGEGSASPFVEVKFDEQQHSTETRHKDLNPCWNEKLVFNINNPRDLAHKTIEVVVYNNNHNDRNHNNFLGRVRLSGSSIPLSESQAS

SEQ ID NO: 160072 - protein, 124 aa, Glycine max
  Clone ID: PAT_MRT3847_115564C.1.pep
MMNRLVVEVVEASDLMPKDGEGSASPFVEVKLDEQQHSPCWNEKFVFNINNPRDLAHKTIEVVVYNHNDGNHNNFLGRVRLSGASIPLSESQARVERYPLEKRGLFSNIKGDIALRCYAVHEHA

SEQ ID NO: 160073 - protein, 154 aa, Glycine max
  unsure (1)..(154): unsure at all Xaa locations
  Clone ID: PAT_MRT3847_115565C.1.pep
IHNNGEIMLAVWMGTQADESFPEAWHSDAHNVSHSNLXAGVRKVGATNAVSTRSKVYFSPKLYYLRGQVIEAQDLVPSEKGRPPDSLVRVQLGNQMRFTRPSQIRGTNPVWNDELMFVAAEPFEDFIIVTVEDTVGAHGEILGREIIFVRCVLP

SEQ ID NO: 160074 - protein, 33 aa, Glycine max
  Clone ID: PAT_MRT3847_115566C.1.pep
FDAKERAAAKDKYQLASGQNGVQVPVSQPPTPT

SEQ ID NO: 160075 - protein, 102 aa, Glycine max
  unsure (1)..(102): unsure at all Xaa locations
  Clone ID: PAT_MRT3847_115567C.1.pep
VAKYSTTVCTLPATLRNLSYLILTISEGERAQALLGWRDSIATSILIIFSLIWAAFIYITPFQVAAILVGLYMLRYPRFRSXMPSVPDYFFKRLPSKSDMLI

SEQ ID NO: 160076 - protein, 75 aa, Glycine max
  unsure (1)..(75): unsure at all Xaa locations
  Clone ID: PAT_MRT3847_115568C.1.pep
PVVGFPFYMRARPSFSRGVCVFEVKDVVSFHNVILKFSFPNLILFNELAYPLIVSKEGLQKLIILHYLXVLIHDL

SEQ ID NO: 160077 - protein, 62 aa, Glycine max
  unsure (1)..(62): unsure at all Xaa locations
  Clone ID: PAT_MRT3847_115569C.1.pep
NNNLKLLKRTRAVTRPLLRKVWHLDNLLQLWCSCESHLLITPCGCAEELKKSKXHMTSLLEP

SEQ ID NO: 160078 - protein, 63 aa, Glycine max
  Clone ID: PAT_MRT3847_11556C.1.pep
PPVKTPPRFNKRSFKLKKISLTGRFWARKFLESFLKLGAPAKAQSETVSKVFYFFGDLSQWGV

SEQ ID NO: 160079 - protein, 94 aa, Glycine max
  Clone ID: PAT_MRT3847_115570C.1.pep
IADHHTTISFSLCCLLGIFSCYNHFFNQPSLPQRTSILPFSRTLESWSEPSIQFFLAGFLTRWWFLLKAAIWVLLPLMSLDIGGVSNCKNMGFD

SEQ ID NO: 160080 - protein, 260 aa, Glycine max
  unsure (1)..(260): unsure at all Xaa locations
  Clone ID: PAT_MRT3847_115571C.1.pep
MAGSKIVFREYTSDDSFTKLTDIPKDVSEIQVALTFARDYDGVGSTQGKFIPYWDTAIVNPDVIANFKSKYPSAKVLVSIGNNKRHFPFKIDEDRVTAWINAATESLTRIIKEYNLDGIDVYYEDIEVSNPAIFVHCIGELIKTLKLNKVITRASISPNIEINDNLVPVLXHLNFEDHFDYVNLFLSVVENLTGNTNQEEVLEKLKPTFNQYPPTKRLLGYSSMRPPPIFFVGSKILLSHSVINGISLKVTRFSITYFPP

SEQ ID NO: 160081 - protein, 118 aa, Glycine max
  Clone ID: PAT_MRT3847_115572C.1.pep
EGFLSFFGFLNLGFQNCFGPRANWLLWWPWLGLTLGVATTNFCLSPLQAAFQVVGAFPGNYLWLGGKAFKPGSWTFFAASQSLFGGASGKTLGWENLGDLGFCQPRSRNGQWKPQPFA

SEQ ID NO: 160082 - protein, 51 aa, Glycine max
  Clone ID: PAT_MRT3847_115573C.1.pep
TAGSIFFLNQLFFIPSVSSHRAIDSFSSLLINTHYIRRVWLLHSVAVCHSH

SEQ ID NO: 160083 - protein, 51 aa, Glycine max
  Clone ID: PAT_MRT3847_115574C.1.pep
YFNYITYYYDISIFFFLNTLSVPKLLMLIKIFHTDKIISILRELIFIWRQF

SEQ ID NO: 160084 - protein, 71 aa, Glycine max
  unsure (1)..(71): unsure at all Xaa locations
  Clone ID: PAT_MRT3847_115575C.1.pep
GAHFPGRFTAIAENTKFQTILPSTEQMTGLNHLLHGAKQHHNVTNVYVWHALARYXCGVXPASSSMEHYDT

SEQ ID NO: 160085 - protein, 42 aa, Glycine max
  Clone ID: PAT_MRT3847_115576C.1.pep
TSFLFSYDPVKSSRSIHSSSISTVHCNLKTCVNTSFPKFDSS

SEQ ID NO: 160086 - protein, 38 aa, Glycine max
  Clone ID: PAT_MRT3847_115577C.1.pep
ARGRIETYLAKIFVLAQLTTFKLLIYVTIIMVHFSEDC

SEQ ID NO: 160087 - protein, 316 aa, Glycine max
  Clone ID: PAT_MRT3847_115578C.1.pep
TRPIAVAFSLLLRIFFFFFSSNPKSWPRKLTTKVIELNTLKAMAQSHGSILTRSVWSSNLESEFDLIRSVIDSFPLISMDTEFPGVVVRPDAGDPSFRHRQPVAHYAVLKANVDRLHLIQIGLTLSDNAGNLPTLGTSNAFIWEFNFKDFDVARDAHAHDSVELLRRQGIDFEKNRDFGIDSFRFAELMMSSGLVCDDAVSWVTFHSAYDFGYLVKLMTHRTLPEELREFLRLVRVFFGDRVFDVKHLMRFCSNLHGGLDRVCQSLKVERVIGKSHQAGSDSLLTLHAFQNIRENYFDKADGLVQYAGVLYGLEVF

SEQ ID NO: 160088 - protein, 156 aa, Glycine max
  unsure (1)..(156): unsure at all Xaa locations
  Clone ID: PAT_MRT3847_115579C.1.pep
MAANEDAVQEFTPKKKPPSEDEKRKKKIVPGSLMKALMRPGGGDAGPSDGDQIIYHCTIRTLDGVLVESTRSDYGGKGIPIRHVLGKSKMLLGLLEGIPSMLKGEVAMFKMKPQLHYGEDDCPVSAPDGFXKDDELHFEIELIEFXQAKVXTDXIG

SEQ ID NO: 160089 - protein, 55 aa, Glycine max
  Clone ID: PAT_MRT3847_11557C.1.pep
IQSSSTQHKVQGFIVGTSDCILIGMSYLLGDLISFFSLHLLYKLQVRHFYKVLRG

SEQ ID NO: 160090 - protein, 108 aa, Glycine max
  unsure (1)..(108): unsure at all Xaa locations
  Clone ID: PAT_MRT3847_115580C.1.pep
XXXGTXXLSRXTINXXGGTVPTDAXHSXSXRXLTXAAXGVXXXXXRRXXSASXXXXADTEXVKXLMMVEXSGSKTCGTLALXWXLMKVTSXMXRFRXVKSVXKXKLCX

SEQ ID NO: 160091 - protein, 84 aa, Glycine max
  Clone ID: PAT_MRT3847_115581C.1.pep
KTIPQSLGPPNSKNFLFKSQGKPMLLNKKKIWGNQGGFSSRELPSKGSGGKATLIQNFPLPPGFNESTVAHRRKSFLPKIQILI

SEQ ID NO: 160092 - protein, 49 aa, Glycine max
  Clone ID: PAT_MRT3847_115582C.1.pep
MAVSVMRNRINDHDYELHHHPLFYYHRAFQEDPYAPPHVLDLPASAHPR

SEQ ID NO: 160093 - protein, 84 aa, Glycine max
  unsure (1)..(84): unsure at all Xaa locations
  Clone ID: PAT_MRT3847_115583C.1.pep
TSLHSFSETXFPYXLPXXKINXTPLXTXQTXPLXQINLLSDIAKKXNXVHHVQXXSTMYLRXLLHXXXXRKXRXGXAXXXLHXX

SEQ ID NO: 160094 - protein, 32 aa, Glycine max
  Clone ID: PAT_MRT3847_115584C.1.pep
RGITPAQHVVVRNQFNLGIGTLYNAYKDELVL

SEQ ID NO: 160095 - protein, 108 aa, Glycine max
  Clone ID: PAT_MRT3847_115585C.1.pep
EGNERNNYVTYLKKKKLYHNNANYHYVIRRRKTHVYVFIIRRTSYVTFVSPLLRRYVFRLPAYFSYSIRLSPQTTNVPSPRYKALRFCSLYSLVLIFAIRYVGSRYLS

SEQ ID NO: 160096 - protein, 107 aa, Glycine max
  unsure (1)..(107): unsure at all Xaa locations
  Clone ID: PAT_MRT3847_115586C.1.pep
MFKTFKYIILFGRDSAGYSARQFAKQGVKPWXLAIISKEAVAPYEQPSLNNAYLFPQSPAKLSLFHVCLSNXXQRFLPHSYTQKRIVLILITQIVNVYLPAKSLIIA

SEQ ID NO: 160097 - protein, 67 aa, Glycine max
  unsure (1)..(67): unsure at all Xaa locations
  Clone ID: PAT_MRT3847_115587C.1.pep
XVIXXXITKIQCLTXXXPIISIPXXNSSSSSXXLVTMVCCKTYYHHSLANKCHELTKNLVHVLIYFI

SEQ ID NO: 160098 - protein, 183 aa, Glycine max
  Clone ID: PAT_MRT3847_115588C.1.pep
IYGGVGPLHSDVTIAGIAKAFGVRLAPDEEFEEYLRHIIGDQCTGDRNEMAQLPEGITELWHHDKLSVPLIKCENVIILSATNVPEMEKQWDCWIELAKSSDLLALLEPYVSKHVTTNLSDVEIAQPLSKLCLEFPDLYIGCYRNARYGSLIVSFKGKDLTRIESAIKALQKKFQPSAFIETK

SEQ ID NO: 160099 - protein, 379 aa, Glycine max
  unsure (1)..(379): unsure at all Xaa locations
  Clone ID: PAT_MRT3847_115589C.1.pep
MEEGKLRELKQFIEICKSNPSLLHNPSLSFFKTYLLSLGARIPPQPKTEPGDFDDKSDPPLSAQNDIVESDIELDNADVVEPDNDPPQKMGDPSAEITEEQRDAAQLAKSKAVDAMSQGNLDEALAQLTEAILLNPQSAILYATRASIYMKLKKPNAAIRDADTGLKINPDSAKGYKIRGMSRAMLGLWEEAASDLHVASKLDYDEEISMALKKVEPNALKIEEHRRKYERLMKAKATEKSSYQDXAPIKKEQETEAQVQAALSALKDGQVMGIHSSGELEKKLSAASKTSRLAILYFTATWCGPCRFISPIYTSLAEKYPKVVFLKVDIDEARDVAAGWNISSVPTFFFVKNGKEVDSVVGADKSTLESKIAQHAGSL

SEQ ID NO: 160100 - protein, 97 aa, Glycine max
  unsure (1)..(97): unsure at all Xaa locations
  Clone ID: PAT_MRT3847_11558C.1.pep
XXXXXRNSXXAXXXLXXRXHXXSKRWRRXRRKXAXVXXKXGXIGXWXXHDXXXXXXXSGXXRNXKTXXKTXAREXVAXQRXGXXGQVXNRXNXTIXI

SEQ ID NO: 160101 - protein, 44 aa, Glycine max
  unsure (1)..(44): unsure at all Xaa locations
  Clone ID: PAT_MRT3847_115590C.1.pep
LSHYTPHSWFLTILTPRQEXVKERNNLKRKGKGKIMAYMRLWLS

SEQ ID NO: 160102 - protein, 74 aa, Glycine max
  Clone ID: PAT_MRT3847_115591C.1.pep
DDVVSTAFVVDIRSSIFDAKAAIALNKNFVKHVSEDVSEWGYSSGVINVLVFVAKKSSYRGVLQSCQSTQYERV

SEQ ID NO: 160103 - protein, 92 aa, Glycine max
  unsure (1)..(92): unsure at all Xaa locations
  Clone ID: PAT_MRT3847_115592C.1.pep
FFSRTILIKKSEFHLPTPTITPNFNTILNYSTXLNTHSQSKSKIYSNILYLHSLHKIYLYYISSFNIIILNLNIISTPSIKYTILPDITLKT

SEQ ID NO: 160104 - protein, 54 aa, Glycine max
  Clone ID: PAT_MRT3847_115593C.1.pep
SQKIEIGIYVFHFFSHVNQGGFAPYLYYCISQGPRQEGLVLLLIFKALSLLPPG

SEQ ID NO: 160105 - protein, 65 aa, Glycine max
  Clone ID: PAT_MRT3847_115594C.1.pep
IVASVPPLLLNNTLVSLQKWNHAGSSSYGPKVSMISVNGAIASKTLLGFRPFTCAVESDTEGLEP

SEQ ID NO: 160106 - protein, 119 aa, Glycine max
  unsure (1)..(119): unsure at all Xaa locations
  Clone ID: PAT_MRT3847_115595C.1.pep
TYRCLIGYTIVILTGNLITMALLRQHWDYHNLTLIKLNPVEPHFVICSCSNKEETHTDCQYXHILNVNWESHCTCTLTSTAAGVMLTLTATLAIAIALAPGAFVSFFFVTFTGCAFPGL

SEQ ID NO: 160107 - protein, 71 aa, Glycine max
  Clone ID: PAT_MRT3847_115596C.1.pep
MAETRLLTSESANDWHPDKLCSRISDAVLGACLGHAAVSIVACETCTRTNLVVVFVEFTANANVGCDRDSA

SEQ ID NO: 160108 - protein, 69 aa, Glycine max
  Clone ID: PAT_MRT3847_115597C.1.pep
CGIGLKKKGLLIFPGLLCNICANSQFLLEGTTIFGEENPLLNYVSMLQDPSTMCLLSHKPSSLSQVPAT

SEQ ID NO: 160109 - protein, 50 aa, Glycine max
  Clone ID: PAT_MRT3847_115598C.1.pep
VTICQCLMQYMINLSHYLTCQAQNAASANAVNTGKPRFSVGRLVEREFRT

SEQ ID NO: 160110 - protein, 68 aa, Glycine max
  Clone ID: PAT_MRT3847_115599C.1.pep
DEDGQLVGVSTSNLLIANSGNDLPVIDLTRVSQELAYLASDADLVILEGMGRGIETNLYAQFNCATSG

SEQ ID NO: 160111 - protein, 612 aa, Glycine max
  unsure (1)..(612): unsure at all Xaa locations
  Clone ID: PAT_MRT3847_11559C.1.pep
MQQDLMIQEKEEMDFFSEYGDANRYKIQEVIGKGWCCCLSSTLDDKKDAXDDIFELMISDAAXDKVAFYDILKSLLLKHIMFRQCGNEPHYALPPSRKDFKDIYVVFELMESDLHQVIKANDDLTKEHYQFFLYQLLRALKYHHTASVYHRDLKPKNILANANCKLKICDFGLARVAFNDTPTTVFWTDYVATRWYRAPELCGSFYSRYTPAIDIWSIGCIFAEVLIGKPLFPGKNVVHQLDLMTDLLCTPCLDAIYTLHNDWLRRHLTTMNKNQSIPXTTNVMTRSAINNITQDNRVAIGTKRXSKRLNNMVDLVLLRHRKVGCEQYGRTMIKMKFEFERRRVTMEDIGXLILRKHLDYHHQLFKNYFDGTERTNXIFQAAIAQFKQQXAHPKVNVKKSDLMVTLEXLHSSPPSSTLDGLCILPSKEQSNIACCIYRQTTAEFNNNSRGTESPAPRTSPGLQKFSQAKPGKVVGPVIPYEYASVVKGTYDPRTFMRGSVLPSQPILPTNHYQRSTSGKQERSATEADKGVSLQSKLAQQCGVNAKIAPDTAINIDTNPFFMTRAGVNKIEQDDRIAIETKLLQSKAHQYGGISTTAHRKVGPVQYGMTRLF

SEQ ID NO: 160112 - protein, 92 aa, Glycine max
  Clone ID: PAT_MRT3847_1155C.1.pep
FKRGFLLGSPLIICQCLSYPWQWQIKVTSIPFKVWLFWLSPKFLVNFRPWKKGALCISLSRSLLFPVRFPGLKKKKKKKKRKKDKKKKKKNK

SEQ ID NO: 160113 - protein, 74 aa, Glycine max
  Clone ID: PAT_MRT3847_115600C.1.pep
YIILPPLKYKLSACHKKIYSQLNKHKNGVPPKNNGLKDNFGMLAKSVSIARKITLLESWNNRRPKKIYGKQSKF

SEQ ID NO: 160114 - protein, 136 aa, Glycine max
  Clone ID: PAT_MRT3847_115601C.1.pep
MGLPRFGRPKNDGELSSNLFVANCGSAVGLSDDDIASVFCKFGELKGVYAADESGTRVIVAYVEEGSAQAALKALHGQSCPELGGRSLHIRYSVLQPTPQDQASDLVPVSITASDVSIPGLFLVHDFISAKEEEEL

SEQ ID NO: 160115 - protein, 42 aa, Glycine max
  unsure (1)..(42): unsure at all Xaa locations
  Clone ID: PAT_MRT3847_115602C.1.pep
SXNXGAIVDXKILNHLXXNKNXYXMEVXPKTXADVKGGTXLR

SEQ ID NO: 160116 - protein, 44 aa, Glycine max
  Clone ID: PAT_MRT3847_115603C.1.pep
AFLSTFGWWEHKEWQYVFQALIVQPSCTNFYLGISSFCLVGIVT

SEQ ID NO: 160117 - protein, 235 aa, Glycine max
  unsure (1)..(235): unsure at all Xaa locations
  Clone ID: PAT_MRT3847_115604C.1.pep
MPLSGAACIGXIVKGEQIXHALIVKSGFGPNXXINNALISMYSKCGNKEAALQVFNDMGYRNVITWTSIISGFAKHGFATKALELFYEMLEIGVKPNEVTYIAVLSACSHVGLIDEAWKHFNSMHYNHSISPRMEHYACMVDLLGRSGLLLEAIEFINSMPFDADALVWRTFLGSCRVHRNTKLGEHAAKKILEREPHDPATYILLSNLYASEGRWDDVAALRKSMEQKKFIKET

SEQ ID NO: 160118 - protein, 150 aa, Glycine max
  Clone ID: PAT_MRT3847_115605C.1.pep
GGVRKVYLLTGTFLETRVNPFFMKKPYQQMLVPQIARHHFKYWIKLTRFQKNACYVKKNPYRVPQDAHRMEDYMALLAKSQNGPLLISLELGLAGMLLQMDHLGLPMGFFKGLGPSTFIGNPFCFACLPWAWDACDSNWDHKAFYLAFSP

SEQ ID NO: 160119 - protein, 179 aa, Glycine max
  Clone ID: PAT_MRT3847_115606C.1.pep
MGCVVSTTKDSGGNRRRPGSIGEVSVYVPGLRIPKPVDFAQSLGNYLSKNIVEHLSALRMRIVIMAGQEGPTITRTKRKTQHGGSMLADLLQALEDYLPVVLGLVKDGSHLQYKVQFTWVNQEDDKEETTMFNAWYEVLSVLHLMAMLSLSQANLLLLPRSSSSDGHLPKVSEESRRTS

SEQ ID NO: 160120 - protein, 85 aa, Glycine max
  unsure (1)..(85): unsure at all Xaa locations
  Clone ID: PAT_MRT3847_115607C.1.pep
MIKKTRISVMMMNVLAFVVATILVAWXCHAYDRYPHQLNTGYGARTPEVKCASWRLAVEAHNIFGFETSPEQCVEATQEDIYGDQ

SEQ ID NO: 160121 - protein, 69 aa, Glycine max
  unsure (1)..(69): unsure at all Xaa locations
  Clone ID: PAT_MRT3847_115608C.1.pep
CLXSCVRFILQYQFFGLIRLWFTRYSHIMLDSRDILAPSSLAAGPSILVVQLISWSRIGSASECAGLDG

SEQ ID NO: 160122 - protein, 42 aa, Glycine max
  Clone ID: PAT_MRT3847_115609C.1.pep
CQVYHIHTHRLSSVRPIHTRNKIICRLVLTTSKFQPPSVLFL

SEQ ID NO: 160123 - protein, 182 aa, Glycine max
  Clone ID: PAT_MRT3847_11560C.1.pep
EMARRYLTSMRKKQPVPFTQKFPNADPLALRLLEKLLAFDPKDRPTAEEALADPYFKGLAKVEREPSCQPITKMEFEFERRRVTKEEIRELIFREILEYHPQLLKDYMNGTERTNFLYPSAVDQFRKQFAHLEENGKSGPVMPLDRKHVSLPRSTIVHSNTVHPKEQTNIASCKNRADTWGI

SEQ ID NO: 160124 - protein, 226 aa, Glycine max
  Clone ID: PAT_MRT3847_115610C.1.pep
MADPRSPQQHPWTGADCRSDKNSSKWVIHGLGLDSHGLNGFSPSVPTLLHLLHILYLSGISMQGPIPSSLGTIPSFQILDLLTYFFNGSIPESLGQLTSLQRLNLNGNFLSGRVPATLGGRLLHGASFNFTDNAGLCGIPGLPTCGPHLSAGAKVGIGLGVSFTLLLLITGSVCWWKRRQNILRVQQITARAAPYAKARTQFSRDIQMTRHNNNNNAENGPILLSR

SEQ ID NO: 160125 - protein, 91 aa, Glycine max
  Clone ID: PAT_MRT3847_115611C.1.pep
NHLTRLRYLLPPALELTSCDRQHLETSPVRESVEFSAQSEDQGRPKAVDITGHVGHSVHGIILRWVQRNSLMQRTTTLSWWLQSTQSLPRL

SEQ ID NO: 160126 - protein, 46 aa, Glycine max
  Clone ID: PAT_MRT3847_115612C.1.pep
SGVYITFMHNTWKTEVGTLQGWLPPSTSSVTRIRYQKTKHGNYVLG

SEQ ID NO: 160127 - protein, 185 aa, Glycine max
  Clone ID: PAT_MRT3847_115613C.1.pep
MACRGMLRSTILIEPSLLRSLNFNSNKHHIASLNQWSCRFHSPKPPYSSSQNETPLSQDPVLKAISEISKGEGRVGQTTNVIIGSTAADDSNNEWLALDQKVNSYPTDRGFTAIGTGGEDFVQAMVVAVESVIQQPIPQGYVKQKLSSGGKYVSVNIGPIQVVSSEQVQAVYNAMRTDNRVKYFL

SEQ ID NO: 160128 - protein, 49 aa, Glycine max
  Clone ID: PAT_MRT3847_115614C.1.pep
IICLIDIHDDNLTNVHTKLIQRSPKACLYTSWIFMLLKPRKHSIFTRKK

SEQ ID NO: 160129 - protein, 92 aa, Glycine max
  unsure (1)..(92): unsure at all Xaa locations
  Clone ID: PAT_MRT3847_115615C.1.pep
NNGKDHEARGHQTQHSTTQTEKRRRSNKRNYLHHREIMRTCRRTASKITWRNPANPPAGSSKILXKSITGEHYKKQKSQKSTHLRLPARKLE

SEQ ID NO: 160130 - protein, 124 aa, Glycine max
  unsure (1)..(124): unsure at all Xaa locations
  Clone ID: PAT_MRT3847_115616C.1.pep
HFTVSLSKKKKKKKKKKKKKKKKKKKEQRKKKERGRRHNTCSEKPYISRRGKRNTRAKLKKMGRXKKKRQREKKRLGQDGAKAKRTQNEKGRNRLDIPRGKRHAPPKGTRTGEGEEPRRGGRNP

SEQ ID NO: 160131 - protein, 41 aa, Glycine max
  Clone ID: PAT_MRT3847_115617C.1.pep
SGNASANRSDWASLVQALLSNSNSSQHFDACKWTKSEPHFW

SEQ ID NO: 160132 - protein, 100 aa, Glycine max
  unsure (1)..(100): unsure at all Xaa locations
  Clone ID: PAT_MRT3847_115618C.1.pep
TRMAICAKDVWRVECVIPSGYALTVMWSCFFNEMLIRYSYEKLLRQTKAPSMFIQFFNNFDSLCVSGDDNLISVHEYVKPYFIGTXLKSFVAGHDITITD

SEQ ID NO: 160133 - protein, 52 aa, Glycine max
  Clone ID: PAT_MRT3847_115619C.1.pep
LSYKQSCNLLLVGFNSSKQISSSLLYRFLNKPHSGIKYELFDVKRFQHFFIF

SEQ ID NO: 160134 - protein, 236 aa, Glycine max
  Clone ID: PAT_MRT3847_11561C.1.pep
SSRFGSSVDQFKQQFSHLEENGGKSYPIMPLERKHASLPRSTMVHSNMVPSKEQSNIASCINRQTTGEFNNNSRDTEIINKLTFLYSAKPGKVVGPVIPYEYASVVKGTYDPRTFMRGSVLPTQPVPPAYYYQRSSTGNQERPSTEADKSVPLQAKHAQQCGVNAKMAPDIAINIDTNPFFMTRAGVNKLEQGDQIAIETNMLQPKAHQYGGISAAAGATAHRKVGPVQYGMTRMF

SEQ ID NO: 160135 - protein, 84 aa, Glycine max
  Clone ID: PAT_MRT3847_115620C.1.pep
SLLAPRRAVSFIFLVRRRVGLFFLVSLLGWPGSSCASGSWFFSAGLPSLGSLLPGLHVSLGRFPLTKVGVVSVAWVWLALPLRG

SEQ ID NO: 160136 - protein, 128 aa, Glycine max
  Clone ID: PAT_MRT3847_115621C.1.pep
NSARGKLIRKNKEHGRIKAAVQSIREELEDERRLRQHSESLHRKLARELSEVKSSFSGCLRNLERERKARILLENLCDEFAKGIRDYEQEVHSLRRSSENGQGHVKGNDSLDRLILHISEAWLDERMQ

SEQ ID NO: 160137 - protein, 221 aa, Glycine max
  unsure (1)..(221): unsure at all Xaa locations
  Clone ID: PAT_MRT3847_115622C.1.pep
RVRSTAPSLLHSSVSSFFSNYSPFNAXSSLLFPHIYKHGNALNCEKASDCGVVLLEKSDAXKVNTLTLTYTENIIALLMEHIFYTNXIHHPPRHEKIGGNCGLEHAXAQRCRGIARRIXDLALITXTRPIRTRTMCYLLPPLTSAKDNHLEYLGHYYDVSKHSFLHRVATLRLARTRYFPCVNPFSFDDXGNYSIGIKDQCDLPEIRADGDGKPRSKDICI

SEQ ID NO: 160138 - protein, 61 aa, Glycine max
  unsure (1)..(61): unsure at all Xaa locations
  Clone ID: PAT_MRT3847_115623C.1.pep
XXXXXXXXXXXXXXLXXXXXXXPVXPXXRXXAXWXXSXLXXXXXXCXXXPXPRXXSCSXXX

SEQ ID NO: 160139 - protein, 68 aa, Glycine max
  Clone ID: PAT_MRT3847_115624C.1.pep
HFSNFIQFHHFFHGIQTQKVYRYTTEIEGIFISKIKYVLASYVSQIPNQQNHLFVEGGNAKHFQRFAM

SEQ ID NO: 160140 - protein, 103 aa, Glycine max
  Clone ID: PAT_MRT3847_115625C.1.pep
SDIRATLLLLLIGKCTADPVAFEDVGEERFFMELLNDRDSRVAYYSSAFLLKRMMTESPEKYQHMLQNLLFKAQQTNNEKLLENPYLQMCGILQLANDLGFDL

SEQ ID NO: 160141 - protein, 140 aa, Glycine max
  Clone ID: PAT_MRT3847_115626C.1.pep
MKLQIFTQLNQSQKSALAVVFVILLPPFFPNLFQPLGRSSPSVFSEWNAPRPMHVALLEGALQRQTSVELQTSLWSPLAFQGWKPCTERPKPHSLPEKSRGYIQVLLDGGLNQQKMGVCDAVLLLDLNATLVLPHFEVNP

SEQ ID NO: 160142 - protein, 126 aa, Glycine max
  Clone ID: PAT_MRT3847_115627C.1.pep
HDLKAEAEARLNLISLISIPEHFYLSMLPVISQICSTISKNNLHDAESVISLFVLKINLPRQFQVVNSNLCSPNLLILLVFLPVFVSSLFSLALSQQLLFFGFLCLKGFPLILFLKLSLFDLLTIY

SEQ ID NO: 160143 - protein, 75 aa, Glycine max
  Clone ID: PAT_MRT3847_115628C.1.pep
NEFRERTGRVLHRERMLQIKALTFFLTLNHFYPYIISNSSILSLHTDTNIYTYTILVSCMLILTIHPFRTHPFAY

SEQ ID NO: 160144 - protein, 274 aa, Glycine max
  Clone ID: PAT_MRT3847_115629C.1.pep
LHLMGRNGGKYKADHEQTLPYFNFSTVEDPCKVYMDKVPTNSRCRSASSFTLDSNVSNRNDKNNEHGEIDCGRENGLVDVPKVCFDASPDLMDHKHLTVVSGGSSWERLLGSFGKTVNVDDTQKQSLLSAFEIPLDIIIDKCLLQEIMLQYNYVSKLAINVLEEAFKLQEHLLALRRYHFMELADWADLFILSLWHHKWSVTEANERLSEIQGLLELSIQKSSCEQDTHKDRLFVYMKGHGKLPLSASAIGVRSFDFLRLGYHVQLLPSTVFTT

SEQ ID NO: 160145 - protein, 235 aa, Glycine max
  unsure (1)..(235): unsure at all Xaa locations
  Clone ID: PAT_MRT3847_11562C.1.pep
MQQDHRKKSSAEMDFFSEYGDANRYKIQEVIGKGSYGVVCTAIDTWADAWVAIKKIHDIFEHISDAARILREIKLLRLLRHPDIVEIKHIMQIARLDFFDILSMLXLPPSRRDFKDIYVVFELMESDLHQVIKANDDLTKEHYQFFLYQLLRALXYIHTASVYHRDLKPKNILANANCKLKICDFGLARVAFNDTPTTVFWTDYVATRWYRAPELCGSFYSRYTPAIDIWSIGCI

SEQ ID NO: 160146 - protein, 222 aa, Glycine max
  Clone ID: PAT_MRT3847_115630C.1.pep
TRKNERGGMAGHKDKNNVAADGGVSVTETEAHLSGSQVISESVAGQVVNRLEEKKRKVNKLVEVVKQFNQKAPLNTMTPPSIVQEMGAGGAGSGITIGEALEATVLTAGKKPVEWSDAAAIQAAEVRATGRTNIVPGGVAAAAQSAATLNARVTKDEEKIKLADILADATSKLPSDRAATRRDAEGVTGAEMRNDPNLTTHPGGVSASVAAAARLNKTNTNT

SEQ ID NO: 160147 - protein, 166 aa, Glycine max
  Clone ID: PAT_MRT3847_115631C.1.pep
AIWTFHTDGHEDGKLDSFQADEQLKQKKKISYVRRRKDVFKTLGPGSEVESASLLAFGSLFSAAYKGSELYVDIHESHQNQRFRSLMDKIKHLPFVPEIMIAGKQFVKETIKAPFLCAQLRLLDGQFKNHQKATFHGLRQKIESLRKEGPLPGHIVIMTDVSGDYW

SEQ ID NO: 160148 - protein, 152 aa, Glycine max
  unsure (1)..(152): unsure at all Xaa locations
  Clone ID: PAT_MRT3847_115632C.1.pep
LMNKAAALQAVKKAHEAGSARXEEGREAGSMQLRRKTNFNQILVYVKDIRGACIHVCRPLGMLEKQXSVELNTARLTAYNHNLDTKRKEYMLIHTTRTYAELQHTSTXTRDAWNNECAGGISGLGEAKDDRVCLVHTLITLPTQTERVPINA

SEQ ID NO: 160149 - protein, 236 aa, Glycine max
  Clone ID: PAT_MRT3847_115633C.1.pep
MYSVASTSLTSPLLHDLENFHYSRRLLLHSPYLNQSAKPPRSSHDSSTETYLGDGNFDANVVMVLSVLLCALICSLGLNSIIRCALRCSNFVVSDSVATNNNNNNPPAARVANTGVKKKALKTFTTVSYSAELNLPSLDSECVICLSEFTSGEKVRILPKCNHGFHIRCIDKWLSSHSSCPKCRQCLIETCQKIVGCSTQQASSSQQHVLAVPETIVTIIAPLEPEGLVRNYRELS

SEQ ID NO: 160150 - protein, 70 aa, Glycine max
  Clone ID: PAT_MRT3847_115634C.1.pep
CWHIEDSANNANFGSFFHASSWDKATDLAVSHATEAHCFWLLASYFIIFVSFNTIHSEKYGRSTASMGMI

SEQ ID NO: 160151 - protein, 61 aa, Glycine max
  Clone ID: PAT_MRT3847_115635C.1.pep
KLLPTLKQTLKITKTTYLHYSKTKFSNNKKNKNLVEMPLNITVYNCINYFLISYILISLFT

SEQ ID NO: 160152 - protein, 39 aa, Glycine max
  Clone ID: PAT_MRT3847_115636C.1.pep
LDQMPRRFYLAGNEYQEFRKDHQQQQGGSLSLTGKQQEE

SEQ ID NO: 160153 - protein, 212 aa, Glycine max
  Clone ID: PAT_MRT3847_115637C.1.pep
MNIFTKKPTAKEALRESKREMTNASRGIEKEIGALQSEEKKLVAEIKRTAKTGNEAATKILARQLIRLRQQIANLQGSRAQMRGIATHTQAMHAHSSVAVGLKGATKAMAAMNKKMEPAKQAKIIQDFQKQSAQMDMTTEMMSDAIDDALDNDEAEEETEELTNQVLDEIGVDVASQLSAAPKGRVATKNAENDSSSGIEELEKRLAALRNP

SEQ ID NO: 160154 - protein, 151 aa, Glycine max
  Clone ID: PAT_MRT3847_115638C.1.pep
PVMQWLEESRIMQGEIQQLKDKLAISERTARAESQLKDKLKLRLRTLEEGLKHFSNNPVSSNSGSAKSEKYKTISFLSTNGGVRNRCTSQPRGSTNGSSLFQKSNAKSNTESVTESLIPGSIMKKKYGTAENVLKKGIWASRHKVADSDEK

SEQ ID NO: 160155 - protein, 171 aa, Glycine max
  Clone ID: PAT_MRT3847_115639C.1.pep
EKTGKIKIQESFTSEEERIRMKQEQERIQAKTREFRERQARERDYAEIQDFHRTFGCDDELMYGGVSSYEGSMALNARPQSPREGHMMDALYAQVKKPRNSKPSPVDSNRSTPSTHDRIQRLRQEFQQAKQDEDVEDRRRTYSCEQPWPNARPATQSGRHSVSGEVQMQRQ

SEQ ID NO: 160156 - protein, 56 aa, Glycine max
  Clone ID: PAT_MRT3847_11563C.1.pep
NANCCCLLGYTSSNRGTWFCSLVSRKRNHSKEAFVVNCTIAINKFPFFAQFLHKPC

SEQ ID NO: 160157 - protein, 53 aa, Glycine max
  Clone ID: PAT_MRT3847_115640C.1.pep
NTLTQQTQTQSSIKTTTISKLHKLISNTLKLSSFKLWALNLVHFSKVVFLLQL

SEQ ID NO: 160158 - protein, 182 aa, Glycine max
  Clone ID: PAT_MRT3847_115641C.1.pep
MEESENQRRMEPPKIQRLSESVVNRIAAGEVIQRPVSAVKELVENSLDAASSSVSLLIKDGGLKLIQVSDDGHGIRFEDLPILCERHTTSKLSSFEDLQRIKSMGFRGEALASMTYVAHVTVTTITKPQLHGYRVSYRDGVMEHQPRPCAAVKGTQIMVENLFYNMAARRKTLQNSSDDYSK

SEQ ID NO: 160159 - protein, 37 aa, Glycine max
  Clone ID: PAT_MRT3847_115642C.1.pep
FWKIKDMELLYSVFISILHHDKVITLVLSLPARQKTN

SEQ ID NO: 160160 - protein, 63 aa, Glycine max
  Clone ID: PAT_MRT3847_115643C.1.pep
TEGLILEKSKFCRQWRFGLLDQNRSKNFMVWPEARSEVSLSRRGSCRKMGLVGIRDRAASYTR

SEQ ID NO: 160161 - protein, 191 aa, Glycine max
  Clone ID: PAT_MRT3847_115644C.1.pep
AQFASTTLQIFVITMKNNNKEQQGKGAASYLKLFSAQLDLLNLFSHALVFGIGLLIGVTLTFFVKNFSLINFPIQKFSFSSNSLMIKPPTSLSPSHPIISNISLLTSNNQTKNESQYLEGLVVSDSRLRHHDKTKPSSSDSSSINRKRVMNFNRVGLREFLKPPMAMHDMSDEELLWRASMVPMVHKLPFK

SEQ ID NO: 160162 - protein, 99 aa, Glycine max
  Clone ID: PAT_MRT3847_115645C.1.pep
KKNFTPVFFPIWPPGGAPVWGFFFQTQPGPHRLGWAPFVFGANPRGQGAPPITGMGSPPGNHLGGGPLLGWKRNPFLSALPSCSPGVPGFPTPNGGGGG

SEQ ID NO: 160163 - protein, 106 aa, Glycine max
  Clone ID: PAT_MRT3847_115646C.1.pep
VLQALPDSNMGWVLDLSNMDLQYVTSSQDNAHRWVRDNVINYWNVRVRHITVAKEKKPCDSFSQFVWPAMQNIQRALSKAGLGNQMKGATALESGALAGSYPPSRG

SEQ ID NO: 160164 - protein, 70 aa, Glycine max
  Clone ID: PAT_MRT3847_115647C.1.pep
CSLHTRPRGKTEKFPTFLLLLCGKGMLQYFYQQKSMIDKHSKTIEFYNLQLMKNTKTQKKKRAAARDLEL

SEQ ID NO: 160165 - protein, 419 aa, Glycine max
  Clone ID: PAT_MRT3847_115648C.1.pep
MANNSQPSSMQFRPVIQAQQGQPFVPMNSQQFGPAGHAIPSSNAGMPVIQGQQLQYSQPMQQLTPRPMQPGHPVPSSQAIPMQYIQTNRPLTSIPTHSQQTVPPFSNHMPGLAVSVAAPHSSYFTLSYGQQQDNANALAQYQHRPQMFASPAGQSWPSSASQSVAAVTSVQSAGVQSSGAASTDTVTNATNQQSLSDWQEHTSADGRRYYYNKRTRQSSWEKPLELMSPIERADASTVWKEFTSEGRKYYYNKVTQQSTWSIPEELKLAREQAQKAANQGMQSETNDTSNAAVSSTATPTPTPTAVNAASLNTSLTSNHSNGLASSPSSVTPIAATDSQRSVSGLSGSSVSHSMATPSTTGVEPSTVVTTSAAPTIVAGSSGLAENSPQQPKMPPLVENQASQDFASANGSSLQDIEEA

SEQ ID NO: 160166 - protein, 53 aa, Glycine max
  Clone ID: PAT_MRT3847_115649C.1.pep
SRLMNTSSVFVNQLLVSNDDNNQIILHAFNYVPYLSSQTNLTVSNYFLVESYK

SEQ ID NO: 160167 - protein, 110 aa, Glycine max
  Clone ID: PAT_MRT3847_11564C.1.pep
PAYYYQRSSTGNQVRPATEANKSVPLQAKHAQQQCGVNAKMAPDIAINIDTNPFFMTRAGVNKLEQGDQIAIETNMLQPKAHQYGGIGAAAGATAHRKVGPVQYGMTRMF

SEQ ID NO: 160168 - protein, 120 aa, Glycine max
  Clone ID: PAT_MRT3847_115650C.1.pep
EKAEKPDKKEQKPAAKKAGGDATAPRARPAGAVKKSSSKAKKLRKSKPHCSRNPVLVRGIGRYSRSAMYSRKALYKRKYSAAKTKVEKKKKKEKVLATVTKTVGGDKNGGTRMAKLRIMP

SEQ ID NO: 160169 - protein, 166 aa, Glycine max
  unsure (1)..(166): unsure at all Xaa locations
  Clone ID: PAT_MRT3847_115651C.1.pep
SGYVMPIGELPEGTTVCNLEEKAGDRGRLARTSGNYAIIVAHNPDTKRTRIRLPSGAKKGAFXSANRAMIWHLLLXGGXQRTIPLLKAGRAYHKYKVKRNCWPKVRGVAMNPVEHSHGGGNHQHIGHPSTVKRGTSAGRKVGLDRRRRTGRIRGGKPEKRXKDEAV

SEQ ID NO: 160170 - protein, 112 aa, Glycine max
  unsure (1)..(112): unsure at all Xaa locations
  Clone ID: PAT_MRT3847_115652C.1.pep
PRKFHSNAWLSDFFEIQATFKYSEGNAFFSTARGKKYPSIVILGRAHKIEALWVKSFKAPLAKVAIEVVQGTPVFFIKEARNSGSPXNGQKVRDILISRXKPAFGGTAGKGR

SEQ ID NO: 160171 - protein, 137 aa, Glycine max
  Clone ID: PAT_MRT3847_115653C.1.pep
FKILITSILALVVCALFYEFRRTLCGNTNKICNAPQAPRAWPIIGHLHLLNGHQLTHKTLGMMAEKHGPIFTIKLGSYTDLVLTKWEMATECFTVHDKAFSTIPCVADSKLMGYNYTMFGFTPYESYWREVRKLTTI

SEQ ID NO: 160172 - protein, 204 aa, Glycine max
  Clone ID: PAT_MRT3847_115654C.1.pep
MNGGSASSNLRAALSHCVQQVRSYDYHHYLCLLELPPSMRKAAFALRALNVETARAMDVASDPRIGLMRLVWWQEAIDKMFANKLIEHPTAQALSSVIAETKLSKIWLKRSVDARINDARREVTDMPKTIGELEKYAEDTVSTMLYLTLQAGGIKSTAADHAASHIGKASGILLLLKSLPYHASHNRHFSYIPTAIASKHGLIV

SEQ ID NO: 160173 - protein, 107 aa, Glycine max
  Clone ID: PAT_MRT3847_115655C.1.pep
EFPSTHASGQVGPPTYHCDEQEFKTNLSGWPTKIINIEIPSTRAFDAYPSFSEIPEANLSSMECGLPTQLSFSAREISDGTFFKAIEDYDPDSKRLLYLLEKLVLSH

SEQ ID NO: 160174 - protein, 47 aa, Glycine max
  Clone ID: PAT_MRT3847_115656C.1.pep
MCTSKGVLVLALRHNGLRRTKQREVSKLLLIQSSCVCCIVDCCIVIE

SEQ ID NO: 160175 - protein, 59 aa, Glycine max
  Clone ID: PAT_MRT3847_115657C.1.pep
RLFQLCSCKNNKIHKCARLKRAANRQSEVTLVIQFTRDTLVDQPIKRRGYSFSVEVSCI

SEQ ID NO: 160176 - protein, 272 aa, Glycine max
  Clone ID: PAT_MRT3847_115658C.1.pep
MGSDTWFSFCKKIIMGAVCSAGMVEKNGELGGKSLGLSGKLKKENSFVNRREAFSDSRSNSGHSRKQKKHDTGFSHELGLSSPSPGGKQVSQRGSILGKAGERAVEVLDTIGSGMPKLNTNSGFVSGTTSRGNKISILAFEVANTITKGTILFQSLSEENIQFLKNEVLQSEGVQLLVSTDVKKLIALAEADKREELNVFSREVTRFGNMCKDPQWHNLDRYFSRLDFDVLDDKRYQEDAEKTMQEFTSLVRNTAELYHELNAYERFEQDYL

SEQ ID NO: 160177 - protein, 201 aa, Glycine max
  Clone ID: PAT_MRT3847_115659C.1.pep
MVVEVWSKEGDIIENLPKVRDGKERSRRPEDIIDEVRELAREGYQEITLLGQNVNSYGKDIEGLDYELGDLLEDISKIDIPRVRFTTSHPWDFTDRMIEVIAKGGNIVPHIHLPEAIPNVALTTDIIVGYPNETEEQFEETLSLYDDVQFEHAYTYLYSQRDGTPAAKMKDNVPLEVKKERLQRLNKKVGIYSQQAMSQYE

SEQ ID NO: 160178 - protein, 84 aa, Glycine max
  Clone ID: PAT_MRT3847_11565C.1.pep
LDPCRLAPSVAPYEPLVVLPKRSLWWPPFGHRGVLGVRSFLYEAPPGLLGPSPRVRVCPAWCDKMVEFLYKIPAADGPAPRSNE

SEQ ID NO: 160179 - protein, 59 aa, Glycine max
  unsure (1)..(59): unsure at all Xaa locations
  Clone ID: PAT_MRT3847_115660C.1.pep
EGVRFKAASEILVMGGRLRGWAAGTRVGRSFGRVAPAFYKSAPNXDASIKKKESGAKAV

SEQ ID NO: 160180 - protein, 85 aa, Glycine max
  Clone ID: PAT_MRT3847_115661C.1.pep
EYIRHQIIVEAMSSKVILMMPKNQELSAKIQESSFKFQDSRLIKIKIQDSKIQESREDLIKISIKKFFKILSSTRSFHKIIYQRV

SEQ ID NO: 160181 - protein, 63 aa, Glycine max
  Clone ID: PAT_MRT3847_115662C.1.pep
LGGIVCPLNVDVFMPLMSKYSHLLPKKMLGCFAPSPLEVKKVLYALSRGFVPLIHERSCDVSL

SEQ ID NO: 160182 - protein, 93 aa, Glycine max
  Clone ID: PAT_MRT3847_115663C.1.pep
MAERHYQRQHQYPVRYRHDPHQQTRSFAHQSRQADTVHTMGRYLLILDMIILDATVIALTIDTPLLVITSPGMVPGRITVAVLSLWFLASNRL

SEQ ID NO: 160183 - protein, 67 aa, Glycine max
  Clone ID: PAT_MRT3847_115664C.1.pep
KAQITESSSQGSVSLLTASPSTPSSCASCQYRGSVMYLILFSCTILSDKSANWITLLQICSTSTLRG

SEQ ID NO: 160184 - protein, 120 aa, Glycine max
  Clone ID: PAT_MRT3847_115665C.1.pep
QKMGMLGCLLCIVGSTVIVLHAPEEKSLSSVQEIWELAIQPAFLSYTASAIAVTLFLVLYCAPRHGQTNILVYTGICSIVGSLTVMSVKAVGIAIKLTLEGANQAFHFQAWVFAMVSVTC

SEQ ID NO: 160185 - protein, 61 aa, Glycine max
  unsure (1)..(61): unsure at all Xaa locations
  Clone ID: PAT_MRT3847_115666C.1.pep
SLWVPFTTGELHPARKLCVSMYXIAMVFDNFFAKTSTNVTAVFMCLHECNGAMWSGQDHSP

SEQ ID NO: 160186 - protein, 473 aa, Glycine max
  unsure (1)..(473): unsure at all Xaa locations
  Clone ID: PAT_MRT3847_115667C.1.pep
HSTQTTSLTSGAFIECPFAGTYINSWTPLPGNSQMPPFKRSHSHTDAMSGMFHKGVRCDGCGVYPITGPRFKSKVKENYDLCNICFNEMGNGTDYIRMDRPASARAPRYLHGHTKNFPTLPPHIFKKGAILKHAKPKLDSRFILDVNVIDGTMMAPSTAFTKIWRMRNNGTIVWHKGTQLVWIGGDKFSDSHSVDLEVPEDGVPLEKELDIAVDFTAPPLPGRYISYWRMTTPSGHKFGQRVWVLIQVDASLQDSFYDTSQGLNLNIPLDISGSKGPQIIDINVQPTEEDTVLQTRNPNAPIEPVNQMVDNEPRFELENEFPINEATFVGPAASAPAATPVASSSVSYPIIDLSETTPAVPSNQQSSTVDVPSSSMGTGGINSVEESLLKELEEMGFKQVDLNKEILRNNEYDLYQSLDFLCGVSEWXGTIHLLAELREMGSRDXMNKRLLEKNNGSLKRVVMDLINGEQYFS

SEQ ID NO: 160187 - protein, 86 aa, Glycine max
  unsure (1)..(86): unsure at all Xaa locations
  Clone ID: PAT_MRT3847_115668C.1.pep
MDGMGELVREVGEYSGXLLDEGFVEXEFEEVEELLDECRXDFVVEGGGLFFEDVERVXNEXRKRVGELRIEFKRLDGDVXKLKGXX

SEQ ID NO: 160188 - protein, 59 aa, Glycine max
  unsure (1)..(59): unsure at all Xaa locations
  Clone ID: PAT_MRT3847_115669C.1.pep
RMCDLYQCNQKTRSTNEITNAQXKPITTASTLXDDCHSSEMTLYLQLNLHLYIPQSTDY

SEQ ID NO: 160189 - protein, 112 aa, Glycine max
  Clone ID: PAT_MRT3847_11566C.1.pep
MSLDHMYPTNHYQRSTSGKQERSATEADKGVSLQSKLAKQCGVNVKIAPEIAINIDTNPFFMTRAGINKIEQDDRIAIETKLLQSKAHQYGGISTTAHRKVGPVQYGMTRLL

SEQ ID NO: 160190 - protein, 63 aa, Glycine max
  unsure (1)..(63): unsure at all Xaa locations
  Clone ID: PAT_MRT3847_115670C.1.pep
LCTIGFRAHINYXXTXEAGPNCXASXXXLXXXAXLHXLLVCXHQIASAPKSRYXAXDSTTXKC

SEQ ID NO: 160191 - protein, 145 aa, Glycine max
  unsure (1)..(145): unsure at all Xaa locations
  Clone ID: PAT_MRT3847_115671C.1.pep
AINVFGKSTLIGLALTFFGGLCILMVAPAXNISSHDQWDTLEKGGTHMTDYTGFFYFPISLFXIAVILNITLVYHPVLNLPMLXFKAYLADSDGIGSAMXAGLPLGLGNGLQFMGAHAPGYAAADAVQALALVSTFWCVILFGQS

SEQ ID NO: 160192 - protein, 131 aa, Glycine max
  unsure (1)..(131): unsure at all Xaa locations
  Clone ID: PAT_MRT3847_115672C.1.pep
RKKKKGPWDLVFGEANKANSLTSPQRVLKLXKIGGLFGFKPPPWGGSGAAPPEAPLMDSINPLRGHVMEPTKYWAQNSRIEISPPPRGKGIPRGPRNIGPFSLHQDFSSQKSLSLKQVGGRGEFPNVPRSF

SEQ ID NO: 160193 - protein, 119 aa, Glycine max
  Clone ID: PAT_MRT3847_115673C.1.pep
KKKKIGAPVFGVHMFVSRCFPRQKPFFCVPSILFSWPGFSKCLVLGAPCSPPFFRLLHNCPFPLCVPYQNGPPPLSFQNFALFVCLLGPPFFGSFNPVGWGGSRPRAPLFCDPLKLRSF

SEQ ID NO: 160194 - protein, 55 aa, Glycine max
  Clone ID: PAT_MRT3847_115674C.1.pep
MCNMIPTPIPIFTTPTFLSYLLIFLSFISFVFLPLVYSKNRVFIDHLPFLSMINT

SEQ ID NO: 160195 - protein, 52 aa, Glycine max
  Clone ID: PAT_MRT3847_115675C.1.pep
MNDLFSSSFKKYSDLKEQSHIDDVEAGKESVNLDKFFDEVENVKEDMRLVEK

SEQ ID NO: 160196 - protein, 74 aa, Glycine max
  Clone ID: PAT_MRT3847_115676C.1.pep
SLTGAATPMYTYTGRIRNNNLLLGGGRNSLLNSLNLKLGGTKMGRVPIANKGLCLQVLIRLGRSRWGRSPVWPH

SEQ ID NO: 160197 - protein, 83 aa, Glycine max
  Clone ID: PAT_MRT3847_115677C.1.pep
HNANSQFVCTSRQWRLSIIAHRLQSCSHLVCYRPLTVRYSLQHICVLVETVLAHKLQHPQANLEHYEHSICMSAPLQRNFLTK

SEQ ID NO: 160198 - protein, 51 aa, Glycine max
  Clone ID: PAT_MRT3847_115678C.1.pep
NIGLSSPHVSAQTVFLSCQLALAALVAQHKQQNAFSLHLPVSNIESQSALF

SEQ ID NO: 160199 - protein, 110 aa, Glycine max
  Clone ID: PAT_MRT3847_115679C.1.pep
KFLIIRQTRSTPLNLQWGSLDFILRQRSGIRGKFFFCFSTSSLNNASTFLLSKWNFVFSSPKKVLTGDVPASFGGIGIQNFPFCVPPKFGAKKNGGLISHYKIVRFLVVP

SEQ ID NO: 160200 - protein, 61 aa, Glycine max
  Clone ID: PAT_MRT3847_11567C.1.pep
GNKYNFTIREAFCYEINTFPFSQNTQFSLLCFSSISFLLIFSIFLGEFLDEFVCVIQVYIA

SEQ ID NO: 160201 - protein, 56 aa, Glycine max
  Clone ID: PAT_MRT3847_115680C.1.pep
PDLGQGDLVHKAPYDMKGTVRGKVGLSAVDHEDNVILRPAKKDHGSGRNFPCHNLK

SEQ ID NO: 160202 - protein, 102 aa, Glycine max
  Clone ID: PAT_MRT3847_115681C.1.pep
MVEAISNQLHQLTCKRYYASINLGHGYRERHHHTCHQDRLKDLMFLQQHGTLAEFNNAFDVISCKLHLSEDYLVDAYLAGLQEEYADPIHLFKPPRTIKDTL

SEQ ID NO: 160203 - protein, 74 aa, Glycine max
  Clone ID: PAT_MRT3847_115682C.1.pep
DKANKWISYKYDLDLGFTVCNRGHMNNLYSIEVGHIIHCSGSPTRKEVRKSINLPNHPWILEYGRRFIAVSVDL

SEQ ID NO: 160204 - protein, 63 aa, Glycine max
  Clone ID: PAT_MRT3847_115683C.1.pep
TYYIVRQNTSASLFKKKNERCPLHIYLEQLFFILARRAAIKLPWDSVRGNTWLVCSHMSRCNR

SEQ ID NO: 160205 - protein, 67 aa, Glycine max
  unsure (1)..(67): unsure at all Xaa locations
  Clone ID: PAT_MRT3847_115684C.1.pep
MASILHYFLALSLSCSSLIFLSDSVTATXPICLVVLPVRNDRSTVLHCGCLPERTPLMLVPVLVDLN

SEQ ID NO: 160206 - protein, 165 aa, Glycine max
  unsure (1)..(165): unsure at all Xaa locations
  Clone ID: PAT_MRT3847_115685C.1.pep
FFWVGPXFFWVLXPLPRWPGPCLPGPVAWCLSAVXLGXXFRWRLRXGFVLLPLCPGGGVSXWXSGRFXCRGRVFLSVPLRVWXLPVCRGFPFXGSXFCSRXXPCSFFFVAVSCASPFFAWLXPRVXGWVLALGGRCFFFPPXPLGRGFCCLGTLKSFFXXXGRPL

SEQ ID NO: 160207 - protein, 46 aa, Glycine max
  Clone ID: PAT_MRT3847_115686C.1.pep
VFYLDSLLGYQIEYWFIAYKILLNCETGSTNHEFLFYSKSLCGFVA

SEQ ID NO: 160208 - protein, 80 aa, Glycine max
  Clone ID: PAT_MRT3847_115687C.1.pep
KTSKKYKGFLFNILSPLIFHHFSPSLKANHSSILIGKRKLFLYTGKECVVNSFSYFENSNMLSGFVGKSSVGSKQGKIMF

SEQ ID NO: 160209 - protein, 99 aa, Glycine max
  Clone ID: PAT_MRT3847_115688C.1.pep
PRHVRLYFQLLQLAPYKRRLTTVTPTNTHSIYLPTIRTNLCYSPAIRQHWLFPGVVGSLLLLPIKPLLRVMAPACEFNRTNPELSCLYLSSSYPIKATL

SEQ ID NO: 160210 - protein, 79 aa, Glycine max
  Clone ID: PAT_MRT3847_115689C.1.pep
MAPLLQCSMPLLYLSNQALVPLTSISNPTSVSLSINVRTFPYFTLHPKGLPFQLRCAAKPDTVKNVCDIFKKQLPLPHE

SEQ ID NO: 160211 - protein, 182 aa, Glycine max
  Clone ID: PAT_MRT3847_11568C.1.pep
MASAEVEFRCFVGGLAWATDHDALEKAFSQFGEIVESKVINDRETGRSRGFGFVTFATEQAMRDAIEGMNGQNLDGRNITVNEAQSRGKGGGGGGGGYGGGGGGYGGGGGYSRGGGGYGGGGGRREGGYNRNGGGGGYGGGGGGYGGGGGYGGGGRDRGYGGDGGSRYSRGGGGSDGGSWRN

SEQ ID NO: 160212 - protein, 68 aa, Glycine max
  Clone ID: PAT_MRT3847_115690C.1.pep
AGGTYCYDAIAPHEQKANAATMDPEAPSTRERELLCNHGGPSSAASRDTRRSTKLPTTWRKSTINSPT

SEQ ID NO: 160213 - protein, 58 aa, Glycine max
  Clone ID: PAT_MRT3847_115691C.1.pep
SLCEYTAVEDILLAPKPKNLHFAHAASLPLAIETAYEALERTGFSPGKSILVLNAPGA

SEQ ID NO: 160214 - protein, 166 aa, Glycine max
  Clone ID: PAT_MRT3847_115692C.1.pep
MPPKFDPSQVVDVFVRVTGGEVGAASSLAPKIGPLGLSPKKIGEDIAKETAKDWKGLRVTVKLTVQNRQAKVTVVPSAAALVIKALKEPERDRKKTKNIKHNGNISLDDVVEIARVMSPRSMAKDLSGTIKEILGTCVSVGCTVDGKDPKDLQQEISDGDVEVPLH

SEQ ID NO: 160215 - protein, 89 aa, Glycine max
  Clone ID: PAT_MRT3847_115693C.1.pep
MLHTLIFLVGETYCVPLEIPITGIDSEKSWLMSQLKFEKKFGQSAVFIASTLMEDGGILKGATCASLLKEAIHVISCGYEDKTEWGKEV

SEQ ID NO: 160216 - protein, 70 aa, Glycine max
  Clone ID: PAT_MRT3847_115694C.1.pep
MSRCFPFPPPGYGKKAITDEVDLLEKEKQKEKKHKKDKKDKEKRESKEKREKEGRDGKHKEKKDKKEKHR

SEQ ID NO: 160217 - protein, 95 aa, Glycine max
  unsure (1)..(95): unsure at all Xaa locations
  Clone ID: PAT_MRT3847_115695C.1.pep
GHKNYELMVNLQLGMRHAVGRPAPSTYLDLTSSAFEPKEKVRALFSPEGSKHTPPNQSCEFRWXDYCPVLFRALRELLKGDPADYMLSLCGNDAL

SEQ ID NO: 160218 - protein, 108 aa, Glycine max
  Clone ID: PAT_MRT3847_115696C.1.pep
TFFPHVSHSSIHSHITVVHEVAEAIAPYTFPSQYGVKQGKSLTVLFNLPKPLKNSSNLVDLAGSYLCRHACLKTRRKWIQEHTRPTVFTFYITNSISTSKLLRCWKKL

SEQ ID NO: 160219 - protein, 201 aa, Glycine max
  Clone ID: PAT_MRT3847_115697C.1.pep
FLVLKFTPLLQSLGEVIDVSMLHVKPGEAVAVHWLQHSLYDATGPDWKTLKLLEELEPRIITLVEQDVNHGGSFLDRFVASLHYYSTLFDSLGAYLHNDDSNRHRVEHGLLSREINNVLAIGGPKRSGEDNFRQWRSELARHCFVKQVPLSDNSMAQAQLILNMFSPAYGYSLAQVEGTLRLGWKDTSLYTASAWTCCNSS

SEQ ID NO: 160220 - protein, 37 aa, Glycine max
  unsure (1)..(37): unsure at all Xaa locations
  Clone ID: PAT_MRT3847_115698C.1.pep
SLSLLSQNQISNVYNFECIVINAGQMRSXXITRVPLP

SEQ ID NO: 160221 - protein, 63 aa, Glycine max
  Clone ID: PAT_MRT3847_115699C.1.pep
LALKTHNIFSLKTITEELVVATNENNNGQHYILLSIAGNRQPYYSVGLPEYDAMDTFVVIIVG

SEQ ID NO: 160222 - protein, 155 aa, Glycine max
  Clone ID: PAT_MRT3847_11569C.1.pep
LVHKVEESDKLADIKVAAASAQVEAAKASENKVLKRLEETQKEIEDMKSETQAALKRAEMAEAAKRAVEGELRKWREREQKKAAEAASQILAETLISPELSPQHYRIQIQNSPPNRVEMKKLEKGKVSVSKKVLLHNISGIFHRKRNHVEGESSS

SEQ ID NO: 160223 - protein, 53 aa, Glycine max
  Clone ID: PAT_MRT3847_1156C.1.pep
HSHQPHNIQHKIMIRFINIIKDELVVDRGHRVATQGTRPSVVFSQPSRAEFRA

SEQ ID NO: 160224 - protein, 122 aa, Glycine max
  Clone ID: PAT_MRT3847_115700C.1.pep
KGRKSWEQLRLKQGLKRAQREMARLLELVRRAFGGRRVDCTYRRRRVAEIQDTRLLGMDRALQGAPNLGLPEEKTAAAAGDGGGRWQRRKQSERDCTCSDTMLKIKGYIVEGFEIHIVLEKC

SEQ ID NO: 160225 - protein, 43 aa, Glycine max
  Clone ID: PAT_MRT3847_115701C.1.pep
EFWFKPSELVENRFLPHPRVAGTSIIEARRLVIIFLDVALTFS

SEQ ID NO: 160226 - protein, 60 aa, Glycine max
  Clone ID: PAT_MRT3847_115702C.1.pep
SSAWPIESSHFSKLFFSLSKLNKKTKKVHVFFGFGFGFVPSSFSGRTWEFLASCFYFIPT

SEQ ID NO: 160227 - protein, 60 aa, Glycine max
  unsure (1)..(60): unsure at all Xaa locations
  Clone ID: PAT_MRT3847_115703C.1.pep
XGXVXLKMXNDLGKVRNVNKVSDTTFXVLARLGKQIALKFXSXIRKLVTXXNTXCRAAXC

SEQ ID NO: 160228 - protein, 116 aa, Glycine max
  Clone ID: PAT_MRT3847_115704C.1.pep
RPSVRAILHLTQNHFCHKLFFANQTVRVKKNPDLPLRFRSDGTFKILQVADMHYGTGTSVTRCRDVLASEFEFCSDLNTTRFLKRIILAENPDFLAFTGTSLINPPRFFTSTVKVA

SEQ ID NO: 160229 - protein, 112 aa, Glycine max
  Clone ID: PAT_MRT3847_115705C.1.pep
GRSSFKGLLRGWKKGPLQDPFDKGLLFAPGFPPLVEKNASGEKAFFADSGGGPQKLFELGVVKPKTTFWGLLERPGAPKIFSKNFRGGGFKGPRGVPQIFKKLLNGFSGAGE

SEQ ID NO: 160230 - protein, 58 aa, Glycine max
  Clone ID: PAT_MRT3847_115706C.1.pep
HPVLHMIQNSSKYKHLIISKKYHFWKLERRALNIPCGRHPKLHGICIFNRMSRIHWPC

SEQ ID NO: 160231 - protein, 65 aa, Glycine max
  Clone ID: PAT_MRT3847_115707C.1.pep
ASLSDSDLSNVSHSLCVLSQQHVTCVVSCVCVCISQEKTRKGLTWAEKELQFYGVIKIIKEGRFV

SEQ ID NO: 160232 - protein, 64 aa, Glycine max
  unsure (1)..(64): unsure at all Xaa locations
  Clone ID: PAT_MRT3847_115708C.1.pep
VSGDHWNHVNDEDAFGYANPKEGXEKVLVICLTMNDKLIAYAFYPRFSESICLKTDDADYAGHD

SEQ ID NO: 160233 - protein, 128 aa, Glycine max
  unsure (1)..(128): unsure at all Xaa locations
  Clone ID: PAT_MRT3847_115709C.1.pep
MDNSSSEQTVQDGKLYRNLNSLIVAHLRDNSLTQAASAVASATMTPLNVEAPPNRLLDLVAKGLAVEKGDITRGTGFTATLPLPHTTAIDFSSVPXCEGSSKXLPKHETRHLFRHKNXARCAXVSADG

SEQ ID NO: 160234 - protein, 66 aa, Glycine max
  Clone ID: PAT_MRT3847_11570C.1.pep
YVDMAVVYHKNFFRKYSSSQNKNYHHHHPYEHLCIFSLSPFSMNDFPDLRIIIVIWRVMLILAVIQ

SEQ ID NO: 160235 - protein, 66 aa, Glycine max
  unsure (1)..(66): unsure at all Xaa locations
  Clone ID: PAT_MRT3847_115710C.1.pep
MAERGGGDRGGDRGGFGPCFGGGGEGGHGGXARRPGAGRVNPEPWVALTKLARHLKEADHRALEQI

SEQ ID NO: 160236 - protein, 69 aa, Glycine max; identical to SEQ ID NO: 157625
  Clone ID: PAT_MRT3847_115711C.1.pep

SEQ ID NO: 160237 - protein, 92 aa, Glycine max
  Clone ID: PAT_MRT3847_115712C.1.pep
RLFFFRPWLAALAVLLFALRLVSGILFIFRPGLLRGSPLAPLVLVSLFCLVILSSGSAGGVLGVVCLMAPSRSGSPVGFTLVGTVQALSPPR

SEQ ID NO: 160238 - protein, 370 aa, Glycine max
  Clone ID: PAT_MRT3847_115713C.1.pep
MVQISVSVVSLYRHPVPMALLAVTSRAPFLFSPNPKPLSPSSFYSHLSLSPRSPRFPSLRFRSATGDASDAGKPAGKISDEWGEDYDPEAEALTSKLPDSDPPKDEDEWQEGGAPDAGGYVDGGNGTPVTGAEDPAEEEVDDKLEALKRALVDTLYGTELGIRAGSEVRAEVSELVSQLEAANPTLAPVEEPALLNGNWVLLYTASSELLPLLAAGRLPLLKVDKITQTIDTSSSTIINSTTLSSPFASLSFSASASFEVRTPTRIQVTFKEGSIQPPEIKSNVELPENVDIFGQKLSLQPLQQSLGPLQGLVENISRVISGQPPLKIPIPGERTSSWLLTTYLDKDLRISRGDGGLFVLAREGSPLLDQ

SEQ ID NO: 160239 - protein, 88 aa, Glycine max
  Clone ID: PAT_MRT3847_115714C.1.pep
RLREDDRRDHYLLHLLWTCTIAQPAAICAYNSSGTMSTRGLLDLPSVRTRPLKFMRMWEIFSDDKDLTSSEIAYYWDVISEEILEGEM

SEQ ID NO: 160240 - protein, 66 aa, Glycine max
  unsure (1)..(66): unsure at all Xaa locations
  Clone ID: PAT_MRT3847_115715C.1.pep
MASIAVLLLAMCVLPAIIVAIHPANNPFCLKGHVYXYPCLADFDTLSTTYFTCSDIMLQCNSIISN

SEQ ID NO: 160241 - protein, 80 aa, Glycine max
  Clone ID: PAT_MRT3847_115716C.1.pep
RADMSFWGSVSSPCKGQVGNSSQYFDFSDIYNCRTTISLLNCSILYGIQSLELFRVGASAACMPYILFWSQLYGQFAILC

SEQ ID NO: 160242 - protein, 58 aa, Glycine max
  Clone ID: PAT_MRT3847_115717C.1.pep
GVGFDFFFFLFFVLFLGKKKNGGGYFFFGAMTCFHLPKKRPIVVDCLTKLFVGRGGSS

SEQ ID NO: 160243 - protein, 220 aa, Glycine max
  Clone ID: PAT_MRT3847_115718C.1.pep
METLHPSSPPSHPKLDTNIHVEVADFSGGACVDEGDDSLWGALWPKPQSSITIIPTTTSTKIIESPDLPLASINKIHNEYAIDSLDVGFRDALHVVSQHRPLPLGSSLSQTLASLPRPLYLPPSPPPPYPPPPRRTVHRSQLSLPLVASSSSDHATTASSLQFGELPSWPAPIGAEVRATSASKSHNQAKKRHKEFDSIVRIEEHKNQQGEVTDRERTNV

SEQ ID NO: 160244 - protein, 179 aa, Glycine max
  Clone ID: PAT_MRT3847_115719C.1.pep
MTTLRVINIVNGEKATKGAHQIEEMMLLLHGQKKKKQQEGVKVVNDELPGGGGSSGFGGGCGFNGTVVVVDMVVGVMVADIVVVEVRQGFGKGRSQGAEDGVARQHAGHHETRPHVRRKMVTIMDLVDARKRQVRALYDFGARGGGESSPSSTHAPPLKSATSTWIFVSSFGCEGGDDG

SEQ ID NO: 160245 - protein, 85 aa, Glycine max
  Clone ID: PAT_MRT3847_11571C.1.pep
FESWCTGRGDKRGEKKHGARILVPKLWENLHDAHGAQSRRSEGTPRCKWNLSTDCVARGRCRGRIMWFTVYGTAPLLLGRRARKT

SEQ ID NO: 160246 - protein, 91 aa, Glycine max
  unsure (1)..(91): unsure at all Xaa locations
  Clone ID: PAT_MRT3847_115720C.1.pep
GKGLGKGGAKGHRTVLRDNMQGITKPDVKRINGIFXEKTRKVLKIHRAHARRKMVTTMDVVDARKRKVRALYDFGARRGGYNRDGGVWLEP

SEQ ID NO: 160247 - protein, 156 aa, Glycine max
  Clone ID: PAT_MRT3847_115721C.1.pep
MSRRGTAEKRTAKSDPIFRNRLVNMVVNRIMKDGKKSLAYQILYRAVKKIQQKTETNPLLVLRQAIRRVTPNIGVKTRRNKKGSTRKVPIEIGSKQGRALAIRWLLEASQKRPGRNMAFKLSSELVDAAKGSGGAIRKKEATHRMAEANRALAHFR

SEQ ID NO: 160248 - protein, 233 aa, Glycine max
  Clone ID: PAT_MRT3847_115722C.1.pep
METLHPPSPPSHPKLETNIHVEVAHSSGGACVDEGDDSLWGALWLEPHSSITVIPTTTSTKIIESPDFPLASINNIHSEYAIDSLDVGFRDTLHVVSQHRSVPLGSSLSQTLASLPRPPYLPPSPPPPPRLYPLKPQPPPKPPLPPPPRLTRVCASLTVVFGCHGPSRTVHRSQISLPLVASSSSNHAPTTSSLQFGELPSWLAPIGAEVRAASASKSHSQAKIRHKDRINAL

SEQ ID NO: 160249 - protein, 173 aa, Glycine max
  Clone ID: PAT_MRT3847_115723C.1.pep
MILALIKVIKKRIPPFTLMSRRGTAEEKTAKSDPIYRNRLVNMLVNRILKHGKKSLAYQIIYRAMKKIQQKTETNPLSVLRQAIRGVTPDIAVKARRVGGSTHQVPVEIGSTQGKALAIRWLLGASRKRPGRNMAFKLSSELVDAAKGSGDAIRKKEETHRMAEANRAFAHFR

SEQ ID NO: 160250 - protein, 178 aa, Glycine max
  unsure (1)..(178): unsure at all Xaa locations
  Clone ID: PAT_MRT3847_115724C.1.pep
GKGLGKGGAKGHRTVLRDNMQGITKPDVKRIITKPGIKRISGIFXEKTRKVLKNFLENFICNVVTYTEHXARRKMVTTMDVVDARKRQVRALYDFGARGGTPQGVITFINARSSAKIWGFHLEYWGQVPGMDWGVLKREGVEIEGKNPVGGRIPFGGPTLVITLWWWLPSKGPTHDWP

SEQ ID NO: 160251 - protein, 68 aa, Glycine max
  Clone ID: PAT_MRT3847_115725C.1.pep
YRTAFYEIKLCVIRNVQGTYQVYILIPPLVWVKHQIQFYGITIQTKGDGGSLYRVRFPTQAYCLVVKE

SEQ ID NO: 160252 - protein, 62 aa, Glycine max
  Clone ID: PAT_MRT3847_115726C.1.pep
WCSNLWPCIWVIFYFGVTWRIYNPPPLFRVEKISCDMRILIIIYYRLGLIKNYVLILIFDLS

SEQ ID NO: 160253 - protein, 72 aa, Glycine max
  Clone ID: PAT_MRT3847_115727C.1.pep
VPQYDSSASPASAVELSSVSVPVFGLQFTLCQVFSKVVSMLSPRILSLLSSCIYSFLSTLLSLPLGSTRPSP

SEQ ID NO: 160254 - protein, 113 aa, Glycine max
  unsure (1)..(113): unsure at all Xaa locations
  Clone ID: PAT_MRT3847_115728C.1.pep
EEFESGNAREPSLLIRQRYREAAYLIKKGKMCALFMNHLDARTGRLAGTTQYSVNNHMVNASLMNIADNPSNVQLTGMYNMAXNARVPIIVTGNDRFTLYAHIIRDARIENST

SEQ ID NO: 160255 - protein, 47 aa, Glycine max
  Clone ID: PAT_MRT3847_115729C.1.pep
SSSTVCLHYGQSFFHTTAKIAAIEPFFSLLLLYPHPNPNQVLSVSFP

SEQ ID NO: 160256 - protein, 56 aa, Glycine max
  Clone ID: PAT_MRT3847_11572C.1.pep
AMHAAPMYIAETAPTPIRGQLKSLKEFFIVLGMVVGSCTFFGYLAVSTGFTYATTE

SEQ ID NO: 160257 - protein, 166 aa, Glycine max
  Clone ID: PAT_MRT3847_115730C.1.pep
IRLEEAFRLFEWMVCSGVVPDSVTLLALLVAYAHKGLVDEGIRLFESMDRDYGVEPRIEHYGAVIDMLGRAGRLQEAYDLLTNIPIPCNDAVWGALLGACRIHGDVEMGEKLIKKLLELKPDEGGYYILLRDIYVAAGQTVEANETRQAMLASRARKNPGCSWVEG

SEQ ID NO: 160258 - protein, 606 aa, Glycine max
  Clone ID: PAT_MRT3847_115731C.1.pep
MADRLTRIAIVSNDRCKPKKCRQECKKSCPVVRTGRLCIEVTSSSKIAFISEELCIGCGICVKKCPFEAIQIINLPKDLDRDTTHRYGPNTFKLHRLPVPRPGQVLGLVGTNGIGKSTALKVLAGKLKPNLGRFTNPPDWQEILTYFRGSELQNYFTRILEDDLKAIIKPQYVDHIPKAVQGNVGQVLDQKDEREKKEELCADLELNQVIDRNVGDLSGGELQRFAIAVVAIQNAEIYMFDEPSSYLDVKQRLKAAQVIRSLLRPNSYVIVVEHDLSVLDYLSDFICCLYGKPGAYGVVTLPFSVREGINIFLAGFVPTENLRFRDDSLTFKVAETPQETAEEAQTYARYKYPTMSKTQGNFRLRVAEGEFTDSQIIVMLGENGTGKTTFIRMLAGLLKPDTIEGGSEVEMPEFNVSYKPQKISPKFQSTVRHLLHQKIRDAYTHPQFVSDVMKPLLIEQLMDQEVVNLSGGELQRVALCLCLGKPADIYLIDEPSAYLDSEQRIIAAKVIKRFILHAKKTAFVVEHDFIMATYLADRVIVYEGQPSIDCIANTPQSLLSGMNLFLSHLDITFRRDPTNFRPRINKLDSTKDREQKSAGSYYYLDD

SEQ ID NO: 160259 - protein, 146 aa, Glycine max
  Clone ID: PAT_MRT3847_115732C.1.pep
HCGCCDPEWQTFGAHHPKDHQRFAIAVVAIQNAEIYMFDEPSSYLDVKQRLKAAQVIRSLLRPNSYVIVVEHDLSVLDYLSDFICCLYGKPGAYGVVTLPFSVREGINIFLAGFVPTENLRFRDDSLTFKVAETPQETAEEAQTYA

SEQ ID NO: 160260 - protein, 440 aa, Glycine max
  unsure (1)..(440): unsure at all Xaa locations
  Clone ID: PAT_MRT3847_115733C.1.pep
RCCCGCNLSDLRFCFRIISPTKNYTLQXSALDQMDWIEKITGVIASLLSSQIPERMLPASPMGSGHHRSTSESSSFESSDXDHYAGEECAADRSFTSAHLERPSRSLQQQRSCTKSEKPIDVLRRVCGNDKCADCGAPEPDWASLNLGVLVCIECSGVHRNLGVHISKVRSLTLDVKVWEPSVISLFQSLGNTFANSVWEELLQSRSAFQVDLVPTGLSTSDKPMMFFITKPCQSDSLSVKEKFIHAKYAEKLFVRKPKDNQYCLLVAQQIWEAVHANDKKAVYRYIVNSDVDVNAVYEPTCSSSLTLAKVMLLQEQTSHDHGSTLAGNTLDWSSTKEGQVMDNLEGCTLLHLACETADIGMVYGCEKTTANVNASDSRGQTPLHRCILKGRSTFARLLLSRGADPRAVDEQGRTPIELAAESNAGGDREVHAPLTDSSG

SEQ ID NO: 160261 - protein, 142 aa, Glycine max
  Clone ID: PAT_MRT3847_115734C.1.pep
PSLPVRTGRLCIEVTSSSKIAFISEELCIGCGICVKKCPFEAIQIINLPKDLDRDTTHRYGPNTFKLHRLPVPRPGQVLGLVGTNGIGKSTALKVLAGKLKPNLGRFTNPPDWQEILTYFRGSELQNYFTRILEDDLRLSSS

SEQ ID NO: 160262 - protein, 345 aa, Glycine max
  Clone ID: PAT_MRT3847_115735C.1.pep
MLATLKSEESSGQLQLVEREDIDDDEDLFEAIDKLIAQGINAGDVKKLQDAGIYTCNGLMMHTKKNLTGIKGLSEAKVDKICEAAEKLVNFGYITGSDALLKRKSVIRITTGSQALDELLGGGVETSAITEAFGEFRSGKTQLAHTLCVSTQLPTNMRGGNGKVAYIDTEGTFRPDRIVPIAERFGMDPGAVLDNIIYARAYTYEHQYNLLLGLAAKMSEEPFRLLIVDSVIALFRVDFSGRGELADRQQKLAQMLSRLIKIAEEFNVAVYMTNQVISDPGGGVFVTDPKKPAGGHVLAHAATVRLMFRKGKGEQRICKVFDAPNLPEAEAVFQITAGGIADAKD

SEQ ID NO: 160263 - protein, 203 aa, Glycine max
  Clone ID: PAT_MRT3847_115736C.1.pep
MRTVLSRLIHSTPSISRINAVSIRGRDLFFPNVCFKVEEAVNVPPPPTEKVVLFGGDWFVGSHFFREALERGMSAGSPSRSGRSSLHDSWARNFAWYQGNLFSTALLRKHLSGVAKLISQVYILEYGRDCLEMHVGAVEPGERALVVDDLIATGGTLCAAMDLLERVGAEVVECACVIELPELKGRERLNGKPLYVLVEYVEI

SEQ ID NO: 160264 - protein, 70 aa, Glycine max
  Clone ID: PAT_MRT3847_115737C.1.pep
ENGKSTNHSKCILVKTSLLSKHPSPTESITETIRIESNSNKHLFYMTYFWLHLSPSVLWFPPGFGYFIHR

SEQ ID NO: 160265 - protein, 76 aa, Glycine max
  Clone ID: PAT_MRT3847_115738C.1.pep
SIFHTTLMTTWLGHFLNNPDFLGSINSLLNMTNAPLNGSLQLNLGKENTHKPKITKNRLTENSPLHSIAEGLYILN

SEQ ID NO: 160266 - protein, 57 aa, Glycine max
  Clone ID: PAT_MRT3847_115739C.1.pep
VHITDPRELCAAKRVNGYIACSHTIHHIGSSLHSYTSLAPTLNAQVADPSMNDVEML

SEQ ID NO: 160267 - protein, 86 aa, Glycine max
  Clone ID: PAT_MRT3847_11573C.1.pep
DHQSLHDPPRVIPLHRSELPYPSILKLTREDMSKKKYHCQHGWWSSSSPPRTPFCVLSPSQIMFSNLVAPLHITIRSIPNSTNFYH

SEQ ID NO: 160268 - protein, 136 aa, Glycine max
  Clone ID: PAT_MRT3847_115740C.1.pep
MMGKLKVYADRMSQPSRAVLIFCRFNGIDFEEIKVDISKRHHLSPEFREVNPLQKVPAIVHGSFNLSESHAILVYLASAFPGIADHWYPSDLYRRAKIISVMDWHHSNLRHGAVNYVINTVLRPATGRPLNPKAAA

SEQ ID NO: 160269 - protein, 49 aa, Glycine max
  Clone ID: PAT_MRT3847_115741C.1.pep
VNGVRPRWVIPKSIKLSIPHEGGVGSTLRGRAKRVSYPTPPFCRLSQPL

SEQ ID NO: 160270 - protein, 109 aa, Glycine max
  unsure (1)..(109): unsure at all Xaa locations
  Clone ID: PAT_MRT3847_115742C.1.pep
KTKGEPRTLQDSKQPTAAKPGGRQKQEKGERGTTTKRDKPRREXGTNPHSRARTEATNRQPXEDNQQQQQQQTGXDXXSTKQGLSKAETTTNTRQRGEKKAQQQRTHRR

SEQ ID NO: 160271 - protein, 81 aa, Glycine max
  unsure (1)..(81): unsure at all Xaa locations
  Clone ID: PAT_MRT3847_115743C.1.pep
SFPHSWEXNFPVEVCGPNNGTETRSSXWANQTISHFIFLIDNAKQATVFDILSAILXDCGIAGDTLMPAVSVTQATARSSQ

SEQ ID NO: 160272 - protein, 78 aa, Glycine max
  unsure (1)..(78): unsure at all Xaa locations
  Clone ID: PAT_MRT3847_115744C.1.pep
NFSYPGGVLPNENLEMDPSFVXPIFSWNHFPLLEQAKVILSPQNTNRVCAAKLXKGFPQPLFIKALLIKDGFRPNPEV

SEQ ID NO: 160273 - protein, 73 aa, Glycine max
  unsure (1)..(73): unsure at all Xaa locations
  Clone ID: PAT_MRT3847_115745C.1.pep
LLLFXFNISPSLNLPPNYNLIFYLFLINTFLQNNYLKSPTFLKIFTTIFYLIFQNFFIHHTLYYFNLITYINL

SEQ ID NO: 160274 - protein, 50 aa, Glycine max
  Clone ID: PAT_MRT3847_115746C.1.pep
KRSIRDGDDGVLQGTAGTALSAKCRYTIFTYGRFQICSSTGLYKRILLNP

SEQ ID NO: 160275 - protein, 99 aa, Glycine max
  Clone ID: PAT_MRT3847_115747C.1.pep
MASACSRIAQRTSISSIRSSIKSNIRASSSFSKPASSSSPLRQSLLTRISAELRCAQSMLPLHSAVAAARMTMTSCLSVTSRSCRALSQGTLCCTSPGL

SEQ ID NO: 160276 - protein, 125 aa, Glycine max
  unsure (1)..(125): unsure at all Xaa locations
  Clone ID: PAT_MRT3847_115748C.1.pep
TPAETPAGXPARPTAPPSQPPPKREGPGGPIAGHPEERPKSPQPEHHRGQRRRATRESTRRGQRPRPRKRAPQPQQTEGGPAGNTXAGKAGAKGAGRPDGRPAADHHHKGPGAGNNNRRHQQGGG

SEQ ID NO: 160277 - protein, 85 aa, Glycine max
  Clone ID: PAT_MRT3847_115749C.1.pep
PWSVSLGFHTDGWLGFLAIPSHSRSIFSYIGGDILKPSLSPRDQSRICGCAFIGLWSGLHIWTNSSSTVCASLTTPIMVGGNPPS

SEQ ID NO: 160278 - protein, 194 aa, Glycine max
  unsure (1)..(194): unsure at all Xaa locations
  Clone ID: PAT_MRT3847_11574C.1.pep
GNTSLRAASPCCGLSEGEVQRCADDKAVLITTYXGNHNHPLPPAATAMANTTSAAAAMLLSGSAASKEALTNSAGYYSSSIPYASMATLSASAPFPTITLDLTQNPNNAMQLHRVPAGHGATFPLPLHAAAAGPHLLGHPLFFQQKLPPAALMPLLQRQPSSMVETVSAAIASDPNFTELCSNLINHWSTKKRQ

SEQ ID NO: 160279 - protein, 76 aa, Glycine max
  Clone ID: PAT_MRT3847_115750C.1.pep
AREIGSKGPVHNPSPDRHATTRSRRGSSSSSPPTADGFGTGTPVGRVGANLLQPQKEGEKVEEHPQKVHEGEQDLV

SEQ ID NO: 160280 - protein, 158 aa, Glycine max
  Clone ID: PAT_MRT3847_115751C.1.pep
LRCATHCYIARNILCHQQIARMNSFWPAAAGSASLYGAKPSNLNVVPSTELHGNVPGRAANSSQDKGHGIAMFPGHIGKDKASQPAIVDNSSRKQILLQQALPPGAAPSNILHGPAFIFPLNQQQASAAASVRPGSLKSLPVSSNGAPSSVSNSTTKA

SEQ ID NO: 160281 - protein, 116 aa, Glycine max
  Clone ID: PAT_MRT3847_115752C.1.pep
PKKKKKKEEQEVWIFLNLTSHSQPQGSLSAFRFQMQMAIEHLYHSPPLYQNQCNQKKKKKLKKEIFIFHGFHSQCTLCLGVVLLSLPVLWEFVTERKYEFSNSCPFTTFFLFFLLL

SEQ ID NO: 160282 - protein, 51 aa, Glycine max
  unsure (1)..(51): unsure at all Xaa locations
  Clone ID: PAT_MRT3847_115753C.1.pep
MKEEEVVEXKFSLIDGYDIGPIRYSPDSAIELLEDRIFEDWTKDKKIIQKA

SEQ ID NO: 160283 - protein, 70 aa, Glycine max
  Clone ID: PAT_MRT3847_115754C.1.pep
YGFCLDIININKGSFSDIRKKKKKKKKKKKKKKKKKKKKEKKKKKKKKSKQKTNKKKLGGPQQRITWPQK

SEQ ID NO: 160284 - protein, 41 aa, Glycine max
  Clone ID: PAT_MRT3847_115755C.1.pep
RSLIPGSTARVRTLVRLTPHIRSLLHMLKTMANGEMLITGM

SEQ ID NO: 160285 - protein, 91 aa, Glycine max
  unsure (1)..(91): unsure at all Xaa locations
  Clone ID: PAT_MRT3847_115756C.1.pep
IAINQYYIHHRHQCLSNHQHHYHHHHHRHYYYYHHHYQYHLYHSHHXYCHHHHXHCCHNHHQCYYHHNHYRINRLYYYYYHYXYHHHLYHH

SEQ ID NO: 160286 - protein, 55 aa, Glycine max
  unsure (1)..(55): unsure at all Xaa locations
  Clone ID: PAT_MRT3847_115757C.1.pep
MGNEKVHISIVVIXHVDSGESTTTGHLICELGGIDRRVIETFEQEAAQMYKRSFK

SEQ ID NO: 160287 - protein, 284 aa, Glycine max
  Clone ID: PAT_MRT3847_115758C.1.pep
TRRKLGIRLEGKHGDALKTLSLSRKFSLPSLNDEGLRKAIFGGESAAFSDSEGTNYTFGFHFGESEYLRSQDDRKLLEMLFPFPTILPSFQDDLPVSELLPFQRNSSLISRVLRWMQNVDLRITPLPLVIMQYCLTVYIQKQVDYIGVNMLLKLMNEWRFMDELAVLRAIYLLGSGDLLQHFLTVIFNKLDKGEAWDDDFELNTILQESIRNSADCMLLSAPDSLVVSITKNRVDGDEEASTAGVLSTPRQSHANSFGINGLDMLKFTYKVPWPLELIADTEAI

SEQ ID NO: 160288 - protein, 262 aa, Glycine max
  Clone ID: PAT_MRT3847_115759C.1.pep
RQEVRSVLAEAPVQPLEQPFYWISSEWLRQWADNIIPIPLDNTPVQCSHGKVPVSKVTSMKRLSAKAWDTLFSKYGGGPALSHDNHCRDCLIHGAMTVVSADTYRDRRESMKSLARDILDGNCLDGKYYISRPWLQQWWKRKVLDAPSEADAGPTAAISCPHGQLMPEQAPGAKRVLIPEIFWLFLYEDAVSVKPDDPLGGPTFSSDSDECSQCSNELSEVACLEDSLRLVKQKQRQNHEKLFQAKSLQLSLHSKYFLVPLS

SEQ ID NO: 160289 - protein, 57 aa, Glycine max
  unsure (1)..(57): unsure at all Xaa locations
  Clone ID: PAT_MRT3847_11575C.1.pep
MGSLEAPTAADNGSAPXAGNXKSXXINGAEAAPXXXASKXXRXSXXXXEVSXXIMCX

SEQ ID NO: 160290 - protein, 144 aa, Glycine max
  unsure (1)..(144): unsure at all Xaa locations
  Clone ID: PAT_MRT3847_115760C.1.pep
HRLFYYCYHCHYHYHRQCHYHRHKSILHXHHRHQCLSNHQHHYHHHHHRHYYYYHHHYQYHLXHCHHHHYRQHWXHHQCHCHHXSTTTYHSHHXYCHHHHXHCCHNHHQCYYHHNHYRINRLYYYYYHYXYHHHLYHHCYRNHH

SEQ ID NO: 160291 - protein, 165 aa, Glycine max
  Clone ID: PAT_MRT3847_115761C.1.pep
PYMLDRYPMKPTQMDEFGCAKPFNEVAQYFNRKLKEVVEQLRKELPGAAITYVDVYTVKYTLISHAQKYGFEQGVIACCGHGGKYNFNNTERCGATKRVNGTEIVIANSCKDPSVRIIWDGIHYTEAANKWIFQQIVNGSFSDPPHSLKRACYGKSIRRHKFQLL

SEQ ID NO: 160292 - protein, 399 aa, Glycine max
  Clone ID: PAT_MRT3847_115762C.1.pep
MKAMELVGEKWIEIVTCLVISTTLMRSVSGSESECIFPAIFNLGDSNSDTGGLSAAFGQAPPPNGITYFHSPNGRFSDGRLIIDFIAESSGLAYLRAYLDSVASNFTHGANFATAGSTVRPQNTTISQSGYSPISLDVQFVQFSDFKTRSKLVRQQGGVFKELLPKEEYFSQALYTFDIGQNDLTAGYKLNFTTEQVKAYIPDVLGQISNVIKCVYGEGGRSFWIHNTGPLGCLPYMLDRYPMKPTQMDEFGCAKPFNEVAQYFNRKLKEVVEQLRKELPGAAITYVDVYTVKYTLISHAQKYGFEQGVIACCGHGGKYNFNNTERCGATKRVNGTEIVIANSCKDPSVRIIWDGIHYTEAANKWIFQQIVNGSFSDPPHFLKRACYGKSIRRHKFQLL

SEQ ID NO: 160293 - protein, 160 aa, Glycine max
  Clone ID: PAT_MRT3847_115763C.1.pep
SSAKGWRWMFGGLIYISGGIGVFSFLVLRETYAPVILARKAKRLRQRTGNVHIRARGQKTKPLGVLLSRACLRPLQILIFSPIILALSLYMSLVYGIIYILFTTLSTVFQGVYGFDTGNSGLTYLGYAAGMDLSLMVAGYFNDSIHKKLSEKHHEEMPEF

SEQ ID NO: 160294 - protein, 36 aa, Glycine max
  unsure (1)..(36): unsure at all Xaa locations
  Clone ID: PAT_MRT3847_115764C.1.pep
LRIXSPTMXLXXFXYSSLFSSVAVLAXSSLXSDLPP

SEQ ID NO: 160295 - protein, 184 aa, Glycine max
  Clone ID: PAT_MRT3847_115765C.1.pep
ARAGSYKLWREFLHIVQRNFSRFKVSEVRKMYAHAIEALSASCSKHSRQVLQAANPSSPDPVFVQLELGLVDIFLSLCRFEWQTGYRELATALFQAEIEFSLFCPPLLLTEQSKHRLFEHFWNSGGARVGEEGALGWSTWLEKEEETRQRVMNEELSRENEGGGWTVGQNHGLKIMRVLPMLNM

SEQ ID NO: 160296 - protein, 67 aa, Glycine max
  Clone ID: PAT_MRT3847_115766C.1.pep
GLFFSSGHEQEHVARAMLRLHQETRQRDAPRRLVETPVPSHYLSGTHARLALQVERHSARARLQVPA

SEQ ID NO: 160297 - protein, 103 aa, Glycine max
  unsure (1)..(103): unsure at all Xaa locations
  Clone ID: PAT_MRT3847_115767C.1.pep
MSFEDVNAAVSEFARRFNPILKGDWESTKAFLDNDPSALTAKVTAIGGTALHAAAVGGQWQIIEKLVQHVPAQVLSDLDLMGCTCLHYVAMGESTSAAKALXG

SEQ ID NO: 160298 - protein, 133 aa, Glycine max
  Clone ID: PAT_MRT3847_115768C.1.pep
EKKPPFIRIRIIFSSIKHPYSYKRGKKENNIKFITQKLVNLFLKRKKIDTPKSLGTGFPWVYYPPLTFPSPRGLFTFLPPTKTGITIHHHWLNKILFSHHSHSSREPLLGAPAIGVTIIFEPKQHGRVMATGA

SEQ ID NO: 160299 - protein, 65 aa, Glycine max
  unsure (1)..(65): unsure at all Xaa locations
  Clone ID: PAT_MRT3847_115769C.1.pep
FFLQFFYMHLFTYIYFTQELHYSMCSHTKSQRVQKKLRWKFIITLXLVLCFHPSKDEQFARKLKP

SEQ ID NO: 160300 - protein, 51 aa, Glycine max
  Clone ID: PAT_MRT3847_11576C.1.pep
PVFGRFLPNPILVPLYGKTSEHYAYLNRLRNSNPKAPSLFGQPGTHGVANG

SEQ ID NO: 160301 - protein, 36 aa, Glycine max
  Clone ID: PAT_MRT3847_115770C.1.pep
RLKDMMRINALAKLYPNVLLTSTIPIGSPYIIISLS

SEQ ID NO: 160302 - protein, 69 aa, Glycine max
  Clone ID: PAT_MRT3847_115771C.1.pep
LSASVSSHFMWYCSTLIMKFIYCNLAITSRVSYNIYTPSLSSFVKFMILFNNSKRFTSINNHINKFNIT

SEQ ID NO: 160303 - protein, 80 aa, Glycine max
  Clone ID: PAT_MRT3847_115772C.1.pep
ISAHWRPELVDAHDRIRMACALGQSCHVVYERSTTDPRRNRDKIRPELVYFHNASGLSSFRASVSMRLPNSSKALMLSGS

SEQ ID NO: 160304 - protein, 192 aa, Glycine max
  Clone ID: PAT_MRT3847_115773C.1.pep
AYCSRVWGHIPGHKSVRVTKILILGKYPGLKKIGNISNSLSSASSSEDKKSDSDGLDTNDSVHDNANTSDCLDANNSVLNTYKVTKSLSGSNISVVTNIDYDNKQLCQNEVSLSPGKYSNVGSPQNRNLEDVGDELLKSSDTFSCSGKTRIQDGLDCLQHASALKHSSDNGSSNLEDSTCVDCSGIMHCAGK

SEQ ID NO: 160305 - protein, 69 aa, Glycine max
  Clone ID: PAT_MRT3847_115774C.1.pep
TKDTMEARVCHPSFSDRMHMICVYRETKNIVQKQKIKGSKNRAISLTFYNSSIIIPLIIFLSFKPFPFY

SEQ ID NO: 160306 - protein, 78 aa, Glycine max
  Clone ID: PAT_MRT3847_115775C.1.pep
LIAHKLQNKSFPKHFSDPIKTSIDKSSYNPTPTLLHSHKGLHTLRCGDGVGVFGCGCHHNFYASAYTALCETYSLSKY

SEQ ID NO: 160307 - protein, 82 aa, Glycine max
  unsure (1)..(82): unsure at all Xaa locations
  Clone ID: PAT_MRT3847_115776C.1.pep
TLVSCYCSLSWIKIDLAKKACQNKFKSIICSGMIWKQCFLPNNSLLLSAFEVEVETWFHQFLNEQLCLLFLLFSQSSTNNXC

SEQ ID NO: 160308 - protein, 55 aa, Glycine max
  Clone ID: PAT_MRT3847_115777C.1.pep
GVIVFIVVFFKPTIFLIFDYFFHTANYFILLDFFHPTNYLITLDELNTTNFLNVF

SEQ ID NO: 160309 - protein, 62 aa, Glycine max
  Clone ID: PAT_MRT3847_115778C.1.pep
SLSYYYPFPSCLSLLSWLFQKILTSLWTSLALPFSQVAHITLCHELGALPVVDCVVVGSDDS

SEQ ID NO: 160310 - protein, 499 aa, Glycine max
  Clone ID: PAT_MRT3847_115779C.1.pep
MLPLVYILIALPAVVLLLILFKANKNNPPRPPGPRGLPIIGNLHQLDASKLNLQLGQLSKTYGPLFSLRIGFKPALVVSSPKLAKEVLKDHDLDVCTRPPSLGPLKLTYNALELIFSPYNDHWREIRKICVVHFFSSKRISAFSHVRKSEAKRMLQIVSSHVDSSKTTNLTEVLMAVSSAIICRLAFGRKYDDDGAEKSRFHGLLNDSQAMLLSFFVSDYIPFLGWIDKLTGMVTRLEKTFEALDGFLQEVLDEHLDPNRVKVKQNEEKDLVDLLLELKKQGRLSIDLTDDQIKAIILDILIAGTDTTAATSVWVMTGLIKNPRAMGKAQEEIRNLSGNKELIEEEDVQKLVYLKAVIKETLRVYAPTPLVPREAIRSFTIEGYEIQPKTIVYVNGWSIQRDPEAWKDPEEFYPERFLNNEIDFKGQDFEFIPFGAGRRICPGISLGIATVELITANLLNSFHWEMPQGMKPEHIDTEGLPGLARHKKNHLCLVAKKRM

SEQ ID NO: 160311 - protein, 201 aa, Glycine max
  Clone ID: PAT_MRT3847_11577C.1.pep
IHFKKEKYDKNPALYGELAKGQSPKFMVFACSDSRVCPSHVLDFQPGEAFVVRNVANIVPPYDQSKYAGTGAAVEYAVLHLKVSEIVVIGHSACGGIKGLLSFPYDGTYSTDFIEEWVKIGLPAKAKVKTQHGDAPFAELCSHFLSIESVNVSLGNLLTYPFVRDGLVNKTLSLKGGYYDFVKGSFELWGLQFGLASSFSV

SEQ ID NO: 160312 - protein, 46 aa, Glycine max
  Clone ID: PAT_MRT3847_115780C.1.pep
NLSINRGIYMRKEKFLDHENVNVIIEVLCLLKRLCLDMRVIVVEGE

SEQ ID NO: 160313 - protein, 72 aa, Glycine max
  Clone ID: PAT_MRT3847_115781C.1.pep
HWRNSLFNHTPVVSLCVLIAADQNSTALLGNRRDRREVKTTAFCVVCKKRAKTSEPLPLLPSKIRGKFTCIG

SEQ ID NO: 160314 - protein, 85 aa, Glycine max
  Clone ID: PAT_MRT3847_115782C.1.pep
TSPYQSRSNFLGVQHTPNKTTNNSNSYMNIFASLLVWNVELGFPDEFLSHFLWLQDRPNKKTYNFNSYMNIFSFLFLENEQFVFP

SEQ ID NO: 160315 - protein, 111 aa, Glycine max
  Clone ID: PAT_MRT3847_115783C.1.pep
LALFSLFKKGSSSNCCLTHNSPLASMVYFSKNISGGERALHPSHNNSSIDNFPHGSNLAIINLVRRRPEQFLFQFHPCGHNPLQNLFGACVSCQCPCPHWVFVKIKKTNNR

SEQ ID NO: 160316 - protein, 91 aa, Glycine max
  unsure (1)..(91): unsure at all Xaa locations
  Clone ID: PAT_MRT3847_115784C.1.pep
GQNVTQSIGGSSTVTFNNLSXRFHTLCDPRINVSQCPEHAFTIAERLRKSRIRLQLPLAPLWSVKVPSKPTREKYIRSCVLWSYIFIIKRW

SEQ ID NO: 160317 - protein, 87 aa, Glycine max
  Clone ID: PAT_MRT3847_115785C.1.pep
VPVSSRLAVSRALLTASCSRASPSPGAWSLSCSWLLIPGLVGLIGFALSLRSALGLRAHLSSPLSLVVNGVSSQFAPPSVVFSRLFT

SEQ ID NO: 160318 - protein, 167 aa, Glycine max
  Clone ID: PAT_MRT3847_115786C.1.pep
ANCKIKTLENLAIRYVFFPCLLCEWRFGIIQINPNVFHHRFTQIQRNNILISMEPSDPTHASPDEFDSLLEELESAHEHVQDRIRRLEAITSRTRQYSSWPLFHTPIQITNSTGQTSALADAREEEMPSREVEERVVESGRGFKRKGAHLVAKALGRIETDANKEGG

SEQ ID NO: 160319 - protein, 79 aa, Glycine max
  Clone ID: PAT_MRT3847_115787C.1.pep
KKFPTWLGNFAAMVVALSQGHCNQMQHHQDSSLLLAVSSPTLPINPNINYANNLALIGSTTVLLIIKPLKGCTARVVES

SEQ ID NO: 160320 - protein, 104 aa, Glycine max
  unsure (1)..(104): unsure at all Xaa locations
  Clone ID: PAT_MRT3847_115788C.1.pep
NSATCTRLTKGASAQVRFQPRLWRFLAAASDQGASIFDVESDTHIYTLHXILNRRPISCWDGNGDALASVSPNWLKVWSSSSGRQCFHEVSSAGTPTPSCVFPP

SEQ ID NO: 160321 - protein, 157 aa, Glycine max
  Clone ID: PAT_MRT3847_115789C.1.pep
VYLVLFLTTFTRKKLIYRGMATPLNETREPEWKKAWTAGNTLLSAPPLPLLAIVGIVVFLLWVSSQLNTNYSSMQIATTNVNLFLLFLLLVLTLIAQGTRLVLPAAPSVTSLYDADVESSESSSMPWGWIVSALMLLVLISNRLHPIFVIATVVVYV

SEQ ID NO: 160322 - protein, 171 aa, Glycine max
  unsure (1)..(171): unsure at all Xaa locations
  Clone ID: PAT_MRT3847_11578C.1.pep
LAQTQRVCPSHVLDFQPGEAFVXRNVANIVPPYDQSKYAGTGAAVEYAVLHLKVSEIVVIGHSACGGIKGLLSFPYDGTYSTDFIEEWVKIGLPAKAKVKTQHGDAPFAELCSHCEKEAVNVSLGNLLTYPFVRDGLVNKTLSLKGGYYDFVKGSFELWGLQFGLASSFSV

SEQ ID NO: 160323 - protein, 100 aa, Glycine max
  unsure (1)..(100): unsure at all Xaa locations
  Clone ID: PAT_MRT3847_115790C.1.pep
MGLCLLVIFMFFVTKEIIRXYASITYLVYSTFLLAXDILYEDYNHGWHDKQIGTXNNTKPIALWVIPLVCTPATFAFSGVLFHFYTPTGQDCGLNVLLIL

SEQ ID NO: 160324 - protein, 165 aa, Glycine max
  Clone ID: PAT_MRT3847_115791C.1.pep
MMKSPSQSTYEASHYDDYGFDLQQDFCQFLEEARQHGKEAKLKSSSVHPEESRKTGSEKEKKGKKSWKSSLASWWKADKKSKHSEKTSNNSKLKDSGKKHAHSSGPMYRSSRSSDGKHWRPSSGPLVSLFKSSKKDENEIPYISLHQHNNSPPAEQNYGPLYVVN

SEQ ID NO: 160325 - protein, 314 aa, Glycine max
  Clone ID: PAT_MRT3847_115792C.1.pep
LNIIVYDYFFSFKSSFFEHSYLQDLLERFAFDNVCKLAFNVDPACLGGDGTAGGEFMRAFEDAAVLSSGRFMSILPVVWKIKKLFNFGSERRLRESITTVHQFADSIIRSRLESKDQIGDEDLLSRFIRTENTSPEFLRDVVISFILAGRDTTSSALSWFFWILQAAISETMRLYPPVPVDTMECLNDDVLPDGTRVGKGWFVTYHTYAMGRMESVWGKDCTEFKPERWLENRAESPWLENRAESPFRYPVFHAGPRMCLGKEMAYIQMKSIAASLLERFEIEALDKDTCPEHVLSLTMRIKGGLPVSVRVRNE

SEQ ID NO: 160326 - protein, 75 aa, Glycine max
  Clone ID: PAT_MRT3847_115793C.1.pep
MERASCLLLLLLPLVHVSATTPEPCELDDEDFRCVCNFSEPQPDWSESYKCVSAVEVEIHAAGLNLEPFLKRVDA

SEQ ID NO: 160327 - protein, 492 aa, Glycine max
  Clone ID: PAT_MRT3847_115794C.1.pep
MELLSFLFLSLLFFLYLYIQFLARKKPRNNKAFKDYPLIGTLPEFLKNRHRFLEWTTQVLRDSPTNTGVFSRPYKLHGILTANPDNVEHVLKTKFDNYPKGERFIHLLQDFLGNGIFNSDGDLWKVQRKTASYEFSTKSLRNFVVDAVTFELQTRLLPILSKASETNKVLDLQDLLERFAFDNVCKLAFNVDPACLGGDGTAGGEFMRAFEDAAVLSSGRFMSILPVVWKIKKLFNFGSERRLRESITTVHQFADSIIRSRLESKDQIGDEDLLSRFIRTENTSPEFLRDVVISFILAGRDTTSSALSWFFWILSSRPDVQRKIRDEIETVRSEKSKGAFGYEEVKEMRYLQAAISETMRLYPPVPVDTMECLNDDVLPDGTRVGKGWFVTYHTYAMGRMESVWGKDCTEFKPERWLENRAESPFRYPVFHAGPRMCLGKEMAYIQMKSIAASLLERFEIEALDKDTCPEHVLSLTMRIKGGLPVSVRVRNE

SEQ ID NO: 160328 - protein, 56 aa, Glycine max
  unsure (1)..(56): unsure at all Xaa locations
  Clone ID: PAT_MRT3847_115795C.1.pep
GVGRGNKSALGRVTLVXKWGNVIYDEFVRPIERVVDFRTRISGIRPQILDTILNYN

SEQ ID NO: 160329 - protein, 64 aa, Glycine max
  unsure (1)..(64): unsure at all Xaa locations
  Clone ID: PAT_MRT3847_115796C.1.pep
WNVVYPDDTLSKHITNITTGQGANVYTAAQKMLIHKXNELNDGTTSEDNKGAENRIIVIMLYKD

SEQ ID NO: 160330 - protein, 74 aa, Glycine max
  Clone ID: PAT_MRT3847_115797C.1.pep
PRVRPRVRGNSTNLPSPQSVGSSIRRLQDEFPLARRQSLQRFLEKRRNRYSTSNLSSLVLSLISLEFPILYLIS

SEQ ID NO: 160331 - protein, 135 aa, Glycine max
  Clone ID: PAT_MRT3847_115798C.1.pep
VPRGRNWFTNPPLVPTYFSGRSTAIVLIEFSRIWRAQSALFPLAVFQHFCVSGSFLPPSFVSVSSACPSCILIIHRSCIIYFFIYLTSPVFVQVTAYIPIVFLQFRTLSFCSRWLFPRLPFQKILDNWAFSHGLY

SEQ ID NO: 160332 - protein, 52 aa, Glycine max
  Clone ID: PAT_MRT3847_115799C.1.pep
LEEIQFSFISQVLVHQLVRCRCLSGIDAYSRPKSLRTQFIDIKSGVSCLQVP

SEQ ID NO: 160333 - protein, 75 aa, Glycine max
  Clone ID: PAT_MRT3847_11579C.1.pep
FQVNTVAYHLSVLKGRFPNGINVLSLFSGIGGAEVALHRLGMMLKNVVSVEIAEVNRNIIRSWWEQTNQRGNLIW

SEQ ID NO: 160334 - protein, 71 aa, Glycine max
  Clone ID: PAT_MRT3847_1157C.1.pep
LVLMAPATNPLEIFFHFPSPTEEKNVPYVFFPSKQPLWRACGVPRPVISFFFPPNKGSPLKSPIPPLKDAF

SEQ ID NO: 160335 - protein, 47 aa, Glycine max
  Clone ID: PAT_MRT3847_115800C.1.pep
TQLANFVFSKLFPLTKTKNPVGSMYVPKETGFKYKIMLGGQGNCVQV

SEQ ID NO: 160336 - protein, 68 aa, Glycine max
  Clone ID: PAT_MRT3847_115801C.1.pep
MTLAIFSACRQCPINGSTSASTSATIGIGLAASSTRYVPAAAHSSTAVAHPPSVIKCLLFSERVGGRV

SEQ ID NO: 160337 - protein, 68 aa, Glycine max
  unsure (1)..(68): unsure at all Xaa locations
  Clone ID: PAT_MRT3847_115802C.1.pep
SSEPWMMRLRAVSRWTGRERREGLQTLIESYVKDERGKRVKCGYEIPLQLEEASRGIXGSAKFRGRNL

SEQ ID NO: 160338 - protein, 70 aa, Glycine max
  Clone ID: PAT_MRT3847_115803C.1.pep
ENPPYSKWIGCNCASQGVMFLNGAHSGQYGVGGSSRYVRMSSIRAKLFSYGGPRCPPDGVLCCIKGFRWS

SEQ ID NO: 160339 - protein, 40 aa, Glycine max
  Clone ID: PAT_MRT3847_115804C.1.pep
EVAGGKGRMRFASFIPYVAPMEQAQSAEVYLRLGPFEVEC

SEQ ID NO: 160340 - protein, 114 aa, Glycine max
  unsure (1)..(114): unsure at all Xaa locations
  Clone ID: PAT_MRT3847_115805C.1.pep
HIIIPSSMLQRGDFTHRNGMVGESTYCEKPVAENSLVPHTGPPLLSPSPAGPTTNGSQYXITTATTTWMDGGQAXLFAKSFLGAHVVYKIEAAGSHXGTSYIWGVTVDSGELPL

SEQ ID NO: 160341 - protein, 51 aa, Glycine max
  Clone ID: PAT_MRT3847_115806C.1.pep
EIGHNIKVIGTTSREEGGCMNRNYNDFRFPEIKAYPWEKIFEKKRPPEEID

SEQ ID NO: 160342 - protein, 58 aa, Glycine max
  Clone ID: PAT_MRT3847_115807C.1.pep
QFELQEMLSARTGAKRMGFKTQTSYGHAKRSLALSVPYKLLKKKREKSNCLGSYPFFL

SEQ ID NO: 160343 - protein, 96 aa, Glycine max
  Clone ID: PAT_MRT3847_115808C.1.pep
PKILKKKKKKKKKKKKKKKKKKKKKKKKKKKKKKKKKKKKKKKKKKKKKKGGPFLRIQFFLPLFGGGYFFFCAPKFNLLARFLKPFYLKNPWVSQF

SEQ ID NO: 160344 - protein, 165 aa, Glycine max
  Clone ID: PAT_MRT3847_115809C.1.pep
ADFGVSKLFKVAKMVKEDKPVASLDTSWRYVAPEVYRNEEYDTNVDVFSFALIFQEMIEGCPPFFAKPENEVPKAYVENERPPFRASPKLYAYGLKQLIEECWDEKPYRRPTFRQIIGRLEDIYYHLAQKRGWKVRTPGCFQNLEAIFRGNRTNPSSRSSRSTAR

SEQ ID NO: 160345 - protein, 81 aa, Glycine max
  unsure (1)..(81): unsure at all Xaa locations
  Clone ID: PAT_MRT3847_11580C.1.pep
IXKISRAIXXSKFXSLXYHXGQNHLXXXXVEPEPXCTXPXFXNIIXLAXXXQXDNFXXSXIXLPHFXFXEPNSEXTYACXR

SEQ ID NO: 160346 - protein, 101 aa, Glycine max
  Clone ID: PAT_MRT3847_115810C.1.pep
EETLDGESIGPGAGEGLKSSSRSTKDQNLQLKSKARESEIRVKELGKGLGDWGILNRVTWFSLCFIVFPFSIETRKKGKKKKKTCSSSRIQNLDRQPTQSS

SEQ ID NO: 160347 - protein, 47 aa, Glycine max
  Clone ID: PAT_MRT3847_115811C.1.pep
FYRHRNPTQPWSDSSVSSHLHSFYPLNNRFYFTSNSRFDLKFKVLIS

SEQ ID NO: 160348 - protein, 63 aa, Glycine max
  Clone ID: PAT_MRT3847_115812C.1.pep
VGPPRGHPQISPTYITQLQPPYKRKDHSYDILLHPKNTLVLTPPILTPNTPPQDVEAQNLPWP

SEQ ID NO: 160349 - protein, 119 aa, Glycine max
  Clone ID: PAT_MRT3847_115813C.1.pep
MTNMQIVPAYKNVVEAQYVEMMVPLCEKKIKKTLSNLKGIYSVNVDYYHQKVTVWGICNKYDVLETVRNKRKEARFWNQEDNVLLEKSQSPSSSPPPSFPHKDFKPSLALTKHLQITAS

SEQ ID NO: 160350 - protein, 108 aa, Glycine max
  Clone ID: PAT_MRT3847_115814C.1.pep
SLRQSNNSSRSSSLRSQNSSTSSVTAATATTTTTIPKSKPRIRNQFHTHPSPKPQLRASAPTHNQGRKSTSAWGIFRLGVVAAPHCASRSAPRPGWLATVSQSQQHYG

SEQ ID NO: 160351 - protein, 43 aa, Glycine max
  Clone ID: PAT_MRT3847_115815C.1.pep
DACDNASAKYAEHKRLCRAANDASALGYHSLYHRLYKRQDIRI

SEQ ID NO: 160352 - protein, 72 aa, Glycine max
  Clone ID: PAT_MRT3847_115816C.1.pep
NILRLRKTTEGGEQLDGIESHVARANSYVRGGVQQLHVARKHQKNTRKWTCIAIILLIIIILIIVLPIVLRN

SEQ ID NO: 160353 - protein, 78 aa, Glycine max
  Clone ID: PAT_MRT3847_115817C.1.pep
TIYANVDYVKIVRDTCREVGYIFVDGGLDAVICTVLLNIEQKSLDIVQRVHGYLTKRPMEGGATVLCNMFGYSTDETC

SEQ ID NO: 160354 - protein, 133 aa, Glycine max
  Clone ID: PAT_MRT3847_115818C.1.pep
TLGPSIHITYSLNSLCKCITTSQNLFFLGDINFARLWVFNPHRPSLILLDKPSSTFPIPINKTKKEWALLPLLVHFTISFRYTQQKPFTLIKDANMITRNPIQLLDTKIKGLPEHWNNIKASQCLALNTPKCQ

SEQ ID NO: 160355 - protein, 60 aa, Glycine max
  Clone ID: PAT_MRT3847_115819C.1.pep
RRPVSADSTSDLVLHDEEEQLLHPLLRSLFSRTLEGGLIVRQWRIPVILARFGQMNSHPE

SEQ ID NO: 160356 - protein, 134 aa, Glycine max
  Clone ID: PAT_MRT3847_11581C.1.pep
AIYHEHLSLHCARATSSINGWCLSSISPAKTSLKKATLRPSVFATVSTPSSPSPSSSSSFPSLIQDRPVSAAPAPIITPTVTEDMATEYDQAIAELHKLSREKSELKATAAEKVEQITASLGTSSCDGMQSSEA

SEQ ID NO: 160357 - protein, 38 aa, Glycine max
  unsure (1)..(38): unsure at all Xaa locations
  Clone ID: PAT_MRT3847_115820C.1.pep
MGGICCDLXLXTEKVXXKRVXXFEGEXXEXKXKSXLXX

SEQ ID NO: 160358 - protein, 438 aa, Glycine max
  unsure (1)..(438): unsure at all Xaa locations
  Clone ID: PAT_MRT3847_115821C.1.pep
MLDINLFREEKGHNPELIRESQRRRFASVEIVDEVINLDKEWRKRQFELENLRKEFNKINKEVSKLKRAGEDASKFITESEETKKSIAEKEVEVRETLNLLNSKLETIGNLVHDSVPISNDEANNVVVRSWGEKRVEPKLKNHVDLVELLGIADTKKGADVAGGRGFYLKGDGVRLNQALINFGLDFLDKREYTLLHTPFFMRKDIMSKCAQLAQFDEELYKVTGEGDDKYLIATAEQPLCAYHLDDWIHPTQLPIRYAGYSSCFRKEAGSHGRDTLGIFRVHQFEKVEQFCLTSPNDNDSWDMQSVMLXSTLVVSIEPGVLNDAAAKKYDLEAWFPASQAYRELVSCSNCTDYQARRLEIRYGQKKSNEQMKQYQYVHLLNSTLTATERTICCILENNQKEDGVEIPEVLRPFMGGKTFLPFKSQPSNEAKGKKSKA

SEQ ID NO: 160359 - protein, 240 aa, Glycine max
  unsure (1)..(240): unsure at all Xaa locations
  Clone ID: PAT_MRT3847_115822C.1.pep
MEMASTPRTVEEIFKDYTARRTAIVRALSQDVDEFYGLCDPDKENLCLYGHPNETWEVTLPAEEVPPELPEPALGINFARDGMNRRDWLSLVAVHSDSWLLSVAFYLGARLNRNERKRLFSLINDLPTVFEVVTDRKXPVKDKPTADSGSKSRGSTKRSSDGQVKSNPKFADEGYEEDDDEHNETLCGSCGGNYNADEFWIGCDICERWFHGKCVKITPAKAESIKQYKCPSCSLRRGRP

SEQ ID NO: 160360 - protein, 239 aa, Glycine max
  Clone ID: PAT_MRT3847_115823C.1.pep
MDMASSPRTVEEIFKDYGARRTAVIRALTHDVDEFYGLCDPDKDNLCLYGHPNEAWEVTLPAEEVPPELPEPALGINFARDGMNRRDWLSLVAVHSDSWLLSVAFYLGARLNRNERKRLFSLINDLPTVFEVVTERKPVKDKPTADSGSKSRGSTKRSSDGQVKSNPKFADDGYEEEDDEHSETLCGSCGGNYNADEFWIGCDICERWFHGKCVKITPAKAESIKQYKCPSCSLRRGRP

SEQ ID NO: 160361 - protein, 101 aa, Glycine max
  unsure (1)..(101): unsure at all Xaa locations
  Clone ID: PAT_MRT3847_115824C.1.pep
CGRLGCACRCGVSGWLVLRACVVGPVPGRLLVWSWGRGLWLLLCPFLFSFPLFPSPALAGPPLLSVLAASLLCGCVLPHVDGGRVGRPGVSGPVRXAFXFP

SEQ ID NO: 160362 - protein, 84 aa, Glycine max
  Clone ID: PAT_MRT3847_115825C.1.pep
LKTILPREQLLPNIFPHLKTIPIRKTGSPSSPRTEIISGGRNPPRIDPPLFFFFYFFFLPFFFFFFFFFFFFFFVEKVCFLKQC

SEQ ID NO: 160363 - protein, 91 aa, Glycine max
  unsure (1)..(91): unsure at all Xaa locations
  Clone ID: PAT_MRT3847_115826C.1.pep
FQAXXRTTXYARXIPXLPWXRSTIPQMAMAGFXFSXIYIXLXYIFXSXWXHRIYTIYXRXXIXSLFCXVSCFHHCGXTYFXXAXEDXXWWW

SEQ ID NO: 160364 - protein, 65 aa, Glycine max
  Clone ID: PAT_MRT3847_115827C.1.pep
KKYHIPILAMTADVIHATWDECVKCGMDGYVSKPFEEENLYQAVAKFFNPKPTSIQQNARTGKAT

SEQ ID NO: 160365 - protein, 115 aa, Glycine max
  Clone ID: PAT_MRT3847_115828C.1.pep
SLLEKISGNIHQHDSWFSWDSDTTKTSATDFLKCNGCRLWGGKNPSYHVLGGGEPSGVFLWRNRRISASTLWVDTAIWGFLELLECQLLTCVCHFRDLAVGGYGWWGSVPSLCAK

SEQ ID NO: 160366 - protein, 53 aa, Glycine max
  unsure (1)..(53): unsure at all Xaa locations
  Clone ID: PAT_MRT3847_115829C.1.pep
XERESELESIVCGVDWWWXGGGKRXXCXQXPLRVNLVXLDIPSNPVLGXPTHP

SEQ ID NO: 160367 - protein, 152 aa, Glycine max
  unsure (1)..(152): unsure at all Xaa locations
  Clone ID: PAT_MRT3847_11582C.1.pep
MAEVVKSEDCCQENKQSTAASCSSVSEGSGSAXLMSPAICSPASTSPSHRRTTGPIRRAKGGWTAXEDETLRNAVAVFKGKSWKKIAEFFPDRSEVQCLHRWQKVLNPELVKGPWTQEEDDKIVELVSKYGPTKWSLIAKSLPGRIGKQCRE

SEQ ID NO: 160368 - protein, 70 aa, Glycine max
  unsure (1)..(70): unsure at all Xaa locations
  Clone ID: PAT_MRT3847_115830C.1.pep
ISIKLVRLTTKKMVMHICHDGINPYSMAWTGMANRLLSXGYDILCCVYXSLIGSITNQAMSKLVLIKIIF

SEQ ID NO: 160369 - protein, 118 aa, Glycine max
  unsure (1)..(118): unsure at all Xaa locations
  Clone ID: PAT_MRT3847_115831C.1.pep
WLRANQQTEDSPNXKHDHXGDGGTRKTTLXKRHRTGECEKKYEPTIGGEEHPPDAHTNSGKNRSDSRDTAGQEKXGGLRDGYYNHGQXAISKKDETARLTYKKGPTWHPELCRDCENI

SEQ ID NO: 160370 - protein, 164 aa, Glycine max
  unsure (1)..(164): unsure at all Xaa locations
  Clone ID: PAT_MRT3847_115832C.1.pep
ENQTLPHGTSRSVKRMPLSIGGRAGANNAILMTMPHAALLMWIYCVGYLVFEVPNMTSPYIKCTDSIFIXFGNSADDTINFEAFPHKLLQCXEIQEIVELYFSQNESLTAWSTHVLAATTLLADGCPYSHAMVHDSSAPTIPWDFVIGVKLTTINHMCAYRLNP

SEQ ID NO: 160371 - protein, 141 aa, Glycine max
  unsure (1)..(141): unsure at all Xaa locations
  Clone ID: PAT_MRT3847_115833C.1.pep
LSIVPRAEETLQAWXRVTKGAKRLMRMYNVRVCGYCPEIHVGAQGLKAKNCEAHKHQQRNGQHGWQSAIAVLNDLIPPRFVWHVPDVNAPLERELRNFYGQAPAVVEMCIQAGAGLPEQYKSTMRLDVGIPSTLKEADMVV

SEQ ID NO: 160372 - protein, 109 aa, Glycine max
  Clone ID: PAT_MRT3847_115834C.1.pep
LYSLTPREKHPFTSLQYGHSNITNLLVEHVKAFPAANKFMRARNDEKDTALHEAVRNHHIEVVKTLLEMDPDYSYETPLYLPSERQYQQVVAQISNKVKAPAYVGPNNQ

SEQ ID NO: 160373 - protein, 99 aa, Glycine max
  Clone ID: PAT_MRT3847_115835C.1.pep
NLKSEHEIVHKFLIPITVKRNKSVSRCKSVRTISSNPLKQKGKCYRMSNQSHSQSIIKQKYLKSKELKFPTIHKRKLIATTTNPKLPPHLSNSPSVVFR

SEQ ID NO: 160374 - protein, 50 aa, Glycine max
  Clone ID: PAT_MRT3847_115836C.1.pep
PYLFSQNFKIFLSSYKKWHLFYLHFEGRGNKSVFKFKMDRKKNINRAVLY

SEQ ID NO: 160375 - protein, 141 aa, Glycine max
  unsure (1)..(141): unsure at all Xaa locations
  Clone ID: PAT_MRT3847_115837C.1.pep
PKHDSNMQMIGKGHRWLGLATHLDGVISTRSTVARRHAYWSANMRSKPNNHKHYAPMYKSEESFDRPQPSTRIQAKNYAMGTTQQHVNHGHLLVEPPLKTDEHYPDMIVLXEESLTPTDSHLTGAAQLPVTAHSGAAPPTA

SEQ ID NO: 160376 - protein, 60 aa, Glycine max
  Clone ID: PAT_MRT3847_115838C.1.pep
ISTDCAEKPHSLSFWWYAILNWSPQRSVPQPLVAVSFLWPQQKARSPIIYCQISVLVSNS

SEQ ID NO: 160377 - protein, 136 aa, Glycine max
  Clone ID: PAT_MRT3847_115839C.1.pep
MMRSKIVLFGDSITEQSIRENGWGVPLANAYSRRADVLVRGYGGYNTRWAMFLLGHLFPLDSTKPPTATTIFFGANDAALLGRTSERQHVPIEEFKENLRKFVRHLKDCSPTMVIVLITPPPLSEEGRLAYARYDS

SEQ ID NO: 160378 - protein, 101 aa, Glycine max
  unsure (1)..(101): unsure at all Xaa locations
  Clone ID: PAT_MRT3847_11583C.1.pep
ISLMEVLPCSGVQYAGESDCPQQSSGTAFVYQEQPNCPENGEHVNFVAAQLNESSHKMQGPQIERHLSTNSDCQCIGTSCCDCQVDDQHNLXGFMILKKHD

SEQ ID NO: 160379 - protein, 202 aa, Glycine max
  unsure (1)..(202): unsure at all Xaa locations
  Clone ID: PAT_MRT3847_115840C.1.pep
TQLRARSQAMSLNRLLSVARRSDRRASALSSLRSLSASTGAVAPSASCPPGALPPAASVVGVPQMRSYRYSIGETTPQLVTRTAAPWGHPYEAFHELXELFRMGGRCPDSSCLFMGDYGGSWVLLCRSWYAFGVPLGGVVGGVLLLWGEIGGVARVLRRVGVVAERXXXXXXXXXXXXXXXXXXXXXXXXXXXXXXXXXXXX

SEQ ID NO: 160380 - protein, 161 aa, Glycine max
  Clone ID: PAT_MRT3847_115841C.1.pep
FVIMEVSSEQSGEGVTLEKLQSSLKKNVPEASRRAAKTVAEPGGSVSAKRRVEPRTGSVTAATKRSGSIGGSSSVVTAPRRNSTGGLSQKASISDGRRKTGTESAAGARSGASSVGELVRSSLPELRLISVNSSRVAVKPAVASLAGSASRTSGASKAEVA

SEQ ID NO: 160381 - protein, 78 aa, Glycine max
  unsure (1)..(78): unsure at all Xaa locations
  Clone ID: PAT_MRT3847_115842C.1.pep
KPQQVARIFSLTLPLILELQTSKVNEAFTATLSCNKSLPKQPNISLHADAIVSFSRISRLNMVDXTVTPQPSSLGLVL

SEQ ID NO: 160382 - protein, 46 aa, Glycine max
  Clone ID: PAT_MRT3847_115843C.1.pep
ETKTKNFNLNFHSYSYLYTHQGLENKLTLSHFELFFFYVHELKKPF

SEQ ID NO: 160383 - protein, 71 aa, Glycine max
  Clone ID: PAT_MRT3847_115844C.1.pep
GLHGRCGYDQTHVGHNPPPSAAGVLGLGNGRASILSQLNSKGLIRNVVGHCLSGTGGGFPSVVFSQPYGRV

SEQ ID NO: 160384 - protein, 72 aa, Glycine max
  Clone ID: PAT_MRT3847_115845C.1.pep
KKIIFSIPGAVNWELGSELKGVFWHSPFVQVKKGIVLRLVSVPQFGPTGKKILFTMGGLKGKKGGFFFFPWG

SEQ ID NO: 160385 - protein, 179 aa, Glycine max
  Clone ID: PAT_MRT3847_115846C.1.pep
LNRPLTFAEKILYSHLDDPHGQEIERGSSYLKLRPDRVACQDATAQMAILQFMSAGLPSVATPTTVHCDHLIEAQVGGEKDLARANEINKEVYNFLSTSCAKYNIGFWKPGSGIIHQIVLENYAFPGALLIGTDSHTPNAGGLGMAAIGVGGADAVDVMAGLPWELKASKVMGVKLTGK

SEQ ID NO: 160386 - protein, 157 aa, Glycine max
  Clone ID: PAT_MRT3847_115847C.1.pep
IRLEQHFYVPVAHHAAEVHFVVKDSDVVGSQLIGVVAIPVEKIYSGQKVQGTYPILNSNGKPCKPGAVLMVSIQYIPMHTLIMYYQGVGAGPDYIGVPGTYFPLRKGGTVTLYQDAHVPDGCLPNVVLDNGVYYAHGKCWLDIFDAINRAKRLIYIT

SEQ ID NO: 160387 - protein, 486 aa, Glycine max
  unsure (1)..(486): unsure at all Xaa locations
  Clone ID: PAT_MRT3847_115848C.1.pep
MFNMLQTHHLQFLAILFLYTLTCSETAATSIPQELHIGFSVTPESWTTPFQAVLSDHSGNFSLGFLRVNQNQLALAVLHVASSEPFWVANPSHAPSWSDNTRLFFNGSLVLSDPETLVLWSTATNGDRVVLLNSSNLQVHHNGIPLWESFHFPKNTLVQDQNFTSNMTLLSCNGIYSMRLGNDLMGVYENHALLYWKRTPLGAKAEVKDFQGPIYAXVNPEGYLGMYQTSDEKPADVQKFNTFQLTSSFLLLRLEPDGNLKGYYWDGSRWMLNYQAITEACELPRSCGSYGLCTPGGSGCSCLDNRTRFEPGGCFNDASSGDADLCSSEGIGGKSSYWVLRRTGVEAAHKELLRHVTTSSLAECEGLCQNNCSCWGALYSNETGFCYLLEYTIQTLLGTGDGSKVGYFKVKKEERRTKRVWIRVGVVVTVLVGVGVIIIGVGFCVTRWKKKRGVKEEDWGSPGPYKNLESASFRSIEMSNSNSANE

SEQ ID NO: 160388 - protein, 41 aa, Glycine max
  Clone ID: PAT_MRT3847_115849C.1.pep
HLNKNPISTLKGKTNPLLYHLEKQSNHMVSHISRHHKPNIE

SEQ ID NO: 160389 - protein, 67 aa, Glycine max
  Clone ID: PAT_MRT3847_11584C.1.pep
KFCYKRISKLLSKEDFPTCINAVHSFIYIYFYKYHMVMKVARPLHCRYTRPLSMAPIASNAEWWPHL

SEQ ID NO: 160390 - protein, 171 aa, Glycine max
  unsure (1)..(171): unsure at all Xaa locations
  Clone ID: PAT_MRT3847_115850C.1.pep
MLHIVETTEPQEPFGGQLLEVAGSSKDLRNLCPSADAVLEDQVPEAYKMNPQCSDLPQMQHMDTLNKTMTPFAVRKEVNSVTIKATYKEDIIRFKVSMDCGIVELKEEIAKRLKLEVGTYNNKYLDDDHEXVRIACETDLTERIYLSRSLGESVLMMARIMMVSLTRSVST

SEQ ID NO: 160391 - protein, 82 aa, Glycine max
  Clone ID: PAT_MRT3847_115851C.1.pep
TRGVVEGFKTRKSLKGTFKPIPFRNSPDHDLALGLAKGFPMAKGPNPGNPLPKGKGIKLPSIEEVRKRIPAHHPPEKKPPLE

SEQ ID NO: 160392 - protein, 202 aa, Glycine max
  Clone ID: PAT_MRT3847_115852C.1.pep
MLIIISFLPQIKQISTVNPSLFPSILTSSLSRCTDLRGVCVLGFLPFLSLSALHFCVFFSIGVSKMPMFQPCRKDLVAGYEGGGDGQILDLDTAVKDGVLGGVEGGVLGGGVGEKVDLGKMIEELELCEVPSVFICPISLEPMQDPVTLCTGQTYERSNILKWFNLGHFTCPTTMQELWDDSVTPTPPFKLSYTLWISQKYL

SEQ ID NO: 160393 - protein, 80 aa, Glycine max
  Clone ID: PAT_MRT3847_115853C.1.pep
AARGAALFGGGRGQGFSFFGPSPAQQTCFVLFIFGEKARAGRPLRVPGWGHPFLQRTPLKRFRGIPVVWKGLSFFIRNPA

SEQ ID NO: 160394 - protein, 172 aa, Glycine max
  unsure (1)..(172): unsure at all Xaa locations
  Clone ID: PAT_MRT3847_115854C.1.pep
LEKPPSGKFPIIKICVLIFIIILYAESFKFLSSGSIFNFKPCPTNSTKPKSNDNKIQEVVPNDSLWFHDGFVYDPEECDFTNGKWVFNSSIKPLYSDTTCPYISRPYSCVNNGRVDSDYRYWEWQPEDCTLPKFNPKLALKKLQGKRLLFVGDSLQKSQWESXVCMGEWIIP

SEQ ID NO: 160395 - protein, 76 aa, Glycine max
  Clone ID: PAT_MRT3847_115855C.1.pep
FKIILPWLLQNVYPMNKKGLSSQITIVKETPPDTRALLQANGPSPGKDFRPQENGPGGGSTNRAGEPGQPNVSANK

SEQ ID NO: 160396 - protein, 57 aa, Glycine max
  Clone ID: PAT_MRT3847_115856C.1.pep
VFIFAAILKSKLHEYRFVVSWLVNLWVLSTFCSDSLTLNRTLYLHFLFAFQNVYDYI

SEQ ID NO: 160397 - protein, 79 aa, Glycine max
  unsure (1)..(79): unsure at all Xaa locations
  Clone ID: PAT_MRT3847_115857C.1.pep
XAXXXHWXTSXXXQXXIXGRVXPXXYLSTRNXVXVPXIPXPTRTSXXKQXQLRLISSCSSKHGGSLRHHQXAVSYPCRX

SEQ ID NO: 160398 - protein, 88 aa, Glycine max
  unsure (1)..(88): unsure at all Xaa locations
  Clone ID: PAT_MRT3847_115858C.1.pep
THDQQVTKAQLYRCTRTRPHVHTRIMKKNYEXVPEWWFVTILILMVVMALVACEGFGKQLQLPWWGILLSLTIALVFSLPIGVIQATT

SEQ ID NO: 160399 - protein, 60 aa, Glycine max
  Clone ID: PAT_MRT3847_115859C.1.pep
EVAWLPEGVYIYSGIFKDGVSNGAFFFFVLESFSVSYTLMIQLFNKFKWIFILCGRKVIF

SEQ ID NO: 160400 - protein, 560 aa, Glycine max
  Clone ID: PAT_MRT3847_11585C.1.pep
MAEVVKSEECCQENKQSTAASCSSVSEGSGSAIHKSPGRCSPASTSPSHRRTTGPIRRAKGGWTAQEDETLRNAVAVFKGKSWKKIAEFFPDRSEVQCLHRWQKVLNPELVKGPWTQEEDDKIVELVSKYGPTKWSLIAKSLPGRIGKQCRERWHNHLNPDIKKDAWTLEEELALMNAHRIHGNKWAEIAKVLHGRTDNAIKNHWNSSLKKKLDFYLATGRLPPIPKNSPQVPVKDTIRRSASKSMLGCSNKELNAAVETSSETTAISKLDDSGRNQFESSGTVREVGDSSSVPANDSADSDCVECKPGSSNINPSCSNSEHVSRANFGTTFGPISENSGLNGNSTFEHCTNNGDRSSTRLIGTSSQENPTCGSLCYEPPQLDGSVPIDSLYLNYTCQQNEYCPSPTMSPTGFFTPPRAKGSELCTETPESILRKAANTFPNTPSILRRRRTGAQTLTSPTKVLKVDNNPHTSNKTERTNDDSGSGHFSGSPASHGYGIGIPNNKAFNASPPYRLRSKRTAIVKSVEKQLEYAFDKEKNDDKRSNVMTEDRLHETKLVVT

SEQ ID NO: 160401 - protein, 53 aa, Glycine max
  unsure (1)..(53): unsure at all Xaa locations
  Clone ID: PAT_MRT3847_115860C.1.pep
SXXXYSVACQKKTSGQKTKLHNKRSNVFISCDLYPKHDSNLTNHRSNQQNNNN

SEQ ID NO: 160402 - protein, 94 aa, Glycine max
  Clone ID: PAT_MRT3847_115861C.1.pep
FSVLLKDFQKGCKIIQFMKWSLWLWFMPCRMEALLGRKAFCDSITDQISLKFLTEQKLVIELQFKWASKLIGYHFEIQYKLRLKTEQQMHSQGK

SEQ ID NO: 160403 - protein, 70 aa, Glycine max
  Clone ID: PAT_MRT3847_115862C.1.pep
WLLQVNLIRYVLPYTHAIIFTQWRYCNLSRRISIHVRKTSERIIILGPLRLTPRTTFVPTCVTPDSRNLH

SEQ ID NO: 160404 - protein, 170 aa, Glycine max
  unsure (1)..(170): unsure at all Xaa locations
  Clone ID: PAT_MRT3847_115863C.1.pep
SNSDFNELARKTTARRYFYNGGHNASSRRVDIGVGRGHDSQPGTTAKDRQGPYIGYRGRVIDVKGTTVSVELEYQTEGCTQLDRNHISXTTVDCNTHIDDTSXRYGMGSETPMHPSXRTPLHPYMTPMIDPGTTPIHDGMRTPMRDPAWNPYTPMSTTRDNCEYGNTCSW

SEQ ID NO: 160405 - protein, 76 aa, Glycine max
  Clone ID: PAT_MRT3847_115864C.1.pep
SLYIKQTRKKMTRGGLLFTCSMSLTLLLVLKPYPLLMLLLCKQAIEATTLPYRIMPNTMELLKGKKAGTYPAFFLF

SEQ ID NO: 160406 - protein, 47 aa, Glycine max
  Clone ID: PAT_MRT3847_115865C.1.pep
FKKKKKKKKKKKKKKKKKKKKKKKKKKKIKKKKKKKKKKKKKRGGRF

SEQ ID NO: 160407 - protein, 133 aa, Glycine max
  unsure (1)..(133): unsure at all Xaa locations
  Clone ID: PAT_MRT3847_115866C.1.pep
FHSPNXRGSEXALIIHFIXQSARGGYXRGYXGSGGSNFTHGANFPTGGATVRPQNTTISQRGTXPISLXVXVGQVSEFKTRSKLXANKGGGFKGLWPKGGXFSQALYTFXIGGGELTGXYKLNFTTXQGKAYI

SEQ ID NO: 160408 - protein, 82 aa, Glycine max
  Clone ID: PAT_MRT3847_115867C.1.pep
PPISPVLVAGAKIPKSLSVLKATLLVGKHVRGDTVFEHGKMTNLFNQSTNSHIIELSERVEDTDCPPGLTHNMVQLRQMHQK

SEQ ID NO: 160409 - protein, 75 aa, Glycine max
  Clone ID: PAT_MRT3847_115868C.1.pep
EFLNFFLLLWVRFLEGEKITLCAGHRLRESFSFPLLVYLLNTLLFDIRLRVRCKLLLVLSQFSVQFQGQAGETLD

SEQ ID NO: 160410 - protein, 47 aa, Glycine max
  Clone ID: PAT_MRT3847_115869C.1.pep
VLFYWPIRPLSGEKASSLGFKKPCGYVVYSSNLSLNFSIFNFHLSHF

SEQ ID NO: 160411 - protein, 329 aa, Glycine max
  unsure (1)..(329): unsure at all Xaa locations
  Clone ID: PAT_MRT3847_11586C.1.pep
MSTSSINEWCLSSISPAKTSLRKATLRPSVFATLNTPSSPSSSSSFPSLIQDRPVFAAPAPIITPTVREDMAKEYEKAIEELQKLLREKSELKATAAEKVEQITASLGTSSSDGIPSSEASDRIKAGFIHFKKEKYDKNPALYGELAKGQSPKFMVFACSDSRXVCPSHVLDFQPGEAFVVRNVANIVPPYDQSKYAGTGAAVEYAVLHLKVSEIVVIGHSACGGIKGLLSFPYDGTYSTDFIEEWVKIGLPAKAKVKTQHGDAPFAELCSHCEKESVNVSLGNLLTYPFVRDGLVNKTLSLKGGYYDFVKGSFELWGLQFGLASSFSV

SEQ ID NO: 160412 - protein, 119 aa, Glycine max
  unsure (1)..(119): unsure at all Xaa locations
  Clone ID: PAT_MRT3847_115870C.1.pep
DARVRPGLRTSQDVSSMFQCGQKTXIFVINNGGYTIHVXTHDDPYNMIYNCNYTALIDAIHTGVGKCXTAKKFFXEDLIESIATSTGPNIDSLCFIEVIVHNDDTQXEFLEWISRFSAS

SEQ ID NO: 160413 - protein, 35 aa, Glycine max
  Clone ID: PAT_MRT3847_115871C.1.pep
PTTAEISKSIRQLQGMRDPKCIYVVRISIVSIPFA

SEQ ID NO: 160414 - protein, 422 aa, Glycine max
  Clone ID: PAT_MRT3847_115872C.1.pep
VWENNNNNHNLIVPNPQDSLWMMNLRTGETMDSGSYPERPGEPDCSYYMRTGLCRFGATCRFNHPPNRKLAIATARMIGEFPERIGQPECQYYLKTGTCKFGATCKFHHPKDQAGIAGRVALNILGYPLRPNEPECTYYLRTGQCKFGNTCKFHHPQPSNMMLSLRSSPVYPTVHSPTTLGQQSYAGGTYIPSPRWQGPSSYAPLILPQGVVSVPGWSAYSGQMGSISTSDSPQQAMRNGQTYGTSRQGELAGSQGAYSQFRSGTVPVGFYTLQRENIFPERPGQPECQFYMKTGDCKFGAVCRFHHPQERLVPAPNCVLSPIGLPLRPGEPLCVFYSRYGICKFGPSCKFDHPMEIFSHNISASPSADAPSRHLLGSSSGTAALNLSSEGLVESSSAKPRRLSLSETRQIPSGDDDIDDDG

SEQ ID NO: 160415 - protein, 70 aa, Glycine max
  Clone ID: PAT_MRT3847_115873C.1.pep
PSPQSGGGGIKPLILKFFTRPKQNFPKPEKSQTRKKKLKTQIPPWFYPPFYKKKLNLKKPPFINFYPSKK

SEQ ID NO: 160416 - protein, 42 aa, Glycine max
  unsure (1)..(42): unsure at all Xaa locations
  Clone ID: PAT_MRT3847_115874C.1.pep
RMILLHIEDRYFSIWFPLLSVRAESKKKRWLRRSYKTELXLA

SEQ ID NO: 160417 - protein, 78 aa, Glycine max
  Clone ID: PAT_MRT3847_115875C.1.pep
TAYFKHIAYSTHQSFPIGSREPKPTPPNHLTIYNYNILTSGKTTNEAFFTHQVLDPTKAFLPSANACDSPVNYQPTNS

SEQ ID NO: 160418 - protein, 85 aa, Glycine max
  Clone ID: PAT_MRT3847_115876C.1.pep
LDSIPLSTVMSNVVVSVTIHPRRASFTYTPTHTIYTYVRSVSSDTENSVSGNSPCTSVSVSAETWHVIAPYSLSTMLRWRSESVS

SEQ ID NO: 160419 - protein, 97 aa, Glycine max
  unsure (1)..(97): unsure at all Xaa locations
  Clone ID: PAT_MRT3847_115877C.1.pep
XXKXKXXTXKXKKXPXXXRKRXXGXXXQKXXXXXXXGXXQXXXXVFVRGMXLLCYXWKEXXLXXFXXXXXXRAIRXWXXXXXMXRDWXXXXGXGKXX

SEQ ID NO: 160420 - protein, 72 aa, Glycine max
  unsure (1)..(72): unsure at all Xaa locations
  Clone ID: PAT_MRT3847_115878C.1.pep
VGVEVXKGDEDGMYTKESVCKAVSIVMDGENETSKRVRANHARIRELLLNKDLESSYVDSFCMRLQEIVEGI

SEQ ID NO: 160421 - protein, 102 aa, Glycine max
  Clone ID: PAT_MRT3847_115879C.1.pep
GLGRAIHLHWGRVNTTIVAFPRNPDKFRLPPANNLFATPLSMAFRGGLFKNGGTWNPCGVIKLSRFLSIHFLGLYYNIAHPPFEVVGLQKGLLKTCISLTPL

SEQ ID NO: 160422 - protein, 32 aa, Glycine max
  Clone ID: PAT_MRT3847_11587C.1.pep
YMCIFFLVTTWKGILNRLFYMCDFFVAPFPFL

SEQ ID NO: 160423 - protein, 490 aa, Glycine max
  Clone ID: PAT_MRT3847_115880C.1.pep
SLSAYTTPRFVRSEIEMDHVLVALGETKEEREVRIRSLFNFFDAANNGYLDYAHIEAGLSALQIPPEYKYAKELFKVCDADRDGRIDYRDFRRYMDDKELELYRIFQAIDVEHNGCILPEELWDALVKAGIEIDEEELARFVEHVDKDNNGIITFEDWRDFLLLYPHEATIENIYHHWERVCLVDIGEQAVIPEGISKHVHRSRYFIAGGIAGAASRTATAPLDRLKVVLQVQTGRASIMPAVMKIWKQDGLLGFFRGNGLNVVKVAPESAIKFYAYEMLKNVIGDAQDGKSDIGTAGRLFAGGMAGAVAQMAIYPMDLVKTRLQTCASDGGRVPKLVTLTKDIWVHEGPRAFYRGLVPSLLGMIPYAGIDLTAYDTLKDLSKRYILYDSDPGPLVQLGCGTVSGALGATCVYPLQVIRTSITMILRLQAQPANSTSAYKGMSDVFWKTLKDEGFRGFYKGLIPNLLKVVPAASITYMVYESMKKSLDLD

SEQ ID NO: 160424 - protein, 165 aa, Glycine max
  unsure (1)..(165): unsure at all Xaa locations
  Clone ID: PAT_MRT3847_115881C.1.pep
MEHVGFSKAAIADHGRGKKTGPVSMDHVLLALRETKDERDLRIRSLFNFFDAANNGYLDYAHIEAGLSALQIPPEYKYAKELFELWRTXDANRDGRIDYRDFRRYMDDKELELYRIFQAIDVEHNGCILPEELWDALVKAGRYSGTTTLFIVFCASWLVSCNYCM

SEQ ID NO: 160425 - protein, 81 aa, Glycine max
  Clone ID: PAT_MRT3847_115882C.1.pep
MSGAGQAIDMEHVGFSKAKADHGRGKKTGPVSMDHVLLALRETKEERDLRIRSLFNFFDAANNGYLDYAHIEAGLSTLQAC

SEQ ID NO: 160426 - protein, 281 aa, Glycine max
  Clone ID: PAT_MRT3847_115883C.1.pep
MALRVHFSIVSIAVLALCTSADYFSANFSYAGPNGPEYWGSLSPSYAACSHGKSQSPVELMKTDIVINMQLKNLNRNYLPTNATLVDNIFNIGVHFEGKVGDININGKNYSLKQLHWHSPSEHMANGRIHDAELHLVHLTEDNYNIAVVAVLYKLGDPDPLISQFEDKLVDLEKEIRAGNKDAQIAIGTFDVEEINRSSHRYYRYVGSLTTPPCKEGVTWNILGKLRTLSKKQLELLKAPLGPEFKHNARPLQQLNGRKIQMYYHPNHLHGSHATPSKYHK

SEQ ID NO: 160427 - protein, 49 aa, Glycine max
  unsure (1)..(49): unsure at all Xaa locations
  Clone ID: PAT_MRT3847_115884C.1.pep
FFGFLGAAAALILFCMGAVYGTSNSGVGVAXMGVMRPKLVIEVLLSLLL

SEQ ID NO: 160428 - protein, 115 aa, Glycine max
  Clone ID: PAT_MRT3847_115885C.1.pep
CCESSSGPWVGTPPCVHVVHGAAACAPSLDDGPRIQTCVMFMPSNALWYMEWMCVGLFTLGGSAGIKGIDCPESDPWVCKIMYTRVREASSECGTGPSSVASPRVIFSHPSSSRI

SEQ ID NO: 160429 - protein, 75 aa, Glycine max
  Clone ID: PAT_MRT3847_115886C.1.pep
LIYYKKILIFNFFYTSFYLFLTIRWNLLSNIIKFGYEWITTVTLAFAFSQPHQLSMVLSYKLYIASGVFNTFNLI

SEQ ID NO: 160430 - protein, 79 aa, Glycine max
  Clone ID: PAT_MRT3847_115887C.1.pep
CIKSPSTVLSFSSSSAGLVCRGCFSAFSDSFPLQSSSSAVPLVLESEKVLLSSCGSLRASSDFVGLFILLSPFFNSCFT

SEQ ID NO: 160431 - protein, 59 aa, Glycine max
  Clone ID: PAT_MRT3847_115888C.1.pep
NKVHIVKIKLLLKLLTLPGEKQSRRENPFRPAEISLLNQTRGDTWVYPQKKRLPLQGKV

SEQ ID NO: 160432 - protein, 46 aa, Glycine max
  Clone ID: PAT_MRT3847_115889C.1.pep
HHQLHFDFSSAQLNATKLFLVSICYLLRSLLNKRKIINFTLTTKIN

SEQ ID NO: 160433 - protein, 330 aa, Glycine max
  Clone ID: PAT_MRT3847_11588C.1.pep
MSTSSINGWCLSSISPAKTSLKKATLGPSVFATVSTPSSPSSSSSSSFPSLIQDRPVFAAPAPIITPTVREDMAKEYEQAIEELQKLLREKSELKATAAEKVEQITASLGTSSSDGIPSSEASDRIKAGFIHFKKEKYDKNPALYGELAKGQSPKFMVFACSDSRVCPSHVLDFQPGEAFVVRNVANIVPPYDQSKYAGTGAAVEYAVLHLKVSEIVVIGHSACGGIKGLLSFPYDGTYSTDFIEEWVKIGLPAKAKVKTQHGDAPFAELCSHCEKEAVNVSLGNLLTYPFVRDGLVNKTLSLKGGYYDFVKGSFELWGLQFGLASSFSV

SEQ ID NO: 160434 - protein, 58 aa, Glycine max
  Clone ID: PAT_MRT3847_115890C.1.pep
SRMVQRDICLQVGIRSSLKQCGTEMWHSYCSLVRASSSCHSDIHQTGPFTSVMIKVSD

SEQ ID NO: 160435 - protein, 38 aa, Glycine max
  Clone ID: PAT_MRT3847_115891C.1.pep
MGHHSVMRSLFACDQQHASLAQIAVTRAVSARPSCDAS

SEQ ID NO: 160436 - protein, 144 aa, Glycine max
  unsure (1)..(144): unsure at all Xaa locations
  Clone ID: PAT_MRT3847_115892C.1.pep
QGEAMTTDAARKTAFHLVVVISSSRSSYGQLYLDDGXALDMAGAKDQWTLVSFYGALHNNSVSVTSKVTNGRFALDQRWILDKVTFLRIPKLAGNELSIVNGTSSMKKAIVKSQFDSSSQFVNVQVSKLSLLIGEEFQLEIEIK

SEQ ID NO: 160437 - protein, 64 aa, Glycine max
  unsure (1)..(64): unsure at all Xaa locations
  Clone ID: PAT_MRT3847_115893C.1.pep
DNSQHTIDKRXSNYXXPXIVPXXSILXEXATIXXVLSXAFLRXXPSPXXTSMXNLFXXHXXTIL

SEQ ID NO: 160438 - protein, 77 aa, Glycine max
  unsure (1)..(77): unsure at all Xaa locations
  Clone ID: PAT_MRT3847_115894C.1.pep
MGGTKKPDLNDPASIAKLAKVMGHTIYCKTALPQXLIYIKQATIVGSIALNXSLTGLEPYMIGEPIDTSATPLERLP

SEQ ID NO: 160439 - protein, 237 aa, Glycine max
  Clone ID: PAT_MRT3847_115895C.1.pep
NHSGLEAENILMNLFELNDETITIAANFGWYKPLVDRMIQGPDSRISMTKAIVNLELKDPNLKLLGKEGAIPPLLEMLSGNIESKDLSLSALVKLAGSHANKGIIAASGGVPLIIDLMFSPQSRTLIIIKCSEIIEKLSSDGDGIDFFVDGEGKQLELDSIIANLLALQQTSNSGHNIRKPALSALLGICKFETGLVKKAILAANGVSLILPLLDDSDSEIRETSIILLFLFSQHEP

SEQ ID NO: 160440 - protein, 53 aa, Glycine max
  Clone ID: PAT_MRT3847_115896C.1.pep
KHTSHLIMIVKMTGFQPRSTLIQLPTRKSKHWIKEKLAIYGTIKCTVTAGTAA

SEQ ID NO: 160441 - protein, 43 aa, Glycine max
  Clone ID: PAT_MRT3847_115897C.1.pep
PPRARLQRPPFFPGPIPPPLSFFLSLEIQNLTFLLVFCWFDCL

SEQ ID NO: 160442 - protein, 93 aa, Glycine max
  Clone ID: PAT_MRT3847_115898C.1.pep
IRRVDLNLTRPNSFSFLLSPFVLIFPHSPFIFHSYLIQTLSSTSILFSISIFPLTCSHSYISFLLSNYPYYYSFLLFYLLTFQYYLHLIISFF

SEQ ID NO: 160443 - protein, 51 aa, Glycine max
  unsure (1)..(51): unsure at all Xaa locations
  Clone ID: PAT_MRT3847_115899C.1.pep
MFGRAPNNTDNTRYYXILGVSKNASHDDLNKAYNKASIKNHPYKGGYPYNF

SEQ ID NO: 160444 - protein, 37 aa, Glycine max
  Clone ID: PAT_MRT3847_11589C.1.pep
NGAFHNEYYHLVSIILNINSDDIQQDYCLLNCSLLKP

SEQ ID NO: 160445 - protein, 59 aa, Glycine max
  Clone ID: PAT_MRT3847_1158C.1.pep
VQAFKEITSRGQSNTQLQVFNYGSAINQMQKWPVPMTSHRKSLRVFATLPLFKDLIFFF

SEQ ID NO: 160446 - protein, 188 aa, Glycine max
  Clone ID: PAT_MRT3847_115900C.1.pep
MGSMNLLGFSLSPHEEHPSSQDHSQTTPSRFSFNPDGSISSTDVAGGCFDLTSDSTPHLLNLPSYGIYEAFHRNNSINTTQDWKENYNSQNLLLGTSCNKQNMNQNQQQQPKLENFLGGHSFGEHEQTYGGNSASTDYMFPAQPVSAGGGGSGGGSNNNNNSNSIGLSMIKTWLRNQPPNSENINNQQ

SEQ ID NO: 160447 - protein, 569 aa, Glycine max
  unsure (1)..(569): unsure at all Xaa locations
  Clone ID: PAT_MRT3847_115901C.1.pep
MVGARPRDIDDLPKNAANYTALTPLWFLERAATVHPTRNSLIHGSRRYTWQQTYHRCRRFASALSNHSIGLGNTVAVIAPNIPALYEAHFGIPMSGAVLNPVNIRLNASTVAFLLGHCTAAAVIVDQEFFSLAEEALKIWSEKAKTFSPPLLIVISDENCDPKALKYALGKGAIEYEDFLQSGDPEYAWKPPEDEWQSISLGYTSGTTASPKGVXVLHHRGAYLMSLSGALIWGMTEGAVYLWTLSMFHCNGWCYTWTLPALCGTNICLRQVTAKAVYGAIAKYKVTHFCAAPVVLNTLINAPAEDTILPLPHVVHVNTAGAAPPPSVLSGMSERGFRVTHTYGLSETYGPSVYCAWKPEWESLPPENQARLNARQGVRYIGLEGLAVVNTKTMEPVPADGKTVGEIVMRGNSVMKGYLKNPKANEETFANGWFHSGDLAVKHPDGYIEIKDRSKDIIISGAENISSVEIENTLYSHPSILEAAVVARADEKWGESPCAFVTLKPGVDKSNEQRIIEDILKFSRAKMPAYWVPKSVVFGALPKTATGKIQKHILRAKAKEMGPVKLSKL

SEQ ID NO: 160448 - protein, 70 aa, Glycine max
  Clone ID: PAT_MRT3847_115902C.1.pep
SIYLHTCACARAHTHTHTHTRSHISESHGPLITDIPFYHGKFLVYLCICQWSVSALKEESYIDSFSIPST

SEQ ID NO: 160449 - protein, 95 aa, Glycine max
  unsure (1)..(95): unsure at all Xaa locations
  Clone ID: PAT_MRT3847_115903C.1.pep
XXPXRSQRTRXPPSKYXKQTSSSSFFCLDGGXIPFXXRLXXAXTXTXXVSKRXXNNWRLXQPWQXXEXPCTXXDMRXSRNPXRQXSQALAXAXXX

SEQ ID NO: 160450 - protein, 93 aa, Glycine max
  Clone ID: PAT_MRT3847_115904C.1.pep
LPPPQGKLPQPGAKRLGFSSQTQPRPPLKGLLSPWPSFQRREVLVGLRSTPHPRSWALRFKFVMNFSTVFIYFLTSLVVKCNLAFSFLSCHIC

SEQ ID NO: 160451 - protein, 69 aa, Glycine max
  Clone ID: PAT_MRT3847_115905C.1.pep
SSEFGSRHHIANVTEPVNLCIELKIDRNPADVIKTLGHFQQSHYPIDATFIPARNVNHRTHSYVNRNEK

SEQ ID NO: 160452 - protein, 29 aa, Glycine max
  Clone ID: PAT_MRT3847_115906C.1.pep
HASGSFMFSTLDRLIYHGLQSMKAMRAFC

SEQ ID NO: 160453 - protein, 68 aa, Glycine max
  Clone ID: PAT_MRT3847_115907C.1.pep
FASCIAIYLAHEHRKSSVEDLASCFEKQHTSPLFQACEDLHIQTCPFDVMWDHYLGPVIFRPPLCCHL

SEQ ID NO: 160454 - protein, 181 aa, Glycine max
  Clone ID: PAT_MRT3847_115908C.1.pep
METLSHEPLLYDNSAGETPPSPSTPLQNSREKKQLSVKEEEEEEKEAKADTLLDLNAPGGDSAIGCSPVLNLITCLDTDLSSTTSENQHGSEPRVFSCNYCQRKFYSSQALGGHQNAHKRERSIAKRGHQRSGSRLMASATTALGIPFLHNHLHHHYATMASLPLHGASSNNKPLGIQAHS

SEQ ID NO: 160455 - protein, 515 aa, Glycine max
  Clone ID: PAT_MRT3847_115909C.1.pep
RVRAFEQQVARAESARGALIRLQQNWKVKRQRQAAIVPGNEGFTFDLFDNSYDQAAIIRSLSMSTVRVNHDAAGNLAINVSPDLCHSLQFGFVGAQSDDTWRKSNENKSHFSGEHNLGEMGEESLSDEECVKKTNSLLREVHEAIFNEQVFDLVNREAFNTVAGVSVTGIRENYLQLSLGQGTSVYLTLVSNSQDHSTVEDELTDNVENAILPLESSDGMKREAKQNTSKKGQFSNSICYEIYIQQIFHEHIFGKGGDKAISSGNRLSGVQAKDGSSLLGHFFKSLAHRIFSTKVLAELENVVCKVPYIQLISNPTWHSRASSWTLYMEVPQSILRGSQTKTSDYYEKNAVKRQFWTKVVVNDDCINVKAEGSPNVAGLFKGKIEETHSINKYNCNLADLPVIILQQVASQIINWLYQEAMMVGIKVNRDFLCLSLELKQGETLGLVASVDPEDSEECISWWLVMEDSFAEEQKLHMSITDGASEYRKFLGHLSLDLLYATLIDLVGLCSGGGGQ

SEQ ID NO: 160456 - protein, 60 aa, Glycine max
  unsure (1)..(60): unsure at all Xaa locations
  Clone ID: PAT_MRT3847_11590C.1.pep
TKSTXYLHQSNXKEPVAMCTGQLWQEETXSFSNLEXTRSYCHFQQSXCYLEVTTEDSFTD

SEQ ID NO: 160457 - protein, 91 aa, Glycine max
  Clone ID: PAT_MRT3847_115910C.1.pep
PATCPPPLGLEIEVGKIHPKQFWKHNAFGASPSGGHKHKIGEGTLFPVPHEKADLSVRSIWGPSRHSEEKIFINSVSSQNEERCQCEKKKD

SEQ ID NO: 160458 - protein, 106 aa, Glycine max
  Clone ID: PAT_MRT3847_115911C.1.pep
LGRKRKGRFHHSSFVTGAPIFAAGKIIVKNGVIVAVEPHSGHFKPRLGNLLALCFMLAKHGVDIDNIAFVKPKKWTCAWPFPSQPDLELEHFVSALDTDYGDSEES

SEQ ID NO: 160459 - protein, 65 aa, Glycine max
  Clone ID: PAT_MRT3847_115912C.1.pep
LIIFFTSHNMMGSAPAQQQMSYYDHVQTRHQEKGSLYSCLSRLCCCFCCYHGCTCRLGCTCRCCP

SEQ ID NO: 160460 - protein, 200 aa, Glycine max
  Clone ID: PAT_MRT3847_115913C.1.pep
LGYVVSVSVLEIGGVRVTIVKNEEGGNSVATVVLRGSTDSILDDLERAVDDGVNTYKAMCRDSRFVPGAAATEIELAKRVKDFSFKETGLDQYAIAKFAESFEMIPRTLAENAGLNAMEIISSLYAEHASGNAKVGIDLEEGVCKDVSTLSIWDLHVTKLFALKYAADAACTVLRVDQIIMAKPAGGPRREQPAGGMDED

SEQ ID NO: 160461 - protein, 52 aa, Glycine max
  Clone ID: PAT_MRT3847_115914C.1.pep
LQPCLYRLGSPSSYYEVLAEHVAFKVMVVTLSTQCMQAPSRARRMSYRLAVR

SEQ ID NO: 160462 - protein, 49 aa, Glycine max
  Clone ID: PAT_MRT3847_115915C.1.pep
FMAHNSKHTTSQESCNSQSITYQLIITYTSSQSHFHNKIIYCISCTLHI

SEQ ID NO: 160463 - protein, 46 aa, Glycine max
  unsure (1)..(46): unsure at all Xaa locations
  Clone ID: PAT_MRT3847_115916C.1.pep
FYTLTNLRELKIXSITXGTXXIEFKYETTWDGTTWSRPRGIQRPST

SEQ ID NO: 160464 - protein, 83 aa, Glycine max
  Clone ID: PAT_MRT3847_115917C.1.pep
GSLLHSPTVCACNRSLWNACPYSVAPLSPVKSGTIQTFRAPCVRTGAWIRLHSPISCAGRIPQPSLISRSGGPFNDSAPQVIT

SEQ ID NO: 160465 - protein, 82 aa, Glycine max
  unsure (1)..(82): unsure at all Xaa locations
  Clone ID: PAT_MRT3847_115918C.1.pep
VQHQGSSILGIWGGKGQGXSXQCELVFAXMGIXPIMXSAGELESXXAGXPAKLIRXYREAADLXXMGXMCXXFINXLDXGXV

SEQ ID NO: 160466 - protein, 110 aa, Glycine max
  unsure (1)..(110): unsure at all Xaa locations
  Clone ID: PAT_MRT3847_115919C.1.pep
RSQKKKKKKARDALFTRKSENHKHERKRRATHKREKTGPTPTKPPNRAPAKKETRTPXAGPDAAGKTTTXHKPKHGENATTNPTTGPNAETGEHKNTSPTGGDAGGQDKN

SEQ ID NO: 160467 - protein, 339 aa, Glycine max
  unsure (1)..(339): unsure at all Xaa locations
  Clone ID: PAT_MRT3847_11591C.1.pep
MSTSSINGWCLSSISPAKTSLRKATLRPSVFATLNTPSSSSSSSSLRYLIQDRPVFAAPAPIITPTVREDMAQEYEKAIEELQKLLREKSELKATAAEKVEQITASLGTSSSDGIPSSEASDRIKAGVIHFKKEKYDQNPALSGALAKGQSPKFMVFACSDSRVSPSHVLDFQPXEAFVVRNVANIVPPYDQSKYAGTGAAVEYAVLHLKVSEIVVIGHSACGGIKGLLSFPYDGTYSTDFIEEWVKIGLPAKAKVKTQHGDAPFAELCSHCEKESVNVSLGNLLTYPFVRDGLVNKTLSLKGGYYDFVKGSFELWGLQFGLASSFSVKDVATILHWKL

SEQ ID NO: 160468 - protein, 105 aa, Glycine max
  Clone ID: PAT_MRT3847_115920C.1.pep
ASDQPCSGTVALHFPAANGSIREAPAKALLSRAQATPLIKVGAQRHIPVPPINVDSVRPTDLGQNRFQRCDEGPQSSDLVVFLGPNIWTSFFESQRLEGVCIVVG

SEQ ID NO: 160469 - protein, 68 aa, Glycine max
  Clone ID: PAT_MRT3847_115921C.1.pep
MNDWAPPLIAAALFWLLSPGMIFQLPGKNAPFQFMNMKTTVASMFVHTVIYGLFLMLFFVVLSIHLYI

SEQ ID NO: 160470 - protein, 92 aa, Glycine max
  Clone ID: PAT_MRT3847_115922C.1.pep
TLILSNVLDFKPIQLSKANATSNKLKAITQSIHYSTHTLSFTQYYLNSNLIYPHLSNTFSHKEFTSPPTTTQTPSSNYTILNPTPNLVLHII

SEQ ID NO: 160471 - protein, 50 aa, Glycine max
  unsure (1)..(50): unsure at all Xaa locations
  Clone ID: PAT_MRT3847_115923C.1.pep
PTXWGAEKALYYTPHQTQQNFALRGHHIYNAQNVNGDHKPININLNLLKQ

SEQ ID NO: 160472 - protein, 70 aa, Glycine max
  Clone ID: PAT_MRT3847_115924C.1.pep
NFGKGLCKTKSKKKVFFGIISFWGGPILRKNWKFLNLGVPPPQFNLKKALFRSPKKKKKKKKKKKKKKKK

SEQ ID NO: 160473 - protein, 64 aa, Glycine max
  Clone ID: PAT_MRT3847_115925C.1.pep
GKKKKFFWGGNPGALRGLPPPTICLGGQFTKPPFLPFSPLGPLFFTNREFFGTPPPIPKFRGGV

SEQ ID NO: 160474 - protein, 121 aa, Glycine max
  Clone ID: PAT_MRT3847_115926C.1.pep
MTNRIHGHEQPKASNNLNGQVCEICGDSVRLTVDGDLPVACNERGYPVCMPCYEYERREGSHLCPQGETRYKRLKGSPLLEGDDDEDDGDDIVHESNIAEQKNKHGQFAEAMLHGRMSYGT

SEQ ID NO: 160475 - protein, 68 aa, Glycine max
  unsure (1)..(68): unsure at all Xaa locations
  Clone ID: PAT_MRT3847_115927C.1.pep
QLRPIGSPPSNLLDQGVFGYVHXGFLPIGKIVSVMHFNSEITHGDREFHPYFDVITRVHHRHLVSQVG

SEQ ID NO: 160476 - protein, 154 aa, Glycine max
  Clone ID: PAT_MRT3847_115928C.1.pep
MEVDQMQRECLDYTKSLFLEGFLDGQFLQLQQLQDENNPDFVVEVVSLFFEDSERLLNDLTFALNQKSIDFKKVDAHVHQLKGSSSSIGAQRVKNCCISFRNFCEEQNIDACLSCLQQVRQEYCHVKNKFETLIRLEQQIVAAGGSIPMMEFSF

SEQ ID NO: 160477 - protein, 62 aa, Glycine max
  Clone ID: PAT_MRT3847_115929C.1.pep
MEVDQMQRECLDYTKSLFLEGFLDGQFLQLQQLQDENNPDFVVEVVSLFFEDSERLLNDLTF

SEQ ID NO: 160478 - protein, 339 aa, Glycine max
  Clone ID: PAT_MRT3847_11592C.1.pep
TSSINGWCLSSISPAKTSLKKATLGPSVFATVSTPSSPSSSSSSSFPSLIQDRPVFAAPAPIITPTVREDMAKEYEQAIEELQKLLREKSELKATAAEKVEQITASLGTSSSDGIPSSEASDRIKAGFIHFKKEKYDKNPALYGELAKGQSPKFMVFACSDSRVCPSHVLDFQPGEAFVVRNVANIVPPYDQSKYAGTGAAVEYAVLHLKVSEIVVIGHSACGGIKGLLSFPYDGTYSTDFIEEWVKIGLPAKAKVKTQHGDAPFAELCSHCEKEAVNVSLGNLLTYPFVRDGLVNKTLSLKGGYYDFVKGSFELWGLQFGLASSFSVKDVATILHWKL

SEQ ID NO: 160479 - protein, 156 aa, Glycine max
  Clone ID: PAT_MRT3847_115930C.1.pep
RYFSLLFFFGSEFDIHVFTHFLPSLAISSRLLQVPFPKQTMLATDDAVESVVSVPGPADPSTGNNQIMIEDDTITSSVQYCCDGCSTVPIQRRRWHCTVCPDFDLCEACYEVPDADRLPPPHSRDHPMTAIPIEVDSVGDGNEFQFTADDVSDQNL

SEQ ID NO: 160480 - protein, 68 aa, Glycine max
  Clone ID: PAT_MRT3847_115931C.1.pep
RAHFCKITHPSLHHDDNQKRCENFLIVRAYSTRGSCLISFIELSLRTSESNHEFQIMQRIQHFHKIWQ

SEQ ID NO: 160481 - protein, 84 aa, Glycine max
  Clone ID: PAT_MRT3847_115932C.1.pep
TGGKAPRKQLATKAVGRSVPATGGVKKPPRFRPGTGALSRIRKSQKSPGLLIRKLPFQRWFQGIAQDLRTDLRFKSSSVFRFKE

SEQ ID NO: 160482 - protein, 82 aa, Glycine max
  Clone ID: PAT_MRT3847_115933C.1.pep
GVRASSVTLTLLARIMGKPESLKKDGRILKCTSEASQQRLRHGQRFQAMHDQGGTSMAIEAVSIRTISKSNDGGPIVLELWR

SEQ ID NO: 160483 - protein, 49 aa, Glycine max
  Clone ID: PAT_MRT3847_115934C.1.pep
ENGVVSFICYLPVCTLHVSTDSPVYELLSLSVTFCLRLSVNASSQESQS

SEQ ID NO: 160484 - protein, 165 aa, Glycine max
  unsure (1)..(165): unsure at all Xaa locations
  Clone ID: PAT_MRT3847_115935C.1.pep
MAPPRGGGGFRGGRGDRGRGRGGGGGRGGDRGTPFKARGGGRGGRGGGRGGGRGGGRGGMKGGSKVVVQPHRHDGIFIAKGKEDALVTKNLVPGEAVYNEKRITVQNEDSSKDEYRVWNPFRSKLAAAILGGVDNIWIKPGAXVLYLXAASGTTVSHVSDVVGPT

SEQ ID NO: 160485 - protein, 317 aa, Glycine max
  unsure (1)..(317): unsure at all Xaa locations
  Clone ID: PAT_MRT3847_115936C.1.pep
MAPPRGRGGFGGGGGFRGGGRGDRGRGRGGGGRGGDRGTPFKARGGGRGGGGRGGGRGGGRGGGRGGMKGGSKVVVQPHRHDGIFIAKGKEDALVTKNLXVPGEAVYNEKRITVQNEDGSKXKYRVWNPFRSKLAAAILGGVDNIWIKPGARVLYLGAASGTTVSHVSDVVGPTGVVYAVEFSHRSGRDVVNMAKKRTXNVIPIIEDAXRHPAKYRMLVGMVDVIFSDVAQPDQARILGLNASYYLKAGGXFVISIKANCIDSTVPAEAVFEKRKXTLLKADQFKPFEQVTLEPFERDHACVVGGYRMPKKKKDAAE

SEQ ID NO: 160486 - protein, 307 aa, Glycine max
  unsure (1)..(307): unsure at all Xaa locations
  Clone ID: PAT_MRT3847_115937C.1.pep
MAPPRGGGFRGGRGDRGRGRGGGGGRGGDRGTPFKARGGGRGGGRGGGGRGGGRGGGRGGMKGGSKVVVQPHRHDGIFIAKGKEDALVTKNLVPGEAVYNEKRITVQNEDGSKDEYRVWNPFRSKLAAAILGGVDNIWIKPGARVLYLGAASGTTVSHVSDVVGPTGVVYAVEFSHRSGRDLVNMAKKRTXMVIPIIEDARHPAKYRMLVGMVDVIFSDVAQPDQARILGLNASYYLKAGGHFVISIKANCIDSTVPAEAVFESEVNKLKADQFKPFEQVTLEPFERDHACVVGGYRMPKKKKDAAE

SEQ ID NO: 160487 - protein, 169 aa, Glycine max
  unsure (1)..(169): unsure at all Xaa locations
  Clone ID: PAT_MRT3847_115938C.1.pep
MSLIPNFFGGRRNSVFDPFXSLDVWDPFXGFSFLPKYAFASAFLPLNFLGENFQLFGEHPLLDGKDEPQRRDVFKADIPGLKKEEVKVQIEDDKVLQISGERNVEKEDKNDTXWHRVERSSGKFMRRFRLPENAKVEQVKASMESGVLTVTVPKEEVKKPDVKAIEISG

SEQ ID NO: 160488 - protein, 88 aa, Glycine max
  Clone ID: PAT_MRT3847_115939C.1.pep
MFSTTIFTALWCQIRTSTQLARKSFMAVKESNTSQNIQQQQQQQQEACDPCKSFGQKCSHIVKKQRAKFYILRRCIAMLLCWHERGDT

SEQ ID NO: 160489 - protein, 76 aa, Glycine max
  Clone ID: PAT_MRT3847_11593C.1.pep
LNFSLQFFGGGLSITKYITLYVSFLHFMTPPKKTHSTKTTSSCTCNTHTKHFFYYDSKQKTLLASTKKKNPIFFIF

SEQ ID NO: 160490 - protein, 81 aa, Glycine max
  Clone ID: PAT_MRT3847_115940C.1.pep
RTAPRNSASTLAEAATEVRPATYSMGRVRTITEKLSICLVAYWYYLCMALDFRPSMSFSVKWPSILPIGCGIRSRVSPRIS

SEQ ID NO: 160491 - protein, 51 aa, Glycine max
  Clone ID: PAT_MRT3847_115941C.1.pep
LWCDFQSHEIPQIATTELRWCSNIAFNTVLLYFFIVKIKLNFRFQSSILNF

SEQ ID NO: 160492 - protein, 56 aa, Glycine max
  Clone ID: PAT_MRT3847_115942C.1.pep
RSSSPTVTFSVLFPATYLACQQRIYNPTYLGTTARNGKRDISCPSDHNLCGCSLCW

SEQ ID NO: 160493 - protein, 37 aa, Glycine max
  Clone ID: PAT_MRT3847_115943C.1.pep
ALVLHQPLEKQLFIIHNPHTRFWCRSQKTISAIVGSH

SEQ ID NO: 160494 - protein, 70 aa, Glycine max
  unsure (1)..(70): unsure at all Xaa locations
  Clone ID: PAT_MRT3847_115944C.1.pep
ACDPPXSTLAILGLQILVTIPVTLLSLLKATCTLRDSFLWXHKFKRRTCLHTKSLPTAKVGFTNISCALG

SEQ ID NO: 160495 - protein, 105 aa, Glycine max
  Clone ID: PAT_MRT3847_115945C.1.pep
ISARGPGRQFSVNSQSITTRPEAKVFLQAGRGYCLHGAEPVRIPSKEFGDSTLLIWTWKRNYSRHLTVNKVAAPLAPYNGCNPRGLSGVPGSIWWTLITPICCLP

SEQ ID NO: 160496 - protein, 101 aa, Glycine max
  Clone ID: PAT_MRT3847_115946C.1.pep
KMNIITSSIQFLGWGKLNKELASKQMTNGFHFLQGFLVFGTLKMICNILGTGMNTISLIFQKMWKPHLLRGAFTVHWFLELFPQCKCQRRGASITNLPGLG

SEQ ID NO: 160497 - protein, 71 aa, Glycine max
  Clone ID: PAT_MRT3847_115947C.1.pep
GTIFFIHCQFHFLSVHACNSLQFLESAKLVIVTSSKFKTSLFCPSLHMLSLLKVQVFFSHLQFHLPRISLL

SEQ ID NO: 160498 - protein, 80 aa, Glycine max
  Clone ID: PAT_MRT3847_115948C.1.pep
NTINPPYANGPAYIISSDIVTFILSQHKDTKMEDVSMGMWVERYNNTNDNSKVLQNQFARNRIEFCTNVSKKRGDKKEMR

SEQ ID NO: 160499 - protein, 165 aa, Glycine max
  Clone ID: PAT_MRT3847_115949C.1.pep
PPPPLLPPPATPRPPPPPWPPPPPPPAPAPPPPRPPLASTPPPMPPPPPPPPPTPQSPLSNPTASPPPLSPHPVRPPSPIPHPSCPHQPKANKQHPLPKASPPGLQQYYKIPSVLGNNPASPQPFPKFFTPGLVSWHPNLLPSHSLIFPPSGYWQVFFSDTMCHI

SEQ ID NO: 160500 - protein, 303 aa, Glycine max
  Clone ID: PAT_MRT3847_11594C.1.pep
MLRTLARVFKRATLANDLLQKRSRFYATTVGGRSDRLEGKVALITGSASGLGKATAHEFVQHGAQVIIADNDTKLGPQVAKELGPSAHYTECDVTVEAQVADAVNVAVAHYGKLDIMYNNAGIPGPSIPPSIVDLDLDEFDRVMRINIRGMIAGIKHAARVMIPVGSGSILCTSSISGVLGGLGPHPYTISKFTIPGVVKSLASELCKVGIRINCISPAPIPTPMVLAQIGKFYPGLTQEQIVGIVNGFGELKGAKCEDIDVAKAALYLASDEAKFISGQNLIVDGGFTSFKNLTFPSPDQTA

SEQ ID NO: 160501 - protein, 59 aa, Glycine max
  Clone ID: PAT_MRT3847_115950C.1.pep
NSGIFLWNGQGRKVSNTIVFLKQKKSSLIQGGVAVTYHNSDVIACEKALFWLLLKTALL

SEQ ID NO: 160502 - protein, 78 aa, Glycine max
  unsure (1)..(78): unsure at all Xaa locations
  Clone ID: PAT_MRT3847_115951C.1.pep
NPAXSMFXASXSXITLKHLIXLXSXRRKXMFXLSXTWTLPLXPPXFGISXIXFSCPYLXTIXIGXXXXXXXXLSRMXL

SEQ ID NO: 160503 - protein, 233 aa, Glycine max
  Clone ID: PAT_MRT3847_115952C.1.pep
MDESGSASSPTRPVTIEGGECDAALSKSRVLTREEVLRRRLRRVRQLGRCYRAHYWALMEELRSKYRDYCWTYGKSPFKEDHDDNNNNNDQNGVVSGGDDIVRCRFSGCKTKAMALTNYCHAHILGDSKQKLYQGCKAVAKNLPTGPSFCNKPVLRSMVPPACPSHFQFGERCLARALRRAGLGTAIATTRKPNVKLHVIASEFVRQIQNKRKLALKKTAPKVETEQETKLIC

SEQ ID NO: 160504 - protein, 82 aa, Glycine max
  Clone ID: PAT_MRT3847_115953C.1.pep
HINIKDENKNVLFKPKCSNPCQYCQKLFENDVLNLSLLTENGNTKDDLKLPTDESLLTQVCTNQLFLCVAIAAWKFMILDTL

SEQ ID NO: 160505 - protein, 90 aa, Glycine max
  unsure (1)..(90): unsure at all Xaa locations
  Clone ID: PAT_MRT3847_115954C.1.pep
DPKTIXRNTSIKSERKFWACDDYPRRRHTLPFNTRLTTFYDDAMQIDPVTLKCNTFPVLSLCYSVACLVYPCHLPLRHTVRSSHVFLVLS

SEQ ID NO: 160506 - protein, 87 aa, Glycine max
  Clone ID: PAT_MRT3847_115955C.1.pep
HVMKHNHPLFGTCQITSCRLQIRIIDKIPVAINCLASIFQSTIPANITRHHPSPIKITVTSSCADYYFMSINLPKINTNLCKSRRSR

SEQ ID NO: 160507 - protein, 49 aa, Glycine max
  Clone ID: PAT_MRT3847_115956C.1.pep
YYHCFNKDFFSVKRDQLFESCSLSREPSNGKFCSAISSRTRETISIKIL

SEQ ID NO: 160508 - protein, 90 aa, Glycine max
  Clone ID: PAT_MRT3847_115957C.1.pep
SSLFTPSTSTVLSAVVHVSNFSGSPNPLYSFVSSCGCSIFSSSFLRKTSEPSVTLSSALSFNAGSSPSAALDFSSSIGTSTFSPALASSP

SEQ ID NO: 160509 - protein, 64 aa, Glycine max
  Clone ID: PAT_MRT3847_115958C.1.pep
LKIIKVVLSVCLPVFSQRIRHILRSKVSDGNVAIFWSGFLGVGSSTRIGSERLTSLTFGAYLQS

SEQ ID NO: 160510 - protein, 103 aa, Glycine max
  unsure (1)..(103): unsure at all Xaa locations
  Clone ID: PAT_MRT3847_115959C.1.pep
FLVRHRVRNTPCQKAEARHQETVHDVAMDYYGKRMATGSSEHTLXITGVSNTASQYFTTLTGHQXHDGKWQLAHPNVGSLLASRHYDGRANARHEGKQGLWTP

SEQ ID NO: 160511 - protein, 82 aa, Glycine max
  unsure (1)..(82): unsure at all Xaa locations
  Clone ID: PAT_MRT3847_11595C.1.pep
STVFSLLAMDGSGVALIALLLRSEGLEHYRCDRNTYMGMYLINMAKMLKCAGYYDFISIMAYDWSDTVCFXLESPTQVKISE

SEQ ID NO: 160512 - protein, 32 aa, Glycine max
  Clone ID: PAT_MRT3847_115960C.1.pep
KRQLQNAKDSKKLIVVDFTASWCGPCRVMAFF

SEQ ID NO: 160513 - protein, 112 aa, Glycine max
  Clone ID: PAT_MRT3847_115961C.1.pep
LSLHLFLPYCSLSLFFPFIYIAYSSSCCSLTNTNFTRKDLTMDFDLENPLGNFHDLPCDAVPSLFLIESDHIPPPNYCQSFKASDFDISVRRDVVSLISQVIQQHQPQFTFF

SEQ ID NO: 160514 - protein, 92 aa, Glycine max
  unsure (1)..(92): unsure at all Xaa locations
  Clone ID: PAT_MRT3847_115962C.1.pep
ARGNTTLPLLQIVLHTHLLLSAQNRHSLQIGTVHEKCVRPRNTNSHCSLVIFKVSAFGANKIRGTSRNSNGNTKLFFSLXSAAXXLWLSVIE

SEQ ID NO: 160515 - protein, 99 aa, Glycine max
  Clone ID: PAT_MRT3847_115963C.1.pep
MKHTDNGAFNSEHKVLLHQSIARYLKHSGFYKTLKKFRSEAQFEKNDLKGSPVDLEEMCLKYFEICGKDAKSNLNDQNEQGVNSKNKEEGKSKEKKKRI

SEQ ID NO: 160516 - protein, 146 aa, Glycine max
  Clone ID: PAT_MRT3847_115964C.1.pep
TPIVLLLSMQFLSGVHLVGNRRRNSRDIGKDAKSNLNDQNEQVAGVNSKNKEEGKSKEKKKKKSKLVSESLATNVEDDQLESVATAKENKEKDDVSTDAKVINGSETEKKSKSKMKKKDNRSDEGDAIEQIGDPNETVSKEENIEA

SEQ ID NO: 160517 - protein, 80 aa, Glycine max
  Clone ID: PAT_MRT3847_115965C.1.pep
SLFSYQLANISSEYLAFTTDTPASSIPLEPTNIITAPHLALTKSFSYCLHSQSLYLIFLCLSIIILHNFFILTKYFSPNL

SEQ ID NO: 160518 - protein, 50 aa, Glycine max
  unsure (1)..(50): unsure at all Xaa locations
  Clone ID: PAT_MRT3847_115966C.1.pep
FLSKDLISAYQLVKSERSHFSERDANRFTTFREGSSVFRPSIATWVRMXQ

SEQ ID NO: 160519 - protein, 106 aa, Glycine max
  unsure (1)..(106): unsure at all Xaa locations
  Clone ID: PAT_MRT3847_115967C.1.pep
PELSLSTKKHQRFRRMSIFRNFLHCYLPLPHSHSRWRRRFHWQLALRTLFTVLGLVMLAVFLYTAFTDGLGVKLSGRTNHSGGGLHFTFVHXXPXNSFLNHDPSSV

SEQ ID NO: 160520 - protein, 54 aa, Glycine max
  Clone ID: PAT_MRT3847_115968C.1.pep
FGVLSRTRTPAEESCAAALNEKASTNETPCISRIYGKVQSRASSSVYLSLTISS

SEQ ID NO: 160521 - protein, 182 aa, Glycine max
  Clone ID: PAT_MRT3847_115969C.1.pep
MSSCSIDVAPEQLCYIPCNFCNIVLAVSVPCSSLFDIVTVRCGHCTNLWSVNMAAAFQSLSWQDVQGPGQCNPEYRIDTGSTSKCNNRIAMRAPTTHVTEERVVNRPPEKRQRVPSAYNQVIKEEIQKITAISPGVAFSTAAKTWAHFPHIHFGLMLESNNQVKMENVSEKHLMSRAALLNK

SEQ ID NO: 160522 - protein, 81 aa, Glycine max
  Clone ID: PAT_MRT3847_11596C.1.pep
LFSFFKKYFPNFYSITFFIPSSLTLHYLIMPTTLTTHQTRTKYYGHKTKNFHQPKTHILKSTLFSTTLMQTLLYQNNHPIL

SEQ ID NO: 160523 - protein, 162 aa, Glycine max
  Clone ID: PAT_MRT3847_115970C.1.pep
TCPCFMYQVSQESATPIGWIDIIVPGNQIPRWFNNRCVGNSISLDPSPIMLDNNWIGIACSVVFVVFDDPTSLDNDWKSSISIGFETKSYSSRGSPLYIPILLDRNLVTAKLHHLWLLYLTRGEFFSYFKIEKMLDLYGIKMHAMVDNSQGLHLEVLQCGYQ

SEQ ID NO: 160524 - protein, 62 aa, Glycine max
  Clone ID: PAT_MRT3847_115971C.1.pep
QLLKNQFSHDSPLADQSIHYRSVEKRTMAYESLIKVREARVHASEACALSVAAVNQSLEVSN

SEQ ID NO: 160525 - protein, 63 aa, Glycine max
  unsure (1)..(63): unsure at all Xaa locations
  Clone ID: PAT_MRT3847_115972C.1.pep
WVYXXLTSRSITSVAXXAGXPIPXXTHXXNMXNQNXVPXFXXXXEXPKESGSSXAXASIAXVX

SEQ ID NO: 160526 - protein, 46 aa, Glycine max
  Clone ID: PAT_MRT3847_115973C.1.pep
IYKYCLVCSECMFYLERSIWVNDTIFFKSFLMMLTKKQLFFLKKLN

SEQ ID NO: 160527 - protein, 151 aa, Glycine max
  unsure (1)..(151): unsure at all Xaa locations
  Clone ID: PAT_MRT3847_115974C.1.pep
LRHCVAGEHKLLTDGKLCEGKHIPVSNICAGENYVGXIPLMDHEEIVASSASDFRTAMVSXNGKPXATAMHEXAIEIIIDCFASPDCNIFGAMLWVDTYDTNPENACPSFFCAPFRSGRPIRVDTFPNTIVQIDPDVSSRGELLSATTNGD

SEQ ID NO: 160528 - protein, 63 aa, Glycine max
  unsure (1)..(63): unsure at all Xaa locations
  Clone ID: PAT_MRT3847_115975C.1.pep
QPINNQSVTYNIYPLINLTFKHHYNFINIYXTPFFKNIILHFSIKSISKLKSNSNSYYNTTKI

SEQ ID NO: 160529 - protein, 117 aa, Glycine max
  unsure (1)..(117): unsure at all Xaa locations
  Clone ID: PAT_MRT3847_115976C.1.pep
SYQDCVPRTYXGLHPQNTSGLNTGMXKLPFSQGTPRYVXRMTLPIRGGAGALNAIVMNRPNAGLXWGDPLVAYLFFDIIKTTXPLLKXSVSFIVASRNSTYDPINAEACPHKLEPLG

SEQ ID NO: 160530 - protein, 85 aa, Glycine max
  Clone ID: PAT_MRT3847_115977C.1.pep
GIRVRPPLVHSYPLFGSHNSSDEFVIDSFTISSFFKDFWACVLHGCEEPILATSDKLCQCVNTKKTPITKNKKKKKKKQKNKKQR

SEQ ID NO: 160531 - protein, 66 aa, Glycine max
  Clone ID: PAT_MRT3847_115978C.1.pep
KEESKGLAAFEGEKGREINGKIGNDVVGRKSDKKAKPDSTTRATIKEVVASASQAMTSLAKKFNDE

SEQ ID NO: 160532 - protein, 41 aa, Glycine max
  Clone ID: PAT_MRT3847_115979C.1.pep
ELDSIDEESMFLTLIEGVLAANIIDGGSLSCIDLYHTGTII

SEQ ID NO: 160533 - protein, 72 aa, Glycine max
  Clone ID: PAT_MRT3847_11597C.1.pep
GLDFVIAEAGKNGVRLILSLVNNWNDYGGKSQYVQWARERGQYVNNDDDFFSHPIVKEYYKNHVKVKINYMS

SEQ ID NO: 160534 - protein, 83 aa, Glycine max
  Clone ID: PAT_MRT3847_115980C.1.pep
QADASDQPPSQSPGHLDRGRKPVRINVASIVSVSACADLTLPSGAGLCIDTIHGPTFLVAHSWEALDGWLDAIRLVYTIFARG

SEQ ID NO: 160535 - protein, 179 aa, Glycine max
  Clone ID: PAT_MRT3847_115981C.1.pep
MSKRANKRKAKQDEQPKQRKKRSTTIKPAEHEEYFEDQRNLEDLWRETFPVGTEWDQLDSVYQYKWNFSNLENAFEEGGVLHGKRVYLFGCTEPQLVWFKDESKVVCIPVVVAVVSPFPPSDKIGINSVQREFEEIIPMKQMKMDWIPYIPLEDRESRVDRLKSQIFILRCTQRKAALK

SEQ ID NO: 160536 - protein, 66 aa, Glycine max
  Clone ID: PAT_MRT3847_115983C.1.pep
FFSFYPDRCLVGWSSGNLQCIIFSLIIFVLGINLTLFQTLIFAALGQFLCKMSKEEVIILGCKDVG

SEQ ID NO: 160537 - protein, 44 aa, Glycine max
  Clone ID: PAT_MRT3847_115984C.1.pep
LLSKKTVKKRANMFKRPHSDRPISVETNWRLPKGFESRVRRLLK

SEQ ID NO: 160538 - protein, 89 aa, Glycine max
  Clone ID: PAT_MRT3847_115985C.1.pep
SYYDNKSESDPKKETITPFLAPLTVGGAPRAFILNGHPRKKFILWKKRPLAPPGPLQLNPGRPAKKFFYPSKFLDFFSFIHSPDSPQCR

SEQ ID NO: 160539 - protein, 188 aa, Glycine max
  unsure (1)..(188): unsure at all Xaa locations
  Clone ID: PAT_MRT3847_115986C.1.pep
YSSSQLQETIERKTRMRKSKHDSQHEQCEPSRHPTRPGSTGCKRKSSEGHPQAXQARGXELIQRTSHNWGWTSAQKGYVRTMNSRRLKSLRYKPEKTPNGIHPESPGRIEDREIPVIGNQWCQAVERIYEKEVGEAMHLFTMSVLQIWEQEKLEKHKQVKKNKDLERKERNMDRDDQKLQKQIQALER

SEQ ID NO: 160540 - protein, 70 aa, Glycine max
  Clone ID: PAT_MRT3847_115987C.1.pep
ILVMKRKPPAFPISFPNTYWNKRIIDPLFGILHRKLIIVERKTMYLILPWTLDKPRVNIVQLQPKQHGDT

SEQ ID NO: 160541 - protein, 44 aa, Glycine max
  Clone ID: PAT_MRT3847_115988C.1.pep
KGGTGSFTKPFLSIESLNNKFQSLGAINGAARLIGHKVGKFLPW

SEQ ID NO: 160542 - protein, 243 aa, Glycine max
  Clone ID: PAT_MRT3847_115989C.1.pep
METLHPSSPSSHLKLKTNIHVEVADSNRGACVDENDDSLQGSLWPEPHSSITVIPTTTTTETIESLDLPFASINNIHSEDATDSLDVGFRDALHVVEQHYHVSLGSSLSQTLASLPQPPYPLASPLPPYPPPPRLYPLKPQPPPPPRLTQVCASLTVVFDCQGLSRVVRHSQLSLPLVASSSSDHVATTSSLQFGEFHSWPAPIGAEVRVASDSKNHSQAKKRHRDMINALRHSTQSSHLSRR

SEQ ID NO: 160543 - protein, 63 aa, Glycine max
  Clone ID: PAT_MRT3847_11598C.1.pep
VDYGCCILIEMEIIEKFAIGWNFPLFIDRLYSIVNFFIFYKCCIQFGNHVKGFVYKHKLMSFD

SEQ ID NO: 160544 - protein, 58 aa, Glycine max
  Clone ID: PAT_MRT3847_115990C.1.pep
SLIISHFIKRQRQSSTANTQFHRYLVSNLEITTMGLTPEHLLQKSSNNKRMTPSGRVG

SEQ ID NO: 160545 - protein, 71 aa, Glycine max
  Clone ID: PAT_MRT3847_115991C.1.pep
NFVGKATSEKSFESEPQAFDPKSILDSVKNSLDAFYRFSRPHTVIGTALSIISVRRTLIVEKYQYLIIFYW

SEQ ID NO: 160546 - protein, 67 aa, Glycine max
  Clone ID: PAT_MRT3847_115992C.1.pep
SKKLKKDFFLFIRETQQKVIKKTKVLQISHSSIHWGTHFLRGINDPTHFLKSFPQGGKNYKTLSRLE

SEQ ID NO: 160547 - protein, 54 aa, Glycine max
  unsure (1)..(54): unsure at all Xaa locations
  Clone ID: PAT_MRT3847_115993C.1.pep
TRLXWXAGSRXXGGRALRSAIAVLPVADLVAVLLQQVVIDVIAEGDFMGLAEQR

SEQ ID NO: 160548 - protein, 58 aa, Glycine max
  Clone ID: PAT_MRT3847_115994C.1.pep
FSPNFFPPPLPLGRHGNFCSIGPPQFRGIGMCPGSGDPLWQGILVINFGNKGPIKESF

SEQ ID NO: 160549 - protein, 90 aa, Glycine max
  Clone ID: PAT_MRT3847_115995C.1.pep
STKQCQGSLSGFWETSNYRVGEGAFALRGHHHLEPTTTTTHFLFETSSFPIIPFQKSCSSSSGFRFLTPPPPFYTHGQSLATDQTPERIF

SEQ ID NO: 160550 - protein, 101 aa, Glycine max
  Clone ID: PAT_MRT3847_115996C.1.pep
MRLCLNILNSPIPTILLTRPSLWTHHNQDNHHGWQPAPCLTEQLLLHLNITRYPLITSPTSSLHQLSLSTIHIKSYTQQPRGPSPHHIEPTSVAAPTTTSN

SEQ ID NO: 160551 - protein, 39 aa, Glycine max
  Clone ID: PAT_MRT3847_115997C.1.pep
LICEFICTTCIKIRLFFIPSSIYLFGSFNLWKNVTLEYQ

SEQ ID NO: 160552 - protein, 80 aa, Glycine max
  Clone ID: PAT_MRT3847_115998C.1.pep
PSVYVHAGRHKAVVEVVLIIEENSIMVDVSRGLFVARDPMIHSLVVAGFSVILSPFIILGFIQFSYSVEVELNLYAVVPV

SEQ ID NO: 160553 - protein, 81 aa, Glycine max
  Clone ID: PAT_MRT3847_115999C.1.pep
FDRPINVYLNEKQWQRPAYGEQMHETVYTGHRQLSTTVATYEYHMQTGRSCYSLDPLCTLAFSTNLNSWNPQVNRTQIGSA

SEQ ID NO: 160554 - protein, 57 aa, Glycine max
  Clone ID: PAT_MRT3847_11599C.1.pep
RPQKCKLYYYIKKGNLQDPHSQLQTRVMYIYTLIIFLGYFFFFFNNYPIPGKDRLPS

SEQ ID NO: 160555 - protein, 34 aa, Glycine max
  Clone ID: PAT_MRT3847_1159C.1.pep
TYTRRTRREHIRRRIAVASHTDMRTYARTRILTH

SEQ ID NO: 160556 - protein, 121 aa, Glycine max
  unsure (1)..(121): unsure at all Xaa locations
  Clone ID: PAT_MRT3847_115C.1.pep
VFLERPLWGFFFFFFFCRRGGSVLDXLAPGHASLERCGEGRRGSSWCASEGFISALKCLPGGGSYFLPPFVQRVRXGARPGCFLSRCVADPRRPVPLTGWMGSGAPMVPFPGRGGCVGSWP

SEQ ID NO: 160557 - protein, 53 aa, Glycine max
  Clone ID: PAT_MRT3847_116000C.1.pep
SDTGKACRKNDKKGKKKNGRPKRFKANLDVQGIPKPSCMVTELQLRGLRLKTS

SEQ ID NO: 160558 - protein, 229 aa, Glycine max
  Clone ID: PAT_MRT3847_116001C.1.pep
MARIKPQALLQQSKRKKGPSRISAVTVIFYFLILALVGFFLFASYRHWSSRSRLQSEDHLSVSEGENTFVDSKKSELPGYAVLNTSKGSIIIELYKESAPEVVDEFIDLCQKGHFKGMLFHKVIKHYVIQAGDNQGSGATEDWNLRGKQHTITSMKHEAFMLGTSKGKHNNKGFDLFITTAPIPDLNEKIIVFGQVIKGEDVVQEIEEVDTDEHYKPKVSSGLLHQYQI

SEQ ID NO: 160559 - protein, 179 aa, Glycine max
  Clone ID: PAT_MRT3847_116002C.1.pep
MKEDAEKDKGKDNNRIWGAILFGLIGATVTTFAVGQLRRSVEWFYTQSSWKGERNGSFRSALQEEAWRRHNKRMQEELEEEMERVERIRRMQSVFNRERNKYKRSYESWRGSGPGAYHQHFQREDWYWKADTSFRDKRTNYQETPRESGNYALSHHYSVLGLDRYSQKSWIMVHLILVS

SEQ ID NO: 160560 - protein, 75 aa, Glycine max
  Clone ID: PAT_MRT3847_116003C.1.pep
GAWIDFFEEEKGCVQQCKLGIRSRLFVLHCKGCPTCDNDVITKCPPPSGNGVWIAFMLKLGNFCCIIPRIQKAFF

SEQ ID NO: 160561 - protein, 69 aa, Glycine max
  Clone ID: PAT_MRT3847_116004C.1.pep
VNWMLCPSEGNNSAGLSFMCCHPTRKVLCRSSLLPVTPDVRFEHEIRFLLFLAAFPLKPPPPLWSIWFK

SEQ ID NO: 160562 - protein, 137 aa, Glycine max
  unsure (1)..(137): unsure at all Xaa locations
  Clone ID: PAT_MRT3847_116005C.1.pep
PPPGPRRGAPAAAPEKDPRAREPTEAGLGGQPRNTRRPGANARAPGGGVSNAIIGAAXVPPPPQGSGLGKPETERRPRELRGKGIPNTAPKGDPRVWGFNGPWGPPPDPKGTRKRGSPGNQKKKWDTSSFSSPNLEN

SEQ ID NO: 160563 - protein, 316 aa, Glycine max
  Clone ID: PAT_MRT3847_116006C.1.pep
MALPRACLARILSHRNPMFLSLSPLTMHANYLSHSQTHSLTLSASLSTSEAPSSHEPHFRRKPMCLYHSQGKCTKMDDPIHLETFNHDCFRELLVNTAELNKIRSRDLDFFLVLDLEGRVEILEFPVLMISAKTLQVEDIFHRFVRPSKMSERRINEYVEGKYGKCGVHRVWHDTAIPFTDVIQQFGTWLMRHQLWMGEKLIRAAFVTCGNWDLKTKVPQQCEVSKIELPPYFMEWINLKDVYLNFYDRRATGMVTMMKELQIPMVGSHHLGIDDTRNIARVLQHMLLDGALVQITARRNPRSLRDVKFLFKNRIG

SEQ ID NO: 160564 - protein, 45 aa, Glycine max
  Clone ID: PAT_MRT3847_116007C.1.pep
VIWVKCIRINHTDQSIYLNYTCKLYDLYILYGSTTNSYTFNIGEF

SEQ ID NO: 160565 - protein, 93 aa, Glycine max
  Clone ID: PAT_MRT3847_116008C.1.pep
MGTALGSSHPTILVACNCLAYDILTVRMNTGYGAQTPEVKCSCWMISLAAHIMFVFSTIPDECLELTDKYRLCQQYISDSISVNHQAYFFTTD

SEQ ID NO: 160566 - protein, 52 aa, Glycine max
  unsure (1)..(52): unsure at all Xaa locations
  Clone ID: PAT_MRT3847_116009C.1.pep
XXXXYXSXXXPARGVXXXLTXPSSXXVWXHREXTRVTXXXGTWXLCRTAXCW

SEQ ID NO: 160567 - protein, 123 aa, Glycine max
  Clone ID: PAT_MRT3847_11600C.1.pep
MANDSSFLFAGIRFDRKKFGADIARFQKKDSDTDSAMILSAAEDEGEKTIEPLEEEKVAASTTKKRKRKGTSSETVEGFNVFRSSTSVAQSNDEVRVIEESVELYNNNKKEQNKQLERDAIFR

SEQ ID NO: 160568 - protein, 80 aa, Glycine max
  Clone ID: PAT_MRT3847_116010C.1.pep
VRGYCLVTLSYCILEHDPKNAKSMLEKSSVYRFLRRAEANASSCISTLMLLFVIVFKRVYDIERIAEQGNTRRYYSILNV

SEQ ID NO: 160569 - protein, 109 aa, Glycine max
  Clone ID: PAT_MRT3847_116011C.1.pep
GKLSLNFNIYLLWPRAMGLPFRVGGKLWGPSTDIGGTRGAYPLVFFKPFFAPWLGILGGAGKPPYLGPFFLIRPTFGALVKFFGYLGPLNLFGGFPGGGGHLLVQGRGG

SEQ ID NO: 160570 - protein, 65 aa, Glycine max
  Clone ID: PAT_MRT3847_116012C.1.pep
QKDASIADRIFPSHYSAPAQQPLSELVMKSFRVIGELRIMQNKIAICCDSQSAIHLLKHQVDHAR

SEQ ID NO: 160571 - protein, 50 aa, Glycine max
  Clone ID: PAT_MRT3847_116013C.1.pep
TQWLLMYHTVPIIHQQKQNKQVEVLWSSINYSIIKILLTIKIVIKDNYLQ

SEQ ID NO: 160572 - protein, 58 aa, Glycine max
  Clone ID: PAT_MRT3847_116014C.1.pep
HIMETREVFLQLNRTGGGEFLMVLGPPNYFPQSPNTFFLTLEIPLLPMPNKKWDRYYY

SEQ ID NO: 160573 - protein, 124 aa, Glycine max
  Clone ID: PAT_MRT3847_116015C.1.pep
MGRPPCCDKIGIKKGPWTPEEDIILVSYIQEHGPGNWRSVPSNTGLMRCSKSCRLRWTNYLRPGIKRGNFTDHEEKMIIHLQALLGNRWAAITSYLPQRTDNDIKNYWNTHLKKKLKKMQNWRW

SEQ ID NO: 160574 - protein, 79 aa, Glycine max
  Clone ID: PAT_MRT3847_116016C.1.pep
CGGAFIFFFEPPLLAGSVNSGSPSFFYPRGSPSCLNIFGCHFCVQTPRLLYFEVQWPPGPLSVVSLWKLICGPGFRFLP

SEQ ID NO: 160575 - protein, 63 aa, Glycine max
  Clone ID: PAT_MRT3847_116017C.1.pep
TVSSMIHQGCSPTRASMGIWRAMVSFMAGSRLVSSSCSPASRSFSACLRIRSHRSLHEPLYLL

SEQ ID NO: 160576 - protein, 39 aa, Glycine max
  Clone ID: PAT_MRT3847_116018C.1.pep
RWAMFSRFGSFVQPIVPGKGPLQSLADHLVGPVSTNDWA

SEQ ID NO: 160577 - protein, 336 aa, Glycine max
  Clone ID: PAT_MRT3847_116019C.1.pep
HASARAQKRTLIPLTVPGKRDFRWEDIMDATNNLSEEFIIGCGGSGTVYRVEFPTGETVAVKKISWKNDYLLHKSFIRELKTLGRIKHRHLVKLLGCCSNRFNGGGWNLLIYEYMENGSVWDWLHGEPLKLKRKLDWDTRFRIAVTLAQGVEYLHHDCVPKILHRDIKSSNILLDSNMESHLGDFGLAKTLFENHESITESNSCFAGSYGYIAPEYAYSMKATEKSDMYSMGIVLMELVSGKTPTDAAFRAEMNMVRWVEMHLDMQSTAGEEVIDPKMKPLLPGEEFAAFQVLEIAIQCTKTAPQERPTARQVCDLLLHVSNNKKVEFEKTNLDHY

SEQ ID NO: 160578 - protein, 141 aa, Glycine max
  Clone ID: PAT_MRT3847_11601C.1.pep
PLVRPRVRPRVRAEHSGRPPRTNEECKCPQSRYSYSSHEPLNPNCFVFPQFPMANDSSFLFAGIRFDRKKFGADIARFQKKDSDTDSAMILSAAEDEGEKTIEPLEEEKVAASTTKKRKRKGTSSGNSDSLTTLCYLLHST

SEQ ID NO: 160579 - protein, 222 aa, Glycine max
  unsure (1)..(222): unsure at all Xaa locations
  Clone ID: PAT_MRT3847_116020C.1.pep
TRPGSVWDWXHGEPLKLKGRLDWDTRFRIAVGLAHGMEYLHHDCVPKILHRDIKSSNILLDSNMEAHLGDFGLAKTLVENHESITESNSCFAGSYGYIAPEYAYSMKATEKSDMYSMGIVLMELVSGKMPTDAAFRAEMDMVRWVEMNLNMQGTAGEEVIDPKLKPLLRGEEVAAFQVLEIAIQCTKAAPQERPTARQVCDLLLRVSNNKKVEFEKTNLDHY

SEQ ID NO: 160580 - protein, 91 aa, Glycine max
  Clone ID: PAT_MRT3847_116021C.1.pep
LFKGSPSCFWRVSRSVSRREEAGFRRSWQVVVVACPWGRLSISNRKKMVQLRMLEDRILESIFGLVWWFLLLLCSHFRCNSSSPSVIFSQP

SEQ ID NO: 160581 - protein, 89 aa, Glycine max
  Clone ID: PAT_MRT3847_116022C.1.pep
RVLLLASTAYIPNSSKLRSKVSKGNRLSNFDIFDLNPNESGRRPRLVGVSFVGHFRGLSMDYSFFDTLKFIDDDVDKRVTLKSRARDTK

SEQ ID NO: 160582 - protein, 138 aa, Glycine max
  unsure (1)..(138): unsure at all Xaa locations
  Clone ID: PAT_MRT3847_116023C.1.pep
RTGTPGTSHSTDKSTAQERATREAINNQEEAPATEPNPDKSPPHTTAGGNGPKATNESSEKDADGAQEEQNNEEEDRKPDQPPTNXNPGKERKRGTTPTQQPSQPTKGEEDTNPQRNRKRKTTSDNNKTKDQKTNTGE

SEQ ID NO: 160583 - protein, 87 aa, Glycine max
  unsure (1)..(87): unsure at all Xaa locations
  Clone ID: PAT_MRT3847_116024C.1.pep
IITLLYPLYTCIITIKNQSKLNNKQELXYXIIYSFLTLTKIILQPILEXIPIXYDIKLLTIAXLILPQFTRSTYLYKEFMIEHINKY

SEQ ID NO: 160584 - protein, 90 aa, Glycine max
  Clone ID: PAT_MRT3847_116025C.1.pep
FIINNRRRNSSEGFIGQKNHRTKLRDLRHHIPSSICALDWNSHLFSRSTLTSFVFLFSTFPRKKKIRNSRVSISNGKLVTIPFGTIQLQF

SEQ ID NO: 160585 - protein, 240 aa, Glycine max
  unsure (1)..(240): unsure at all Xaa locations
  Clone ID: PAT_MRT3847_116026C.1.pep
MPRTNTITMTKLEPTLFLLLLFMLSCLITVNNAHSTTIINVWPKPRNLTWAPPYQATLIASTFTIITTTTPHHNKHLSAAIIRYQNLVKSEHHHPLVPPGVNISTNLPPLNSLTLTVLDPVQELVHDVDESYTLSIPPSSSSATLTAKTTWGAMRGLETFSQLAWGNPTCVAVGVHLWDSPLYAHRGIMLDTSRNYFPVKDLLRTVEAMSMNKLNVFHWHVTXDSQSFPLVLPSEPALAE

SEQ ID NO: 160586 - protein, 100 aa, Glycine max
  unsure (1)..(100): unsure at all Xaa locations
  Clone ID: PAT_MRT3847_116027C.1.pep
MRPCDKIPSVSTTTDERXVGTEHEGFDPLLGGIQKNATPMMPLDEEILSKVAQDMVEEWLDRVDEEDSFEEVPLSAAXLNGVQGLDYSERIPLATSEGLP

SEQ ID NO: 160587 - protein, 221 aa, Glycine max
  unsure (1)..(221): unsure at all Xaa locations
  Clone ID: PAT_MRT3847_116028C.1.pep
MLSRKRLIVSLSLATLLLFSSLSLTLCDKIPPQNDNNNDDDEDLSFLEEPDDAAATSHHGHFPDPDRFDEDGDDDGDFGDFSGFDHSTEEAFEVDDKDVVVLKERNFTTVVENNRFIMVEFYAPWCGHCQALAPEYAAAATELKPDGVVLAKVDATVENELANEYDVQGFPTVFFFVDGVHKPYTGQRTKDAIVTWIKKEIXGPGVSNITTVDEAGRVLTA

SEQ ID NO: 160588 - protein, 224 aa, Glycine max
  unsure (1)..(224): unsure at all Xaa locations
  Clone ID: PAT_MRT3847_116029C.1.pep
MLTRKRLVVSLSLATLLLFSSLSLSLCDKTPPQNDNKKNNNDDDEDLSFLEESDDAATTSHQGHFPDPDEFDEDDGDDEDDFGDFAGFDHSSEEAFKEPEVDDKDVVVLKERNFTTVVENNRFVMVEFYAPWCGHCQALAPEYAAAATELKPDGVVLAKVDATVENELANEYDVQGFPTVFFFVDGVHKPYTGQRTKDAIVDWIKKKXGPGVSNITTVEEADVY

SEQ ID NO: 160589 - protein, 282 aa, Glycine max
  Clone ID: PAT_MRT3847_11602C.1.pep
SGTSSRSTSSSIGNPSSGDIFHAAPNVDHSQDFVRKDIKEWLNWLRNDIGFDGWRLDFVRGFSGTYVKEYIEASTPVFAIGEYWDSLGYEHGSLCYNQDAHRQRIINWINATGGTSSAFDMTTKGILHSALHNEYWRLIDPQGKPTGVMGWWASRAVTFLENHDTGSTQGHWPFPRDKLMQGYAYILTHPGTPTIFYDHFYDFGIHDVLTELIDARRRAGIHCRSSIKIYHANNEGYVAQVGDALVMKLGQFDWNPSKENQLEGSWQKFVDKGPDYQVWLRQ

SEQ ID NO: 160590 - protein, 323 aa, Glycine max
  Clone ID: PAT_MRT3847_116030C.1.pep
AEKNLQGQKEVSQKWKLASFHQVDIDADEICKLDEDNLIGSGGTGKVYRVELRKNGAMVAVKQLGKVDGVKILAAEMEILGKIRHRNILKLYASLLKGGSNLLVFEYMPNGNLFQALHRQIKDGKPNLDWNQRYKIALGAGKGIAYLHHDCNPPVIHRDIKSSNILLDEDYESKIADFGIARFAEKSDKQLGYSCLAGTLGYIAPELAYATDITEKSDVYSFGVVLLELVSGREPIEEEYGEAKDIVYWVLSNLNDRESILNILDERVTSESVEDMIKVLKIAIKCTTKLPSLRPTMREVVKMLIDAEPCAFKSPNKDTKALL

SEQ ID NO: 160591 - protein, 348 aa, Glycine max
  unsure (1)..(348): unsure at all Xaa locations
  Clone ID: PAT_MRT3847_116031C.1.pep
VSVEYYEPKPGDFVVGVVVSGNENKLDVNVGADLLGTMLTKEVLPLYGKEMENLLHHVDKDAEDFMCNGKMGISTNEEXGKWISLKNNDETGDHKKFDTXSLTEAQLRELDIAWGQCLSGRKHXRASVVVILLNEPIEVEITEWNTGGLLTRIEGLRAFLPKAELVKRANSFTELKENVGRCMYVQITQIDETKNNLILSEKEAWQKLYLREGTLLDGTVKKILPYGAQIKLGKTNRSGLLHVSNISRAEVTSVSNILSVDENVKVLVVKSMFPDKISLSIADLESEPGLFLSNKERLYMEADMMAKKYKQKLPPSVTTQRLEPLPTSCLPFENEALYANWKWFKFEK

SEQ ID NO: 160592 - protein, 46 aa, Glycine max
  Clone ID: PAT_MRT3847_116032C.1.pep
RNFKIPTMEAFRSIKHHREGSLDIFVSIWAKNTRCIEKKKIVSIWR

SEQ ID NO: 160593 - protein, 88 aa, Glycine max
  Clone ID: PAT_MRT3847_116033C.1.pep
SSIRILVLIVICLYTSSSDWEIGKTCGAYNKCDTGLNCQTCTANGNTRTRRSRIQSWSPRCKVKGLPRNRYSWMTTYNSYALGEARCC

SEQ ID NO: 160594 - protein, 264 aa, Glycine max
  Clone ID: PAT_MRT3847_116034C.1.pep
MVERKQFKTKLCVLYQRGRCNRHNCSFAHGSAELRRFSASYSGRRDYLDNDLRDKLDRRHVSPRRYSPTPDTRGRQIIREYSPTRSLEKKSDRRHRRKQDTTGQSDISGNLKVSDRVQGQVKEGKLLSSGSRNNLEEQLKKVDSDISTLQNRKFQLEVYLDESVQEVDSLNSRIRELEAQLCKEDEECKRITSRIRKFVRVHNHMSELQDELRRSQVRLQRFGDQLVSDISRIGANEEDLSIDIISNGENTGLHPIAKHNGEAQ

SEQ ID NO: 160595 - protein, 88 aa, Glycine max
  Clone ID: PAT_MRT3847_116035C.1.pep
RERNSSPTTVGKLTRGRDPSWGSPFNRTLKAKTTQGFGFLYIGKKLISHFNIGGFGLRGTLTLKHGKTKINIAGKRTKKPSPPRESKT

SEQ ID NO: 160596 - protein, 53 aa, Glycine max
  Clone ID: PAT_MRT3847_116036C.1.pep
RWISGLAPHPSENFKALQHVQKTPNKIGPAGRKPGKKSMKPDPKLRKNYFAGV

SEQ ID NO: 160597 - protein, 52 aa, Glycine max
  Clone ID: PAT_MRT3847_116037C.1.pep
LDPFASSSESCFQSLPPQSFAHKNLPSTRCVTPRSSPWPWAMWSPPSSTPLV

SEQ ID NO: 160598 - protein, 105 aa, Glycine max
  Clone ID: PAT_MRT3847_116038C.1.pep
MKIQCVMLCIMLLSLFLIEADVSAPAPAPAPAPVAECCNVMELVPCAAAFTTSTPPSPECCEGLREQPRSCICQYMKDPTLEKFINTSNAKMVSDSCGSPMPTNC

SEQ ID NO: 160599 - protein, 52 aa, Glycine max
  unsure (1)..(52): unsure at all Xaa locations
  Clone ID: PAT_MRT3847_116039C.1.pep
HIFHXQTTIIISSYKPYSQLIFLFTIHFPPYYPFKPPNFPFNTNFFHPNINI

SEQ ID NO: 160600 - protein, 99 aa, Glycine max
  unsure (1)..(99): unsure at all Xaa locations
  Clone ID: PAT_MRT3847_11603C.1.pep
VRTVVNRQQGGYERNKNLDCGSDKFLHVKNVKLPXTTYVFVNRSMNPRECQDFCLRDCSCTAYANIQITNEGSGCVTWSGELIDMRLYRSGCVTWNGDL

SEQ ID NO: 160601 - protein, 204 aa, Glycine max
  Clone ID: PAT_MRT3847_116040C.1.pep
MKGLGPHAPLVSRGKLPPSLAVVDALPTCSSYFSRTTVLYPLRCRQKSRLSLARGTIRAQASNISGVEPGDYGSNTEKDGQNVFEGNVIEGSSSNVVKPPDRIPYPLSIAFVLLGCALVFSLIAFVKGGPSSVLAAIAKSGFTAAFTLIFVSEIGDKTFFIAALLAMQYEKGLVLLGSMGALALMSILSVVIGRIFQSVPAQFQ

SEQ ID NO: 160602 - protein, 119 aa, Glycine max
  unsure (1)..(119): unsure at all Xaa locations
  Clone ID: PAT_MRT3847_116041C.1.pep
CNTDMLGRLEAXIRAIGQFTVTGXLRGTTPWKWLKRLLSSPSLKFLQGXPTVSPVFCEPDVKVTXHYHSITIXEPHNALDKPMQQLIAIGGSGVLISPLTYIFDEGSARRQQLLSKLGL

SEQ ID NO: 160603 - protein, 79 aa, Glycine max
  unsure (1)..(79): unsure at all Xaa locations
  Clone ID: PAT_MRT3847_116042C.1.pep
LXRARSFXXSXXSSXSPGASLXCGGXPPPXXXSXXXXXXVXSSSLXLRPXWXVSRXXFHXFXRXRGRXRGRXRGXXRGS

SEQ ID NO: 160604 - protein, 141 aa, Glycine max
  Clone ID: PAT_MRT3847_116043C.1.pep
QHSFRDDIRIYPSFSTMAQQPAVVVLYPNTGVILPQSCTWTSKMSRPSLTVPNRTINSPMMNMNPNAASTTFPLSTGLTRNTKTPSKNNPCTSAIYKINKHENITKLNKTRKKRKNLAVPRTCDSRASVLPSRRFTTYTTL

SEQ ID NO: 160605 - protein, 116 aa, Glycine max
  unsure (1)..(116): unsure at all Xaa locations
  Clone ID: PAT_MRT3847_116044C.1.pep
TCIAVRCLLQLPLEEQQGAITPYEALIEPMQELCDSSLGCDSGSIHVIHDAIQAPKTICSPLPIASYLNRMHCIMNCTVLITQLRIHMYSYDGYNYLIKVEVLLNRMIXIICIIIT

SEQ ID NO: 160606 - protein, 35 aa, Glycine max
  Clone ID: PAT_MRT3847_116045C.1.pep
ADLSLIKEDSFMNPHSIGWAHGHPYSLKYYLFLIK

SEQ ID NO: 160607 - protein, 40 aa, Glycine max
  Clone ID: PAT_MRT3847_116046C.1.pep
HPHDSRADIMRFDLSIGPGETPRIVFQANLRGLPVLPGVR

SEQ ID NO: 160608 - protein, 51 aa, Glycine max
  Clone ID: PAT_MRT3847_116047C.1.pep
SKPVIAKCIGIVRIDTLKDAHHATSMMNESKLEGKKLKVQLKRVNKQGKPY

SEQ ID NO: 160609 - protein, 96 aa, Glycine max
  unsure (1)..(96): unsure at all Xaa locations
  Clone ID: PAT_MRT3847_116048C.1.pep
VHFFSGVKIPCCGRNYSCRSSYKCVYSCGCFNMYPYSIYTESTTTXDLSHXVAPVQAQFEGTEIFVPTENHFFICAPNYSCNPFTIKVSVYRALFK

SEQ ID NO: 160610 - protein, 196 aa, Glycine max
  Clone ID: PAT_MRT3847_116049C.1.pep
HASVRLDKRTDACSDGGSSGARSHPNIPSLSPVKSFPASHPVNYYSSSSYNTNSPYYPSSSIPLTSSPISPNSQPPIFNYPVNHGPQGANFMNSSSLGSPPISKASTPTGVASLAIKPSGTSANVDSSLSNSSISDVQNTESPSSTASCDASSSVLQKGSETCSEISLPQYKLSMILPQLWIIMKAGGNLLVGPTL

SEQ ID NO: 160611 - protein, 57 aa, Glycine max
  Clone ID: PAT_MRT3847_11604C.1.pep
RPSSFHAASCFRQSATTTTTTTTPYPTRRGRLHESTSAIMFYQVPYFRQSATKTNNW

SEQ ID NO: 160612 - protein, 38 aa, Glycine max
  unsure (1)..(38): unsure at all Xaa locations
  Clone ID: PAT_MRT3847_116050C.1.pep
HQLXAWDLLEAMAMKSNHTMPTQLRTEKVFVNKFXTRG

SEQ ID NO: 160613 - protein, 423 aa, Glycine max
  Clone ID: PAT_MRT3847_116051C.1.pep
LSVCSMPFQAALVKDPGVSVYRVIWSPDGALFGVAYSRHIVQIYSYHSGDDVQQHLEIDAHVGGVNDLAFSHPNKQLCVITCGDDKTIKVWDAATGAKQYTFEGHEAPVYSICPHYKENIQFIFSTALDGKIKAWLYDNLGSRVDYEAPGRWCTTMAYSADGTRLFSCGTSKEGESSIVEWNESEGAVKRTYQGFRKRSLGVVQFDTTKNRYLAAGDDFSIKFWDMDNIQLLTTVDADGGLPASPRIRFNKDGALLTVSAKENGIKILANADGIRLLRTLENSLYDTSRTSEVMTKPTINPISAAAAAATSAALGERALSVNGDARNLGDVKPRISEESNDKSKIWKLTEINEPSQCRSLKLPENVRVNKISRLIYTNSGNAILALASNAIHLLWKWQRNDRNSTVKASASVQPQLWQPSSGI

SEQ ID NO: 160614 - protein, 75 aa, Glycine max
  unsure (1)..(75): unsure at all Xaa locations
  Clone ID: PAT_MRT3847_116052C.1.pep
SFSPPSLRYTIRALAARXYEGXVYIPLIYVYIXCSTRASVKQEXMKARXXIPWFMYILCSTRHPIGKSCISSRYV

SEQ ID NO: 160615 - protein, 85 aa, Glycine max
  unsure (1)..(85): unsure at all Xaa locations
  Clone ID: PAT_MRT3847_116053C.1.pep
QVVVLXVSLHCKGCEGKVRKHLFRMQGVTSFNIDFAAKKVTVVGDVTPLSVLASISKVKNAQLWPASASAVGSGTVETKRKTLSY

SEQ ID NO: 160616 - protein, 148 aa, Glycine max
  Clone ID: PAT_MRT3847_116054C.1.pep
MRRRMASSAFMVICILHSVIAMTCGALMMFYMKEVYTFGHGVQAATKLLGSTPHDQLLIKTSDSFSGLLLVAIGFLLFMVSFVKDRDFQVFFAKGCTLLHLFMAMWRVYFERKVEDLALDWLRQTVGDFLLALSWVFFLVYSWREKYD

SEQ ID NO: 160617 - protein, 150 aa, Glycine max
  Clone ID: PAT_MRT3847_116055C.1.pep
MRSRMASSSSAFLVICILHSLIAVTCGGLMMFYMKEVYTFGHGVQAATKLLGSTPHDQLLIKTSDSFSGLLLVAIGFLLFMVSFVKDRDFQVFFAKGCTLLHLFMAMWRVYFERKVEDLAWDWLRQTVGDFLLALSWVFFLVYSWREKYD

SEQ ID NO: 160618 - protein, 123 aa, Glycine max
  Clone ID: PAT_MRT3847_116056C.1.pep
LMMFYMKEVYTFGHGVQAATKLLGSTPHDQLLIKTSDSFSGLLLVAIGFLLFMVSFVKDRDFQVFFAKGCTLLHLFMAMWRVYFERKVEDLAWDWLRQTVGDFLLALSWVFFLVYSWREKDTL

SEQ ID NO: 160619 - protein, 50 aa, Glycine max
  Clone ID: PAT_MRT3847_116057C.1.pep
IIFIYLNNHQQHAPYGNPEPLSNSINYIPGKNPTFLFGFKRTTWSFKPRK

SEQ ID NO: 160620 - protein, 122 aa, Glycine max
  Clone ID: PAT_MRT3847_116058C.1.pep
FRRITAARRRQKGGYELLKGQKQKKNRLAKESNIVPKGKGNGVVSCTEEVGGVVRMKIVVRKSELKQLVEVMNGGVKSTMHVSSVEQRLNLLWKKKYLSRAKGNPQKCWSPVLQSIPEEKLV

SEQ ID NO: 160621 - protein, 63 aa, Glycine max
  unsure (1)..(63): unsure at all Xaa locations
  Clone ID: PAT_MRT3847_116059C.1.pep
ILFLVGVTAVRMXLSFFKSDHSISYDNDQFSETXCDLCMFTLXLPSKCICKDITLISYNLNCN

SEQ ID NO: 160622 - protein, 709 aa, Glycine max
  unsure (1)..(709): unsure at all Xaa locations
  Clone ID: PAT_MRT3847_11605C.1.pep
MYFYSMHGCMFQIPLFFMRVVCPHIPLFYSLLLWRCGPXLMGDWLKWALVSVIQFVIGKRFYIAASRALRNGSTNMDVLVGCGTTASYGYSVWALLYGALTGFWSPSYFETSAMLITFVLLGKYLECLAKGKTSDAIKKLVELTPATALLVVKDKGGKSIEVREIDSLLIQPGDTLKVLPGAKVPADGIVTWGSSYVNESMVTGESVPIMKEVNASVIGGTINLHGVLHVQATKVGSDTVLSQIISLVEMAQMSKAPIQKFADYVASIFVPTVVSLALLTLLGWYVAGSIGAYPEXWLPENGNHFVFALMFSISVVVIACPCALGLATPTAVMVATGVGANNGVLIKGGDALERAQRVKYVIFDKTGTLTQGKATVTAAKTFTGMERGEFLKLVASAEASNEHPLAKAILAYARHFHFXSSSSDTTGTEIDAENDAKSGWLFDVSDFSALPGIGVQCFIDGKLILVGNRKLMEENGIDISTEVENFVVELEESAKTGILVAYNDILTGVLGIADPLKREASVVIEGLQKMGVTPVMVTGDNWRTARAVAKEVGIQDVRAEVMPAGKADVVRSFQKDGSIRSWVGDGINDSPALAAADVGMAIGAGTDIAIEAAEYVLMRNNLEDVITAIDLSRKTFSRIRLNYVFAMAYNVVAIPVAAGVFYPSLGIKLPPWVAGACMALSSVSVVCSSLLLKRYKRPRLTTILEIIVE

SEQ ID NO: 160623 - protein, 129 aa, Glycine max
  unsure (1)..(129): unsure at all Xaa locations
  Clone ID: PAT_MRT3847_116060C.1.pep
LLREDDRRGNDILREEKRGEGGRRGFLLRVTEFSSSSDLVGQIVLLKRCEPLXESEVNALCLKAIXILVPESFFQRLYTPFSIFGDLHGQFYDLTHLFIVRCVCPPTNFIFSGDFAAFRFSFLLSSFLF

SEQ ID NO: 160624 - protein, 498 aa, Glycine max
  unsure (1)..(498): unsure at all Xaa locations
  Clone ID: PAT_MRT3847_116061C.1.pep
PFHPRERTVPLXPKQLSWPXLQSPLHSAVDLLPVFVGAASSPDDNLKWKGACFYENKAWMVFHNKSGTQFGGGTLHLKVSNAHSWTCMDLYIFATPYRVTWDYYFLAREHTLEIKEWEGKAEYEYVKNHGLSIFLLQAGMLGTLQALWEVFPLFTNTGWGENSNIKFLEKHMGASSRSSRLEWVTNVSADDIHSGDFLAVSKIRGRWGAFETLEKWVSGAYAGHTAVCLRDSSGKLWVGESGHENEKGEDIIAVIPWEEWWDFELNNDDSNPHIALLPLHPALRARFNETAAWEYALSMAGKPYGYHNMIFSWIDTLNENYPPPLDANVVACVMTIWSQLQPEYAANMWNEALNKRLGTKGLDLSEVLVEVEKRGSSFDELLTIPEQDDWIYSDGKSTSCIAFILEMYKEAGLFDPVASSVQVTEFTIKDAYILNFFENNSTRLPKWCNDGDTVKLPYCQIKGKYRMDLPGYNTMQPYPHMNERCPSLPPKYSRPQNC

SEQ ID NO: 160625 - protein, 236 aa, Glycine max
  unsure (1)..(236): unsure at all Xaa locations
  Clone ID: PAT_MRT3847_116062C.1.pep
MAKMKIAWLLLLLLVSVCVTASQVWALKSPFHPRDVLPLLPRQLSWPILNRLHSAVDLLPVFVGAAFSPVDNLKWKGACFYENKAWMVFHNKSGTQYGGGTLHIKVASFSSVGMEIXVSNAHSWTCMDLYIFASPYRVTWDYYFLAREHTLEIKEWEGKAEYEYVKNHGLSIFLLQAGMLGTLEALWEVFPLFTNTGWGENSHIKFLEKHMGASFEVRPQPFVTNVRVDDIHSGDF

SEQ ID NO: 160626 - protein, 58 aa, Glycine max
  Clone ID: PAT_MRT3847_116063C.1.pep
LNISMIFTMVFLCKYMGNVGVNGFALPYGAIFNYADAIRGTLEAVNNQLSMPRYHTYG

SEQ ID NO: 160627 - protein, 55 aa, Glycine max
  Clone ID: PAT_MRT3847_116064C.1.pep
STHPPRMDLLIYVSLCFTFSLYYRSKIPKLCDIVSLVWMVSNFLLQACTRGGGGG

SEQ ID NO: 160628 - protein, 52 aa, Glycine max
  Clone ID: PAT_MRT3847_116065C.1.pep
ITLLKSAIMSITIVNLLSGWTPSHRVFLFVSIQHAYDSYPGPKNKDPPFFAD

SEQ ID NO: 160629 - protein, 85 aa, Glycine max
  Clone ID: PAT_MRT3847_116066C.1.pep
VVMAQLAESNYCQVCTGVIRDGALSGSIAQGLISRELHYHKKKKSLLNFGSSFFLFLLDIHFFINITARCCSFFEYLPSLEGMLS

SEQ ID NO: 160630 - protein, 48 aa, Glycine max
  Clone ID: PAT_MRT3847_116067C.1.pep
YYVCEFNRICICFYHSAICVYGIFVVLPHLLCSNVLICTLSWFIFING

SEQ ID NO: 160631 - protein, 32 aa, Glycine max
  Clone ID: PAT_MRT3847_116068C.1.pep
MMQFLSLLDSSATFNCEVIRDCYEAFALYCFE

SEQ ID NO: 160632 - protein, 54 aa, Glycine max
  Clone ID: PAT_MRT3847_116069C.1.pep
RPSPFSFHPKKIMFRRKFQPDIGSVNRVMLPTPGIGIHIPNGEDILLLLVSKAL

SEQ ID NO: 160633 - protein, 77 aa, Glycine max
  unsure (1)..(77): unsure at all Xaa locations
  Clone ID: PAT_MRT3847_11606C.1.pep
QGAGGGVSVHNIRATGSDMRGANGASNGIVPMLRVCNDTAPYREQGGGERXKGAFAVCLGRWDADIFQFLGLRRNHG

SEQ ID NO: 160634 - protein, 107 aa, Glycine max
  unsure (1)..(107): unsure at all Xaa locations
  Clone ID: PAT_MRT3847_116070C.1.pep
PTLSTTRTTTRARAHAVTPYTGTNVEEAHDXADVALDKSVSTLDGIEXTKDENLLASEILDQLKTTLFHXLPTEFNLVDGFXLEQNVRLIMMKWDKINMEEGINPIF

SEQ ID NO: 160635 - protein, 62 aa, Glycine max
  Clone ID: PAT_MRT3847_116071C.1.pep
MSKLAKALIPSPSGWTGSSFCQWTGVKCSANRVTIIKIASQSLGGTLPPDLNSLSQLTSLSL

SEQ ID NO: 160636 - protein, 51 aa, Glycine max
  Clone ID: PAT_MRT3847_116072C.1.pep
FIFLINLIYLILFNLYIKDSPYSSFTIQLNHVINCNVYIEVELYKFINYAV

SEQ ID NO: 160637 - protein, 59 aa, Glycine max
  Clone ID: PAT_MRT3847_116073C.1.pep
CCFFFFFFFFFFYLNKRKLALISPPKKSPHLICALAFTHESLDWCNWWLTFQQDMSPRK

SEQ ID NO: 160638 - protein, 95 aa, Glycine max
  unsure (1)..(95): unsure at all Xaa locations
  Clone ID: PAT_MRT3847_116074C.1.pep
TASAQATVDTGQTTFVSRYLTGESEKKHXPTIGVEDHPLDFLTNCGKIRFYSRCTAGQQKNGGLRDGFFIHGHCAIIRCDVTAPLTSHTXPTWHR

SEQ ID NO: 160639 - protein, 68 aa, Glycine max
  Clone ID: PAT_MRT3847_116075C.1.pep
KQSMPSRNSAKTPKKDGNNSNSSLSSLENNFYEGERLTNLLQSIRRYNACFSHVMLHASCFYYSSNMI

SEQ ID NO: 160640 - protein, 49 aa, Glycine max
  Clone ID: PAT_MRT3847_116076C.1.pep
LYMKPINEPVLFHLGFPFCANEVQQVRSRLGLTWKNIGLCGSLENTIIF

SEQ ID NO: 160641 - protein, 154 aa, Glycine max
  Clone ID: PAT_MRT3847_116077C.1.pep
DEGIEKGVKPTLVTCNTGIKGHLRAGNVLKANDFFEKMILEGVSPDCITYNTLINGFVKEENFDRAFVLVNNMEEKGLLPDVITYNAILGGYCRQGRMREAEMVLLKMIDCGINPDKSTYTSLINGHVSLDNLKEAFRFHDEMLQSGFVPYDQF

SEQ ID NO: 160642 - protein, 57 aa, Glycine max
  Clone ID: PAT_MRT3847_116078C.1.pep
ALLDCEESVWDEMECCICFGEFRAGEKVKVLLGCDHYFHCDCVEKWVTNHFSCPLCR

SEQ ID NO: 160643 - protein, 36 aa, Glycine max
  Clone ID: PAT_MRT3847_116079C.1.pep
LFFMILDRLHIYVHSHFSDTCSIMIKHTIRLLLRMG

SEQ ID NO: 160644 - protein, 199 aa, Glycine max
  Clone ID: PAT_MRT3847_11607C.1.pep
GIADPLKREAAVVIEGLQKMGVKPVMVTGDNWRTARAVAKEVGIQDVRAEVMPAGKADVVRSFQKDGSIVAMVGDGINDSPALAAADVGMAIGAGTDIAIEAAEYVLMRNSLEDVITAIDLSRKTFTRIRLNYVFAMAYNVVAIPVAAGVFYPSLGLKLPPWVAGACMALSSVSVVCSSLLLKRYRRPRLTTILEIVVE

SEQ ID NO: 160645 - protein, 82 aa, Glycine max
  Clone ID: PAT_MRT3847_116080C.1.pep
GSLASAIKDFSASENSCLAEQFDKTPDTGNIEEAESSLRESGILNYEEARALLGRYEYQKGNIVAALHVFEGIDIGVVTPKI

SEQ ID NO: 160646 - protein, 90 aa, Glycine max
  Clone ID: PAT_MRT3847_116081C.1.pep
CHLNANGKVVGLITGDKRVLGQTSAVVWNSIEPELRAIGGYAKQKTKAEGNQLVQKNRSSSKVNIALFPIAASLSLSLSVYTTQHKNTDD

SEQ ID NO: 160647 - protein, 127 aa, Glycine max
  unsure (1)..(127): unsure at all Xaa locations
  Clone ID: PAT_MRT3847_116082C.1.pep
FSSSMLDFSNNNTDARPPPPDPSSECDSAATGGAFKKARVQPPTTQSTFKTDTASVLLEAIGYIRFLQSQIEALSLPYLGSGXNMRQQQSVQGENNCIFPEDPGQLLNENCLKRKAXSEQDSQEEPK

SEQ ID NO: 160648 - protein, 188 aa, Glycine max
  Clone ID: PAT_MRT3847_116083C.1.pep
DAWVKYFFFYCIIILTIFLFFNLKCNSSTATGGAFKKARVQPPTTQSTFKVRKEKLGDRITALHQLVSPFGKTDTASVLLEAIGYIRFLQSQIEALSLPYLGSGSGNMRHQQSVQGEKNCIFPEDPGQLLNENCLKRKAASSEQDSQEEAKKDLRSRGLCLVPVSCTLQVGSDNGADYWAPAFGGGFR

SEQ ID NO: 160649 - protein, 212 aa, Glycine max
  unsure (1)..(212): unsure at all Xaa locations
  Clone ID: PAT_MRT3847_116084C.1.pep
SPKSCVTSFSSSMLDFSNNNADARPPPPDPSSECNSSTATGGAFKKARVQPPTTQSTFKVRKEKLGDRITALHQLVSPFGKTDTASVLLEAIGYIRFLQSQIEVINVYSPRSVDFCKQPRXALSLPYLGSGSGNMRHQQSVPGREEWIFPEDPGQLLNENCLKRKAASSEQDSQEEAKKDLRSRGLCLVPVSCTLQVGSDNGADYWAPAFGG

SEQ ID NO: 160650 - protein, 358 aa, Glycine max
  Clone ID: PAT_MRT3847_116085C.1.pep
MNRGVLQSSPVKQMMAGNPNNWWNINTMRPPPPPPQASPPFFSTPSNFLTPYYTPTSSLPLPSWHDNNQELPESWSQLLMSGMVSEEEKGGMCQIQSKKLENWEQQMLSQAPSAPIVDVKQESSVNSYVYGHGTNEEFQAAKPITWSQIVPASSPKSCVTSFSSSMLDFSNNNTDARPPPPDPSSECDSAATGGAFKKARVQPPTTQSTFKVRKEKLGDRITALHQLVSPFGKTDTASVLLEAIGYIRFLQSQIEALSLPYLGSGSGNMRQQQSVRNNTNPPFLVQGENNCIFPEDPGQLLNENCLKRKAASEQDSQEEPKKDLRSRGLCLVPVSCTLQVGSDNGADYWAPAFGGGFR

SEQ ID NO: 160651 - protein, 243 aa, Glycine max
  Clone ID: PAT_MRT3847_116086C.1.pep
MAKTTSLLLFTLLLFGTLALIQANTHSHSCSGDTKIGERMAKTTSLLLFTLLLFGTLALIQAKKSKEDLKEVTHKVYFDVEINGKEAGRIVMGLYGKAVPKTAENFRALCTGEKGTGKSGKPLHYKGSSFHRIIPSFMLQGGDFTQGNGMGGESIYGEKFADENFKLKHTGPGLLSMANAGPNTNGSQFFITTVTTSWLDGRHVVFGKVLSGMDVVYKIEAEGTQSGTPKSKVVIVDSGELPL

SEQ ID NO: 160652 - protein, 64 aa, Glycine max
  unsure (1)..(64): unsure at all Xaa locations
  Clone ID: PAT_MRT3847_116087C.1.pep
GGSWAVIDKEGKRSGEVGINPYSMGWTVLAKKXLSMGSETLCGENTRGDGLVTKPEMSSKGDMI

SEQ ID NO: 160653 - protein, 204 aa, Glycine max
  Clone ID: PAT_MRT3847_116088C.1.pep
MAKTTSLLLFTLLLFGTLALIQAKKSKEDLKEVTHKVYFDVEINGKEAGRIVMGLFGKAVPKTAENFRALCTGEKGTGKSGKPLHYKGSSFHRIIPSFMLQGGDFTHGNGMGGESIYGEKFADENFKLKHTGPGLLSMANAGPDTNGSQFFITTVTTSWLDGRHVVFGRVLSGLDVVYNIEAEGTQSGTPKSKVVIVDSGELPL

SEQ ID NO: 160654 - protein, 59 aa, Glycine max
  Clone ID: PAT_MRT3847_116089C.1.pep
HEFIYILKKLNLKPPSIYSVIVNQIHMYCTARIIKTWNAFWSIMFFYLRNSSRFDFNYI

SEQ ID NO: 160655 - protein, 50 aa, Glycine max
  Clone ID: PAT_MRT3847_11608C.1.pep
YTTKMVKMKHCGLISSIRMFQLSTVVYGAKEGIDDVYALQCCCYTINNIV

SEQ ID NO: 160656 - protein, 67 aa, Glycine max
  Clone ID: PAT_MRT3847_116090C.1.pep
RITSYDLSCRIVDVEIKPVEGELSKSLLENNKCYLLDCGAEVFVWVGRVTQVEERKSACQAVEVRPL

SEQ ID NO: 160657 - protein, 55 aa, Glycine max
  Clone ID: PAT_MRT3847_116091C.1.pep
LEHCHPWGIPIFYDGSRCGTWGHLAKPDDAMHCLSWGLYGKLMSFWGHCLLACTC

SEQ ID NO: 160658 - protein, 49 aa, Glycine max
  Clone ID: PAT_MRT3847_116092C.1.pep
LVETPNNQLIYDGVTIMCGSLRWLKHQKICGYIQIGCDNILQYVNELLF

SEQ ID NO: 160659 - protein, 49 aa, Glycine max
  Clone ID: PAT_MRT3847_116093C.1.pep
VFPWSVISGASLSVIIVVVEGCVHFFFVLSRAKIIRTLLPSNLQNLSSL

SEQ ID NO: 160660 - protein, 61 aa, Glycine max
  Clone ID: PAT_MRT3847_116094C.1.pep
MQLCKQLLETAEACEGMSGRSLRKLPFLAHAALANPFECNPIKFLCTMIETAKRERSELPD

SEQ ID NO: 160661 - protein, 94 aa, Glycine max
  Clone ID: PAT_MRT3847_116095C.1.pep
EFIGGCMFTMRLLWGLRLPLLILIQLLYSNKSTYKLYAEALFTFKGSLGGPQQLGCSIVKYPCQMQWPCLDCYKLKDPGGITAKIDGNNDVPTL

SEQ ID NO: 160662 - protein, 234 aa, Glycine max
  Clone ID: PAT_MRT3847_116096C.1.pep
MDFDSSFFQYQNFNSSFVNSSVCAEPFPWEDFLFFNEENTTTTTTALDSFTITDHSSQSQIKESSSSDYSNSSGSLVSSTESSQLEVSSNLTHASHQLKETHASPQPQPPKETNKDKRPFRGVRRRPWGKFAAEIRDSTRNGVRVWIGTFDTAEAAALAYDQAALSTRGSMAVLNFPEEVVRESLKDMQSNNKPISLEDGSSPVLALKRKHTMRRKSRLPTKKTKGTMEWNHKM

SEQ ID NO: 160663 - protein, 108 aa, Glycine max
  unsure (1)..(108): unsure at all Xaa locations
  Clone ID: PAT_MRT3847_116097C.1.pep
ARLNIGFVTEYYTSKAYSSLQEVAYFWETXSFSEVITDLALRYKSDTKPICGXVIYMIEDFTLDAKYGSAVARPVMXSTIATVKASDTDGTIIYNAGRLGETAVLSYI

SEQ ID NO: 160664 - protein, 52 aa, Glycine max
  Clone ID: PAT_MRT3847_116098C.1.pep
SIQSMLVWKDIKNHKYSQRHTLHASSIRPTNMEMPTTIGFTHLFRATKLFSI

SEQ ID NO: 160665 - protein, 79 aa, Glycine max
  unsure (1)..(79): unsure at all Xaa locations
  Clone ID: PAT_MRT3847_116099C.1.pep
XXGVGVRQRXKEERFEGLIXHXNXEXXXXRXFGSXWCLAFECXGLEFRIRRXEGXKCGSRXELNERISXXXRYFYGACE

SEQ ID NO: 160666 - protein, 220 aa, Glycine max
  Clone ID: PAT_MRT3847_11609C.1.pep
MDLGCSDASVWKEALSLYPSRIQTLSVKKNKPDLVSLDDFYCNQLPLLLHQRNPNPFITTPELSTLMQWKLTRGKWRPRLLDFVSSLDDAVVKSASQKAFQSLPDVSKAVSELTVLKGVGPATASAVLATFAPHLTPFMSDEAMEAALGSSKDYSLKQYIKFVDKLQRKAEGLSSEGDSVTPSDVQRALWSFAVGQSSGPQADQDPKTKPSRSSKRKRKN

SEQ ID NO: 160667 - protein, 89 aa, Glycine max
  Clone ID: PAT_MRT3847_1160C.1.pep
KARPLIGQLAIPVLKKVVLGNSSIEALHCQTFASPAMACSLICIRACLDRVESDSILLVHVEETGAGTLPLSERNAAPVNIRCWHLDDL

SEQ ID NO: 160668 - protein, 103 aa, Glycine max
  Clone ID: PAT_MRT3847_116100C.1.pep
DVHHAYLLLYSAHTTSGLHVLYYKGSLLLQKLVVSGLTVCLQNVSSLIINQIMYYYLCSNLKIPFIFTYLSFIVFIFNFISFLLSSIFSLFFIHFTFFIFSFL

SEQ ID NO: 160669 - protein, 73 aa, Glycine max
  Clone ID: PAT_MRT3847_116101C.1.pep
FWSASKSFARKPNTDLSMFLQGPPLIHAPARCESLALSLSMKTSTDTVASHLRCVALHPMKPVRATCSNTRHL

SEQ ID NO: 160670 - protein, 282 aa, Glycine max
  Clone ID: PAT_MRT3847_116102C.1.pep
MSQQQRSTPAPFLTKTYLLVDDPATDDVVSWSEGGNTFVVWKHADFAKDLLPKYFKHNNFSSFVRQLNTYGFRKTVPDKWEFANEYFKRGQTDLLAEIRRRKVVSPVTGKSTGGGVNISASHSGGDDMGSTSTGSMEAATAAGADISGENEKLKKDNEKLSGELALAKKQCEELVAFLRDSLNVSPDVIERIIRQGTCVSSNNDAVRFDAIINNDLDDDENAVGECEPQQPPPKGDNGESLKLFGVWLKGQNGKENSIGKCRKRGRQDYPIAATAKELKTLV

SEQ ID NO: 160671 - protein, 301 aa, Glycine max
  Clone ID: PAT_MRT3847_116103C.1.pep
PSTMASICDNGIPLRLHNIDAFIASYRNSLQSLRATALEAARSQSELTEVQAKLREAEDDLVKARAVQTRREAKRMALKAAIVSVKGRIEDLKTSIQKQRTQNEECATVVSHHRLVLEVSEQKSNESSEHRDEVQEAISWYNRILGFQIEGGRGVKFSFKNINVDNPNEEFFFTIRHEDDVYTLLNCKPSVKDTDELIHELNNTNGLFKFVRTMRKKFQEVVAQGRLSMTTNEHQESAFISASGPVLSISTITEDNDHQDEPTKGNAHLQKQVNRRRVKSAILSPGSASSVRQSPRLKVRK

SEQ ID NO: 160672 - protein, 65 aa, Glycine max
  Clone ID: PAT_MRT3847_116104C.1.pep
IKITKLINNSIYNFQQLSVSPPQPPIRLSLSKWKSSPGNSSTKPTKHFQDSKPLIPKKAFKKVYA

SEQ ID NO: 160673 - protein, 50 aa, Glycine max
  Clone ID: PAT_MRT3847_116105C.1.pep
VFTSKSITVQALVGSAIGVVFRPLPAPFFLTILGVLDPPLPHLVKNTTRS

SEQ ID NO: 160674 - protein, 115 aa, Glycine max
  unsure (1)..(115): unsure at all Xaa locations
  Clone ID: PAT_MRT3847_116106C.1.pep
PRVRSELSRNRALKMKVLALLAATILRVXHCSAYDMFRIRMNTGYGASTSEVKCASRMLDAEALNISGCDTIPEXCDEAPNEYIHCEQYTSHYKSANQLAYFYAKDLELHSRDTF

SEQ ID NO: 160675 - protein, 344 aa, Glycine max
  Clone ID: PAT_MRT3847_116107C.1.pep
MSTSNAGGAGSNDSNATRRQSKRPKYSKFTQQELPACKPILTPRAVISAFLIVTIVFIPIGVASLIASHDVVEIIDRYDSHCIPSNVTDKVAYIQTPGEKPCNRQLTVEKRMKSPIYVYYQLDNFYQNHRRYVKSRNDDQLRDSGKASSVSGCEPENNVNGMAILPCGLIAWSLFNDTYSFSRNSNNLTVNKTGISWKSDRDHKFGSDVFPKNFQNGPIIGGGGLDENVPLSQHEDLIVWMRTAALPTFRKLYGKIEVDLEKGDVINVNLHNNYNTYSFNGKKKLVLSTTSWLGGKNDFLGIAYLTVGGLSFFLSMAFTVVYLVKPRQLGDPSYLSWNRSPGGH

SEQ ID NO: 160676 - protein, 60 aa, Glycine max
  Clone ID: PAT_MRT3847_116108C.1.pep
MWLCRLGSLTFKTPDNVNYPSMNLAFSAGRAGGTMTGVLSAANEKAVEMFIDEKESFCVI

SEQ ID NO: 160677 - protein, 152 aa, Glycine max
  unsure (1)..(152): unsure at all Xaa locations
  Clone ID: PAT_MRT3847_116109C.1.pep
VKKILFIDSLGVLLIRALDNNIVLLNIPQKHSSKAKQLHKRSNDIVRYKETKWAVECAKAQAEAEVSNAKQTVKYLFSMIGESMYKAKAEMXDMAPLKKYVKPSNDDNQYSQVMTELEHAKWELFQLKLHVGSVLQEKLRVENKIKASRSSM

SEQ ID NO: 160678 - protein, 123 aa, Glycine max
  Clone ID: PAT_MRT3847_11610C.1.pep
LTGLRPPLFLIFVKAGAAASSAAMAPINLTIDGPLPLDDDLVEVAFLEEFLRHRVSVDCDVGALGHHLTNPRGGFLIAGVCKRDFSRTYLNGPLTGDGEFICWQTTFDALPELGPDAPFDTTT

SEQ ID NO: 160679 - protein, 282 aa, Glycine max
  Clone ID: PAT_MRT3847_116110C.1.pep
MATATAAAATSYFFGTRLNNVNTTTLNNGRFHALLNFGKKKAAPQPPPKKKEVKVKPSGDRLVWFPNAEPPEWLDGSMIGDRGFDPFGFAKPAEYLQFDLDSLDQNLAKNVAGDVIGTRVEVADVKPTPFQPYSEVFGIQRFRECELIHGRWAMLGALGALVVEALTGVAWQDAGKVELVEGSSYLGLPLPFSLTTLIWIEVIVIGYIEFQRNAELDPEKRLYPGGRFFDPLGLANDPEEKARLQLAEIKHSRLAMVVFLIFAIQAAVTGKGPISFLATFNK

SEQ ID NO: 160680 - protein, 80 aa, Glycine max
  unsure (1)..(80): unsure at all Xaa locations
  Clone ID: PAT_MRT3847_116111C.1.pep
RCKHIPVSNMSAGENHTVKMPITAQEEIMFFSAGDLRTAMXEKIAXPEATATHVAAIXIIIDWFASSDCNRAGAMLMVDT

SEQ ID NO: 160681 - protein, 114 aa, Glycine max
  unsure (1)..(114): unsure at all Xaa locations
  Clone ID: PAT_MRT3847_116112C.1.pep
MATLVVHNQTTSAQDAEALQQAFKGWGADDTAIIAILGHRNVHQKQEIRRAYDEIYQEDLIKRLESDICGDYXRAMYRWMMQPADRDTVLANVVIKNGTKDYQVIAEIACVLSS

SEQ ID NO: 160682 - protein, 57 aa, Glycine max
  Clone ID: PAT_MRT3847_116113C.1.pep
LKFDTEHYLFCIIIKWSRSLCFVQYYVKKGVVHESETFLQLYNFEFIIVPLYMCMFS

SEQ ID NO: 160683 - protein, 132 aa, Glycine max
  Clone ID: PAT_MRT3847_116114C.1.pep
TEAQTQAPSGFATALTTTLLTHWGFEGYIRWLRGIKSTYKQRRDWICDAFQDNFHLELDLKSIGQAYNGEKGVVLEIEGLGRGVTCYAKQNAEGVEAKWDEKRGVAPKRKGRALVSIIPTTAGMFIILAVHR

SEQ ID NO: 160684 - protein, 70 aa, Glycine max
  unsure (1)..(70): unsure at all Xaa locations
  Clone ID: PAT_MRT3847_116115C.1.pep
EYXLNXSYVDDTRXFKVXLDYWNVLVSELXXPQRSLREPCSSKYDRXQVPXMIDXIXSQLLXRRQLYASP

SEQ ID NO: 160685 - protein, 58 aa, Glycine max
  Clone ID: PAT_MRT3847_116116C.1.pep
VKLIPPQPMVVCAFREHPLFQRYAVKDMRQTAGVVVNKNVTKKDLTGATVSKAVPKLK

SEQ ID NO: 160686 - protein, 469 aa, Glycine max
  unsure (1)..(469): unsure at all Xaa locations
  Clone ID: PAT_MRT3847_116117C.1.pep
MVDEQWMFLPLIVPPTIYQAGLWSTWLTVLCSLKMFQALARDRLERLNASPSATPWTYLRVYSALLFVFMVDVLWIRFCLTIYQAHGSSMYLLLFFEPFSICFETLQAILVHGFQLLDIWLHHSACNSSDFRTPKLLDMLTAGSLLELKGILIRNLGFLLDMATFFMALGHYLYIWRLHGMAFRLIDALLFLNIRAXLLNIYSPWTETVREVLPHIPDDMIFQDLQRTNSVTVTVNNLLRMLAFEIFSLGLFYGDSTRSFTDSRLDQGLAGMYTCPTCRKHLXSGVPGNETNSEAGTISSDEQLARQISAGLDRPNSARHTMPTGFYPNQTLNTPEGVPWWGAGLYFGWYHSWPNQGVDGAGPSTAIRTVGLGRVQMMMRXAWNLWPISLSQASASGSTIPPPGGRLPERTGSLHLRTASQSSNDNVANILAMAETVREVLPHIPDDMIFQDLQRTNSVTVTVNNLLQM

SEQ ID NO: 160687 - protein, 340 aa, Glycine max
  Clone ID: PAT_MRT3847_116118C.1.pep
GRVGGILIRSLGFLLDMATFPMALGHYLYIWRLHGMAFHLIDALLFLNIRALLSAIINRIKGFIRLRIALGTLHAALPDVTTEELRAYDDECAICREPMAKAKRLNCNHLFHLACLRSWLDQGLAEMYTCPTCRKPLFAGVPGNETNSDAGTISSDEQLARQISAGLDRPNSARHTMPTGFYPNQTLNTPEGVPWRGAGLDSGWLHSWPNQGVDGAGPSTAIRTVGLGRVQMMMRHLASGGETYAQTTLEDTAWNLWPINPSQASASGSTIPPPGGRLPERTGSLHLRTASQSSNDNVANILAMAETVREVLPHIPDDMIFQDLQRTNSVTVTVNNLLQM

SEQ ID NO: 160688 - protein, 67 aa, Glycine max
  Clone ID: PAT_MRT3847_116119C.1.pep
CVFLNKRAQVAYVGYSKVHVICLKKKPTRKKRHRTLPTTANKRPSAKNRCQDHRTMKRPRADTKRKT

SEQ ID NO: 160689 - protein, 110 aa, Glycine max
  Clone ID: PAT_MRT3847_11611C.1.pep
ETPPCFKAPSSSKETRGGFPGEVKRFPTPGENPPAWKGLGAAPSGPKRGGAKPETVWGTNPPPKAPGRFLGSNGVDFSSPPRIFYWPRQGPTPQGPWGGARLRRQCFTGK

SEQ ID NO: 160690 - protein, 41 aa, Glycine max
  Clone ID: PAT_MRT3847_116120C.1.pep
FTCHLRGNRRKLLAAFNHDRGTWYKVESNQQLTCYLRGNRR

SEQ ID NO: 160691 - protein, 98 aa, Glycine max
  unsure (1)..(98): unsure at all Xaa locations
  Clone ID: PAT_MRT3847_116121C.1.pep
XXXXXXXXXXXXNXXXXXXXXXXXXPXXXXPHXXXXXXXTXXXXXTXXXXPXHXXXXILXKXXIXXIXXXXXXXXXFSLTHNNXSLXPNSXLXYXXIX

SEQ ID NO: 160692 - protein, 107 aa, Glycine max
  unsure (1)..(107): unsure at all Xaa locations
  Clone ID: PAT_MRT3847_116122C.1.pep
FSSCPNHWRVDRQPIHITEGDSGRKHDVIIEYDACSIANERGSLVGARDAYHKQRDGYHVAGRKGRLQYAXLAPYVEPAEQAQRGEAYYDCFPVEDDKDHGVAHIGE

SEQ ID NO: 160693 - protein, 47 aa, Glycine max
  Clone ID: PAT_MRT3847_116123C.1.pep
SHLGEYILTAVINCTLHNNADLDISIMTGTFMEFRIGMLNALPIGRN

SEQ ID NO: 160694 - protein, 38 aa, Glycine max
  Clone ID: PAT_MRT3847_116124C.1.pep
VVILSYVLHGFLNCYLLLIFVSAFIIPDELERTVKCLC

SEQ ID NO: 160695 - protein, 53 aa, Glycine max
  Clone ID: PAT_MRT3847_116125C.1.pep
CFAQKSNKKKERARARQKQFERWGIIEGPKKGRRPTCAQESTNRKPNQLSRSI

SEQ ID NO: 160696 - protein, 61 aa, Glycine max
  Clone ID: PAT_MRT3847_116126C.1.pep
KLYNIIKDVKQNLKDNFIPVQRIIDPFTAQQITSSFIFHCKKMELIAHSNMFAAFQHGVLP

SEQ ID NO: 160697 - protein, 55 aa, Glycine max
  Clone ID: PAT_MRT3847_116127C.1.pep
SSTEICFTYTEDVEDSAAIYTIQRSSSSTIQPRIFKGAVLTRQKMKNARRRGTRG

SEQ ID NO: 160698 - protein, 70 aa, Glycine max
  Clone ID: PAT_MRT3847_116128C.1.pep
CMHECLLAFVSSDSREQKIRILHVMRQFRATRFHFLSHYYEYNNLRDSIRLDRLLACSFKFRNKLKLKYI

SEQ ID NO: 160699 - protein, 216 aa, Glycine max
  Clone ID: PAT_MRT3847_116129C.1.pep
MSQLNGAYYGPSIPPPKTSYHRPGRGGGCCCGCLFSLIFKLILTVIIIVGIAGFVFWLIVRPNVVKFHVTDATLTQFNYTVNNTLHYDLALNITVRNPNKRLGIYYDRIEARAMFHDARFDSQFPEPFYQGHKSTKVLNPVFKGQQVVPLNAEQSAELKKENATGVYEIDVKMYLRVRFKLGVLKTKTLKPKVSCVLRVPFKGSAAFETTKCHWDR

SEQ ID NO: 160700 - protein, 247 aa, Glycine max
  unsure (1)..(247): unsure at all Xaa locations
  Clone ID: PAT_MRT3847_11612C.1.pep
HASGQRLNYFWFLKRHWKSNVATGRSQSMRPPKVVVLGCMAERLKEKILDSDKMVDVVCGPDAYRDLPRLLEEVDYGQRGINTLLSLEETYADINPVRISKNSVTAFVSVMRGCNNMCSFCIVPFTRGRERSRPVESIVREVAELWKEGVKEVMLLGQNVNSYNDASGXRREVESGSNWKLSEGFSSMAKVXNNGLKVLLIYWXRLSSEFPEMRFRIHVSTPKDXLDDLLYLMRERHXICKLIHLPA

SEQ ID NO: 160701 - protein, 44 aa, Glycine max
  Clone ID: PAT_MRT3847_116130C.1.pep
LDRLELAIEEAGHGSLRGDPHSAEVVHDDLSCSMARGSLFSHLS

SEQ ID NO: 160702 - protein, 277 aa, Glycine max
  Clone ID: PAT_MRT3847_116131C.1.pep
MEPEPEPKLEPEPEPGPEFSSKEEAFSYYQTYAKSVGFSAIIKASRRSRISGNFIDAKFACTRYGTPPNPQKPKPKRARTSPKTDCKASMHVKRTPHGTWIISSFIKHHNHQTNSNNNASPSRKPKIKKTLHHLVFAEGDLQFLLDTFMSMQNENPNFFYAVDFNEEQRLRTVFWVDAKARLDYRHFSDVVLLDTMHVKNECKLPFVPFVGVNHHFQVFLLGLAFVSDESESTFSWLMRSWLRAMGGCAPKVMLTDCDEALKRAVAEVAPESWHGFV

SEQ ID NO: 160703 - protein, 162 aa, Glycine max
  unsure (1)..(162): unsure at all Xaa locations
  Clone ID: PAT_MRT3847_116132C.1.pep
ISNIHFHAFEVPPFVSPPPNPNNEETDFPSHLVPSIXASSHLREPVRNLLQSLSSQAKRVIIIHDSVMASAAQDATNMPNVENYTFRSTCAFTTSVYFWELMGRPLVESLCVPEIPSLEGCSTTQFMDFLIAQSNFLKFNDGNIYNTIREIEGAYIDFMDRI

SEQ ID NO: 160704 - protein, 46 aa, Glycine max
  Clone ID: PAT_MRT3847_116133C.1.pep
VILKMALIGLFDKSKKAVIETPVDMLCLCDYVLRYSSCLFGLGKLN

SEQ ID NO: 160705 - protein, 114 aa, Glycine max
  Clone ID: PAT_MRT3847_116134C.1.pep
PAITVFETFLFLNPGINGGLNITGGSLSLFQPTCNSNYYYYKSIERQEPKLIKNHIHIIPPKMTVTSGEQKSPCGRVHIQHRTKIVLPDFLQNVNLMYVKICYHYLFSNLVHYS

SEQ ID NO: 160706 - protein, 97 aa, Glycine max
  Clone ID: PAT_MRT3847_116135C.1.pep
EGLECDMLLHREPSLLDCEVACTPVISLQRQSPPVKNLSKGPPEWQNLCHQPLTDPPRECPLGLTEGGRGTPPKHLGGGPLETAPCAGALVGGGPPL

SEQ ID NO: 160707 - protein, 58 aa, Glycine max
  Clone ID: PAT_MRT3847_116136C.1.pep
KEKHALVWFDLCTRLSIFKVLTNWNLPKLTSSAWYLVFSFCCEFCSFYSQFSPFQLVH

SEQ ID NO: 160708 - protein, 469 aa, Glycine max
  unsure (1)..(469): unsure at all Xaa locations
  Clone ID: PAT_MRT3847_116137C.1.pep
MPGSLDFTPRAVCVQAVASLEPRNHMALRERHCPESRLHWLLSLPKGYKVPVPWPKSRDKIWYDNVPYSKLVEYKKDQHWVVKSGKYLVFPGGGTQFKXGMTYVLCQTLPTIQWGQNIRVVLDVGCEVASFGGYLLDKNVIAMSFAPKDEHEAQIQFALERGIPATLSVIGTQKLTFADNGFDLIHCARCRVHWDADAMVTVTKAMCWTVVAKTLDSSGIGLVIYQKPTSSSCYQERKGNTPPLCENNDRKSISSWYAKFSSCLIPLPADGEGNMQSWSMPWPQRLTSIPPSLSIESDAGEMFLKDSKHWSELVSDIYGDGLSINWSSVRNVMDMNAGYAGFAAALIDLPVWVMNVVPIDVPDTLSIIMDRGLIGMYHDWCESFNTYPRTYDLLHASFLFKYLEQRCDIVDVAVEIDRILRPNGYLVVQDSMEILNKLNPILRSLNWSVTLHQNQFLVGRKGFWRPTSS

SEQ ID NO: 160709 - protein, 485 aa, Glycine max
  unsure (1)..(485): unsure at all Xaa locations
  Clone ID: PAT_MRT3847_116138C.1.pep
FYSVIQEKPPLNPSQASADYTANPKVQELPPNVTNVRFDWKLCKEPQNVDFIPCLDNFKAIKALKSRRHMEHRERHCPETRLHCLLSLPKGYKVPVPWPKSRDKIWYDNVPYSKLVEYKKDQHWVVKSGKYLVFPGGGTQFKXGMTYVLCQTLPTIQWGQNIRVVLDVGCEVASFGGYLLDKNVIAMSFAPKDEHEAQIQFALERGIPATLSVIGTQKLTFADNGFDLIHCARCRVHWDADVFRILRPGGFFAWSATPVYRDDQRDWEVWNAMVTVTKAMCWTVVAKTLDSSGIGLVIYQKPTSSSCYQERKGNTPPLCENNDRKSISSWYAKFSSCLIPLPADGEGNMQSWSMPWPQRLTSIPPSLSIESDAVPIDMPNTLTTIFDRGLIGMYHDWCESLNTYPWTYDLVHASFIFKHLMQRCDIVDVVVEIDRIMRPDGYLLVQDSMEIIHKLGPVLRSLHWSVTLSQNQFLVGRKSFWHPRP

SEQ ID NO: 160710 - protein, 85 aa, Glycine max
  Clone ID: PAT_MRT3847_116139C.1.pep
TLFYETRMAQLRAIWQFDPSKKPPDFFFFWRILLLGGPHPRGVKTPTGAMGLKKKKTVFTPLPWGDQRPFFLGLVGGPTPPPPQK

SEQ ID NO: 160711 - protein, 72 aa, Glycine max
  Clone ID: PAT_MRT3847_11613C.1.pep
NNGLCIKISAQFVSKKLWFDTKWHYPQRFLPLNWCIVFHMQYKQSSLHILKLLASLARSRQYYTCKFYIMIS

SEQ ID NO: 160712 - protein, 237 aa, Glycine max
  unsure (1)..(237): unsure at all Xaa locations
  Clone ID: PAT_MRT3847_116140C.1.pep
TYVHRTEHAKTCVLGGKLFVYYIDETNSSGIMFNNIYELRGLISDGQFFSLESLTPNQKMSVDSLVKKAYENWHRVVEYDGKVLNSHTNLKKESRAVVHSNNXTITVSLSSSIPQLKNKLSYVDSAPKRNGQGLDDIVAEELRLRSSEMLESDDMQRLLKTIYAEVNRSANLGHSNEGCYTYSLHYEPQNDHSCHEDQGKSSGKAVVGWLKLKTALRWGIFIRKKAAERRAQLTELN

SEQ ID NO: 160713 - protein, 62 aa, Glycine max
  Clone ID: PAT_MRT3847_116141C.1.pep
SQSHLDWPGHWVMLLSRNFVSKSPNDLMKIKFSLTQIDCTHTKGGLCVDSVFICNSDLKKEV

SEQ ID NO: 160714 - protein, 42 aa, Glycine max
  Clone ID: PAT_MRT3847_116142C.1.pep
LPDPSEVQLEETNSPVLLTNIRWVLLAKANSPYNSYLTLDGC

SEQ ID NO: 160715 - protein, 103 aa, Glycine max
  Clone ID: PAT_MRT3847_116143C.1.pep
RPLPLPISKHPLKKTNHPFVSGPESPNMDSHSIGLIWKPQERQTFFICMLLSPEGPHPWDLQPFYRGKKHSPRDIPTQNKIPFSYLKSKNMTSFGWPPLLLSP

SEQ ID NO: 160716 - protein, 158 aa, Glycine max
  Clone ID: PAT_MRT3847_116144C.1.pep
MEEGLCQNSIPGSGFVDKTRIVEAKPLRSLAPVLPKSLQSSLSGRYPSVFPPFVLFEEPQESQPSPAPMPAPIRSYRDPLDEEEAPHGANGETSSPMEGLNGCNVDDGQKRVVLPMNSCKSSQKRSKKTKESPFDLSSSVGGISMAKREDGDREVVNL

SEQ ID NO: 160717 - protein, 92 aa, Glycine max
  Clone ID: PAT_MRT3847_116145C.1.pep
IYSFLYIAHWLCIDFFTYCFCGETQFYYNGAHNHLPLFFYKNLHFFCLWKGFTQFFSKRQMLISTPSPVLTEGLVDPPEGGVYKKKLEPIRS

SEQ ID NO: 160718 - protein, 151 aa, Glycine max
  Clone ID: PAT_MRT3847_116146C.1.pep
MVVASIRLLPSPLLSFAPRRSPYSYSWRSHPSLTIPFSSIHSKASTKGDGGAVELGGDQTELIFLGTGTSEGVPRVSCLTNPLHKCEVCSKAAQPGNKNRRLNTSILIRHPNSSGTHNNILIDAGKFFYHSALHWFPAFGIRTIDAGIITH

SEQ ID NO: 160719 - protein, 164 aa, Glycine max
  Clone ID: PAT_MRT3847_116147C.1.pep
MQSENQNNQLVVQNSGSLSFSSHLSKEDEEMSRSALSTFRAKEEEIERKKMEVREKVQLQFGRVEEETKRLATIREELEALADPMRKEVALVRKRIDSVNKELKPLGHTCQKKEKEYKDALEAFNEKNREKVQLITKLMELVSESERLRMKKLEELSKNIDSMQ

SEQ ID NO: 160720 - protein, 34 aa, Glycine max
  Clone ID: PAT_MRT3847_116148C.1.pep
IITITMFSSLLSFLAEFFHPFEAQHSLPKFIVLA

SEQ ID NO: 160721 - protein, 55 aa, Glycine max
  Clone ID: PAT_MRT3847_116149C.1.pep
QGNWTALAFMWKESPIAVFFPRALGPWTDSSGVLTFKWDVDNATAVFVSALLGFL

SEQ ID NO: 160722 - protein, 82 aa, Glycine max
  unsure (1)..(82): unsure at all Xaa locations
  Clone ID: PAT_MRT3847_11614C.1.pep
EWAKDNIRANAVAPAPVKSXLLDSFVKSGNEADKPIEAIVSQAPAGRLGDPEAISAMVAFLCLPAASFITGQIINVNGGCTI

SEQ ID NO: 160723 - protein, 274 aa, Glycine max
  Clone ID: PAT_MRT3847_116150C.1.pep
MASDADMEDYGFEYSDEEEVEQDVDIENQYYNSKGMVESDPEGALAGFAQVVQMEQEKAEWGFKALKQTVKLYYRLGRYKEMMEAYREMLTYIKSAVTRNYSEKCINSIMDYVSGSASQNFGLLQEFYQTTLRSLEDAKNERLWFKTNLKLCKIYFDIGENGRMNKILKELHKSCQKEDGTDDHKKGTQLLEVYAIEIQMYTEMKNNKKLKQLYQKALTIKSAIPHPRIMGIIHECGGKMHMAERQWAEAATDFFEAFKNYDEAGNHRRIQCLK

SEQ ID NO: 160724 - protein, 74 aa, Glycine max
  Clone ID: PAT_MRT3847_116151C.1.pep
VRTAARRPQKGVSFLCAYSIWGQGWFYTHWVLLSFSLFPKLYFLFHWFFSSFFNLWISTMLLEKNCDNMIGFST

SEQ ID NO: 160725 - protein, 91 aa, Glycine max
  Clone ID: PAT_MRT3847_116152C.1.pep
DFCFRERNKQLSSPFHKKPNKDKIKVLFCLESRIGFKPNFSEKERETQGERKSKAETLQTLVPRSQNLEGSTQQQENSKRNKKEFWRNGFE

SEQ ID NO: 160726 - protein, 91 aa, Glycine max
  Clone ID: PAT_MRT3847_116153C.1.pep
KTSSKSAKTMNSLRSSMIAVIFAMTLIFSYEVIMSQARAHSSSSLVSKMSQSSQSHSHSFFHKEEQKPTQEPAVATSLRRIPPSRPNPTQN

SEQ ID NO: 160727 - protein, 182 aa, Glycine max
  unsure (1)..(182): unsure at all Xaa locations
  Clone ID: PAT_MRT3847_116154C.1.pep
CFQEQIYGRPKLNGVEFLSFSNEDNAMLIQDFEVEEIKKVIXDCESSKSPGPDGYSLLLIKIFWEVIKEEVINFFKEFHKFDFLPRGTNRSFIALIAKCDNPLDIGQYCPISLVGCLYKIVXKIIANRMSIVLGKLIDGCQNAFIGDRELLQSVMIANEIVDEGKRRKKQCIFFKVDFEKAY

SEQ ID NO: 160728 - protein, 90 aa, Glycine max
  unsure (1)..(90): unsure at all Xaa locations
  Clone ID: PAT_MRT3847_116155C.1.pep
LARARPFDDVEXPHGSMSDLTLSRSTIGIPEYTVAGTILRSDLLANFLTEGNFSASVDLQRTHRIEGMIKMVATAGIPEDTGIALACCMN

SEQ ID NO: 160729 - protein, 91 aa, Glycine max
  Clone ID: PAT_MRT3847_116156C.1.pep
SSNKDNVTLSQFPETSIYIDSTGEKVHLFIFIGGESFFIESGWLIAYDHIVEWLNLLLQPLLHSCRKTFNYSPRTPDKPDHCARQCSFSLR

SEQ ID NO: 160730 - protein, 270 aa, Glycine max
  Clone ID: PAT_MRT3847_116157C.1.pep
MPPLTLWLVLPFLVLLAAATTSPTRATTVASSFHGQREFDYFAFALQWPGTYCKRTRSCCPTNGCCRGSNFPTVFTIHGLWPDYNDGTWPSCCSGSSFDPKEILTLTNSLEQYWPSLSCSKPSLCHGGKGTFWAHEWEKHGTCSYPVFRNEYDYFVAVLNLYFKYNVTSVLNDAGYVPSNTEKYPLGGIISAIENAFHASPQIVCSKDSVEELRLCFYKDFQPRDCALGSDIKINMVTSKKSCPKYVSLPEPVSVSKTGTMDFKVGAMMM

SEQ ID NO: 160731 - protein, 67 aa, Glycine max
  Clone ID: PAT_MRT3847_116158C.1.pep
SSELSFYLTKERCTINKQRQNQVILNETFRDTRSNQRILKFKMYLLNLYIKYNLSSVASQCDIFQHD

SEQ ID NO: 160732 - protein, 90 aa, Glycine max
  Clone ID: PAT_MRT3847_116159C.1.pep
TESAMLYLGPSILPVLLLRGGTLVLDPSLLPGIAESEAERVVGLGRRESVRRESERDVRADIPTRKSENRLQFEGFYKLEGAPLEPIRSR

SEQ ID NO: 160733 - protein, 474 aa, Glycine max
  unsure (1)..(474): unsure at all Xaa locations
  Clone ID: PAT_MRT3847_11615C.1.pep
MGCFSCFDSSSKEDHYLRPQHHPNQPLPSQISRLLSGADKLRSRSNGGSKRELQQPPPTVQIAAQTFTFRELAAATKNFSPESFVGEGGFGRVYKGRLETTAQIVAVKQLDKNGLQGNREFLVEVLMLSLLHHPNLVNLIGYCADGDQRLLVYEFMPLGSLEDHLHDLPPDKEPLDWNTRMKIAAGAAKGLEYLHDKANPPVIYRDFKSSNILLDEGYHPKLSDFGLAKLGPVGDKSHVSTRVMGTYGYCAPEYAMTGQLTVKSDVYSFGVVFLELITGRKAIDSTRPHGEQNLVTWARPLFNDRRKVXKLADPXLQGRYPMRGLYQALAVASMCIQEXAATRPLIGDVVTALSFLANQAYDPNGYRXAGDDKKNRDDKGGRILKNDVAGGSGRRWDLEGSEKDDSPRETARMLNRDLDRERAVAEAKIWGENWREKRRQSAQGSFDGSSRLTIPIMCRAHLSALNKAGVGKQV

SEQ ID NO: 160734 - protein, 82 aa, Glycine max
  unsure (1)..(82): unsure at all Xaa locations
  Clone ID: PAT_MRT3847_116160C.1.pep
FXXXVXXXXSNXSNVXXXXXXXYAXYXXXRSXXPNSNSXSPHQFFNXRXXSSLTNFVCAVQXRINGQRSAHSNSVIDLYGVV

SEQ ID NO: 160735 - protein, 56 aa, Glycine max
  Clone ID: PAT_MRT3847_116161C.1.pep
DRSNIIVDLIQDKMYRGVYKDLIILYKRECEVLITPQSFERSSLREILKKDEKKVE

SEQ ID NO: 160736 - protein, 121 aa, Glycine max
  unsure (1)..(121): unsure at all Xaa locations
  Clone ID: PAT_MRT3847_116162C.1.pep
TTEEADFMVQLFGGNTSVTEKHSGNTTFGFWPDHESTIXAITDTNNNSYLPPNFTNTNFLCFSQGSXSXTDNSGNNIFSTTSNGTYSCDPXTNFNSMPMVLCLENTKFXPHXFQCNDYLXQ

SEQ ID NO: 160737 - protein, 83 aa, Glycine max
  Clone ID: PAT_MRT3847_116163C.1.pep
LGAVYIVSTGSLLMNKTSYNLAMPAAHPGHPPTGRPGLAQNGADESRLDGGTGLKGNVRQYDEHGHTIVQGDEAPAKWRLMCA

SEQ ID NO: 160738 - protein, 87 aa, Glycine max
  Clone ID: PAT_MRT3847_116164C.1.pep
PTRSLKMSSKVLLVLLMFLATRLLISSEVAPDDAYENFDKIDGKPSADGVDESKYWRGGYGGGRGGRRGGYGPNEHNEAGVDANPHN

SEQ ID NO: 160739 - protein, 96 aa, Glycine max
  Clone ID: PAT_MRT3847_116165C.1.pep
MSSKVLLVLLMFLATILLISSEVAPDDAYENFDKIDGKPSADGVDESKYWRGGYGGGYGGGYGGGRGGYGGGRGGGRGGYGPNEHNEAGVDANPHN

SEQ ID NO: 160740 - protein, 124 aa, Glycine max
  Clone ID: PAT_MRT3847_116166C.1.pep
MSSKVLLVLLMFLATILLISSEVAPDDAYENFDKIDGKPSADGVDESKYWRGGYGGGYGGGYGGGRGGYGGGRGGYGGGRGGYGGGRGGYGGGRGGYGGGRGGGRGGYGPNEHNEAGVDANPHN

SEQ ID NO: 160741 - protein, 39 aa, Glycine max
  Clone ID: PAT_MRT3847_116167C.1.pep
TLGGGGDLPVISTDESSSGLVVERVSDSLHSCKSQHFFR

SEQ ID NO: 160742 - protein, 34 aa, Glycine max
  Clone ID: PAT_MRT3847_116168C.1.pep
VYKICTMTRYMISSAFGTIMLYMYVQSPHQKLVL

SEQ ID NO: 160743 - protein, 49 aa, Glycine max
  Clone ID: PAT_MRT3847_116169C.1.pep
KKKKKKKKKKKKKKKKKKKKKKKKKKKKKNKKKKKKKKKKKNTKKKNKY

SEQ ID NO: 160744 - protein, 236 aa, Glycine max
  Clone ID: PAT_MRT3847_11616C.1.pep
SSLFFSRKLSDFGLAKLGPVGDKSHVSTRVMGTYGYCAPEYAMTGQLTVKSDVYSFGVVFLELITGRKAIDSTQPQGEQNLVTWARPLFNDRRKFSKLADPRLQGRFPMRGLYQALAVASMCIQESAATRPLIGDVVTALSYLANQAYDPNGYRGSSDDKRNRDDKGGRISKNDEAGGSGRRWDLEGSEKDDSPRETARILNRDLDRERAVAEAKMWGENLRQKRKQSLQQGSLDA

SEQ ID NO: 160745 - protein, 213 aa, Glycine max
  Clone ID: PAT_MRT3847_116170C.1.pep
MAEPRAASDTSFGIARDWRLNLSVAPPLQISKDVQGSDNPIPLSPQWLLPKPGESKPGSGSVENHVVSNSPFGNRSETVKTSGKGEDVHDAHKKKDVFRPSMFDSESGRRDRWRDEERDTKSSVRKDRWRDGDIDLGDSRRVDRWTDNLSTKNFAEVRRGPSDNHRWNDSGNRETNFDQRRESKWNTRWGPDDKEPEGISGKWSDSGKEWDIH

SEQ ID NO: 160746 - protein, 328 aa, Glycine max
  Clone ID: PAT_MRT3847_116171C.1.pep
MALSPIRSSSFSSSAIVALAVLLLLTGTSSANLSKNFYSKTCPNVFNTVKSVVKSAVVREPRIGASIVRLFFHDCFVQGCDGSILLDDTPTFQGEKTAAANNNSVRGFEVIDAIKSEVEKICPGVVSCADILDIASRDSVVLLGGPFWKVRLGRRDSRTANFTAANTGVIPPPTSNLTNLITRFRDQGLSARDMVALSGAHTFGKARCTSFRDRIYNQTNIDRTFALARQRRCPRTNGTGDNNLANLDFRTPNHFDNNYFKNLLIKRGLLNSDQVLFNGGSTDSLVRTYSQNNKAFDTDFVKAMIRMGDIKPLTGSQGEIRKNCRRVN

SEQ ID NO: 160747 - protein, 588 aa, Glycine max
  unsure (1)..(588): unsure at all Xaa locations
  Clone ID: PAT_MRT3847_116172C.1.pep
MDETSALIEAILREQEEEEEEAHRRRRNHTTIKNNNNNNNEWQTVSYTKRNRNRNNNRKPLADDNFAADPSSSDVFSSVQRHSEDRRLRLLKSQIAAAEAAAAEATPSRSKRHSDNEEDGDAEPEAEVKKAKQXKPKKPKVTVAEAASRISADDLDAFLAEITASYESQQDIMLMRFADYFGRAFSSVSAAQFPWLKTFKESTVAKIVDIPLLHISEDIYKISTDWISHRSYEALGSFVLWSLDSILSDLASHQGVKKAVQQSSSKSQVAMFVVLTMVLRRKPDVLISLLPILKENKKYQGQDKLPVIVWVITQASQGDLVMGLYLWVYLLLPMLSVKSGCNPQSRDLILQLVERIITSPKARSILLNGAVRRGERVVPPWALDSLLRVTFPLPSARVKATERFEAVYPTLREVALASSPGSKAIKHLAQQILSFAIKAAGEANSDLSKEASDIFIWCLTQNPECYKQWDFLYMDNLEASVVVLRKLSGEWKEYFVKHPTLDPLRENLKSFSQKNEKALAKVDDGARHALLKDADKYCKVLLGQLSQGHGCLKSMIVLSVVLAVGAVFMSQNLHLWDYSQLTEMLNLS

SEQ ID NO: 160748 - protein, 104 aa, Glycine max
  Clone ID: PAT_MRT3847_116173C.1.pep
LLPTFPMNGYSRISGDDDSSSRRSMDHEGERFGVILGRSASVSSSSQFQRAFSMTRSSSVSERYRRIHDQEDTPITTSPSIASKKKQRGGANKILKACKRLLRL

SEQ ID NO: 160749 - protein, 71 aa, Glycine max
  Clone ID: PAT_MRT3847_116174C.1.pep
KRYKSYQTLKCKNATLSEVKCIFSLIVIEYRRPGGTWVPGQMASGWWMYSALPYCVHHQRGVPTRHSSPSE

SEQ ID NO: 160750 - protein, 50 aa, Glycine max
  Clone ID: PAT_MRT3847_116175C.1.pep
WNSITVSLPLTQIWCSHCQSSRLLSSSLIHNFFAQSTVTLVPIVNYYLRY

SEQ ID NO: 160751 - protein, 126 aa, Glycine max
  Clone ID: PAT_MRT3847_116176C.1.pep
MAGGGFSDAGTLKRAHLYQYKITGYFIFSCIVGALGGALFGYDLGVSGGVTYMDDFLIQFFPKVCEKKHAHLAETDYCKYDDQILTLFTSSLYFAALVSTFGASSVTNTKGRKASILAGSVSYFIG

SEQ ID NO: 160752 - protein, 106 aa, Glycine max
  unsure (1)..(106): unsure at all Xaa locations
  Clone ID: PAT_MRT3847_116177C.1.pep
QSQKGAAPTNNKTIQILKGLTKHSXIHHKLRYTXYALLAAAHLSHQYIRNRFYSQQAIYXIDKSGSXIRLQHAQLPEEARELYKXFMQIVKDKEXFVLNQYYEKAG

SEQ ID NO: 160753 - protein, 60 aa, Glycine max
  Clone ID: PAT_MRT3847_116178C.1.pep
VWFSVETPPASIKKARVLFSVGFHRKPSFASILSLNLVSNTRKGRVFFANSISKMYLPLN

SEQ ID NO: 160754 - protein, 58 aa, Glycine max
  Clone ID: PAT_MRT3847_116179C.1.pep
KKKKKKKKKKKKKKKKKKKKRKNNKKKTKQKGGAILKKTTLIAGPKYKKLSNIEKQIN

SEQ ID NO: 160755 - protein, 128 aa, Glycine max
  Clone ID: PAT_MRT3847_11617C.1.pep
MGCFSCFDSSSKEDHNLRPQHQPNQPLPSQISRLPSGADKLRSRSNGGSKRELQQPPPTVQIAAQTFTFRELAAATKNFRPESFVGEGGFGRVYKGRLETTAQIVAVKQLDKNGLQGNREFLVEVLML

SEQ ID NO: 160756 - protein, 36 aa, Glycine max
  Clone ID: PAT_MRT3847_116180C.1.pep
FFLRIFSCKFRVFRLFFFKIFFFKCWVYVKEKPLGR

SEQ ID NO: 160757 - protein, 109 aa, Glycine max
  Clone ID: PAT_MRT3847_116181C.1.pep
NQLQFWGGNPLTMLNRNFGLEDWHTWVEHSLVWPPCPDKYQWGGGKDHLLCANWPLILGETFFSSKKTPRDAPLMRVEWENMPNPLSTRKIFAFNTLPKGPVVGLQPEA

SEQ ID NO: 160758 - protein, 47 aa, Glycine max
  Clone ID: PAT_MRT3847_116182C.1.pep
VSSFACKMLASLDCPYAAQLLYIQSSFLYVKTGSFSILFMSKHVMSN

SEQ ID NO: 160759 - protein, 78 aa, Glycine max
  Clone ID: PAT_MRT3847_116183C.1.pep
NWGKNDFPKMGRGSIGWPFFAFVAFAIRWLIFGDNLCPLFLKKHFNLVKTVFPLYTQLPPFFFFFQFPHFKSGGGKHL

SEQ ID NO: 160760 - protein, 78 aa, Glycine max
  unsure (1)..(78): unsure at all Xaa locations
  Clone ID: PAT_MRT3847_116184C.1.pep
YLRRGGEPSRACCTGVKSFTRXAKATAGSQGAVRCLKNLAVNLGPSLNAAMAALVPGQCGVNIPYKISPSTICATVKP

SEQ ID NO: 160761 - protein, 152 aa, Glycine max
  Clone ID: PAT_MRT3847_116185C.1.pep
GYHRRHRVCLRCANAATVMLNGEAKRYCQQCGKFHVLSDFDEGKRSCRRKLERHNTRRRRKPTADSGGATHSELLQPVAENEENNYDVEAGKECSLADTDINDVGVSLDLEDEPAPIPSSAPEAQNINSDSVVSLAVSGETRVNSGNTSNSP

SEQ ID NO: 160762 - protein, 87 aa, Glycine max
  Clone ID: PAT_MRT3847_116186C.1.pep
RFWLGSPQCQRSAWTPVGRRGSQDGPVLTRLADLGSESCWCGLLMLPFPFWADGPASGLASQMGMKSHEELLPFLTQDELCFVLCVM

SEQ ID NO: 160763 - protein, 110 aa, Glycine max
  unsure (1)..(110): unsure at all Xaa locations
  Clone ID: PAT_MRT3847_116187C.1.pep
KRGFREYIEPLKEXRKKIQVFLKNLPLSLNLVTQPIEACKQQLCETVAKYNLNAQSECSDQTSTDGPVFEEFIIPIKKKASQPSVEENDDKEHSLKHTKTTTDKKKSDWL

SEQ ID NO: 160764 - protein, 35 aa, Glycine max
  Clone ID: PAT_MRT3847_116188C.1.pep
MFEVIEPYRSFPLPLTVSCILLFAKMSDKEFIALS

SEQ ID NO: 160765 - protein, 269 aa, Glycine max
  Clone ID: PAT_MRT3847_116189C.1.pep
RIAALSDPFKAMLYGGFAESKMRKIDFSKNGISSKGMRAVELYSRAKRLDFFCAMTVLELLSFANSFCCEEMKAACDAHLASFVGSVDDALILIDYGLGERAPLLVGACLQVLLRELPNSLYNPKVAKIFCSFEAKERLANVGCDSFLLYYFLSQVAMEESMVSKTTMMLLERMGECAAERWQKALAFHQLGCVLLERNEYKEAQHCFEVAAEAGHVYSLAGVARTKYKQGQPYSAYKLISSLIFEYKPAGWMYQERALYNMGKEKSFD

SEQ ID NO: 160766 - protein, 114 aa, Glycine max
  Clone ID: PAT_MRT3847_11618C.1.pep
REEDGRMFYVADNDNQTEEKEAGGGNLSLDNKSRSRSEKVASTKAQFVSGKTFKYDISGAGYHSTQDCPGKEDQERPKQIDARLRQRIDPHNNEGEAHMETNGGKLALDDDETF

SEQ ID NO: 160767 - protein, 84 aa, Glycine max
  unsure (1)..(84): unsure at all Xaa locations
  Clone ID: PAT_MRT3847_116190C.1.pep
QLLLPLIRAFKTHPTNSCNFITLXGTFYINYKPHTDLPSVLENYINGEFKLEKFITHTVPFSNINTAFYFMLKSESIIYIILME

SEQ ID NO: 160768 - protein, 82 aa, Glycine max
  Clone ID: PAT_MRT3847_116191C.1.pep
MQEDDFPNMNDITKSQHQVFKMKIRKSQMSVQIGQSQVGKFIFSLGTGPLDLFISVNSLCHHSPLTIFFGESIFSNSILGIG

SEQ ID NO: 160769 - protein, 56 aa, Glycine max
  Clone ID: PAT_MRT3847_116192C.1.pep
ELKSYIIIIIYLKKDLILYFKRLFENNNVCINNIMDLILLFFFSVYNFFINYYLLI

SEQ ID NO: 160770 - protein, 125 aa, Glycine max
  unsure (1)..(125): unsure at all Xaa locations
  Clone ID: PAT_MRT3847_116193C.1.pep
MGDNLMQQSVSLLRVKDPLFKRMGASFLARFAVDGKGGERLGGLGGPXVLLNMLSTAKDVRTRKDALHALNSLTHIDEALASLHHAGAISVIRSAPNSLEDAEVERFKLSLMKRFQDLRYDDVSS

SEQ ID NO: 160771 - protein, 93 aa, Glycine max
  Clone ID: PAT_MRT3847_116194C.1.pep
KSWFHTRGGSTSRLHHQFNSHHGDRCPCARLKKWGSGKNRGFFLNRGIWQKNFFCPFLRGIILITPSFEKPTAKILNIVNLGGKILRHWIFWE

SEQ ID NO: 160772 - protein, 60 aa, Glycine max
  Clone ID: PAT_MRT3847_116195C.1.pep
NSTWTSWGSYALITTPTKQTILICIMLLSLLKRDPCSTATKTGMYIRKTKLRSQGFCTFF

SEQ ID NO: 160773 - protein, 84 aa, Glycine max
  unsure (1)..(84): unsure at all Xaa locations
  Clone ID: PAT_MRT3847_116196C.1.pep
KSEFHLTTPFSTLHFNTILNYSSILKSHSXSKSKIYSNISYLHYFHKTYFYYISSFNIFLIKFNIISTPSIKSTILPYITLTII

SEQ ID NO: 160774 - protein, 51 aa, Glycine max
  unsure (1)..(51): unsure at all Xaa locations
  Clone ID: PAT_MRT3847_116197C.1.pep
ANAPLILGLIQNYVTFWINISIQMPRDXQAHNQHLETALLNIIDFASTTIK

SEQ ID NO: 160775 - protein, 151 aa, Glycine max
  unsure (1)..(151): unsure at all Xaa locations
  Clone ID: PAT_MRT3847_116198C.1.pep
TAQAYGATAGSRENTGISWACAMNSYYRGRASSDIYTICXKTXELWSPACTKAMTMXLNAKSCSDAWSGAXWKRTGXHWEINSGTGWTDTPVQDDXVTSESYINSQEWVPRTYRDQNSQNAFGXNRWLGKLNCPQGTFRSAXRRPQAIGGG

SEQ ID NO: 160776 - protein, 110 aa, Glycine max
  Clone ID: PAT_MRT3847_116199C.1.pep
KYTTLGDVLPLHPTRKPKLSKSNRVSIFTSSISLSSTTIISTAHIGICRITNGTEPMTAVIIINILSHTRNEVTVPSSTLNLPVKYLQRFHINTNGIIYDITFIAIKLLT

SEQ ID NO: 160777 - protein, 65 aa, Glycine max
  Clone ID: PAT_MRT3847_11619C.1.pep
SARRPYGCKKVPLGKKNERVPVGYGCKKAPLGYGSKRAPLGYGCKKAPLGYGCKKAPQGAIDSAT

SEQ ID NO: 160778 - protein, 97 aa, Glycine max
  unsure (1)..(97): unsure at all Xaa locations
  Clone ID: PAT_MRT3847_1161C.1.pep
TPCPPLKLYGHATCPRDTLKLGAMFNIIIWLVHTGKRKLVSNHRXKSLIXLEKNQAGEKKFTSLKMKVVNLNIDVPLVFYKNVTCGKKXTTGYTCSL

SEQ ID NO: 160779 - protein, 88 aa, Glycine max
  unsure (1)..(88): unsure at all Xaa locations
  Clone ID: PAT_MRT3847_116200C.1.pep
QLFDLEPAAAELSRSLKLDLKDHAKKCVDTINVAXSTLPPNISMVMXASADCVPKKLTVDXIHSKTYLQVKGTGTANQSPTIECRVDS

SEQ ID NO: 160780 - protein, 134 aa, Glycine max
  unsure (1)..(134): unsure at all Xaa locations
  Clone ID: PAT_MRT3847_116201C.1.pep
TEYEELKTALSKVDSQMKFLXATAQVASQQGTYLXKCFNRMEECEKNPEGPLRFRGEGHHRFKPFRYKHLGQFAPLGGEQTAAQLPGDWVSIGHSSQWLWYSVYASKQVSWRTRALVVSDWTRRFIFGRDSSSI

SEQ ID NO: 160781 - protein, 73 aa, Glycine max
  unsure (1)..(73): unsure at all Xaa locations
  Clone ID: PAT_MRT3847_116202C.1.pep
GAGNGSVRXWEFESDTKDFRSRGSVPRTGFVESLAFAESGVFLVGGVGQEPCLGRWGGRPEALNGVSFLPYEM

SEQ ID NO: 160782 - protein, 39 aa, Glycine max
  Clone ID: PAT_MRT3847_116203C.1.pep
QIYNIHSLTTFDFLEIITILLHCNYDKLYPTSQISSIFL

SEQ ID NO: 160783 - protein, 55 aa, Glycine max
  Clone ID: PAT_MRT3847_116204C.1.pep
GGCAPPFLKPFFQSFLERAGCEINPLRLAAVYLSQKKVSFFMCLQYFPPPHFFKG

SEQ ID NO: 160784 - protein, 288 aa, Glycine max
  unsure (1)..(288): unsure at all Xaa locations
  Clone ID: PAT_MRT3847_116205C.1.pep
MGLWISLTLEYYMKAYIHIVVLYPYWNRSSGTDYVWSFSWDKGACPCSXTGLRFVLRSLERRKTPFCFNGNLGPAYPHGRPEDTYSMGIRQKLAEEFGSSPNKDGKLGKQHAKDVIVTPERSEDYHMDLASSVFCGVFPGDGWSGRMEDSILQGCIPVVIQDGIFLPYENVLNYDSFAVRIPEAEIPNLIKTLRGFNDTEIEFKLANVQKIWQRFLYRDSVLLEAERQKTAIGHVDDWAVEFLKLTEDDAFATLIQILHYKLHNDPWRKQVRHNKQFGLPHQCLVSTS

SEQ ID NO: 160785 - protein, 50 aa, Glycine max
  Clone ID: PAT_MRT3847_116206C.1.pep
YYFFQPEKIPHLLPLKNHNEKGPKINYLNLFLISHKLHDDPLTIPVSPTH

SEQ ID NO: 160786 - protein, 77 aa, Glycine max
  Clone ID: PAT_MRT3847_116207C.1.pep
THMSSSSAFVQCGIHKSCDNSTIICLLEFSAIDPSTDSTCKHDFHLHCIHYLCQISYHCTICFHPISSKDPTIYELF

SEQ ID NO: 160787 - protein, 49 aa, Glycine max
  Clone ID: PAT_MRT3847_116208C.1.pep
FCSEIKNLVIQCLSLCTLIVYQIFISKFQLDTSRQYKHIYCMFIYIEYL

SEQ ID NO: 160788 - protein, 77 aa, Glycine max
  Clone ID: PAT_MRT3847_116209C.1.pep
HNKIGRTFLFKKEFFAFKREVIDLTNSSPVNGYIKLLNLLEPPKTVVVPKTVKQIVVCIEHEAPNSLDSYPIFFPYT

SEQ ID NO: 160789 - protein, 89 aa, Glycine max
  unsure (1)..(89): unsure at all Xaa locations
  Clone ID: PAT_MRT3847_11620C.1.pep
IKRGGIFKXAPGTPPXRKKXKKXPPQRDRENTPKTGKPSESTQKQTNRQKKPKTRRGHFIQKPNRKANPPHILKGETGGKSFETKPFLT

SEQ ID NO: 160790 - protein, 113 aa, Glycine max
  Clone ID: PAT_MRT3847_116210C.1.pep
RGGPPFGCFSFLCGLVVGRVLSLCVSCSRLAFRGLFWLLLFSVFSGGPCFRVFCLFPMVSGELFQIVLFFQVFRHLCSILSSVFRSSGGPFCRVYYVAFPRARSLWSRCTLIF

SEQ ID NO: 160791 - protein, 67 aa, Glycine max
  Clone ID: PAT_MRT3847_116211C.1.pep
LIQLLVQCLRFSSYIQKLIVSPCSCTYTFNSFSPTHPPFWVYLDENLHKISRRRKQKRKNEISFSAC

SEQ ID NO: 160792 - protein, 324 aa, Glycine max
  Clone ID: PAT_MRT3847_116212C.1.pep
MSDSKVETIARLAQWKIDNFGPCSYKKSDPFKLGIWNWFMSIERNRYLYIHIFPEPSRLTKEQPPVARFILRVSNNSGPTRKFYISPVHERVLRTCEDFVWPVDTAFLGRFVIDIEFLDLRTCPVNGETRSVWPSDGKLQTVAAQSTLRCLSRMLDEAIHADLTIITADGTLRAHKAVVSASSTVFHSLYLHNGDEKETSTIHIEDMSQESCMALLSYLYGTIKQQDFWKHRLALLGAANKYEIGDLKDASEESLLEDLNSGNVLDRLNDAWLYQLQALKKGCFSYLFYYGKIYDVRDEMDTFFRHADRELMLEMFQEVLTISK

SEQ ID NO: 160793 - protein, 78 aa, Glycine max
  Clone ID: PAT_MRT3847_116213C.1.pep
WGFFFFFFFERTNRNIFTPLVLIPVHITNTFLQIKTNTFLHYFFIFMAPPFSLRRQTKLSSIPSKTLPICAKGGDGYF

SEQ ID NO: 160794 - protein, 61 aa, Glycine max
  Clone ID: PAT_MRT3847_116214C.1.pep
PRPFTFFLKFFKTCGLNPKSPYLFFCKGRFFKKKKKRGEKNIKRGENIFRGEEKKKKKMGG

SEQ ID NO: 160795 - protein, 207 aa, Glycine max
  Clone ID: PAT_MRT3847_116215C.1.pep
MECNKDEAIRARQIAENKMQAGDFEGGLKFATKAQRLFPEIQNILQILAVCEVHCAAQKKHSGSDMDWYGILKIEKSADEATIKKQYRKLALLLHPDKNKSDGAEAAFKLIGEANRVLSDQTKRALYDLKFGVPVGNTAAKVPPRHPNGNASGMGCDGTARNYQNSFFSQYQAWNSYHRTDNQTFWTCCPHCNTRYQYVITILNHTI

SEQ ID NO: 160796 - protein, 129 aa, Glycine max
  unsure (1)..(129): unsure at all Xaa locations
  Clone ID: PAT_MRT3847_116216C.1.pep
MECNKDEALRARQIAENKMQAGDFEGGLKFATKAQRLFPEIQNILQILAVCEVHCAAQKTYSGSDMDWYGILKTEKSADEATIKKQYRKLALLLHPDXNKSAGAEAAFKLIGEANRVLSDQTKRALYDL

SEQ ID NO: 160797 - protein, 36 aa, Glycine max
  Clone ID: PAT_MRT3847_116217C.1.pep
ESDGYCEGELVQVVQFGGQHLVSTVICMAAMILAQW

SEQ ID NO: 160798 - protein, 504 aa, Glycine max
  Clone ID: PAT_MRT3847_116218C.1.pep
KISSLPSPLVAVAARREQGKQRSSVVFSVDYNRFIGVLLRHSRLHLAHHFYRRHVIPRGFSLLPFTYSRFISALCSAPNNINLPLIHRLLLDMDALGFVPDIWAFNTYLNLLCRQNRLETALELFHSMPSKGRDPDVVSYTIIIDALCRAKRFDEAARVWRRLIDRGLNPDYKACVALVVGLCGGGRVDLAYELVVGVIKGGVKVNSLVYNALIDGFCRMGRVDKAMKIKAFMSRNGCVLDLVTYNTLLNYCCDEGMVDEAVRLVETMERSGVEPDLYSYNELLKGFCKANMVDRAYLMMVERMQTKGMCDVVSYNTVITAFCKARQTRRGYELFEEMCGKGIRPDMVTFNVLIDAFLREGSTHVVKKLLDEMTRMCVLPDCIFYTAVVDHLCKNGKVDVAHSVFCDMVENGVNPDVISYNALVNGFCKASRVMDAMCLFDELQSKGLYPDGVTYKLIVGGLIRGKKISLACRVWDQMMERGFTLDRHLSETLVIAIQSSDGTT

SEQ ID NO: 160799 - protein, 90 aa, Glycine max
  Clone ID: PAT_MRT3847_116219C.1.pep
FFFFFFFFFFFFFFFFFFFFFFFFLGERKTISPGPLKKKKNFPSPPGAFGGRVLHFLKPGGRGVAFFNRGPHLLVRGAPFWLFILGPLPG

SEQ ID NO: 160800 - protein, 39 aa, Glycine max
  Clone ID: PAT_MRT3847_11621C.1.pep
RDPLALLSLPPGLRVYPTDEELLVQYRFCIVSCHHCSLP

SEQ ID NO: 160801 - protein, 35 aa, Glycine max
  Clone ID: PAT_MRT3847_116220C.1.pep
NIIMAYILPLYNFGVVRAINSTKWSLPLACCKYKQ

SEQ ID NO: 160802 - protein, 85 aa, Glycine max
  Clone ID: PAT_MRT3847_116221C.1.pep
FILIWRNESYSIEDQYYGGMKSLSEKVDALSQNLVRETSVLNNKEDTLRSEEANKANLVKNIEELKHSVKEKSSAVKKAEEGAAD

SEQ ID NO: 160803 - protein, 129 aa, Glycine max
  Clone ID: PAT_MRT3847_116222C.1.pep
PWPFKQNTLVHGWGVDIKLGYCAQGDRTKKVGVVASENVFPKGIQTLGGRGPRMPKVLKLQRPPMQKQGGVGIYVRTEIKRPSPWEFEIFKKGWNKPLGAPQNWVGPFKSAPNRIKKWGAPQPPVKNKI

SEQ ID NO: 160804 - protein, 113 aa, Glycine max
  unsure (1)..(113): unsure at all Xaa locations
  Clone ID: PAT_MRT3847_116223C.1.pep
FLCVRSLVTAGIKFKRNLSNVHICGLYYDGXYKFWTKHERNFALTEEEKMEAIRNRGIPADVLAKRADEFEKHXAHESLKDQITAADRLGSTKVYXCGQIMNLQHSVVGDLKL

SEQ ID NO: 160805 - protein, 68 aa, Glycine max
  Clone ID: PAT_MRT3847_116224C.1.pep
MGAHGSRIRTSSTRTALLRELEQIWNDLVETVLDKDLMVMELERECLDVYRRTVDEVAYTTVRSHQTV

SEQ ID NO: 160806 - protein, 60 aa, Glycine max
  unsure (1)..(60): unsure at all Xaa locations
  Clone ID: PAT_MRT3847_116225C.1.pep
MFXRAPKKSDNTRYYEILGVSKNASQDDLKXAYKKAAIKNXPDKGGDPEXFKELAQLMRV

SEQ ID NO: 160807 - protein, 115 aa, Glycine max
  Clone ID: PAT_MRT3847_116226C.1.pep
FPRIPFFSGQFSFFSTFFSFPQTKRTRQHGFLLQEFKQKKKRFFFKYSLVFFPHVCLSFLLVLACLCFWPSLCRFKVKASACCLSLNVEQSRVGISFFQDLVYQRKKERKKERKR

SEQ ID NO: 160808 - protein, 192 aa, Glycine max
  Clone ID: PAT_MRT3847_116227C.1.pep
KPLPMGEAIAFGKTVTDHMLRVTWTAESGWDTPRITPYGPIVLDPVASGLHYGFECFEGMKAYRDAAGRLRLFRPELNAARLNRSAARISLPTFDEAEFVKLVRMFVKIEGRWVGNGPPHSLYIRPVLVSTTASLGVSAPTSALLYVVASPATSYFSASATALSLYAMPPSRFVRACPGGPGASKIGGNYAP

SEQ ID NO: 160809 - protein, 48 aa, Glycine max
  Clone ID: PAT_MRT3847_116228C.1.pep
YYMYADSHLVYAFMVCAHLDSMLYMTRLNKHWTCCSYVCLMNEFKSTH

SEQ ID NO: 160810 - protein, 67 aa, Glycine max
  Clone ID: PAT_MRT3847_116229C.1.pep
LIFRAFGDPCSQGALLFILHFSILQRQSRRTKHKWHGVLPLRHLESNNNQTNTKKTKYSHGLHIQAS

SEQ ID NO: 160811 - protein, 100 aa, Glycine max
  Clone ID: PAT_MRT3847_11622C.1.pep
AFHKCREISRDTAENKASPTIQVWKQTWLREHTHLSYFHKTEHSLRVKNVQCSLQPCPLSLTVISIGGKLQMKPSKKKERTLASHRHLPHHILKCGVTAI

SEQ ID NO: 160812 - protein, 63 aa, Glycine max
  Clone ID: PAT_MRT3847_116230C.1.pep
TIVYSWRSVMSDIPPFKTGARMMKFSNVLPSFLNLCVFRVTLLIWQKGYKSTFFLFKKRKKKK

SEQ ID NO: 160813 - protein, 73 aa, Glycine max
  Clone ID: PAT_MRT3847_116231C.1.pep
QITQGYYFITRYFILNKGKKNLCRLMPSYLLIRALTLAQKDHLLAEHAHRAFKANFPQETPYVKPLKNKGSGC

SEQ ID NO: 160814 - protein, 54 aa, Glycine max
  Clone ID: PAT_MRT3847_116232C.1.pep
SSFFFKKYFFLFIKEKKRGGWGWLISVNFITRLKPEKPLNMNLFTQGLTIFSQT

SEQ ID NO: 160815 - protein, 78 aa, Glycine max
  unsure (1)..(78): unsure at all Xaa locations
  Clone ID: PAT_MRT3847_116233C.1.pep
XRXHXHLENXPNXTXXSTEDAXXNTXPTTLSXGHYFVEXXTFLLIXXXVPXILCXLLPPKMXNXXARIATSTQHNTLF

SEQ ID NO: 160816 - protein, 119 aa, Glycine max
  Clone ID: PAT_MRT3847_116234C.1.pep
QALRVSGFLFMDEWARVISGEEQGISSWVAVNYALGNLGREPQETTGIVELGGASLQVTSAKLNADIAQSLHTIRLSGVMYNLYTRSLPQLGQDMVWKSLEEQLKYRELKLSSKSSKGN

SEQ ID NO: 160817 - protein, 56 aa, Glycine max
  Clone ID: PAT_MRT3847_116235C.1.pep
IVGRTEEGIQRMSRFERKGKPLEEKFFSLFSSISFNQKKKKTLFLFMSILGTLTAT

SEQ ID NO: 160818 - protein, 233 aa, Glycine max
  Clone ID: PAT_MRT3847_116236C.1.pep
GLDTRRPRREGESSRTRGSRLVTDGEYERAEAKKAKVRREGRHENRQDDADGQSLADTRNLLHLNVAACHLKLGECKKSIETCNKVLEANPAHVKGLYRRGMAYMAAGDFEEARADFKVMMKVDKSTESDATAALQKLKQKEQDVEKKARKQFKGLFDKKPGEISEAKADVDGDQITSESQKDDEVHGDSDGTNSEDSHEAPPEAQRTGWFSLFWPSGRRLFESLGINRCTIL

SEQ ID NO: 160819 - protein, 49 aa, Glycine max
  Clone ID: PAT_MRT3847_116237C.1.pep
NPLSIGVGLTLLTDKKHWKVIGLKLFICKKMHKVIFFISFKVPMSSYPV

SEQ ID NO: 160820 - protein, 137 aa, Glycine max
  Clone ID: PAT_MRT3847_116238C.1.pep
SSANQKLYSVIWPGETLSKPRGWVFPNNGRQLRIGVPIRVSYREFVAPVQGTEMFKGFCVDVFTAAVNLLPYAVPYRFVPFGDGHKNPSYTQLVNLITTGYFDGAIGDIAIVTNRTRIVDFTQPYAASGLVVVAPFK

SEQ ID NO: 160821 - protein, 54 aa, Glycine max
  Clone ID: PAT_MRT3847_116239C.1.pep
HLLYMASLYDQRCAPHDQVPISLGIKVRWGEPMIRKMFCNKIIHYHPVAASVDA

SEQ ID NO: 160822 - protein, 76 aa, Glycine max
  unsure (1)..(76): unsure at all Xaa locations
  Clone ID: PAT_MRT3847_11623C.1.pep
SISLCLYGNCHDLLHLHCQLHHSSDGHLIEKLNHRQTWXPINSNEYSPIHPQLNLDYSLXDLLVQHQXGKTXGRIF

SEQ ID NO: 160823 - protein, 371 aa, Glycine max
  Clone ID: PAT_MRT3847_116240C.1.pep
MALGDDAQHHSPSFLDALLCEERETFEEDFDENGYERETENNEPSVIKSQSLPLVLHDNDLFWEDEELVSLIAKEGETHLCFHGVVANGALEGPRVEAVNWISKVCGHYGFSALTTVLAVNYFDRFITSLKFQNDKPWMTQLTAVACLSLAVKTEETHVPLLLDLQVEESRFVFEAKTIQRMELLVLSTLKWRMHPVTPISFFEHIVRRLGLKSRLHWEFLWRCERVLLNVIADSRVMSYLPSTLAAATMIRVIKEIESFNATEYIDQLLGLLKISEEQVNQCYKIIQKLLGCYEGIYSLHQKRKRLSEPGSPGAVTDASFSCDSSNDSWTVSSSVSLSLEPLLKRRKSQDQQMRLPSVNCVSIDVLNSPR

SEQ ID NO: 160824 - protein, 383 aa, Glycine max
  Clone ID: PAT_MRT3847_116241C.1.pep
MKKRFFFLLRRRKMALGDDAQHHSHSPSFLDSLLCEERETFEEDFDANGDECETENNDPSVIKSQPLPLVLYDNDLFWEDDELVSLIAKEGETHLRSFSDGALEGPRVEAVNWVSKVSGHYGFSALTTVLAVNYFDRFITSLKFQRDKPWMTQLAAVACLSLAAKTEETHVPLLLDLQVEESRFVFEAKTIQRMELLVLSTLKWRMLPVTPISFFEHIVRRLGLKSRLHWEFLWRCERVLLNIIADSRVMSYLPSTLAAATMIHVIKEIESFNATEYIDQLLGLLKISEEQVNKCYRIIQKLLGCHEGIYGLPQKCKRLSELGSPSAVTDASFSCDSSNDSWAVSSSVSLSLEPQLKRRRSQDQQMRLPSVSRVSIDVLNSPH

SEQ ID NO: 160825 - protein, 50 aa, Glycine max
  Clone ID: PAT_MRT3847_116242C.1.pep
GEIWINYSKPKKKKELPITIPGVSNQNIGPLFWLLTPGMVIGNQNNGPIF

SEQ ID NO: 160826 - protein, 92 aa, Glycine max
  unsure (1)..(92): unsure at all Xaa locations
  Clone ID: PAT_MRT3847_116243C.1.pep
MSSQDAQVEVDVEDKKESKKGGAAAKKEAVIYYGPTKLREGENVXGVCHIYASFNDTFVHVTDLSGKETIAKVTGGMKEKDDRDESPPYAAM

SEQ ID NO: 160827 - protein, 112 aa, Glycine max
  unsure (1)..(112): unsure at all Xaa locations
  Clone ID: PAT_MRT3847_116244C.1.pep
RENRKKKPGPLFWRGPNPQGKNNPGGGTPPXKKIKKKPAPQGGGTGKKKRGGPPPHKKGGPPQGGRKKGPPPFVKKPPQGGGFFWGKGGALPERGPRPFKIGVKRGGPNPFF

SEQ ID NO: 160828 - protein, 74 aa, Glycine max
  unsure (1)..(74): unsure at all Xaa locations
  Clone ID: PAT_MRT3847_116245C.1.pep
ALNRHAKSNVALSAFEVGPDLHQPXAANSSIARANSSTAETEIYVDRIHSFLADEPHHXLDKLRDMCVVHFRRR

SEQ ID NO: 160829 - protein, 140 aa, Glycine max
  Clone ID: PAT_MRT3847_116246C.1.pep
TGRKILLCSLEFSRLFCSISFAPVSDSSIIISSTGEAETTSETGFCGSDISDATLGISSVGSDFSLLPKNEWKGRLTEDLICSSLISSLPLPGPSFLFEAELPRSAPKAPVNTGRKILLCPLREKRMKMSQYHCQNCHRI

SEQ ID NO: 160830 - protein, 753 aa, Glycine max
  unsure (1)..(753): unsure at all Xaa locations
  Clone ID: PAT_MRT3847_116247C.1.pep
MAYSELWPSLLENHLVVAIPGKVFQPPYPKWYNSNAKCAYHSGAPGHDIDSCLPFKYKVQHLINVGWLSFQEEGPNVKTNPLARHGGASVNTIEEDGPRCKRHAWSLVVETKGTNVCFISGSHMTWKPVPWWKSCFNGSWTRDSLKCPKERPSQHRLHIKAIRPFRGERVATKVDSLSAKVTNITSLSGVTRIGRVFVPPHSAELPSKGKAPMIQEPTDVATPSKEVDPPGVKEAEKKEGLQGKAVTLEEAHEFLRLIQQIHDKMHKEIEVYVDDMIAKSRIETEHLVNLRKLFGRLQKYQLKLNPTKCTFGVKSGKLLGFIVSQKGIEIDPEKVKAIMALHVFVRCMDHVVAKVLIDNGSSLNVMPKTTLEKLPVSASRLKPSSMVVRAFDGSRREVMGEIDIPIQIGXTLAMCCLLGRPWIHALGVVPSTLHQKLKFTVGGLLVIRLIAQEEREMKPHQEETELVNLGTREEKKEVKVGTGMTAPIRQGLITLLEEYQDVFAWSYQDMPGLDSDIVQHKLPLNPGSSPVKQKLRRMKPEMSLKIKEEVRKQFDAGFLAVARYPEWVANIVPVPKKDGKVRMCVDYRDLNRASPKDNFPLPHIDILVDNTAKFALFSFMDGFSGYNXIKMAPEDVEKTTFVTLWGTFCYKVMAFRLKNAGATYQRAMVALFHDRMHKEIEVYVDDMIAKSRTEAEHLVNLRKLFGRLRKYQLKLNPTKCTFGVKSGKLLGFIVSQKGIEIDPEKVKAILEMP

SEQ ID NO: 160831 - protein, 66 aa, Glycine max
  Clone ID: PAT_MRT3847_116248C.1.pep
IPFPPGPSSSTILRSLEPRPWVPLNPSSRIGWPKVWLGWFPGFCRKNPNLEKTKEGLLELRIRRPC

SEQ ID NO: 160832 - protein, 152 aa, Glycine max
  unsure (1)..(152): unsure at all Xaa locations
  Clone ID: PAT_MRT3847_116249C.1.pep
MFYGAGGWDPWLILLLLLCLQCMYYITPSXSSLLLLSTLVSLSSLVYFXNEIHITRREFXNMSGIAACLLVIFSXAVYVFFSFEISKKCLDFSATVYIVHLFICIVYGGWPSSITWWIVNGTGIAVMALLGERLCMKRELQEISLTRFRSNV

SEQ ID NO: 160833 - protein, 40 aa, Glycine max
  Clone ID: PAT_MRT3847_11624C.1.pep
FFSTFFLVHYRIEMVDIKEIVTLSNKFKSFGIIIFKLVVT

SEQ ID NO: 160834 - protein, 66 aa, Glycine max
  Clone ID: PAT_MRT3847_116250C.1.pep
LLMASELYRPRARVLICVGRHVNILKWSNGHTFSILASWFRESGASELKILSCSSERIQVFHQCRW

SEQ ID NO: 160835 - protein, 52 aa, Glycine max
  Clone ID: PAT_MRT3847_116251C.1.pep
LHSTNIILSTVKLPHRVKNLPTDFACTWQPKSSHQLTEHPSNSLENSIPTPI

SEQ ID NO: 160836 - protein, 59 aa, Glycine max
  Clone ID: PAT_MRT3847_116252C.1.pep
KGANHAPRGLIQADNISRRMKLNKTGGGGLKTVITFQCTRPTHAHNAIGTQLMLLPSHL

SEQ ID NO: 160837 - protein, 94 aa, Glycine max
  Clone ID: PAT_MRT3847_116253C.1.pep
SPDNNASVLISLRIVFVFTVKRASPSMLHSSFVSAPIICLLSNSPKTFLRTTGFVRPFFSSRVILCQRAAPWSMAASKADAVFHGFCCKKDFSA

SEQ ID NO: 160838 - protein, 60 aa, Glycine max
  Clone ID: PAT_MRT3847_116254C.1.pep
MSDLGQGYNILRLSQGKFLGRGAVEFCDGPTLGGLCCSLTNYPTLFGSTLGESSCFFLLH

SEQ ID NO: 160839 - protein, 56 aa, Glycine max
  Clone ID: PAT_MRT3847_116255C.1.pep
LVISVDYGVKVNIQISVVISLRVSLCKVERVISLLKELSICLRKMSVNSLCRVCMF

SEQ ID NO: 160840 - protein, 58 aa, Glycine max
  Clone ID: PAT_MRT3847_116256C.1.pep
GCGRNHVMTHNVSINKSQAYALEKHAAANCKDLDVANAANTNALILKEFASSIPGKKH

SEQ ID NO: 160841 - protein, 118 aa, Glycine max
  unsure (1)..(118): unsure at all Xaa locations
  Clone ID: PAT_MRT3847_116257C.1.pep
PRAQLRXDNXFSFYNLCXXKFAKXPXFPKXQKXXLIGLXQKXKXLALRLILXPLPLPLGGGXGXKXKNXAQPPKKRFLGGPRAQKTGXXGLXXPQNPLXRGGENXPCPFPGXFXRFWX

SEQ ID NO: 160842 - protein, 57 aa, Glycine max
  Clone ID: PAT_MRT3847_116258C.1.pep
GADHENKAWEAGLACKWCLPVAKSNMSKRCMSGCYAPKVSNLAVESGNAEPLVWLLI

SEQ ID NO: 160843 - protein, 90 aa, Glycine max
  Clone ID: PAT_MRT3847_116259C.1.pep
MSSWLIHYNKRVIISISLAFMLRLFGFKSTMFMVVLTIAILVLPLMLPPLPPPPMILMLVPLVIMLLLVKLALYSKHGPADVIYQCNFTW

SEQ ID NO: 160844 - protein, 70 aa, Glycine max
  Clone ID: PAT_MRT3847_11625C.1.pep
WPINTLPYAPTPQRSLPLQTTWNPARPPSDEDTALPARAGKLTIVAFLEAPEDADVRHLTVTMAKEASYD

SEQ ID NO: 160845 - protein, 65 aa, Glycine max
  Clone ID: PAT_MRT3847_116260C.1.pep
KDILSVIAVTKNDRHPSALPNLEVCGVHLDKPCKVSFSQLKLYHPEQVLVHRVSSGKESFDRALQ

SEQ ID NO: 160846 - protein, 62 aa, Glycine max
  Clone ID: PAT_MRT3847_116261C.1.pep
SLTINTSLVQYGEGIHSWSTSPLMNRFDTRHPCSQAHTVSARAYPTPSSLCNLTTVSSPNVD

SEQ ID NO: 160847 - protein, 173 aa, Glycine max
  unsure (1)..(173): unsure at all Xaa locations
  Clone ID: PAT_MRT3847_116262C.1.pep
LKKKSLWSRTLEEIVEKLVDIGTYIHQAIYEFGGNHGRYSCNQXSEGPERLGEAGLALHYANIINQINMIASRPTALPPNTRDTLYHGLPNNIKAALPSQLQTIGDMKELSITRIKAEMDKILQWLAPLATNTVKAHQGFGWVGEWANTKLAGNLEYSLIIYMCYMCNWKETQ

SEQ ID NO: 160848 - protein, 57 aa, Glycine max
  unsure (1)..(57): unsure at all Xaa locations
  Clone ID: PAT_MRT3847_116263C.1.pep
HKFDPTFYPXYKKWCDDYCYIEHRDERRGLREIFLRGYPSERKGGIALYRLTLNTTR

SEQ ID NO: 160849 - protein, 62 aa, Glycine max
  Clone ID: PAT_MRT3847_116264C.1.pep
HKPSIDTVAKRSEAVNNRRYYSTLLLPREISVAFSDNDWRYSCDSESSIYEAVLHCKRSFGE

SEQ ID NO: 160850 - protein, 76 aa, Glycine max
  Clone ID: PAT_MRT3847_116265C.1.pep
YGSNEFTLRWSESFTRISSAHKLLFDPKKVIIVCLPLSMVNSISLYLLTGHFYRHSSSQLCSRAVHVYELVTVQPP

SEQ ID NO: 160851 - protein, 121 aa, Glycine max
  Clone ID: PAT_MRT3847_116266C.1.pep
KFRFNSTVEVVFQNTALLGGQNHPMHIHGYSFHVLAQGFGNFNRKDRAKFNLVNPQLRNTVGVPMGGWTVIRFQANNPGVWLVHCHMEDHVPWGLAMIFEVENGPTPSTSVPPPPADLPKC

SEQ ID NO: 160852 - protein, 67 aa, Glycine max
  Clone ID: PAT_MRT3847_116267C.1.pep
TRPIYLVTISSGIHHVFPDIFTECRCNIGMFGAVLTFHIFFHKLNEIAILSAFNFCVAITITVVVCY

SEQ ID NO: 160853 - protein, 101 aa, Glycine max
  Clone ID: PAT_MRT3847_116268C.1.pep
SSRRSRGSHGAFVAFPILSFAAATVAAEPPSLAALPPGPPRLKDEIRRRNPAMKTARGQSPFLCFTLLGAVMATRAQQIYHSLLFIFSFCELSVPCCLVEL

SEQ ID NO: 160854 - protein, 49 aa, Glycine max
  Clone ID: PAT_MRT3847_116269C.1.pep
QCHFTSQQTIIQSITIKNPLLTTSPSSTTHPFNTKTLATPDLLTILNPI

SEQ ID NO: 160855 - protein, 42 aa, Glycine max
  Clone ID: PAT_MRT3847_11626C.1.pep
DVRRKGPLNKGGLKYYTYLSIFSFFFFFIKFFLNFYFFFIFF

SEQ ID NO: 160856 - protein, 100 aa, Glycine max
  unsure (1)..(100): unsure at all Xaa locations
  Clone ID: PAT_MRT3847_116270C.1.pep
LAPSMVSSKFFPPASNSTPKVLIVPILLKIVPHPXSVNWGLCIKNEAGFFIIARTAWSNQPXYVSEGEAMGHLLAIQWLQELVVSHVIIDMDCKIVVDKL

SEQ ID NO: 160857 - protein, 52 aa, Glycine max
  Clone ID: PAT_MRT3847_116271C.1.pep
LGSLAIRVWRHFRLQLRSHRVRISIPGTRNLRGVRFKQGAPTHATQVHSVTP

SEQ ID NO: 160858 - protein, 65 aa, Glycine max
  Clone ID: PAT_MRT3847_116272C.1.pep
GEPIWLYRRMCVRVNDSLLHRGPVDLTLSAPDLCEPRPTPPSACRSGSYPYRSGHEKRGGEKPPK

SEQ ID NO: 160859 - protein, 53 aa, Glycine max
  Clone ID: PAT_MRT3847_116273C.1.pep
NTHQFIYDNLYLCYAINPVKHHDPKLQRVYAKPILQNCIAHENECLPQSQYHD

SEQ ID NO: 160860 - protein, 100 aa, Glycine max
  Clone ID: PAT_MRT3847_116274C.1.pep
KDLDGCFLTYHTLHTPLTGSGRTHAPTLVYPSQMDVVPKISMPTFAMASYKLKGSIWMKKGVSESQQVSSLLQAADNWLRLVQVHHPDFQFFKSHGTYHR

SEQ ID NO: 160861 - protein, 49 aa, Glycine max
  Clone ID: PAT_MRT3847_116275C.1.pep
DPAWKLPTTKALIQFQLGPNEFISDYRGLFSKDYIRECFSHSCENVRKY

SEQ ID NO: 160862 - protein, 37 aa, Glycine max
  Clone ID: PAT_MRT3847_116276C.1.pep
AAFSLQYVTTSPCLQFKQISLYIIQKALLLVNMIEPV

SEQ ID NO: 160863 - protein, 48 aa, Glycine max
  Clone ID: PAT_MRT3847_116277C.1.pep
QQHPFCHPIKQEHSNNVTEGIHMDNSNSSSILTSRQSTFSVTVSIKEK

SEQ ID NO: 160864 - protein, 72 aa, Glycine max
  Clone ID: PAT_MRT3847_116278C.1.pep
DKPCAKEYEQLSMESIDSIIMLIFRGTFAKAGKPIYLNPTSETDPDHDYRNLTQYVIACHAFYTNTGFLKSI

SEQ ID NO: 160865 - protein, 88 aa, Glycine max
  Clone ID: PAT_MRT3847_116279C.1.pep
KNCGKKIALAFMGKKGVFSFGDLHFPAFPDDENKKAPLEKGKLFTLYHLVPKTKRKLALFKSLGGGFPLWGEDYFFFLGFQIKKPPLR

SEQ ID NO: 160866 - protein, 53 aa, Glycine max
  unsure (1)..(53): unsure at all Xaa locations
  Clone ID: PAT_MRT3847_11627C.1.pep
MVDYQLSHADKISILPGQASFKLHXYAGYITMEDXQKRVLYYYFVEAYVEPAS

SEQ ID NO: 160867 - protein, 33 aa, Glycine max
  Clone ID: PAT_MRT3847_116280C.1.pep
CKHEERRRFMRRLRLEVEWSDQQTRIPAFCRTK

SEQ ID NO: 160868 - protein, 57 aa, Glycine max
  Clone ID: PAT_MRT3847_116281C.1.pep
TILSHTFLYLFYNKKNCTNIIYVVRLYGCLKMMITVVAKNDENKVHIIIWFVAYNTF

SEQ ID NO: 160869 - protein, 52 aa, Glycine max
  Clone ID: PAT_MRT3847_116282C.1.pep
SMLLNSRFYLGLGAVNAHNSNHKILLPKMQNYTNIYICIKNYVNKITSKSQH

SEQ ID NO: 160870 - protein, 67 aa, Glycine max
  Clone ID: PAT_MRT3847_116283C.1.pep
GKDWSRPRFGVGAVPSSLYGSQCPLKQVAVDNWPPNQVGLAQFFNVLLPVILFSALIKRGFLFSPIW

SEQ ID NO: 160871 - protein, 57 aa, Glycine max
  Clone ID: PAT_MRT3847_116284C.1.pep
TQLSFCSIPSTLQNTKSLSLSLSSHRRCETTMGSKDWKMKQARTDKQKVEEECFTSL

SEQ ID NO: 160872 - protein, 94 aa, Glycine max
  Clone ID: PAT_MRT3847_116285C.1.pep
QVGRLQLYTDSSFVGSDKLRVRRGYAERILSNANLTRRNIGDVIAAACNLVAQRLPVDLGNVLRTVGLPTDVSSLGTNLTGISKGTLSRFWRRR

SEQ ID NO: 160873 - protein, 114 aa, Glycine max
  Clone ID: PAT_MRT3847_116286C.1.pep
SLMANHHLAAMLLLVFLFLTSSSARPLNDENNYFSLAATEPSLNLALPSDRVVVPEEPAPRHVSGCGHTRVAGILALPGTRLAGGKYGPMILNMLPKGPVPPSGPSKGTNNLNN

SEQ ID NO: 160874 - protein, 107 aa, Glycine max
  unsure (1)..(107): unsure at all Xaa locations
  Clone ID: PAT_MRT3847_116287C.1.pep
PRIPQVFLLEPSAVVALSTLRGLNEIYKGHRRVRILHRALVVSAQLCSRVCISRXHRPAKAIHLSDAAWANXSVPLFSHPEPIDNPFSVVNAAVSGASRIIAIQGLS

SEQ ID NO: 160875 - protein, 85 aa, Glycine max
  Clone ID: PAT_MRT3847_116288C.1.pep
DSPGSGNARPNNPDWGTFEEVSGNVSPGTRREYHTEKLVTSKGDKELRTGKEKVTSGSTTTTRRSCSKTVTKTVIGPDGHKEVTK

SEQ ID NO: 160876 - protein, 181 aa, Glycine max
  Clone ID: PAT_MRT3847_116289C.1.pep
GFPHEDFIMNPLDPQEFRRQGHMIIDFLADYYQNIANYPVLSQVEPGYLRELMPYFAPLNPEPIETILQYLQQHIVPGITHWQSPNYFAYFPSSGSTAGFLGEMLSTGFNLVGFNWVSSPAATELESTVMDWLGQVLKLPKAFLFSGSGGGVLLGTTCEAILVTLVAARDKVLGQIGRENI

SEQ ID NO: 160877 - protein, 47 aa, Glycine max
  Clone ID: PAT_MRT3847_11628C.1.pep
PPGHDLFEGRISPINFFPIKNSLPGNLEFWGATRSNQRLVVPPSLWG

SEQ ID NO: 160878 - protein, 171 aa, Glycine max
  unsure (1)..(171): unsure at all Xaa locations
  Clone ID: PAT_MRT3847_116290C.1.pep
HASGETRGTIAGGKELSSSEKDFVSCCGSTNFAKEKAPAFPFCSLRDAGSVARHVWINGVDVXTRCVRAFFLHPLIGQRHAPSVGYEATAQWCKGXQSTALTTGTVSSLQELYEWIAPDREKLAFVFLISAAGRKPAVILAELEIRYTDRPSVAFDIAARQQMNITELRLA

SEQ ID NO: 160879 - protein, 328 aa, Glycine max
  Clone ID: PAT_MRT3847_116291C.1.pep
NGRPFYSLLRAGFLEVTDPIGGSPLGALFTPVVGRVAPMAAWVVSFGPCACVDDRFAFCLFLLAVDMGLFTPGKAGLGAPAGRYSGIGVPFGAAPQGVWLILAMPAFVCRVSRMVLRALAAVLLLTAPPLASPSALQKAEELLRETPDAFMPHQFENPANPKIHYETTGPEIWTDSGGKVDALVAGIGTGGTITGAGKFLKERNPKIKVYGVEPVESAVLSGGQPGGHLIQGIGAGIVPAVLDVNLLDEILQVSSEEAIETAKLLALKEGLLVGISSGAAAAAAIKLGKRPENADKLIVVVFPSSGERYLSSPLFESIRQEAEQMTFD

SEQ ID NO: 160880 - protein, 36 aa, Glycine max
  unsure (1)..(36): unsure at all Xaa locations
  Clone ID: PAT_MRT3847_116292C.1.pep
VFPVAHYFLTHXXRYFIFKYHIRIAFVTKLYFWLSK

SEQ ID NO: 160881 - protein, 119 aa, Glycine max
  unsure (1)..(119): unsure at all Xaa locations
  Clone ID: PAT_MRT3847_116293C.1.pep
GGEIVSPDGRGFEFFFGGPFSYENFKIKHSHAGGVFMGNSGPDFKGSQFFFSPIKTGWFNGKNGVFGKVVQGMDFGFAIXGGGGTPNGEPQKKGVFSAFGGKPQRQWGKEKLTSLVEGP

SEQ ID NO: 160882 - protein, 61 aa, Glycine max
  Clone ID: PAT_MRT3847_116294C.1.pep
ESETLIGGGSCSILLSICFSWLSALSTVLDPYSCPSQFYSCVLRIRIMMRATFYSERISFD

SEQ ID NO: 160883 - protein, 45 aa, Glycine max
  Clone ID: PAT_MRT3847_116295C.1.pep
QYIGLRRKKKGNYISHKRSIFIFFLNKNKTCFSYSINKIDMKRPP

SEQ ID NO: 160884 - protein, 96 aa, Glycine max
  unsure (1)..(96): unsure at all Xaa locations
  Clone ID: PAT_MRT3847_116296C.1.pep
AGRPGPEFRSDTPVRFWFLTVDFAVFNLSAISDLCNVLDNIFLNLFLRILKAGRLPEKVLGLLMAPGRDEAFXLVQALIIHHFWTPVLPTRGFGAK

SEQ ID NO: 160885 - protein, 52 aa, Glycine max
  Clone ID: PAT_MRT3847_116297C.1.pep
VSNHFRELISILIQLQISITHSFWLSKFYPIINNNCIFSIYSLTSILLLPFF

SEQ ID NO: 160886 - protein, 209 aa, Glycine max
  Clone ID: PAT_MRT3847_116298C.1.pep
MANYLASIFGTEQDKVNCSFYYKIGACRHGDRCSRKHVKPSYSQTILLPNLYQNPAYDPKNKMNPQQMQMHFDAFYEDIWCELCQYGLAEELVVCDNNNDHLIGNVYVRFKYEEDAQKACDALNSRWYAGRPIYCELSPVTDFREACCRLNSGEGCVRGGFCNFIHRKEPTAELDRELDMCTRKWLKERGRDARSMSRSPTPPATKNRF

SEQ ID NO: 160887 - protein, 68 aa, Glycine max
  Clone ID: PAT_MRT3847_116299C.1.pep
EKTQEMISISAADDLLSKLLAQIKIGPPSCPELYSFLVTEETFTTVKWQNQEFLTAIIIYCIEAKHGK

SEQ ID NO: 160888 - protein, 87 aa, Glycine max
  Clone ID: PAT_MRT3847_11629C.1.pep
TRTFCSRFLFIGTQASLLIGITRNRAVKMKVLVFFVATILVAWQCHAYDMFPLRMNTDYGARTPEVNCSSCKLASESHSIFGFETIS

SEQ ID NO: 160889 - protein, 200 aa, Glycine max
  unsure (1)..(200): unsure at all Xaa locations
  Clone ID: PAT_MRT3847_1162C.1.pep
MAELGFQERSSWRKREKKAKVQDDEDRDADIQEPVELDSARNSFSLALKECQDKRSKFEALLKKAASLDLNNDFGSGSSRRLQTLKKSSISSRRSGXATFPIPGTPNFHIAMYKGWSSEQVPLYAGATQKHVFPFNNGKTLPSKWEDAERWIISPVSADTESVIINAPPRGQVWWVQRRWHQCVPCCFKEGHGDPDDPTG

SEQ ID NO: 160890 - protein, 93 aa, Glycine max
  Clone ID: PAT_MRT3847_116300C.1.pep
MGTLMLLKKFTLLFLLISGSLLSTSFAGRVRSNSIKNFAKDVNAIEEGTPRKPLNKEEVRTIHERLLRANTKDYGRYDPSPSLSKPPFKLIPN

SEQ ID NO: 160891 - protein, 234 aa, Glycine max
  unsure (1)..(234): unsure at all Xaa locations
  Clone ID: PAT_MRT3847_116301C.1.pep
MMWSFASNALTSIRLKIGSKQPSLLHSEYRALGLVLWPSREEGLECPICWESFNIVENVPYVLWCGHTLCKNCILGLQWAVVKFPTQQIKIPFFISCPWCHLLSFRIIYKGNLKYPCKNFFLLWMVESLNGDRHKVFSTCTDNQPIWSPKCNLLGSQVTNCNLRRASVXLFLDCWDLKVMFVTMMVQHTTFLILNCAVILVLHFLVTILFAISSFLVLYFAYPTIQRLVREITS

SEQ ID NO: 160892 - protein, 159 aa, Glycine max
  Clone ID: PAT_MRT3847_116302C.1.pep
SFRIICKGNLNIPCKTFFLLWMVESLNGDRNKLVSTCTDNQPIWSPKCNLLGSQVTNCNLRRASVSPCSRLLGSNHDVGVNDGETHHFSLHKSLDFFLHFTSKFPLVVIFLLIALFLIPCCAVILVLYFLVTILFAIPSFLVLYFAYPTIQRLVREITS

SEQ ID NO: 160893 - protein, 42 aa, Glycine max
  Clone ID: PAT_MRT3847_116303C.1.pep
IFEEFLFKSHLNNFIQFQKKPYVIGATVIISLSLYFVIFFYL

SEQ ID NO: 160894 - protein, 178 aa, Glycine max
  Clone ID: PAT_MRT3847_116304C.1.pep
MLVSGAISDVLVVLPPSASLRLPEFRHLHAFTVSDAKGFLSGGFLKSCPSSYNPKHYNELYNFRARGLVARASADPRDNLVPFAPLQFESPVGQLLEQISNTHPHLLPAAIDQQLENLQTARDAQNESSDSSLDSLYKRIAEVKEKEKRTTLEEILYCSIVHKFLENNISMIPKISAT

SEQ ID NO: 160895 - protein, 110 aa, Glycine max
  Clone ID: PAT_MRT3847_116305C.1.pep
TFISITFHVSTKNLTEAIWVYHFSNNPNPKPYLHHTQSKFFILFSYIAHKPIIYPISTRTTVILSHYTKFTVLLNSISYQYLHKLPITNNNFTYNFYSHSFNYLFYNFYT

SEQ ID NO: 160896 - protein, 89 aa, Glycine max
  unsure (1)..(89): unsure at all Xaa locations
  Clone ID: PAT_MRT3847_116306C.1.pep
MASHRLLLLCLAGLVCVSEAXPTGTGESKCPLMVKVLDAVRGSPAINVAVHVFRKAADDTWEPFASGKTSESGELHGLTTEEEFVEGIY

SEQ ID NO: 160897 - protein, 81 aa, Glycine max
  Clone ID: PAT_MRT3847_116307C.1.pep
FSLTSSGISMIWISSALSCKDLSECIESISSSFNMRARHMVDVPEFLAEPFPHLKQLCSGPLMLGFSMCFLLNLASLWRPQ

SEQ ID NO: 160898 - protein, 49 aa, Glycine max
  Clone ID: PAT_MRT3847_116308C.1.pep
MTLSLETTTKLFLFVEMKTASSIFPTIRVNACVTDTSLNVSLNASGKCY

SEQ ID NO: 160899 - protein, 199 aa, Glycine max
  unsure (1)..(199): unsure at all Xaa locations
  Clone ID: PAT_MRT3847_116309C.1.pep
KIKCYFWLLRLEASVNDLEKLQQDACITDKRVANNIEDLLTLASTILXLLKDKREGNENFKSGKYMEAVENYTSALSCNIKSRPFMAICFCNRAAAHQALGHAXAIADCSVAIALDGNYAKAISRRATLHEMVRDYEQAACDLKRLIAVLETQSNERAKQSDSPSGSNAVKELRQAHQRLLSVEDQAKKGAPLDVYLIL

SEQ ID NO: 160900 - protein, 73 aa, Glycine max
  Clone ID: PAT_MRT3847_11630C.1.pep
LAWRCWYCCRWLWRWRRKLREVDLDQGVLFASTSLFLLLCRTCKINTKTENTAEHQAWIYTMRLCGSAMCLHT

SEQ ID NO: 160901 - protein, 106 aa, Glycine max
  Clone ID: PAT_MRT3847_116310C.1.pep
FCAFGNSGAGQVADSARTWVYVGGRGCSACKGALWLPWLVCAGSLKAPWTGLLGRLSGIHVFIQPTFWCPFHRFSMIKIYVCLPKAACSLWMKLIYFLCQGAFYWC

SEQ ID NO: 160902 - protein, 99 aa, Glycine max
  Clone ID: PAT_MRT3847_116311C.1.pep
KGGKHNGTSAPTPPKVRYMANCGQAERYRDVDSWKVSLREARSSRDDAPPLSPTELIGLAAPLEHHLIMSTRGEPGNDDQSASPDYRPRSSRLYTFARN

SEQ ID NO: 160903 - protein, 49 aa, Glycine max
  Clone ID: PAT_MRT3847_116312C.1.pep
VHNVVPHGLWNMHKCFLLCFRMSLKRLWLKVCILYFFLRCLGMISLKTS

SEQ ID NO: 160904 - protein, 56 aa, Glycine max
  Clone ID: PAT_MRT3847_116313C.1.pep
FGQIPFNLQARHVDDDDNNDNIKKILLVDWGVKATLSECKYMILSSGFRILYRQLS

SEQ ID NO: 160905 - protein, 72 aa, Glycine max
  Clone ID: PAT_MRT3847_116314C.1.pep
ENVQSSDLNTGGSHVLSHVSPPKSSSFFADFGMDGGFPKKSGPSSSKVQVSHMLATLVSAMLSLMHPVSIQD

SEQ ID NO: 160906 - protein, 160 aa, Glycine max
  Clone ID: PAT_MRT3847_116315C.1.pep
MFGRLNQVARHLSRPIPNFAHRSAVSFRPSITSSVMASTQQKSLIHTAGCLVIGDEVLGGKTVDTNSAYFAKFCFSLGINLRRIEVIADDEGEIVEAVQRMSKNYDMVVTSGGIGPTHDDITYQSIAKAFGLPLKLHDAAFERMKRLSKPHKSQPNFDWN

SEQ ID NO: 160907 - protein, 36 aa, Glycine max
  Clone ID: PAT_MRT3847_116316C.1.pep
HRPLGSRQPLGGCRSQVPLVEVARLAVRLAAIENNG

SEQ ID NO: 160908 - protein, 50 aa, Glycine max
  Clone ID: PAT_MRT3847_116317C.1.pep
AEYKLGSILIDKNKITLIIYIFVGFKGKLRFNDIFQLYGRVENKAFGHVL

SEQ ID NO: 160909 - protein, 84 aa, Glycine max
  Clone ID: PAT_MRT3847_116318C.1.pep
MFPDEFFPCQQIARLSCLDNYSIYFGWKVIRFACDPSAYNNARTTQRVSPRWSFISFKIPGFYNTLLPIIHFVLFFGTRWVRTR

SEQ ID NO: 160910 - protein, 81 aa, Glycine max
  unsure (1)..(81): unsure at all Xaa locations
  Clone ID: PAT_MRT3847_116319C.1.pep
MASILHYFLALSLSCXSCLFFLSDSVTPTKPINLVVLPVQNDGSTGLHWXNLQKRTPLMXQVPVLXPLWGNXXWVNCEQQX

SEQ ID NO: 160911 - protein, 72 aa, Glycine max
  Clone ID: PAT_MRT3847_11631C.1.pep
KAKNQKRAFLVCKKAQNVPNPSPIFLIPGKKGFWPPNFKMLQNWGFKSKPKKVLKKKRFGKKILFQPKKCYV

SEQ ID NO: 160912 - protein, 184 aa, Glycine max
  unsure (1)..(184): unsure at all Xaa locations
  Clone ID: PAT_MRT3847_116320C.1.pep
PRPQEIPLPXEFLLNRDLLAQLSPSFAEGATPXFFTLNWSKYAEFLTXFRGGLDPVTGGLWLTDIIHHHLAIAILFLIAGHMYRTNWGIGHSIKDILEAHKGPFTGQGHKGLYEILTTSWHAQLSINLAMLGSLTIVVAHHMYSMPPYPYLATDYGTQLSLFTHHMWIXXDFSXXGAAAHAAIF

SEQ ID NO: 160913 - protein, 46 aa, Glycine max
  Clone ID: PAT_MRT3847_116321C.1.pep
LLLSHVGPILRVWSVQLHVEWIYARVVKTCAGLVAFKPSLFFLYRK

SEQ ID NO: 160914 - protein, 127 aa, Glycine max
  Clone ID: PAT_MRT3847_116322C.1.pep
QGQPLSFPGHNKTLFPSCFTRALCPSLAWPNGLTHFNKIISHDSSSVYTFYKQCLRHYPHSAHKPILDFCQYADRLREKPNTARALSQTRPRQPLSQHGSARKTCLVRSLPLTRVGFYSFRLRESRP

SEQ ID NO: 160915 - protein, 83 aa, Glycine max
  Clone ID: PAT_MRT3847_116323C.1.pep
LMFSNMSSEQTVHSRGIYHGLSVFPSSLKGLTAIIKGANGISGNYMLRVLVARSRTMEQDLCLSRRPWAIPNGLSKNAEHMLG

SEQ ID NO: 160916 - protein, 69 aa, Glycine max
  Clone ID: PAT_MRT3847_116324C.1.pep
LIQHKPLGTCHSGVQSNLILMLIHRLGARSPTQRMPRYRSQNNLKPLRLLVKPTGTQTSSRVFKRLLSR

SEQ ID NO: 160917 - protein, 73 aa, Glycine max
  Clone ID: PAT_MRT3847_116325C.1.pep
VCTGPLLGPSWLAVTRGTPTLISPLTSAIVYIIAIVGCVSHLVTVTFRGSVYIVLHCSSGRSHTCCWVYSHIR

SEQ ID NO: 160918 - protein, 69 aa, Glycine max
  Clone ID: PAT_MRT3847_116326C.1.pep
LLSLIRDKIKKRICPTGQSFIVLVCIWFFFVSCEWRKTMLQCPRTWSFGPVTFFFQPSPSVVFSQPYSR

SEQ ID NO: 160919 - protein, 92 aa, Glycine max
  Clone ID: PAT_MRT3847_116327C.1.pep
PTTSPQLKNTQARLIKKEKRERFWFIPTTSNQAYFEGQYKITKLAAYPISKVPILDERERNWINLHERGQYRQSVEKRQIRQQQLNKKKSSH

SEQ ID NO: 160920 - protein, 757 aa, Glycine max
  Clone ID: PAT_MRT3847_116328C.1.pep
MEVLMAERANLVFHNKVIGGTAIKRLISRLIDHFGMAYTSHILDQVKTLGFRQATDTSISLGIDDLLTIPSKGWLVQDAEQQSFILEQHHHYGNVHAVKKLRQSIEIWYATSEYFRQEMNPNFRMTDPFNPVHIMSFSGARGNASQVHQLVGMRGLMSDPQGQMIDLPIQSNLREGLSLTEYIISCYGARKGVVDTAVRTSDAGYLTRRLVEVVQHIVVRRTDCGTIQGISVNTQNGMMPERIWIQTLIGRVLADDIYRGSRCIAVRNQDIGIGLINRFKTLQTQPISIRTPFTCRNTSWICRLCYGQSPTHGHLVELGEAVGIIAGQSIGEPGTQLTLRTFHTGGVFTGGTAEQVRAPYNGKIQFNEDLVHPTRTRHGHPAFLCYIDLYVTIESGDIIHNVTIPPKSFLLVQNNQYVKSEQVIAEIRAGTYTFNLKEKVRKHVYSDLEGEMHWSTDVYHASEFRYSNVHILPKTSHLWILSGKSYRSGSVSFSIRKDQDQMNIHYLSTGERDFCNLLASKKKVRHKLFRFNPSDKKERRISDYSIFNQIISIDHCHFTHPTIFHDTTDLLAKRRRNRLIIPFQFQSIQERDKELMLASSISIEIPINGIFRRNSILAYFDDPQYRTQSSGITKYRTIGINSIFKKEDFLIEYQGVKEFKTKYQIKVDQFFFIPEEVHILPESSSIMVRNNSIVEVDTLITLNIRSRVRGLVRLEKKKKKIELKIFSGDIYFPGEMDKISRHSAVLIPPRTVKKNSK

SEQ ID NO: 160921 - protein, 67 aa, Glycine max
  unsure (1)..(67): unsure at all Xaa locations
  Clone ID: PAT_MRT3847_116329C.1.pep
TAMLSLRRLMSLLEQNQYVVLXRQWSRVGPNRSVYIEVALINTRPSAHFHAHKYDEFNNGYGSPIRQ

SEQ ID NO: 160922 - protein, 317 aa, Glycine max
  Clone ID: PAT_MRT3847_11632C.1.pep
MQALCALLSVLDDRGKREALLIESLERRRASLCRSMSRINVNSTGKGSMSHSDQSELDMVTDDSYSPASDVDNLNLTETAEDSLPSAGAVVIEAGKKGEEQIKKWIRVQEYDSWIWNSFYSDLNVVKYGKRSYLDSLARCKSCHDLYWRDERHCKICHMTFELDFDLEERYAIHIATCREKEDSNTFPDHKVLSSQIQSLKAAVYAIESVMPEDAMVGAWRKSAHKLWVKRLRRTSTLVELLQVLTDFVGAINKDWLYQCKFLDGVVEEIIASFASMPHTPSALALWLVKLDAIIAPYLDRVHLQKKQGTSQHGAWR

SEQ ID NO: 160923 - protein, 34 aa, Glycine max
  Clone ID: PAT_MRT3847_116330C.1.pep
NHLVMVLNHHKLRFFNTVDPIYVVGSPSVVFSQP

SEQ ID NO: 160924 - protein, 102 aa, Glycine max
  unsure (1)..(102): unsure at all Xaa locations
  Clone ID: PAT_MRT3847_116331C.1.pep
ARWSDLIRSWNQTERSSSAQKLLRKVQKLHLVLCRRXQNNEIVHLSNIFKYLQHAVSIPLISSYPXCDMVPXGELCSSNKTSFLYKNPIDLMEEGSHQCASC

SEQ ID NO: 160925 - protein, 67 aa, Glycine max
  Clone ID: PAT_MRT3847_116332C.1.pep
PPLFFLKTLPLHFMRRNFCFPFSTGGGISFFVESSNLWDSFWVPIKNCFYKLTFFLSKKDFKKAPLA

SEQ ID NO: 160926 - protein, 65 aa, Glycine max
  Clone ID: PAT_MRT3847_116333C.1.pep
SLLFTHFLSSVRQSLSFTLSGLSLSLSLSLYFNVFYSRLNMNAMLLFSPLQSHLLIFQFPYSRSI

SEQ ID NO: 160927 - protein, 60 aa, Glycine max
  Clone ID: PAT_MRT3847_116334C.1.pep
YFSFHIFFFYHPMACKNPFCCIRFLNHVNNVKSSRRKSLFYRYKVDLFVLKKKKKGRLRS

SEQ ID NO: 160928 - protein, 37 aa, Glycine max
  Clone ID: PAT_MRT3847_116335C.1.pep
FFFFFFFFFFFFFFFFFFFIINFSFFGLTEVTGGKIG

SEQ ID NO: 160929 - protein, 49 aa, Glycine max
  Clone ID: PAT_MRT3847_116336C.1.pep
GSSSDATYYATGFTFHRRHHTTERGRMHTQPPENTSPAEPKRINYGYER

SEQ ID NO: 160930 - protein, 160 aa, Glycine max
  unsure (1)..(160): unsure at all Xaa locations
  Clone ID: PAT_MRT3847_116337C.1.pep
DSIKSLQIRQVLTQAVSLGMIVTSALIIWKALMCVTGSESPVVVVLSGSMEPGFKRGDILFLXVFNVDGREIPIVHRVINVHEMEDTGEVDVLTXGDNNYGDDRLLYAHGQLWLQRHHIMGRAVGFLPYVGWVTIIMTEKPIIKYILIGALGLLVITSKD

SEQ ID NO: 160931 - protein, 491 aa, Glycine max
  Clone ID: PAT_MRT3847_116338C.1.pep
NHFVPFIVYGGQYDVKDLCKIVEFWYILTSSYSWKSLFHWTLVVHSFDLIVSSAGIFSIRGTRETGVIVPMEDPMTILQKGYSFTIVLAVLAFGLSTRWLLYTEQAPSAWFNFALCGLIGIITAYIFVWIAKYYTDYKHEPVRILALSSSTGHGTNIIAGVSLGLESTALPVLVISVSIISAFWLGHTCGLVDETGNPTGGLFGTAVATMGMLSTAAYILTMDMFGPIADNAGGIVEMSQQPESVREITDVLDAVGNTTKATTKGFAIGSAALASFLLFSAYMDEVSAFAHEPFKQVDIAIPEVFVGGLLGSMLIFVFSAWACAAVGRTAQEVVNEVRRQFIERPGIMDYKEKPDYGRCVAIVASASLREMIKPGALAIISPIVVGILFRILGYYTGQPLLGAKVVAALLMFATVSGILMALFLNTAGGAWDNAKKYIETGALGGKGSEAHKAAITGDTVGDPFKDTAGPSIHVLIKMLATITLVMAPVFL

SEQ ID NO: 160932 - protein, 87 aa, Glycine max
  Clone ID: PAT_MRT3847_116339C.1.pep
FNSLNLKGPPFLLWEPPFKRRPPTLLPPFPQKYFILFPLLEKKNFFYQIPPNIKIPPPASKKKKEAVSSLYYNHRQKSPLLTTFFQK

SEQ ID NO: 160933 - protein, 77 aa, Glycine max
  Clone ID: PAT_MRT3847_11633C.1.pep
SALVSSAGSPSLGPHGSDFGWGKPTQCEILHIECSSPISRSDSRDREGGLVVRLALGRAHMSSFSAMLGGYLRDFGI

SEQ ID NO: 160934 - protein, 180 aa, Glycine max
  Clone ID: PAT_MRT3847_116340C.1.pep
MGWIGESVDSIKSLQIRQVLTQAVSLGMIVTSALIIWKALMCITGSESPVVVVLSGSMEPGFKRGDILFLHMSKDSIRAGEIVVFNVDGREIPIVHRVIKVHEREDTGEVDVLTKGDNNYGDDRLLYAHGQLWLQRHHIMGRAVGFLPYVGWVTIIMTEKPIIKYILIGALGLLVITSKD

SEQ ID NO: 160935 - protein, 127 aa, Glycine max
  unsure (1)..(127): unsure at all Xaa locations
  Clone ID: PAT_MRT3847_116341C.1.pep
EFGTSIXXLFXLKHYSTLFNVGSISSPIGSYLLSVRVAGYLYDMQARRQMEALGQKTSPGEELNCNGDECYKLAFITMTAVCLFGACLSLILVFRTIQLYRRDLYKKFNGATTDVTETTDVTETAVS

SEQ ID NO: 160936 - protein, 37 aa, Glycine max
  Clone ID: PAT_MRT3847_116342C.1.pep
GIRKVERDTSLHHRYVPQRAACRSHECACQQHDRPLR

SEQ ID NO: 160937 - protein, 60 aa, Glycine max
  Clone ID: PAT_MRT3847_116343C.1.pep
EFGTRLKCILKGLDFKTYIFLFVIVPVGIFGLYLHGQKISYFLRPLWESPPKPFHEIPHY

SEQ ID NO: 160938 - protein, 129 aa, Glycine max
  unsure (1)..(129): unsure at all Xaa locations
  Clone ID: PAT_MRT3847_116344C.1.pep
APTHATIRTNHIIINSSQYGSGWGALCRNHTSKILQHKRAMCFYCTRNCVLHTLLTRLISXHQSNDSIKVLDHLQYFMKSLIVSMILCERLDDGKERDIEQVQXQMLLLIIRFNVLKFWPLQTHVLFFK

SEQ ID NO: 160939 - protein, 89 aa, Glycine max
  Clone ID: PAT_MRT3847_116345C.1.pep
PRGKLKGFQRGVFFPEFLPRVKGGKRGLGGFLKGPPGGKSPPFWGQGLLIPCERPFLFPPAPLWGGVNPFLGPELIPLGMGFFGGVLAS

SEQ ID NO: 160940 - protein, 39 aa, Glycine max
  Clone ID: PAT_MRT3847_116346C.1.pep
PRVRSCMINFCKIPSLTYSFKFCIRYYNIVVLTIKALCF

SEQ ID NO: 160941 - protein, 39 aa, Glycine max
  Clone ID: PAT_MRT3847_116347C.1.pep
ECDLSMGMSGYFELAIEMGRPNVKIGSPIFGPRGYAKNQ

SEQ ID NO: 160942 - protein, 57 aa, Glycine max
  Clone ID: PAT_MRT3847_116348C.1.pep
SNVEFVISASLIPYSVIVFPPCSREYMLRSLSICQVLVRIHHVQWNCPFLMAACFLM

SEQ ID NO: 160943 - protein, 120 aa, Glycine max
  Clone ID: PAT_MRT3847_116349C.1.pep
GVYPPHTPPGVLNAPPLGGALPFSPLRGAPPFLKKPPSIPPLLRYTPPHGAKRKIPPTPLKLGTPRFFSLSPFFYPRPNDSLGPPPKKPFTFSPPGEKPLFSKKPPPLFFSPPFFLGVFK

SEQ ID NO: 160944 - protein, 114 aa, Glycine max
  unsure (1)..(114): unsure at all Xaa locations
  Clone ID: PAT_MRT3847_11634C.1.pep
MASFLSPSPSSLDQTLRDGDDYVLENGSEGLSRDTLHYVYELVKNGNVAFRENRMEEAINFYSRANNIKXRISQYFMHRTPSSSERRPLSGLEPTTLAELGLKDAEKLVNSKEF

SEQ ID NO: 160945 - protein, 70 aa, Glycine max
  unsure (1)..(70): unsure at all Xaa locations
  Clone ID: PAT_MRT3847_116350C.1.pep
PPPCAPPRPEQAPPLPVEPPLPPPAAPPPXPPXDPPLLPPPPPXAPPARAPPPPPLQKPPPYPPPRAEFR

SEQ ID NO: 160946 - protein, 82 aa, Glycine max
  Clone ID: PAT_MRT3847_116351C.1.pep
HSLGTRTWNIGIACECTFSTLFGLLTELQMWEKETEMGVIYNWNCRRSFQSMRKYLEKEICINFQIFYDPDPHSPFGSSAFF

SEQ ID NO: 160947 - protein, 48 aa, Glycine max
  unsure (1)..(48): unsure at all Xaa locations
  Clone ID: PAT_MRT3847_116352C.1.pep
YSKANINIQKLRKGAGTHKGGXCELMVTYPSTHGFNEEGIDVIFQYYS

SEQ ID NO: 160948 - protein, 74 aa, Glycine max
  unsure (1)..(74): unsure at all Xaa locations
  Clone ID: PAT_MRT3847_116353C.1.pep
ARNSARXXGYKRLMAXGXXXXXXXXPLLXXXSPXXHSXSQRXXXGAQGXVXIXXXXIXXGLXXDXXRAXYGIAX

SEQ ID NO: 160949 - protein, 222 aa, Glycine max
  unsure (1)..(222): unsure at all Xaa locations
  Clone ID: PAT_MRT3847_116354C.1.pep
GQQRCELWDPIIKKCERKLAKWKQRRISFEGRVTLIKSVSIPIYFFSFFKVPNRVVDKLVSIQRRFLWGGXFEQKKTVWVKWDTMCLPKEKGGLGIRDIKSFNLALLGKRGWNLFHHQGKLWARVLDSRYGSWRSMDDKRRGSNESLWWQDLKSRFQSSQEVNFFQKGIAWRAGCRDKVSFWVDKWNDDGNPLILKYPRLYHISSQQKQLIQHMEVTKRRHQ

SEQ ID NO: 160950 - protein, 67 aa, Glycine max
  Clone ID: PAT_MRT3847_116355C.1.pep
CESVLYQIEEYLGRAGWVSCEGVKPLLDYIRMECVMYFLMGVNNAFSQVRGQILLMDSIPSITRFPP

SEQ ID NO: 160951 - protein, 27 aa, Glycine max
  Clone ID: PAT_MRT3847_116356C.1.pep
KTKVQFFFKGNKTLSLGLVPICNPIGN

SEQ ID NO: 160952 - protein, 119 aa, Glycine max
  unsure (1)..(119): unsure at all Xaa locations
  Clone ID: PAT_MRT3847_116357C.1.pep
LRSLELEYTVYDDRDLGEKAYEYRLVKVVKFXLPRNQWVVYLDLKREECNNLLPSGLVYSHAFHLGGQGFFLLAHCNVDQQSSFHCLGLFLGMQEMGSVIFVANYHFVARFMPTDEFIA

SEQ ID NO: 160953 - protein, 124 aa, Glycine max
  unsure (1)..(124): unsure at all Xaa locations
  Clone ID: PAT_MRT3847_116358C.1.pep
DTWGHCLYCDKRDADNAVRLNYPYAVFHSLRHTDPDRRSEGSNMTNTCTKGPMFVFITFCGDNKDTVTTVANCHKLDLLGENHAIAAXFRTHVPHFTRWPTDARPTSTLPSDVTAYIEAMRHES

SEQ ID NO: 160954 - protein, 73 aa, Glycine max
  Clone ID: PAT_MRT3847_116359C.1.pep
FLLAPPLGTPGFTLYVFGSHVVWYCDRVPFFPGPLFLPFFPPAFIRLPFGKIGPPPGPGPDFPGKPPGPPPGR

SEQ ID NO: 160955 - protein, 53 aa, Glycine max
  Clone ID: PAT_MRT3847_11635C.1.pep
DKRKGVYSFVNKLSVNVDGKSLIMDYKEWFITGNVDEEGIIGLSNWAVTPNGF

SEQ ID NO: 160956 - protein, 65 aa, Glycine max
  Clone ID: PAT_MRT3847_116360C.1.pep
MFVYTYLVYISLQFILDDMMKSSDFILMMRVIFRCVNRLNLRGGCFFRMRSSPECYKHASIGNWR

SEQ ID NO: 160957 - protein, 123 aa, Glycine max
  Clone ID: PAT_MRT3847_116361C.1.pep
PVIPGSTHASATAAYLARRAAQKERVRILYRRALKDTLNWAVHRHLFYDDASNLRERFEENRHVEDPDTIDRLIADAEASYNKWRHPDPYIVPWAPGGSKFTRNPTPPQGIEIVYNYGREDND

SEQ ID NO: 160958 - protein, 202 aa, Glycine max
  Clone ID: PAT_MRT3847_116362C.1.pep
RKLLPFPISPSKFATFEILMAFQLKPEPGSPPMSTSTTQKNYKEMSISQLVSVLRVSFQTEDFDKVEEELANRDAKLKAEIEPLREKIEVERLKRIEAEEKLKNRDEQCEKGKRAQQNYEQLLKEVKKNGLVEKNTIEELRQMSLALQRENCELKGLKKKWLDDGKSVGELRSRISVLEEEKSALDALSTKNSELKGSIKIN

SEQ ID NO: 160959 - protein, 136 aa, Glycine max
  Clone ID: PAT_MRT3847_116363C.1.pep
MEIESSAATDSNNWGGAAAVEREMTYTGFDRGTFLAWQDLRVVIPNFGKGPTKRLLNGLNGYAEPGRIMAIMGPSGSGKSTLLDSLAGRLSKNVVMTGNVLLNGKKKGLGAGYGVVVSKVTHFLHIIICGSINIRE

SEQ ID NO: 160960 - protein, 180 aa, Glycine max
  unsure (1)..(180): unsure at all Xaa locations
  Clone ID: PAT_MRT3847_116364C.1.pep
MRKFTTIFSHIKSTKMNFSVSLLHRSSPFCPNQPPHPNFKNLTWQNRDSLLLFPLLCSRHFASTTAQNPSTLNALQDHYQAIDFPGGAVQFIPEMRFISESPKERIPCYRVLDDNGQPILGHNFVQVSKEVAVKMYTDMVTLRSMDTIFYEAXRQGRISFYVTAIGEEAINVASTAALAM

SEQ ID NO: 160961 - protein, 115 aa, Glycine max
  Clone ID: PAT_MRT3847_116365C.1.pep
MASTAAYLARRAAQKERVRILYRRALKDTLNWAVHRHLFYDDASNLRERFEENRHVEDPDTIDRLIADAEASYNKWRHPDPYIVPWAPGGSKFTRNPTPPQGIEIVYNYGREDND

SEQ ID NO: 160962 - protein, 143 aa, Glycine max
  unsure (1)..(143): unsure at all Xaa locations
  Clone ID: PAT_MRT3847_116366C.1.pep
SDVFSFGXLVLEIVSGKKNTDFYQPNQADDLLSYAWKNWTEQTPLQLLDPTLRGSYSRNEVNRCIHIGLLCVQENPSDRPSMATIALMLNSYSVTLSMPRQPASFLRGRNPNRLNQGLDSDQSTTCSIPWSVNEVSITDIYPR

SEQ ID NO: 160963 - protein, 115 aa, Glycine max
  Clone ID: PAT_MRT3847_116367C.1.pep
MASTAAYLARRAAQKERVRILYRRALKDTLNWAVHRHLFYDDASNLRERFEENRHVEDPDTIDRLITDAEASYNKWRHPDPYIVPWAPGGSKFTRNPTPPQGIEIVYNYGREDND

SEQ ID NO: 160964 - protein, 464 aa, Glycine max
  unsure (1)..(464): unsure at all Xaa locations
  Clone ID: PAT_MRT3847_116368C.1.pep
AYSLLVLVASVDAATGRSSHGFLVGPGGCGVVYHGEDFLGRKGHVNSLIVYFQLFASNFQCAGKSSISIILAIVVPIRVAILLFIVGGYFLRKRASKKYNTFVQDSIVDDLTDVGDVESLQFDLATVEAATXEFSDENKIGQGGFGVVYKGVLPSGQEIAVKRLSVTSLQGAVEFRNEAALVAKLQHRNLVRLLGFCLEGQEKILIYEYIPNKSLDHFLFDPAKQKELDWSRRYKIIVGIARGIQYLHEDSQLRIIHRDLKASNVLLDEDMNPKISDFGMAKIFQSDQTDVNTGSIFVMESYMSPENTVLCQSKXDEDLLSFXVLVLEIVSGKKNTEFYQSNHADDLLSHAWKNWTLQTPLELLDPTLRGSYSRNEVNRCIHIGLLCVQENPSDRPSMATIALMLNSYSVTMSMPQQPASFLRGRGPNRLNQGMDSDQSTTDQSTTCSIPWSVNEVSITDVYPR

SEQ ID NO: 160965 - protein, 41 aa, Glycine max
  Clone ID: PAT_MRT3847_116369C.1.pep
VIWKLDLGEWGRIFLAAPGVLTSHRCSSFRKKSCLGDGEVF

SEQ ID NO: 160966 - protein, 420 aa, Glycine max
  Clone ID: PAT_MRT3847_11636C.1.pep
MASSLSPSPSSLDQTLRDVDDYVLENGSEGLSRDTLHYVYELVKNGNVAFRENRMEEAINFYSRANNIKSGDPIILSNRSAAYIRISQYFMHRTPSSSERRPLSGLEPTTLAELGLKDAEKLVELQSNSAKSYLLKANAFLLLEKYEKARDVILSGLQVDPFSNSLRASLQNLESVSSSSRGMSTHGHPERNDDFDCTLCLKLLYEPVTTPCGHSFCCSCLFQSMDRGNKCPLCRTVLFISPRTCSISVTLKNIIQKNFPEEYAERKQEHDSLIKAGVDLLPLFVMDVVIPCQRFPLNIFEPRYRLMVRRIMEGNHRMGMAILDSTGSLAEFACEVEITECEPLPDGRFYIEIESRRRFRIIHSWDQDGYRVAEVEWIQDIMPPEGTSERDTLQQQTYNAVEDARSWIARAKEAARHGNF

SEQ ID NO: 160967 - protein, 212 aa, Glycine max
  unsure (1)..(212): unsure at all Xaa locations
  Clone ID: PAT_MRT3847_116370C.1.pep
ADCLRGWSSLLALSVPTCVSVCLEWWWYELMIILCGLLLNPKATIASMGILIQTTSLVYVFPSSLSLAVSTRVGNELGANRPAKARISMIVSLACAVALGVTAMLFTTLMRHRWGRFFTSDQQILHLTSIALPIVGLCELGNCPQTTGCGVLRGSARPTVXANINXGSFYLLACLAGSFSGCWEMGFPGLLPGLLASQGYVLLSLISSLPTD

SEQ ID NO: 160968 - protein, 76 aa, Glycine max
  Clone ID: PAT_MRT3847_116371C.1.pep
KVYFHFLCFQKTKNIKPNENFYYHPTSFFYFSIFLNDLISYQYQFKFYCKTLIKQINLLIFKLKPLTLDYQNSKLH

SEQ ID NO: 160969 - protein, 107 aa, Glycine max
  unsure (1)..(107): unsure at all Xaa locations
  Clone ID: PAT_MRT3847_116372C.1.pep
QTDKDRWKGLAYDISDDQQDITRGKGLVDSLVGAAQDAGTHYAVMSSYECVSAXLRQYLDNNMDGVDIAPAVMDXLVVHITRNLRTLPDMXGPCGLGVWGGVGQRRS

SEQ ID NO: 160970 - protein, 36 aa, Glycine max
  Clone ID: PAT_MRT3847_116373C.1.pep
SQAISFYNLNHPNNTHVILSSCNSQHNMTRLLQYHT

SEQ ID NO: 160971 - protein, 254 aa, Glycine max
  Clone ID: PAT_MRT3847_116374C.1.pep
LSQSHSLSILYFHLSFISQSLSILYLHFYLDTNISAVHRLDRLVSGLLILARNAAKADIFRQQIEAGLVHKQYIAKVGGEFPEDEVIVDANIDYNAREGRSTAEVRGSAKGKAASTKFTRISTNGTQSIVLCEPITGRTHQIRVHLQYSGHPIANDMLYISEQTVDRSVKGLSADRSARISGVSLTSNFNEKVLNECEENSNGDFGIDPMCTNCPNLAPKGYDSDEEGLWLHCIRYSGPGWTYECPYPDWAKLG

SEQ ID NO: 160972 - protein, 91 aa, Glycine max
  unsure (1)..(91): unsure at all Xaa locations
  Clone ID: PAT_MRT3847_116375C.1.pep
AXXQXQXGLLGXXXIVRKQKLXXNRILQFHSLXGXRIVMYRVATSINSRXAIXKGHGRETWGSNXVFXXQPXGTGKGXXSRXVCFKLGLXE

SEQ ID NO: 160973 - protein, 36 aa, Glycine max
  Clone ID: PAT_MRT3847_116376C.1.pep
CCCCANNPLLFAVEFPNARIPRPKIQLPVLRFGLLR

SEQ ID NO: 160974 - protein, 64 aa, Glycine max
  Clone ID: PAT_MRT3847_116377C.1.pep
VPSQAKFIEKRESPALTPLGLLPDNSTCITQNKRIRNRINSKSLTFPSFRLNQAFRCSTIHFSV

SEQ ID NO: 160975 - protein, 99 aa, Glycine max
  unsure (1)..(99): unsure at all Xaa locations
  Clone ID: PAT_MRT3847_116378C.1.pep
DSISINFVASVTCLLAVVSKLMEPESKLSLLQSLQISRVLRLVTEDVYVELVSDIAALLSGYAVEALDCFKRINSEDAKGISMELLSEXLPSIFYVMNN

SEQ ID NO: 160976 - protein, 65 aa, Glycine max
  Clone ID: PAT_MRT3847_116379C.1.pep
VGNLTSSIAKFGMNNFLFDFKYMAKSTDFSPPAVWERKPFFSYSSYLNRKFKLILPFSCLLVSIQ

SEQ ID NO: 160977 - protein, 65 aa, Glycine max
  Clone ID: PAT_MRT3847_11637C.1.pep
LRKSLVWQLTNLGFHSRKKTSRPLYILVSVCFAISRFLFLLLSYSLSVFGSSLSVALVYTILLEI

SEQ ID NO: 160978 - protein, 82 aa, Glycine max
  Clone ID: PAT_MRT3847_116380C.1.pep
YIYVLDLYHKIKLQNLVNTNVSILHIRTSSLSLFFYSHILLKKTKTQLNNYMSLLSFSRKETTPHARWVQFSIQPLFMLCQN

SEQ ID NO: 160979 - protein, 63 aa, Glycine max
  Clone ID: PAT_MRT3847_116381C.1.pep
KTPISYHHLHSQAIQHSSSYYYHIFQIIPIHSLLSSKSLTITTYILSISPLSHHKNLPSLLYS

SEQ ID NO: 160980 - protein, 296 aa, Glycine max
  Clone ID: PAT_MRT3847_116382C.1.pep
APDPLSNTPNKKPQRCSVAKFLTVNSPIVLSMLRVKGGSRPPWVGLGAAVWVQIASGNTFTFPLYSHSLKSVLGFDQRHVTLLGVAIDIGENLGLLPGVACNKLPPWLLLVVGSLAAFLGYGLLFLAISKTLHSLPYILLWFALVVAANSSAWLTTAVLVTNMRNFPASRGSVAGILKGYGGLSAAVFTEIYSIVLHNSSSKFLLFLAVGIPVVCFSMMFLVRPCTPATGDDPVEPYHFLFVQGSSVVLGVYLLATTIVGNIIPFSGALSYVLVAVMILLLIAPLACPLKMTLFLG

SEQ ID NO: 160981 - protein, 88 aa, Glycine max
  unsure (1)..(88): unsure at all Xaa locations
  Clone ID: PAT_MRT3847_116383C.1.pep
GGEXGKPPETNCFLSNPVFRPKKKPPPLYEGTGFTLLTPMFPLEPTPTFFFNLQVMFKFCSSFEIIKKILKKFDFFIQGFFPLVPICP

SEQ ID NO: 160982 - protein, 258 aa, Glycine max
  Clone ID: PAT_MRT3847_116384C.1.pep
GCLLHREAYNMSKMDKIMLRFRPIAPKPLPAAAAALSDASSSESTGSAKRKDNTASKRCSRGIRRRRNAPPPPPSPAVTLPLLPGPPGPKKITSELKNKNVPVWLSFENNFENRGGAASEKLDPCWYSQATAAAGSVVTVECVMDTWQQQDEGLGLGSGDEERKVKLKEDTCPGFISDGYGRVTWTNEAYRETVGAGGVWLAMKVAVPYPYRGFTCRVRVRYACGIERTVPCDVWRMDSGGFAWRLDVKAALSLSLAF

SEQ ID NO: 160983 - protein, 113 aa, Glycine max
  Clone ID: PAT_MRT3847_116385C.1.pep
EKCLQDSAHWNRISAAGLQRINECYTWKIYANKMLNMGSSYTFWRRVNNEQKEAKQRYIKMFYNLMYKNLVKTVPVPNHEPQQPQPVVSKKQSVKKQGTSKRSQFGLQSLFGA

SEQ ID NO: 160984 - protein, 54 aa, Glycine max
  Clone ID: PAT_MRT3847_116386C.1.pep
RTPKLVLVPQKYMPPSMLLQSRNKSIVFQMLSRHMPCIERYETFFSGILRLGLS

SEQ ID NO: 160985 - protein, 66 aa, Glycine max
  unsure (1)..(66): unsure at all Xaa locations
  Clone ID: PAT_MRT3847_116387C.1.pep
FFFXXFFGRKGRLFHLALKGAFTPRNPLLFKKQFLNNPFNWKTELETFFNILPQGGPTKKFQLFLR

SEQ ID NO: 160986 - protein, 38 aa, Glycine max
  Clone ID: PAT_MRT3847_116388C.1.pep
KRTPKGLEMGGFVVYQKFGKTSDCGSPKSTLKCWNEEN

SEQ ID NO: 160987 - protein, 160 aa, Glycine max
  Clone ID: PAT_MRT3847_116389C.1.pep
MVVSLFFLSHYCFLPSKSAFPKSYSTLFSKSFPNNNISQQAPSSPTLRNSFPPRFHFLLERTQSARHQARRARPCQSLQKRRHFGVCQGQCRLSTRSRKGVLSHLDFSLSRIKLPDINPDALTPLTVPIFKDSQFNDETVVLFNLDFNIVKNRDQTIAVN

SEQ ID NO: 160988 - protein, 127 aa, Glycine max
  Clone ID: PAT_MRT3847_11638C.1.pep
PTRTPTRFYIIKKQIPRRTKRGEGKKKKSRGGAGAEPTERKGRPHQRNQATEPGKDTRKAHKGGNPKTKARAGDQHPRDGKNPGGTQPKGQAAEPQDATGGKNKKARTKHHSQKGHHPRKGKGEPPP

SEQ ID NO: 160989 - protein, 37 aa, Glycine max
  Clone ID: PAT_MRT3847_116390C.1.pep
GFGNKTLMSLVCKNGKNRGLVGVKFGNNVMRKICVCS

SEQ ID NO: 160990 - protein, 64 aa, Glycine max
  Clone ID: PAT_MRT3847_116391C.1.pep
NFNFRYETFNHKFFWLLDVFGNICKILFFSFSSQNSTSLGIFINRKKQGNKLSQIKKKLTKLYI

SEQ ID NO: 160991 - protein, 268 aa, Glycine max
  Clone ID: PAT_MRT3847_116392C.1.pep
LIATLASFLPTTTQSPATDGAKSAVGSSTMKPPFPPMTPNDGNQSHLWKQDNQIADQSTHPPQQLRSMYNIHNAHYQPYPPASAPSGNPSQVVSGSSHIQDTAASMQQQGAVSSRHMPNFMMPTQSGQVAVSPHASQNYQVEVSPSNQKGFGVVQGTDASVLYNSQAFQQPNNNSLAFQQPNNSFALSNQVNSTNASQQQTAMPYTVDQVNPDTPNQQLPMFGVSQGQTEVEADKNQRYQSTLQFAANLLLQIQQQQQQAPGGHGPGQ

SEQ ID NO: 160992 - protein, 51 aa, Glycine max
  Clone ID: PAT_MRT3847_116393C.1.pep
LSPSATTIDHRRCERDDARRNEMRVFSDARLLRRALWVVFLSCVAKSAVLS

SEQ ID NO: 160993 - protein, 101 aa, Glycine max
  unsure (1)..(101): unsure at all Xaa locations
  Clone ID: PAT_MRT3847_116394C.1.pep
SPSQEPFYACKWAKSEPPSWGLIFPIKGGGPNKGFXKWSFEWANQNSGDLSFLIGNPKQFPGFDIFLGIFQDFENAGKTFMPAFFVPQGTARFFENGESSA

SEQ ID NO: 160994 - protein, 42 aa, Glycine max
  Clone ID: PAT_MRT3847_116395C.1.pep
LNRVVASEKKTWLYHTTTNITLSTFNHEYAIYIYHSTRMGKK

SEQ ID NO: 160995 - protein, 176 aa, Glycine max
  Clone ID: PAT_MRT3847_116396C.1.pep
GVKKGVPFWLFKRALSKIFPGPFGVSRAPFLGGFKLKFLVWLPFLEPLSFKWNLAPQISPFAPPVFAGKEFFPPPPPGFCPPPSPGPFPGFCPWGVFLGAGNAFYSFVGPVFGFPQFFGFWIFPRRVFLLFGVINLCLVPKFVFWCCFLLPKKKKKKKKKKKKKKKKKKKKKKKKK

SEQ ID NO: 160996 - protein, 90 aa, Glycine max
  Clone ID: PAT_MRT3847_116397C.1.pep
RGNRTRLGLMPQLQHTAPMLFTRFTSCLLPLNPLNIVRKPPNTLHPAYPFIPPPCITVTLSRIRWTTCCCTTNLIQCLSLTSTTSFRVSP

SEQ ID NO: 160997 - protein, 35 aa, Glycine max
  Clone ID: PAT_MRT3847_116398C.1.pep
VGLPNQQTVDYPSFKLVIVGDGGAGETTCREKGSY

SEQ ID NO: 160998 - protein, 317 aa, Glycine max
  unsure (1)..(317): unsure at all Xaa locations
  Clone ID: PAT_MRT3847_116399C.1.pep
DRLSNSTNFLQFLGRHAFIMQEELPSSSEDHIGDERYHFMSLLLNLANTFLYIGNTYIIVPTADNYTLSLGAAASVCGVVIGMMAVAQVFSSVYFSAWSNRSYLRPLIFSSIVLVVGNTLFFLAFDMNSIVVLLMGRLFCGLGSARAVNRRYISDCVPLKLRMQASAGFVSASALGMACGPALACLLQTNFRIYRFTMNQDTLPGWIMALAWLVYLLWLWICFKEPAHENQGNLVLYHADTEPVVQVAVGNERTQPLLMNSEERXLDEDGEEXNDTTEETKKPVTSIVLAYKLLTPSVKVQLFVYFMLKYAMEDHSC

SEQ ID NO: 160999 - protein, 67 aa, Glycine max
  unsure (1)..(67): unsure at all Xaa locations
  Clone ID: PAT_MRT3847_11639C.1.pep
PYRYPHDQKDAIEKFVRDMLAACMIRPSVGPYSSLLILVXKKDGSWHFCTDYRTLNTITIPNKYPIP

SEQ ID NO: 161000 - protein, 164 aa, Glycine max
  unsure (1)..(164): unsure at all Xaa locations
  Clone ID: PAT_MRT3847_1163C.1.pep
VWWVQRCGHQCVLCCFKEGHGNPDEPTGDVQVDEXLTVTRWSKKHRALFTGXRLRTSQKLEKRKSKHSIAKSEEAKISAWENLQKAKAEAAIRKLEMKLEKRRASSMDKIMNKRILAXRKAQEMRSSVPHNQTDRVVRTSHKASXFLRTSQMRSLSGCLTCHAF

SEQ ID NO: 161001 - protein, 113 aa, Glycine max
  Clone ID: PAT_MRT3847_116400C.1.pep
FFHKDFAATCYGNFRPLATRFFVLKGFIGHLAPLWAIWGQFIMLRVLVSHVPPAVLRPSPMFACNCSLVHPFLLAMFLAFPYSFFVFQPLFFLKTPVLSASQIFPYALSISKK

SEQ ID NO: 161002 - protein, 301 aa, Glycine max
  Clone ID: PAT_MRT3847_116401C.1.pep
MGRSPCCEKEHTNKGAWTKEEDERLINYIKLHGEGCWRSLPKAAGLLRCGKSCRLRWINYLRPDLKRGNFTEEEDELIINLHSLLGNKWSLIAARLPGRTDNEIKNYWNTHIKRKLYSRGIDPQTHRPLNAASATPATTVTATAVPSSNSKKKIKNNNNNNNGFQLVNNSAYANTKIGTDMIAAEDSNSSSGVTTEESFPHHQLNLDLSIGLPSQPQVSSSLNPEKLKPEPQEHDDQKPQVLYQLYGKNITGQQGVCLCYNLGLQSNQACYCKTMGTSTTTVTTTTATDRNLYRFYRPMNI

SEQ ID NO: 161003 - protein, 241 aa, Glycine max
  Clone ID: PAT_MRT3847_116402C.1.pep
PHCSPLQFPHSSSRLISPPIRTCAAADSNFDSLLSLLEFSCLLSSAISSAAAAVLAGSKNELIAGIGARAAPFGGALLVVGVLVGAWIRRRQWRRACVETGKGGLEVNLLERIEKLEEDMRSSATVVRVLSRQLEKLGVRFRVTRKGLKDPIAETAALAQKNSEAARALAVQSDILEKELGEIQQVLLAMQEQQRKQLDLILAVGKASKLWESKHETNERHDTLEMSNSAEDEVKQEVHQI

SEQ ID NO: 161004 - protein, 73 aa, Glycine max
  Clone ID: PAT_MRT3847_116403C.1.pep
VGKLGKILERVAATNLSVIQRNLWDPRTRRALLFNNNKVQEGDATWQVLVSLSEKLGRSQRRSSVAGQLKSDT

SEQ ID NO: 161005 - protein, 87 aa, Glycine max
  unsure (1)..(87): unsure at all Xaa locations
  Clone ID: PAT_MRT3847_116404C.1.pep
VSPPAAQPSXGYKKKTLRPPPQKRRSPSKHASNQRRSEKRVTLNSNRDCCRQYPFVPSISPHMSLVKEHSHSQHGHRHCGRGATGNX

SEQ ID NO: 161006 - protein, 154 aa, Glycine max
  Clone ID: PAT_MRT3847_116405C.1.pep
KIGLTVVFLAFDVFFIIFCMGMACIVFIALFCIIPIIALAYAMRIREGASEEDIRSLPMYRFSLSNSLVMVDDNKKQLVKVRVDSCNGSHMSELSLHPDDSECCICLCPYVEGEELYRLPCTHHFHCGCISRWLRTKATCPLCKFNILRGDTLV

SEQ ID NO: 161007 - protein, 80 aa, Glycine max
  unsure (1)..(80): unsure at all Xaa locations
  Clone ID: PAT_MRT3847_116406C.1.pep
PNRWLRPEVYPLFAALGICGLQLVRNICINPDVMVSNEKRTAGLLENSALGLNYTNHFLNNLLLNKXPEIIPSINSFFAN

SEQ ID NO: 161008 - protein, 73 aa, Glycine max
  Clone ID: PAT_MRT3847_116407C.1.pep
NSFRHKIKGGLYYSGECPPPKQLKATIYKNFFPKGKVYHAYHAKRALYEQTKKVPSLILGGPGGLKVLFSEMR

SEQ ID NO: 161009 - protein, 59 aa, Glycine max
  unsure (1)..(59): unsure at all Xaa locations
  Clone ID: PAT_MRT3847_116408C.1.pep
KRAVIFPDEVDVLIKVKKKVGGLRWDPXKXVDHEDGPLVPEKVLVAVKQYWVTNSTSTQ

SEQ ID NO: 161010 - protein, 75 aa, Glycine max
  Clone ID: PAT_MRT3847_116409C.1.pep
ESCHTNSAKLWSQLSNTTKPTKRVLGAWVEKKAERRRGEQTRPGGVGGVAGTRVREGEYGETMCSVCASSSDNDN

SEQ ID NO: 161011 - protein, 35 aa, Glycine max
  Clone ID: PAT_MRT3847_11640C.1.pep
LNHQHFNNHLYVSYKFTYSNLNTYIHTHILTYIFS

SEQ ID NO: 161012 - protein, 127 aa, Glycine max
  Clone ID: PAT_MRT3847_116410C.1.pep
GGGTNGGNKKKKAKKHQKAKIPQQRSLGGGVTKQAPKKIQTQQGQTSAQNNRPKRTQQEQKKANQKQEAKGKPHQGARRAKEGPTSSRGPTERDNQHIKAPLRGGKQREPPGEPERLPTTSQPGGAP

SEQ ID NO: 161013 - protein, 126 aa, Glycine max
  unsure (1)..(126): unsure at all Xaa locations
  Clone ID: PAT_MRT3847_116411C.1.pep
FNETLYDEWVNMGDAPALPETLKNYNMLQSLGFKIAYSSGRYLDTMVVTDANLKMAGLHTWEQLILKDPHLITPDALSYKSAVKENLLLQGYRSVGIIGDQWSDLLGDHTCXSRTFKLPNPMYYIA

SEQ ID NO: 161014 - protein, 32 aa, Glycine max
  Clone ID: PAT_MRT3847_116412C.1.pep
EASYNKLYVITRYESQYIKILAITYTPPSLDS

SEQ ID NO: 161015 - protein, 57 aa, Glycine max
  Clone ID: PAT_MRT3847_116413C.1.pep
GQDLFIYFMRTHYLCFICKIRTANSNLSLTFQLSFLNLSAYKVYCPLIFLTLSDPTC

SEQ ID NO: 161016 - protein, 111 aa, Glycine max
  Clone ID: PAT_MRT3847_116414C.1.pep
LWEKYSLDLQQKLTLDKEFERKVKMLEREEQKMHKVMRAHEKKMVTVGREESDALLRGDAVHHADVVDTTNLQSGLKQIFGAMEKFTDSTVRLYEELCQQIKQEEKPTKIN

SEQ ID NO: 161017 - protein, 73 aa, Glycine max
  Clone ID: PAT_MRT3847_116415C.1.pep
GPGPESPGLLSTRPFIHQIARPHERGLIKPCGVSNPTRCQSREKLQQLGQGRAQEDKRTSPCPGYSQRPKSPP

SEQ ID NO: 161018 - protein, 235 aa, Glycine max
  unsure (1)..(235): unsure at all Xaa locations
  Clone ID: PAT_MRT3847_116416C.1.pep
MATKRLARRLGLIRRKSVTPASGNPGGSRLKQLYAYLIVVDFESTCWNDGKHHSSPEIIEFPAVLLNTATGEIESEFHAYVQPQEHPILSEFCTELTGIKQVQVDEGVPLKICLSQFCKWIHKLQQQQTISFAAGDSEPSTSEVKLCAFVTWSDWDLGVCLEYECRRKQLXKPVFLNSWIDLRATYXGLDDSRNTALLAWKMIRXGCLMKITRSLNRVLTKKNPKIARNLGTESS

SEQ ID NO: 161019 - protein, 68 aa, Glycine max
  Clone ID: PAT_MRT3847_116417C.1.pep
ILVCQQSFLTLAQFRSIYPDSDGAVSDVVQVLQALIKALYPAMFDHVGNHSHSVSRSSPCRYVFSNAS

SEQ ID NO: 161020 - protein, 207 aa, Glycine max
  Clone ID: PAT_MRT3847_116418C.1.pep
MSFGGFLDDKSGSGGARINNFSDIPYNNNNVTNTTTTNNNNNDRMPFGAISQPRLVTTTPTLAKSMFNSPGLSLALQTSIDGQEDVNRMAENSFEPNGLRRSREDEHESRSGSDNMDGGSGDEHDAADNPPRKKRYHRHTPQQIQELEALFKECPHPDEKQRLELSRRLCLETRQVKFWFQNRRTQMKTQLERHENTLLRQEKRQLR

SEQ ID NO: 161021 - protein, 212 aa, Glycine max
  unsure (1)..(212): unsure at all Xaa locations
  Clone ID: PAT_MRT3847_116419C.1.pep
MGSVVESREWYLAAYSPHGVPNSDNLKLRTVALSLSSDSIPDGHVSLQILFLSVDPYLRTRLTGTLDGLYIQQYPLNEVITAYGVGRVIGSKDSKYTEGDLILTPSAPVAEYCILPSSRVIRKIDAASGISLPDYLSALGVPGFAAWVGIVVLGDPKPGSNVFISAASGAVGMSAGQLAKIRGCRVIGSTGXXEKVKLIKEDFWVFDDGFNY

SEQ ID NO: 161022 - protein, 136 aa, Glycine max
  Clone ID: PAT_MRT3847_11641C.1.pep
MSLINQLFNRGVFGTRCKTCLNLAISRIKLLQNKRDIQLKQMCKEISQFLQAGQEAIARIRVEHIIREQNTWAAYEILELFCEFVLARVPIIENQRECPTELREAIASIIFAAPRCSDVPDLLHIKNLFTTKYGKE

SEQ ID NO: 161023 - protein, 61 aa, Glycine max
  unsure (1)..(61): unsure at all Xaa locations
  Clone ID: PAT_MRT3847_116420C.1.pep
CTLESYLISLVPLSVRNSVLNVFVTVLTLNLRVLQQHNSIXLFLLLFAFSTNLYYSFTKKT

SEQ ID NO: 161024 - protein, 47 aa, Glycine max
  Clone ID: PAT_MRT3847_116421C.1.pep
EQTECRVYLHIHMSVAVRDQLTYKEVYGLHLTCVLCASSIPFLISML

SEQ ID NO: 161025 - protein, 119 aa, Glycine max
  unsure (1)..(119): unsure at all Xaa locations
  Clone ID: PAT_MRT3847_116422C.1.pep
GLLGEKLPSRKXGDIPKTRCCTTLPMEWNHVVRQKFLNCARFIMKNRDKLKXQAGLNPYSMEWTGLANRLLSKGNDILCCDYASFDGLITKQVMSKMAEMINSXLCGGDERLXMRERTH

SEQ ID NO: 161026 - protein, 69 aa, Glycine max
  Clone ID: PAT_MRT3847_116423C.1.pep
LLRQTTEGGEQLDGIESHVARANSYVRGGVQQLHVARKHQKNTRKWTCIAIILLIIIILIIVLPIVLRK

SEQ ID NO: 161027 - protein, 179 aa, Glycine max
  unsure (1)..(179): unsure at all Xaa locations
  Clone ID: PAT_MRT3847_116424C.1.pep
MCGGPEKSKSLSTPSSSAVEGSTNGKDMNKLTVHAADSFSCLLELASNNDFEDFKLALVRDVSLISEVGLWYVRQIGSKQIVLEHRTPLMVAAMYGSIDVLKLILSCPETDVNFSCGTDKSTALHCAASGGSVNAVDIVKLLLSAGADIXCVDANGNRPVDVIGVPPKLEGLKAPLKIY

SEQ ID NO: 161028 - protein, 75 aa, Glycine max
  Clone ID: PAT_MRT3847_116425C.1.pep
ILSYEEIHGDLDFGGLTLLLLDQSTQALDVLMSALDQLHGPSGKDYGELNLFESHLFLTKTEPQKDHPANAYGQP

SEQ ID NO: 161029 - protein, 70 aa, Glycine max
  Clone ID: PAT_MRT3847_116426C.1.pep
IERQEVKQMVVATLAESGMNLSDDVIESIIDKTFEEADTKHDGKIDKEEWRNLVLRHPSLLKNMTLQYLK

SEQ ID NO: 161030 - protein, 120 aa, Glycine max
  unsure (1)..(120): unsure at all Xaa locations
  Clone ID: PAT_MRT3847_116427C.1.pep
MGWIGRLGSEYGLVQAPLGPDISAPPLVAAVANAGALGLLRAPDRQSPDYLRELIKTTWTLTXIPFPDGGGLTFPFDEKLHDILEEKRAFLPVDWWECTKDLVNHAYSDAIKVVTQVGFL

SEQ ID NO: 161031 - protein, 126 aa, Glycine max
  unsure (1)..(126): unsure at all Xaa locations
  Clone ID: PAT_MRT3847_116428C.1.pep
MVQDMKQQDNGESKKKERHIVTWTQEEDDILREQIGIHGTENWAIIASKFKDKTTRQCRRRWYTYLNSXFKKGGWSAEEDMLLCEAQXRVFGXRWTEIAXVVSGRTXYAVXNRFXTLCRKNRNMQL

SEQ ID NO: 161032 - protein, 551 aa, Glycine max
  unsure (1)..(551): unsure at all Xaa locations
  Clone ID: PAT_MRT3847_116429C.1.pep
MVQDMKQQDNGESKKKERHIVTWTQEEDDILREQIGIHGTENWAIIASKFKDKTTRQCRRRWNTYLNYDFKKGGWSAEEDMLLCEAQKVFGNRKTEIANLVSGRTDNAAKNRFSTLCRKXTIIYIXKKEICTSHINSTNMGLKSQHCNNMDTTSESGVPIKNLRRADIADDAEKIKFEDRSHLRNGTPINQQPRAPLAVLAQNSHNSNNLTDQHHLCNPKFSSSAQNNKIQGTFLKKDDPKISALMQQAELLSSLALKVDTENMDQSLENAWKVLQEFLNRSKESDIPGQKVPDVRLVDLKDMIEELKSGNEEGRVLQELLNRTKESDSTGHKIPDLRPADFKDMVEDSKSGNEEGQVLQEFLNRTNKSDIPEHKIPNLQLVDLKDMIEDLKSGNEEGQACWRKMDCYENSPGSSGYSTGSILICQSASDNLEHSLHQDIGTEMKSKQLEDEKGVKVVMPTANVDQDMVPCCMEQINNDGIVSTSSRLEFSSPLQVTPLFRSLAAGIPSPQFSESERNFLRKTLGMESPSINPSANSSQPPPCKRALLPSL

SEQ ID NO: 161033 - protein, 144 aa, Glycine max
  Clone ID: PAT_MRT3847_11642C.1.pep
MSVSEVAVRPILKKSVHWQGRCSGESIRIYLTVDGALRPMRVLESDSIASVKMRIQACKGIAGKKHKLVYGGRELARKDALIKDYGVTAGNVLHLVLRLSDMIFIVVRTALRVIKSFSVVGKSSMTRGSSVIYATLMMLMVSFI

SEQ ID NO: 161034 - protein, 129 aa, Glycine max
  Clone ID: PAT_MRT3847_116430C.1.pep
MYGSTCECRSGAVISGAMLSNEIVHQKGGHNLWRERDSSLVVQSFKNSDLVPWKLKNRWEDNTCADILANEAHSYNEFYWWNSLPQFLAVDFNRNRYGYTNDRENKSKGECISLREVKIALAYYAFTRF

SEQ ID NO: 161035 - protein, 107 aa, Glycine max
  Clone ID: PAT_MRT3847_116431C.1.pep
MLSNEIVHQKGGHNLWRERDSSLVVQSFKNSDLVPWKLKNRWSNCINLTKTMNFLVGHIFREDNTCADILANEAHSYNEFYWWNSLPQFLAVDFNRNRYGYTNDRFN

SEQ ID NO: 161036 - protein, 93 aa, Glycine max
  Clone ID: PAT_MRT3847_116432C.1.pep
MGLGENKEQFQESCTSPFAAKIYIGSIVEGMARMGQCHESRTLVLKVGGGEHSPVSFFPFQKEKKPPKILIFWGAKKPGVLSPRFFLIKLGHV

SEQ ID NO: 161037 - protein, 54 aa, Glycine max
  unsure (1)..(54): unsure at all Xaa locations
  Clone ID: PAT_MRT3847_116433C.1.pep
TPPLTCXIRTTAKGPHPFFPFFGFFHPFPQNYWFSLRFSLFWEKKIKKKKKIKN

SEQ ID NO: 161038 - protein, 33 aa, Glycine max
  Clone ID: PAT_MRT3847_116434C.1.pep
IEDGCLLPFALSEHAAGFLLPQTCCIIQLPLDD

SEQ ID NO: 161039 - protein, 97 aa, Glycine max
  unsure (1)..(97): unsure at all Xaa locations
  Clone ID: PAT_MRT3847_116435C.1.pep
LEGVYHTYFFVISKPHLLTSGGSLLVSAKKLTAEXTCIIIRGESAXLNVGINRTAKNLNNISKSXYIISCHNIQLGILTNASNAVGNRTIFVAYHHP

SEQ ID NO: 161040 - protein, 348 aa, Glycine max
  Clone ID: PAT_MRT3847_116436C.1.pep
TRLNGHGDFCREMLRMDKHVFHKLCDILRQRAMLRDTAGVMIEEQLAIFLNVIGHNERNRVIQERFQHSGETISRHFNNVLKAIKSLSREVLQPPQLKTPPEILNNARFYPYFKDCIGVIDGMNIPAHVPAKDQSRFRNKKGILSQNVLAACTFDLQFIFVYPGWEGSVTDSRVLRAVLDNPDQNFPQIPQGKYYLVDKGYLNTEGFIAPYQGVRYQHYEFRGANQLPRNAKELFNHRHCFLRNAILRSFNVLKTRFPILKLAPQYSFQIQRDIVIAGCVLHNFIRREERNDWIFNSVGGSPVEEISDIDELPDVPMLSSIQEQLAFSSRDSIASSMWDDFLTKWDEW

SEQ ID NO: 161041 - protein, 98 aa, Glycine max
  Clone ID: PAT_MRT3847_116437C.1.pep
FCYISNTLRSSNKIQCITADTIASSSLFISNHFIYYISYFINQNLYILLLELKFHLTTILRNHLMNLCFVKHLLNQFQFSFSYSDYFSISNFKKQMNE

SEQ ID NO: 161042 - protein, 60 aa, Glycine max
  unsure (1)..(60): unsure at all Xaa locations
  Clone ID: PAT_MRT3847_116438C.1.pep
CIQINKAATIPAKFCKREGPXQFHNAKIKVPLVFQKGXPPTRKVKTPXKAPKRNLFMECG

SEQ ID NO: 161043 - protein, 57 aa, Glycine max
  Clone ID: PAT_MRT3847_116439C.1.pep
HFRVAKYQEANPTVYTVVTFPFLFAVMFGDWGHGICLLLAALYFIIREKKLSSQVTF

SEQ ID NO: 161044 - protein, 324 aa, Glycine max
  Clone ID: PAT_MRT3847_11643C.1.pep
MSLLNQLFNRGVFGTRCKTCLNLAISRIKLLQNKRDMQLKQMCKEISQFLQAGQEAIARIRVEHIIREQNTWAAYEILELFCEFVLARVPIIENQRECPTELREAIASIIFAAPRCSDVPDLLHIKNLFTTKYGKEFVSAVSELRPDSGVNRTIIEKLSVSAPSGEVKLKVLREIAEEYNIAWDSSKTEAEFRKNHEDLLGGAKQVSAGATLSHTPSRNGSNNPSPCITEPSIKPVQDKQEYKHLEAPSPSNNNSSLDTNEIEQSHKNNNVPAGDAKSETRFQSSDVLEKARAAIASADRASAAARAAAALVQSNFGSLKLEGK

SEQ ID NO: 161045 - protein, 104 aa, Glycine max
  unsure (1)..(104): unsure at all Xaa locations
  Clone ID: PAT_MRT3847_116440C.1.pep
EGGQNFGYKAVMCHRQNFSTAVFSPHXAREPPAFMVPLGGGDGPKTQALVICHSNIXGRNLQRVPQLMGVVPGANPVCHSLGSKAILWVPNLSGGPAYQTTIVV

SEQ ID NO: 161046 - protein, 108 aa, Glycine max
  unsure (1)..(108): unsure at all Xaa locations
  Clone ID: PAT_MRT3847_116441C.1.pep
KRLISSYSSTALMTIFPSSSSEEHTPTNILHMYGMEFRSILHGLDEERCVEXPGHQSENKRRLSVEQVKASEKNLHGETQLDPEXEVKLSQTLVAPILVPFVPNPPTR

SEQ ID NO: 161047 - protein, 36 aa, Glycine max
  Clone ID: PAT_MRT3847_116442C.1.pep
TKRILLKLNIKVHMQNRSNVSVKLCSKDMKNYGNSN

SEQ ID NO: 161048 - protein, 74 aa, Glycine max
  Clone ID: PAT_MRT3847_116443C.1.pep
TFAHSFDAKLGRGPTEVRSTVNTQIGAWHPYFRCARNRDSANSLFYKQMLIGGENFLIPIPIDQIPNTKTEIMY

SEQ ID NO: 161049 - protein, 64 aa, Glycine max
  Clone ID: PAT_MRT3847_116444C.1.pep
KRRVLDLQMKGPGKKYRPIPANLPNLPIAKSIKTQHHLGHNGNLSEILFLQQAHILFSPLTCHG

SEQ ID NO: 161050 - protein, 38 aa, Glycine max
  Clone ID: PAT_MRT3847_116445C.1.pep
CCPKFYQLKFFFNFKGRGFNMRNTIYPSPLSTYSSFWP

SEQ ID NO: 161051 - protein, 58 aa, Glycine max
  Clone ID: PAT_MRT3847_116446C.1.pep
YEWPRINYFEPGIKRLLINPGPRKGPLANFLGLGEEPLRNLTDLGPNPFYPFFKTNNR

SEQ ID NO: 161052 - protein, 76 aa, Glycine max
  unsure (1)..(76): unsure at all Xaa locations
  Clone ID: PAT_MRT3847_116447C.1.pep
GCLSXXXKSVGILIGKFLRXVCLGHSLKIFKFLGVXECLPVSARVWYDGVYKALDMYLEVSXAYPSVHCFSYESSS

SEQ ID NO: 161053 - protein, 85 aa, Glycine max
  unsure (1)..(85): unsure at all Xaa locations
  Clone ID: PAT_MRT3847_116448C.1.pep
SHVRDCASVXKLXXXTLMDEXRLTPTWIWMXXXRCXASSVVHXQTVXALRXXXLXVEPTKIPDTHLFYCQPDFXNTSTSSISHII

SEQ ID NO: 161054 - protein, 152 aa, Glycine max
  Clone ID: PAT_MRT3847_116449C.1.pep
MRSSIIFLCILVYLNVVAAELSAYDVLEKYDLPVGLLPKGATGYELNEKNGHFTAYLNGTCYFSIESYELKYKSTIKGVISKGKLSKLKGVSVKIEVLWLKIVELTRDGDDLQFSVGVASAGFSVDSFSESPQCGCGFACDNFNQNGDVSSL

SEQ ID NO: 161055 - protein, 42 aa, Glycine max
  unsure (1)..(42): unsure at all Xaa locations
  Clone ID: PAT_MRT3847_11644C.1.pep
SRAXXFGFFFFFFFXRISISSPYLVVIMKSASRQREARQREV

SEQ ID NO: 161056 - protein, 69 aa, Glycine max
  Clone ID: PAT_MRT3847_116450C.1.pep
LWPTYVPSHHYSCPPMLFPLILLGAENVYDMGMLFVQILKSADSTFTLKTMHVDRCECPLLKLHFGTIL

SEQ ID NO: 161057 - protein, 47 aa, Glycine max
  Clone ID: PAT_MRT3847_116451C.1.pep
LLTNQRTTFIYLCPLIQLPYNAHLKAFQTRLLSKICSTQISHMNASI

SEQ ID NO: 161058 - protein, 67 aa, Glycine max
  Clone ID: PAT_MRT3847_116453C.1.pep
EKVAIAFMLLNTPPGTPIRVMKNLRVCADCHMAIKLIAKIYDREIVIRDRSRFHHFRGGSCSCKDYW

SEQ ID NO: 161059 - protein, 55 aa, Glycine max
  Clone ID: PAT_MRT3847_116454C.1.pep
SGSRQALQRSYKWPLRKMAVLSAWIMLFPPKTGLRSKATGDMNEVSFFLNLSNNK

SEQ ID NO: 161060 - protein, 113 aa, Glycine max
  Clone ID: PAT_MRT3847_116455C.1.pep
RGRLGPNRSMMVQVSANRVLKSPPLTPLKHMLSLTRKMNLKSMRDVHVTKDANVRPHAPGPTLNWTTEKKTKSNRAYYSKMPSKTKSNRKNCKHKTCITRWTLLSLNATQLIT

SEQ ID NO: 161061 - protein, 148 aa, Glycine max
  Clone ID: PAT_MRT3847_116456C.1.pep
MAEPNRIERAHQMYRDGSYEEALGFYTEAIALAKTNPQKIALHSNRAACYLKLHDFKKAAEECTSVLELDHKHSGALMLRAQTLVTLKEYHSALFDVSRLLELNSSSEVYQNLQARLKTQVTLTPIPESKEDFKNSKMKNLKLFAKRS

SEQ ID NO: 161062 - protein, 174 aa, Glycine max
  unsure (1)..(174): unsure at all Xaa locations
  Clone ID: PAT_MRT3847_116457C.1.pep
YRIFGNQLLFLIGLSYTNPTYAAAIQPSIPVFTFLLAVMMGTERVNLLRYDGLAKVGGTIICVSGAIFMVXYRGPALIGYAEFNHVTQNEISAKGQPEPSGWLIGGLQNLWFDHFHLGVLCLIGNCICMAAFLAIQRKQCPLPGDNEIEGSISSPSLQRLKTLAEQPGENLKES

SEQ ID NO: 161063 - protein, 79 aa, Glycine max
  Clone ID: PAT_MRT3847_116458C.1.pep
QTTTTKIRSLKKLSLLPPSYNTFHIISSFSNVFYLRNLFEATKRSSSMFIFKKPASSPISKLDGISTNLNFTLTAKNQF

SEQ ID NO: 161064 - protein, 92 aa, Glycine max
  Clone ID: PAT_MRT3847_116459C.1.pep
PGLLLRLPPRAPPLGLCLPAVPPGSVARSLGGGGPSLPLLSCSPGSRFPASAWPWWRWLSGFLSARPGQRPVRSLLFRRVPSCRLVGNKRRS

SEQ ID NO: 161065 - protein, 53 aa, Glycine max
  Clone ID: PAT_MRT3847_11645C.1.pep
AKKTFYSRIATSLVGNTLITQLYKLRQLNVCYSKHILLTRIQSPYTCKLDGHT

SEQ ID NO: 161066 - protein, 93 aa, Glycine max
  unsure (1)..(93): unsure at all Xaa locations
  Clone ID: PAT_MRT3847_116460C.1.pep
FYLPKTFPFVGPRGWENWLFSFYPGGFSFNPSEQWGGFFVKDKNFPLFLEXXXXXGGPLSFMEKIGPQKKMYFLFLNNMKQKKRXXXXXIXNX

SEQ ID NO: 161067 - protein, 99 aa, Glycine max
  unsure (1)..(99): unsure at all Xaa locations
  Clone ID: PAT_MRT3847_116461C.1.pep
RLLGIFIYSCLSYNSFYTLNFHRGCTFITAMLRHIYPLNNSXISKGMSPPDRNYIKQTISTMLRLLPSDHFTNTITVFKHPLHLLLFYYIFTSYTIWNA

SEQ ID NO: 161068 - protein, 151 aa, Glycine max
  unsure (1)..(151): unsure at all Xaa locations
  Clone ID: PAT_MRT3847_116462C.1.pep
FPPTNPRFQVGSTPTNGASPHGKDLAPVNDTVACACXDETSNYPPSPWLEAGLQKGSMLTAESLGRMTYVAHTINHSHETDLXKGNLAFDTNLALYRHKLSELKHSPIPXNSMKYDLLGAGTHPSQDFPAKDEQXNPPTTEARLRQIIDPQ

SEQ ID NO: 161069 - protein, 35 aa, Glycine max
  Clone ID: PAT_MRT3847_116463C.1.pep
TFRSSQLILYKLMPDRTFFKGKYYIDKSNIFIYLI

SEQ ID NO: 161070 - protein, 144 aa, Glycine max
  Clone ID: PAT_MRT3847_116464C.1.pep
MEDVTERFSCSKLLVPKGEPIFVKATWFPTHFHLAVTDGITAWHCHPSEEEVKQRAAQWDLPVSEYLNLSERYLGLQQPGSVYALDDAGDGHKRLSWTFEKEGMTLLWRWKCLLSPDSKKSNVEILDFLMGSNINLSVRFFSLT

SEQ ID NO: 161071 - protein, 70 aa, Glycine max
  Clone ID: PAT_MRT3847_116465C.1.pep
RSGRTANNDIRNSFYRPCRERQMFISQSNQTIMILGLIHQLKAMGAFLYHHQVLRNSFIFPTMVNGMTCK

SEQ ID NO: 161072 - protein, 72 aa, Glycine max
  unsure (1)..(72): unsure at all Xaa locations
  Clone ID: PAT_MRT3847_116466C.1.pep
RYSXSNTXXITEXNHXPXSTXSSPSFXXXHHHXRXHGVVTTXXHHHHXHGLCHRHSHRHLEPNSEXTYACXR

SEQ ID NO: 161073 - protein, 118 aa, Glycine max
  unsure (1)..(118): unsure at all Xaa locations
  Clone ID: PAT_MRT3847_116467C.1.pep
IPGVGPTPVRSDRARREAAVLPKPWAEARTVALKTLTDHEDAGSSVKLSNDGTLLASXASLYKTLIIWSFATLTTLPPASCGHSEGMSDLAGSSDSHYICSACDYRTLRMWYATVGVG

SEQ ID NO: 161074 - protein, 64 aa, Glycine max
  Clone ID: PAT_MRT3847_116468C.1.pep
IGCNVLYNIFLTTLSLLFSFDFSVLPSCRQGTHCLIVYINLSCKKSNKIVEHKQAINFDIQDIG

SEQ ID NO: 161075 - protein, 63 aa, Glycine max
  Clone ID: PAT_MRT3847_116469C.1.pep
MKKEEFLQERGLESLPFGGKRLLTETNGNRIDSFVQRFVATGKPSPPSSPCKDSAVNPLVNGR

SEQ ID NO: 161076 - protein, 722 aa, Glycine max
  unsure (1)..(722): unsure at all Xaa locations
  Clone ID: PAT_MRT3847_11646C.1.pep
GSRARSSNLNLSQSIFLKLSDQRLPKNYFFIPFLVLPSHHLPHSTTTTDNDRVSRRTEVLTNHLLRRTPPPSLLRPLPCLSYSPPELSNTISFDTREMRKLMDCHNLEDRDWIFSLILQSPLFNPRHRAGRFFVCPDYNQPMEHQRQATMKRIAYLLDKGVFRGWLTGNGPEQELRKLALHEVIGMYDHSLAVKLGVHFFLWGGAVKFLGTKRHHDKWLNSTENYDIKGFVAMSELGHGSNVRGIETVTTYDSNTGEFVINTPCESGQKYWIGGAANHATHTIVFSQLYINGSNQGVHAFIAQIRDSDGNICPNIRIADCGHKIGLNGVDNGRIWFDNVRIPRENLLNSVADVSPSGEYLSAIKNADQRFAAFLAPLTSGRVTIAVSAVYISKISLAIAIRYXLTIQAFFITPNGPEVFLLDYPSHQRRLLPLLAKVYAMSFAANELKIMYVNRTPKSNKAIHIVSSAYKATLTWNNMRTLQECREACGGQGVKSENRVGNFMGEFDVHSTFEGDNNVLMQQISKALFAEYVASQKKKKPFSGLGLEHMNKPLPVIPSQLTSSYIRNSEFQIDLFHLRERDLLRRFADEEVSEYQSRGESKESAFILSYQLAEELGRAFSERAILKTFMEAESTLPAGSLKNVLGLLRSLYAVICVDEDSAFLRYGYLSTENASAVRKEVPKLCAEIRPHALALVSSFGIPDAFLSPIAYNWVDSNSWSSQL

SEQ ID NO: 161077 - protein, 32 aa, Glycine max
  Clone ID: PAT_MRT3847_116470C.1.pep
MRLCTPRLGIHFVKDPGFRALVVNRDPFDDVC

SEQ ID NO: 161078 - protein, 83 aa, Glycine max
  Clone ID: PAT_MRT3847_116471C.1.pep
HPQPSIFWLLNKIKFLILIFALPHLPFVNVYFPIFIRDLLPFFCSSALPSSLKFCFVLGAPPPPPPPPPPPPPPPPKEGDVIQ

SEQ ID NO: 161079 - protein, 57 aa, Glycine max
  Clone ID: PAT_MRT3847_116472C.1.pep
RPEFGHPRGACVRHASTICVIWAQTWYVRHSANGHHSSDHLTAHWVNHKVQREHHDL

SEQ ID NO: 161080 - protein, 42 aa, Glycine max
  Clone ID: PAT_MRT3847_116473C.1.pep
GSSSIEAYTLNGLTLNLTGARVHTIHYPTLSAHYLNVPSPKH

SEQ ID NO: 161081 - protein, 135 aa, Glycine max
  Clone ID: PAT_MRT3847_116474C.1.pep
HASDDDEYHAYLIISLEARTMGLETADLLSEGTESVDYYVQGKTLAAGNLFGRRGVIQVYERGARILDGSFMTQDVSFGASNSESGSASESAIALSGSIADPFGLLRMSDGSVRLLSGDPSTCTISVTSPASFES

SEQ ID NO: 161082 - protein, 237 aa, Glycine max
  unsure (1)..(237): unsure at all Xaa locations
  Clone ID: PAT_MRT3847_116475C.1.pep
GCTNADVLAAMDQAVSDGVDVLSLSLGSIPKPXYSDSIAIASFGATKKGVXVACSAGNSGPFPSTVGNGAPWITTVAASSTDRSFPTKVKLGNGKTFEGSSLYQGKKTNQLPLVYGKSAGAKKEAQYCIGGSLDPKLVHGKIVACERGINGRTEKGEEVKVAGGAGMILLNNEYQGEELFADPHILPATSLGASASKTIRSYSQSVKKPTASISFMGTRFGDPAPVMAAFSSRGPSL

SEQ ID NO: 161083 - protein, 61 aa, Glycine max
  Clone ID: PAT_MRT3847_116476C.1.pep
CSGARSGSVLSMSGNVLSKFASLAVAASVIVASEGAASVAVALSTSGAFDAEGGGGVSSIA

SEQ ID NO: 161084 - protein, 28 aa, Glycine max
  Clone ID: PAT_MRT3847_116477C.1.pep
KKKNYIITCSYLQMIYYDEFHGGTFTAM

SEQ ID NO: 161085 - protein, 85 aa, Glycine max
  unsure (1)..(85): unsure at all Xaa locations
  Clone ID: PAT_MRT3847_116478C.1.pep
MDGNEEDVRAVANRYSERQPVPDRCIGXDYREPTSTPIVXPGELAQRSLHKAGISESVATFXPLYITGPTATGCGKSKSKEYHCG

SEQ ID NO: 161086 - protein, 50 aa, Glycine max
  Clone ID: PAT_MRT3847_116479C.1.pep
QPKVVYEEKDFYKITRMTRHKKDYYYVFASSKEEDDKVSMMVVWSGSLKW

SEQ ID NO: 161087 - protein, 69 aa, Glycine max
  Clone ID: PAT_MRT3847_11647C.1.pep
NIVGFSFFGPLNTKPSIFEEFVLIKESFQQVSIFLFGLSLPFLILGFDVFFKKKKKKKKKKKKKNKKNK

SEQ ID NO: 161088 - protein, 72 aa, Glycine max
  Clone ID: PAT_MRT3847_116480C.1.pep
CVYCFNIFFIIQTPSQGTLLVKRKGVVYTNQPFKNRSTSRRYSSITNLSIGCRSCIQKIHFIEPTYIYDWKK

SEQ ID NO: 161089 - protein, 55 aa, Glycine max
  Clone ID: PAT_MRT3847_116481C.1.pep
YSGIISNPEMLCGATTGSQKPEITSGEQASLVQWSLGEGRSHTTVNSMIPKLSQG

SEQ ID NO: 161090 - protein, 326 aa, Glycine max
  Clone ID: PAT_MRT3847_116482C.1.pep
FLSLPFNFPTQKFLQAQSKVKVIAWIGLVALILHIGMLWFLIYVLDFGLAGAALAFDITSWGITVAQLVYVVIWCKDGWNGLSWLAFKDIWAFVRLSLASAVMLCLEVWYMMSVIVLAGHLDNALVAVDSLSICMNINGWEAMLFIGVNAAVSVRVSNELGLGHPRAAKYSVYVIVFQSLFLGIFFMAIILATRDYYAIIFTNSEVLHKAVAKLGYLLSVTMVLNSVQPVVSGVAIGGGWQALVAYINIGCYYLFGLPLGFVLGYTANLGVEGLWGGMICGIVLQTLLLLLILYKTNWKKEVEQTAERMRIWSGQDIGVDKIVASA

SEQ ID NO: 161091 - protein, 245 aa, Glycine max
  Clone ID: PAT_MRT3847_116483C.1.pep
ARDFVAAASIFEPEKSRVRLAWAQTSILLETITSYVSDAEMRKAFMKKFSDCLNRRDYSIGWRLNRNRTGHGLAETLVATIDQISWDILVSHGHEIGYDMHRNWEKWLSSWHREGDKCKGQAELLAQTINLCGGHWISEDQVSDPLYQSLLQLTNNLCNKLRCHQKDKELESSNSGTNVNSMITQEEESKMQELVQLVHQKSPTGIDFNIKNTFLTVAKSFYYTAFCDSRTVNFHIAKVLFDEVV

SEQ ID NO: 161092 - protein, 100 aa, Glycine max
  unsure (1)..(100): unsure at all Xaa locations
  Clone ID: PAT_MRT3847_116484C.1.pep
AGXVRXLGIRXRAQIXESXXVIXKXXXSXSQLXEXXXXAYXLVXXXFPIWVMXVXRTWNPXIVTWTYPNGXNRXTXXGXLXVIAWIXYXIXLVXIXHXDG

SEQ ID NO: 161093 - protein, 62 aa, Glycine max
  Clone ID: PAT_MRT3847_116485C.1.pep
GIHPSFFLTCLLLIRFNDLLVFVVGTSPSLLSECFCDYYYSKFGIFSYLEKLKKTQLLVWVS

SEQ ID NO: 161094 - protein, 53 aa, Glycine max
  Clone ID: PAT_MRT3847_116486C.1.pep
ILILSPIANAAHRFCSSSSGLIHRRMIKSQMQGCHNKQQYTVVVLREAGYISA

SEQ ID NO: 161095 - protein, 80 aa, Glycine max
  Clone ID: PAT_MRT3847_116487C.1.pep
PPPKNNNPISPLHPTCTTFNTTNPFPKSRSYSKKSLIALLQHNPPPGTTLHQIGSPIIGLLNQPNLPSLQIQRRGWYLKT

SEQ ID NO: 161096 - protein, 81 aa, Glycine max
  Clone ID: PAT_MRT3847_116488C.1.pep
SVSLSPALSGLKASDRASVPWKQKSSLSFSSPKPLKFCRTARAAAGDETTAAPAKVEAAPFAFTPPEVGPETPSPIFAGST

SEQ ID NO: 161097 - protein, 60 aa, Glycine max
  Clone ID: PAT_MRT3847_116489C.1.pep
QGNLWNSYLLLIKQTVYLLAFHRTNRMMSLDDLYMQPLLAKCPTGPAMPGNCEESSALSK

SEQ ID NO: 161098 - protein, 66 aa, Glycine max
  Clone ID: PAT_MRT3847_11648C.1.pep
EKKTPLGVSSPRKFKPCHVYVWKTPARKYVDRYNKPLGFSAPHHSEVHKPRGEALVFCIICSPDRL

SEQ ID NO: 161099 - protein, 148 aa, Glycine max
  unsure (1)..(148): unsure at all Xaa locations
  Clone ID: PAT_MRT3847_116490C.1.pep
MFTATSAAVATGSFLSLIAVSRKGSAGLKVSAPQATRXGMKATLKDIGVAAVATAASAVLASNAMANEVVLGGDDRTLAIVPNNXFEASGEKIVCKNNARVPHNXVIDEDEIPSGVDAGKISMSHEDLLNAPGETYSVTLDAKGTLHF

SEQ ID NO: 161100 - protein, 152 aa, Glycine max
  unsure (1)..(152): unsure at all Xaa locations
  Clone ID: PAT_MRT3847_116491C.1.pep
NALPLHALAVSLQVAVGRRLGVXDPQLMKIIEATLYTHNEWFKLQMWKDRFEGLLRLDSLKEANTPFLAPVTTSKSYADSCTNGSSQAPVSSGTRMSEDGSSPTQASSRDVICDEGAILKVMEFLALPRADAIHLLAQYNGNAETVIQQIFA

SEQ ID NO: 161101 - protein, 741 aa, Glycine max
  unsure (1)..(741): unsure at all Xaa locations
  Clone ID: PAT_MRT3847_116492C.1.pep
MESTPVNWEALDALLIDFAKSENLIEDSSALSPSSPSSSSYHSRLVIRQIRRAVETGAIDAAVALLRLHAPSILTDLKILFRLRKQKFIELLRKGTAEDRDSAIECLRTALAPCALDAYPEAYEEFKHVLLAFIYDKDDKTSPVANEWSEHRRLDLAGFMSSMLRAHLNAYDPIFSMALGYGVCFLRGDGFRQAASSPFSDRPVCPLLLVRVPPASPLGCCYVVPPFDEVDIQALAHAVELTRQGAIDSLRFTKGDVFLAFQNELCRMRLDAPLLDQLVREYCVYRGIVDSASGKQPIPETVKFNPQDPGYCSSRDCSLELDCNASKHSDGETSVTNAQMDGSPENNTDVTSMRRIDFEVRYASELASIHEDCSTSGSQQHEDASVLQRSRLSGNGERSKRKRWRGRYDDNSYMPNASLEENSKQEHSIGTVVSTILKEKQGSERLSVHDVSKVEHRYEILLGMKELASKGMAAEAVEEVNAIDPNFFAQNSVLLFQLKQVEFLKLVSSGDYNAALKVACTHLGPLAACDPALLKPLKETLLALLRPNEDALGNALPLHALAASLQVAVGRRLGVEEPQLMKIMRATLYTHNEWFKLQMWKDRFEGLLRLDSLKEANTPFLAPVTTSKSYADSCTNGSSQATVSSGTRMSEDGSSPTQASSRDVICDEGAILKVMXFWLCLGLMPYICLHSTTEMRRQSFSRYLRRRCAGNRVCYLEERSNYFFQYYLIQICEFFLYPLYI

SEQ ID NO: 161102 - protein, 136 aa, Glycine max
  Clone ID: PAT_MRT3847_116493C.1.pep
MESTPVNWEALDALLIDFAKSENLIEDSSALSPSSPSSSSYHSRLVIRQIRRAVETGAIDAAVALLRLHAPSILTDLKILFRLRKQKFIELLRKGTAEDRDSAIECLRTALAPCALDAYPVSEFVNSNWLLFVGFS

SEQ ID NO: 161103 - protein, 277 aa, Glycine max
  Clone ID: PAT_MRT3847_116494C.1.pep
MASWNSFPLQVTYEALGWFAFVSWSISFYPQVILNFRRKSVVGLNFDFVVLNLTKHSSYLIYNASLYFSSAIQKQYFEKYGYGEMIPFAANDVAFSIHAVLLTAITLFQIAIYERGSQKVSKVSIGIVSVAWLVAAVCFFIALPNNSWLWLLSVFNTIQVVMTTIKYIPQAVMNFLRKSTDGFSIGNILLDFSGGIANYGQMVVQSIDQDSWVNFYGNIGKVLLSLVSVFFDIIFIIQHYVLYRGKKSSKLEITTEQEDQIREHLVRHSDQSSPENV

SEQ ID NO: 161104 - protein, 51 aa, Glycine max
  Clone ID: PAT_MRT3847_116495C.1.pep
PATNPAQRRSAAQIQGISSKPKPKKKKSEISKRPKLTNAHLPELFQNLNSS

SEQ ID NO: 161105 - protein, 72 aa, Glycine max
  Clone ID: PAT_MRT3847_116496C.1.pep
IGPLCAPLPKKGVMGIKPSPRINLTTLYIKLYIFPFCPLGVHKTQGGAKLIKVENPFFLMGAGLFFCRPPPP

SEQ ID NO: 161106 - protein, 62 aa, Glycine max
  Clone ID: PAT_MRT3847_116497C.1.pep
CLQKVGLLFILNYLINPRPGWSQGQCQEPHYQPLELWAFHFLLSLPLSVSVSVFSQGKRFSF

SEQ ID NO: 161107 - protein, 41 aa, Glycine max
  Clone ID: PAT_MRT3847_116498C.1.pep
AMIKNMDSILVNTQKTSLLKPMLVESYKTLIKMVTTFFKYK

SEQ ID NO: 161108 - protein, 95 aa, Glycine max
  Clone ID: PAT_MRT3847_116499C.1.pep
SSSGKPRLHWPQSLCELSYAKDCSLSTSTIGADHALAGCLDRTATRDGIPIGEPTGDPDLFDGSSDWGTLDEDMKTMITYGGLYMPEKGATEPAK

SEQ ID NO: 161109 - protein, 49 aa, Glycine max
  Clone ID: PAT_MRT3847_11649C.1.pep
RAKNRFLGHQLYVSVLFPNRSLRDGYTLPKTQLVWGIVKDMPKPPPFSS

SEQ ID NO: 161110 - protein, 278 aa, Glycine max
  unsure (1)..(278): unsure at all Xaa locations
  Clone ID: PAT_MRT3847_1164C.1.pep
RYTYIHYYTSSSFFFFFVGKEKITNTPRGLLISEKLTLIFKNPWSWILPADSIHYGCIPDDKFGGFKDVGTNVSCVVSRKDMATHMSPQGSSRSSPNXGPSFSASTSSTLPVTELRTIGSSKVDIRDVQVDEXLTVTRWSKKHRALFTGXAHNKSKAGKKKKAKSEEAKISAWEXLQAKAEAAIRKLEWIQVTETKVMVTEMKCRFXWSMMKLEKRRASSMDKIMNKRILAXRKAQEMRSSVPHNQTDRVVRTSHKASXFLRTSQMRSLSGCLTCHAF

SEQ ID NO: 161111 - protein, 88 aa, Glycine max
  Clone ID: PAT_MRT3847_116500C.1.pep
LDTMGVVDGSLWAEAEAGSETIPFYHLLTTMPVYHLLTTMPFYHLLTTMPFYHLLTTMPFSHLLTGMHLYHLLTTMPLEHLLTDHAST

SEQ ID NO: 161112 - protein, 86 aa, Glycine max
  Clone ID: PAT_MRT3847_116501C.1.pep
FRAYTRVKPVDRKGLTGKCFRHSSSLTDYCTRSPYTIQYYIRVQSTLSSLKWVSLRLLLALRSLLSSQFYSLARHFQRSPVAHLSL

SEQ ID NO: 161113 - protein, 83 aa, Glycine max
  Clone ID: PAT_MRT3847_116502C.1.pep
REYAYLFHTVTDWCNAYGSFRGTGLPNPPHLIFADGHRAVCMNRCGYLGPEKLNQLWWRWGLLEDIYSVNSCRTIGRLDWIHF

SEQ ID NO: 161114 - protein, 112 aa, Glycine max
  unsure (1)..(112): unsure at all Xaa locations
  Clone ID: PAT_MRT3847_116503C.1.pep
FDHHIFVFPPRYPPVVFLSSIVIFFVTGMKAENCHRNFLAGSPSTVITQXPSSLPELAFPGCAQAVXQLLQSSYEXPYFVDAQPKQKESGNKVSKGPLSSILRAFWGFSIAQ

SEQ ID NO: 161115 - protein, 50 aa, Glycine max
  Clone ID: PAT_MRT3847_116504C.1.pep
GLKKVQAFYVRKHRVLYFVFIVKMFCSCSAYMFMFNLATLTQSYMYLGSI

SEQ ID NO: 161116 - protein, 132 aa, Glycine max
  Clone ID: PAT_MRT3847_116505C.1.pep
NVPFHVFSIIINGISNGPPAPVTLQCPSSSSSSSFIFTFFMISPSFCRVQPRGINIPCTLIVFQFVIKTHVFRNAQRHHQPINAEKKSNTHTHTHLVESSTQREWQNKKTTLGSENKREKEPWRKERTHATK

SEQ ID NO: 161117 - protein, 67 aa, Glycine max
  Clone ID: PAT_MRT3847_116506C.1.pep
INKGKVNRNLIYATTFLRAKYVYCSLAFSLAEVLSEISFRLLGVRKDPHNCCNLFCSLLLFWTNICP

SEQ ID NO: 161118 - protein, 285 aa, Glycine max
  Clone ID: PAT_MRT3847_116507C.1.pep
SICELGFGCRDMGERIPCGSGMYFPFPPPPSPIRPSSSSSDRDRYLAELLAERQKLVPFLQVLPQSTKLLTQEIRRMSVGGGGGGGGFNHEPAADTPPPYFRPMDLEGWAIEVQQDKPNPQRMMAWPAPVVKRVIRLDVPVDKFPNYNFVGRILGPRGNSLKRVEAMTECRVYIRGCGSVKDSIKEEKLKEKPGYEHLKEPLHVLVEAEFPEDIINARLDHAVAILENLLKPVDESLDHYKKQQLRELAMLNGTLREESPSMSPSMSPSMSPFNSTGMKRAKTGR

SEQ ID NO: 161119 - protein, 107 aa, Glycine max
  unsure (1)..(107): unsure at all Xaa locations
  Clone ID: PAT_MRT3847_116508C.1.pep
SHGLHRAQGVADLGQSEAPGRLKLMYYEECEGICERRRYLYFIRARKRSKKAVSEDSPTARSKIQIKYLPPRRSQRTLNANRYGFEPRIHHXRYHVTTPAVEPRSNP

SEQ ID NO: 161120 - protein, 46 aa, Glycine max
  Clone ID: PAT_MRT3847_116509C.1.pep
QQLFRKKIQKLLQPRFVWDHEFMIIIIYARVISNLDLLVGSPCGVP

SEQ ID NO: 161121 - protein, 58 aa, Glycine max
  Clone ID: PAT_MRT3847_11650C.1.pep
ALKCHGPAGWRIAGIQVQWSTLRPSYMDNMVPSFDCRRPMKQIPTILVPTRMSYSLKH

SEQ ID NO: 161122 - protein, 88 aa, Glycine max
  Clone ID: PAT_MRT3847_116510C.1.pep
EYLVVIAITIYAKVQFFKPPSCTYVCVVDMNLSRSNYFKISVVLMHHINPDMLLIVVGNLFITSMNVEWTRSSCSRTIVTEDQEPPGG

SEQ ID NO: 161123 - protein, 69 aa, Glycine max
  Clone ID: PAT_MRT3847_116511C.1.pep
KNLLEIDIYSLKQVKTAKKKRESWLNYVVIRHTSRSWCNLVAKVREKPSFVSVKGTNHFCLVIVTMIFS

SEQ ID NO: 161124 - protein, 401 aa, Glycine max
  unsure (1)..(401): unsure at all Xaa locations
  Clone ID: PAT_MRT3847_116512C.1.pep
AARRRHRERREGKVVLVVVLLIGMATLSSILSSSLPLFHRYPNPNPSLFRPSLSLSFSRTKPRSPFLVLAASSHDFASNSKKSVLTELIQEIEPLDVSHIQKDVPPTTADAMKRTISGMLGLLPSDQFNVVIEALWEPLSKLLISSMMTGYTLHNVEYRLCLEKNLDMFEGDIEKPKAESTKVDLQGLMHDSVNAIEFGRNKNLSSKEQKLHEEVDIQELGEISAKAHQYIFNLQSRFSXSMKYELHEVKRKSAALQMQQFVGEEKKDLLGYLRSLQPEQVAQLSEIATPEFKNSILSVFRGLLASLSPKIHSKPSTMSENTTVGATNAGNEDCAEVLENSALQFQPVISLTRDYLARLLFWCMLXWDTILEGLSVDWXLTDLLSLTSDAENDVSGSQPIA

SEQ ID NO: 161125 - protein, 216 aa, Glycine max
  Clone ID: PAT_MRT3847_116513C.1.pep
MAFFQVSVRRWILTFAILYVCVFGKNFGNADEDESEAQTGGGGYGGVGGGFGGAGAGVVGGGGGFGAGGGGFGAGGGGVGSGDPAQIVSKALLCFNDKNIYRSCEETCRLNENGNLNVPAEKTDTFCEGPCLSETNLVLNCLDNVFSNFIFYNRATIQDIRETIEAGCGYGPQRGNFNVAEHIQREESKAPKATSHVAMGLAIIVMRRALMPLNFT

SEQ ID NO: 161126 - protein, 82 aa, Glycine max
  unsure (1)..(82): unsure at all Xaa locations
  Clone ID: PAT_MRT3847_116514C.1.pep
GGTSGGASSTARIPLYFGVLADCTGSAGSYXLTNTPLQLDGTIQTPTSTCAGDKGLHQCAXWYKLKPSPIHGLGIYDDSGPP

SEQ ID NO: 161127 - protein, 63 aa, Glycine max
  Clone ID: PAT_MRT3847_116515C.1.pep
GSPNIYSLVCRIRLGYSSFAFHRWYVASRTMPCGYADIYVRRFSQWMAHDKQSGKSSLSRVPQ

SEQ ID NO: 161128 - protein, 99 aa, Glycine max
  Clone ID: PAT_MRT3847_116516C.1.pep
MGKGKPRSVEKGVVGPSLSVTSSTIPLGPVYYPTEDEFKDPLEYIFKIRPEAEPFGICKIVPPKSWKPPFALDLDSFTFPTKTQAIHKLQSRPAACDSK

SEQ ID NO: 161129 - protein, 104 aa, Glycine max
  Clone ID: PAT_MRT3847_116517C.1.pep
KIETHIQLPHSVCNNIQPQINKIMFTVTQNSDLRYFGPRNPNSDKSSPMRPPPPSDAATHGQVEGDDGVRCGGGIWRKREWCSCSRSCRRTRTMSRDYGSSNLI

SEQ ID NO: 161130 - protein, 136 aa, Glycine max
  unsure (1)..(136): unsure at all Xaa locations
  Clone ID: PAT_MRT3847_116518C.1.pep
SKDSGASKKKNLLSNTNNRKXGEDTNNKEGAKTXAEKKAKTPAPREPQPKNETSGGDSCSQNNDTTAENPQRQHVGPPPQHRDSARTRTPGMPKGRNNNSTHQLQGKPEEAKGGGAKKEPTAWEDKKGPGETRSPA

SEQ ID NO: 161131 - protein, 124 aa, Glycine max
  Clone ID: PAT_MRT3847_116519C.1.pep
MSGGMDFLSLKEEDVTKMLSATTHIGSDNVDFQMEQYVYKRRADGVHIINLRHTWEKLLLAARAIAAIEQHSEVFVFSAKAYGQRAVLKFATHTGATPIAGRFTPGTFTNQIQTGFREPRLLIV

SEQ ID NO: 161132 - protein, 45 aa, Glycine max
  Clone ID: PAT_MRT3847_11651C.1.pep
FPFDRTRPINLPPIPFNGYRFSTPKMITGSVIFYGGEVYSSSSIQ

SEQ ID NO: 161133 - protein, 284 aa, Glycine max
  Clone ID: PAT_MRT3847_116520C.1.pep
MATEAAGSSKDNNNQGHVTTENRADIPKQKGPAPSEITEELPREQHGARQNLILDIPAISQEEAREDYVRINMPLTPPPRRVIFSPCPSPVFPRSKESPGPSSSKSKSNIKTFLPKLSLKFRNTSSEIEKAAFLALEGSTVAPKKPFLSRTLSLVTPRGKKTSSLPVTPIAHSNPGSVHGGNLVYAETVEKELNLPIHRSRSVPVLNKEGNSPVRGMFRIVPTTLRLDEKIASATPMTSPIHDTVKNEDGGEDIPEEEAVCRICFVELGEGADTFKLECSCKGE

SEQ ID NO: 161134 - protein, 301 aa, Glycine max
  unsure (1)..(301): unsure at all Xaa locations
  Clone ID: PAT_MRT3847_116521C.1.pep
MEGDEHMNEVPSENSNLGSDSLEKENILEDEKEDLQDGLKLKVVTEEVSGGLLAENGCISLEDGSLKRSLETVGTSVSGAKRARITVDEYQPSVHFTYNSLTRASRQKLQELLQQWSAWHAKHVSSSNDASEVLESGEETFFPALHVGLEKTSAVSFWMENQTRNDKNKDFIPLADNTVPLYDRGYTLGLTSADGSSNVDGGLEIIDAAARCLNCGSYNHSLRECPRPRDNTAVNNARNKHKSRRNQNSSSRNPTRYYQNSPAGKYDGLRPGALDDATRQLLGLGEXDPPPWLNRMRELGY

SEQ ID NO: 161135 - protein, 83 aa, Glycine max
  Clone ID: PAT_MRT3847_116522C.1.pep
VPSDLLDPSPGIEFCLLLLEQKQRETTTMVDHQQPGNLLTRLKEIEVGSEIHTRIDQNLYRLDQCHGKEISFSIVSFQTVHVL

SEQ ID NO: 161136 - protein, 56 aa, Glycine max
  Clone ID: PAT_MRT3847_116523C.1.pep
SPHFVLKKKNFFFFFFFFFFFFLIFFFFFFFFFFLENYLYILKLNFSVYLITSCRI

SEQ ID NO: 161137 - protein, 55 aa, Glycine max
  Clone ID: PAT_MRT3847_116524C.1.pep
LPSYFLVISFLNKELGSQQQNPIHDVKYFCIPSSWLISNNSPLLKESTLHSWNLR

SEQ ID NO: 161138 - protein, 64 aa, Glycine max
  Clone ID: PAT_MRT3847_116525C.1.pep
RHIYSESFMLLTVTRRLSIVTVLKSAHRTEFEPIISSRESIEVELKRVESKYTRSWWWITIAEI

SEQ ID NO: 161139 - protein, 87 aa, Glycine max
  Clone ID: PAT_MRT3847_116526C.1.pep
MKMDNGHTTKATNYLDIIIKRLEMVQLLQLKLGLNNTIRKQLVQLIMYLRMIDILIPSIIFYIVCITSFLLHVTLYQTVLIGCFTLT

SEQ ID NO: 161140 - protein, 32 aa, Glycine max
  Clone ID: PAT_MRT3847_116527C.1.pep
KKAKLKYFFKGVPNNPPLKITYYPDSPLLKNN

SEQ ID NO: 161141 - protein, 55 aa, Glycine max
  unsure (1)..(55): unsure at all Xaa locations
  Clone ID: PAT_MRT3847_116528C.1.pep
MEPXRVLPDRPIVIYXWDIIXAARXLGXIAXFSVTCPXXQIPXNQXWXAXXTNXX

SEQ ID NO: 161142 - protein, 64 aa, Glycine max
  Clone ID: PAT_MRT3847_116529C.1.pep
PTHPLIVFYISNSLHPNAIIMAPAYLIPRQLIYTSTNTLISPNLLYLYSLLHLFQLYTQTKLHY

SEQ ID NO: 161143 - protein, 47 aa, Glycine max
  Clone ID: PAT_MRT3847_11652C.1.pep
QFFSFVFFWADKRFIRPFFTLNTKGVENTSLHHYSDPEGQHNRIRIL

SEQ ID NO: 161144 - protein, 65 aa, Glycine max
  Clone ID: PAT_MRT3847_116530C.1.pep
ATPRSSLDGGEKKTGCYIIEKYHGPALGCNGHASAVKQEHDFQLLSAPNNKVSSIAYISTSSLEK

SEQ ID NO: 161145 - protein, 41 aa, Glycine max
  Clone ID: PAT_MRT3847_116531C.1.pep
GSSSILFSATTPFTLNITVTRLSLTNYYTRLPYFLFLNTSL

SEQ ID NO: 161146 - protein, 68 aa, Glycine max
  Clone ID: PAT_MRT3847_116532C.1.pep
PPWVNVKAKVKKVFPPGRFPSWPVWPFVGGINPKFRPFHFRVVFQSLVAFFWGVFLTLRARFLALFKA

SEQ ID NO: 161147 - protein, 52 aa, Glycine max
  Clone ID: PAT_MRT3847_116533C.1.pep
FKIPVGKKKLFTNTLIFDPIPSFFFPPFLLSFTPFFYFPPFLVEFPSFLIFL

SEQ ID NO: 161148 - protein, 111 aa, Glycine max
  Clone ID: PAT_MRT3847_116534C.1.pep
TRVRPLARIYGSFTHITAAWLICACSCSLSGLSLLDPQLGSISFRSCPFTGTAYRSDQSYKLIALACMLLVGFEDKNFYIVHTCAIIECIKGLVFDSAAMTFGLTYCNLCN

SEQ ID NO: 161149 - protein, 153 aa, Glycine max
  Clone ID: PAT_MRT3847_116535C.1.pep
MDWIGAYRGGQRSRDWCDPSSPFTDLWDPRRVGDADDITSSLAHAHVDWRETDKAHIFRADLPGVKKEDLKVQVEENKILQISGERVKEKEDQNDKWHRVERQCGSFLRRFRLPEDANPNQISCTLENGVLNVTVPKVEKKPENKNVRQIDVV

SEQ ID NO: 161150 - protein, 86 aa, Glycine max
  Clone ID: PAT_MRT3847_116536C.1.pep
MGILLLIKDVARAVSLTPAEPKRGFPLKSDIEECFPSSICPFKGCTMLDFTFLQFWLLFGNSVEEGNFITKLVSFWAQLLTFNNWG

SEQ ID NO: 161151 - protein, 61 aa, Glycine max
  unsure (1)..(61): unsure at all Xaa locations
  Clone ID: PAT_MRT3847_116537C.1.pep
ELAKDVEGQQQGGEYSARDYHDTRPAGFDXDTAELTEWSVYRALIAELIATRLHRYVTVLT

SEQ ID NO: 161152 - protein, 105 aa, Glycine max
  unsure (1)..(105): unsure at all Xaa locations
  Clone ID: PAT_MRT3847_116538C.1.pep
PNSRSTLRPPLVAHAAPTRGGTLSNGWGDNKRGGTAEKEIHXXPNHNKQSSHLRILYIINRCVPLKSTTTTTTTTLFFFPAMALVDLDGNPMKALTICMIRSSGF

SEQ ID NO: 161153 - protein, 69 aa, Glycine max
  Clone ID: PAT_MRT3847_116539C.1.pep
MAPPTIKQRRETTQHQREEEGKRFIITVFGEIDKGVRGVLGGGPIGFVPEESGIEEGNCSLTSERRALV

SEQ ID NO: 161154 - protein, 171 aa, Glycine max
  Clone ID: PAT_MRT3847_11653C.1.pep
DLEIVFNRGRVPIATWNKTLLASNLQPSSESCGNAGFLMFNSKFLKPNGSKLLSNQNQHIITHGERNIVTEHTTQLACVFTEEVCGDGDWAHGSFPLEEYIQALDRSKDEMYYNHSLGMRYSKITEQIYVGSCIQTEDDVETLSKVEGVTAVLNFQSGTEAENWGINAKSI

SEQ ID NO: 161155 - protein, 279 aa, Glycine max
  Clone ID: PAT_MRT3847_116540C.1.pep
MENRTSSVLPPGFRFHPTDEELIVYYLCNQATSRPCPASIIPEVDIYKFDPWELPEKTDFGEKEWYFFSPRERKYPNGVRPNRATVSGYWKATGTDKAIYSGSKHVGVKKALVFYKGKPPKGLKTDWIMHEYRLIGSRRQANRQVGSMRLDDWVLCRIYKKKNIGKSMEAKEEYPIAQINLTPANNDSEQEMVKFPRTSSLTHLLEMDYLGPISHILSDATYNSTFDFQINTANGGIDPFVKPQPVEIPYAADSGKYQVKQNSTINPTIFVNQVYYQRG

SEQ ID NO: 161156 - protein, 115 aa, Glycine max
  unsure (1)..(115): unsure at all Xaa locations
  Clone ID: PAT_MRT3847_116541C.1.pep
EETPRSTGKRGXXEXDDPKXXXQXKEEXXEXXKXXXKEKTXXKEPAKPPXKAQAXGRPPXRXXRKNKXAXQKXSXEXXAEKTTSSXXKXGAKGKXTKXGAPNPRKGDXTXXKSXK

SEQ ID NO: 161157 - protein, 52 aa, Glycine max
  Clone ID: PAT_MRT3847_116542C.1.pep
LRIPTSKYKLIKKLQYVKYLNKNIPLYSSEWPNDIKIWSYETSQPVITLTRA

SEQ ID NO: 161158 - protein, 110 aa, Glycine max
  Clone ID: PAT_MRT3847_116543C.1.pep
AGIPGPTTPFRKVVLYTRGRKWVPFRQRKLGGEFFSLSSLITLTFKGFFFFPAFAPHHLRRKWVAIVSFSDFLEFPVKPVQKVGKIFRKGFYQTKNVDPKGQVVLVPETC

SEQ ID NO: 161159 - protein, 50 aa, Glycine max
  Clone ID: PAT_MRT3847_116544C.1.pep
YLSPHSSDIRNDQNGGHCGVFLNFQVLHCQVPRIVFPGGSAYTDIITICP

SEQ ID NO: 161160 - protein, 45 aa, Glycine max
  Clone ID: PAT_MRT3847_116545C.1.pep
KFYFDEGESSLTRIEFFPCRKIHHSVISYTWVVTYEEKYVKRLGG

SEQ ID NO: 161161 - protein, 102 aa, Glycine max
  Clone ID: PAT_MRT3847_116546C.1.pep
PPYPNPEQNSITIKIHEFSWENYNPKTQQHYHQQIERERSNPIKIQKDKLQKLKMKNKIFSRTKGGDLQKGLIFIFFYFFPSSSGVGLCKRSQRMQRRSKTR

SEQ ID NO: 161162 - protein, 246 aa, Glycine max
  Clone ID: PAT_MRT3847_116547C.1.pep
MANEEEQKNHLFGIKDLGHKTLLQSDALYQYILETSVYPREHECLKEIRKMTAKHPLNIMATPADEGQLLSMLVKLTNSKNALEIGVFTGYSLLSTALALPPDGKILALDVNREYYELGLPIIQKAGVAHKIDFREGPALPFLDEMLKDENKKGSLDFVFVDADKDNYLNYHKRVLELVKIGGLIGYDNTLWAGSVAAPPDAPLMDYIKPLRGHVMELNKYLAQDSRIEICQLPVGDGITLCRRII

SEQ ID NO: 161163 - protein, 210 aa, Glycine max
  Clone ID: PAT_MRT3847_116548C.1.pep
RLREDDKRGHHTTMSSPLLPVATSSDAHAPNPRVLPLYDIFSFLSTTISSGIITYLAYTKNDTPMLLFAAFIYVVYFSVDFSPPPQQPKARGLHAVKLASWALLSSTMLGFACSFSTSLTPPESLCFFWVVLGGSALLHGAWMGDENFVSKKEQYADMVRSFAPIMLMFFGLGRHYLSTQLILHAAIMNARNLVRPTTICVNINTKQLSG

SEQ ID NO: 161164 - protein, 202 aa, Glycine max
  Clone ID: PAT_MRT3847_116549C.1.pep
MANEEEQKNHLFGIKDLGHKTLLQSDALYQYILETSVYPREHECLKEIRKMTAKHPLNIMATPADEGQLLSMLVKLTNSKNALEIGVFTGYSLLSTALALPPDGKENKKGSLDFVFVDADKDNYLNYHKRVLELVKIGGLIGYDNTLWAGSVAAPPDAPLMDYIKPLRGHVMELNKYLAQDSRIEICQLPVGDGITLCRRII

SEQ ID NO: 161165 - protein, 117 aa, Glycine max
  Clone ID: PAT_MRT3847_11654C.1.pep
QAFTRCQSNIVHFTESYLKPQESYVTGDRSPNGSHQNIGDRESAATAKSLDITSSGACSGGSFQFTENVNMSHQSHSQKDAPTNTSETDCDCQPSLTLFGEEFSCESETFGSFDLGF

SEQ ID NO: 161166 - protein, 246 aa, Glycine max
  Clone ID: PAT_MRT3847_116550C.1.pep
MANEEEQKNHLFGIKDLGHKTLLQSDALYQYILETSVYPREHECLKEIRKMTAKHPLNIMATPADEGQLLSMLVKLTNSKNALEIGVFTGYSLLSTALALPPDGKILALDVNREYYELGLPIIQKAGVAHKIDFREGPALPFLDEMLKDENKKGSLDFVFVDADKANYLNYHKRVLELVKIGGLIGYDNTLWAGSVAAPPDAPLMDYIKPLRGHVMELNKYLAQDSRIEICQLPVGDGITLCRRII

SEQ ID NO: 161167 - protein, 63 aa, Glycine max
  Clone ID: PAT_MRT3847_116551C.1.pep
GSSANFLLHSLMLDHPDTATSGDGDILQLTVNPCPTGAGRRRFLNPKHASSYRPASGLLHGDR

SEQ ID NO: 161168 - protein, 133 aa, Glycine max
  Clone ID: PAT_MRT3847_116552C.1.pep
MEERWRFITWLKLFRVFVAVVSLFLFILEPIWCSTLNNEGLALQKMRERVVRDPLGALSSWNSKGEIDPCSWFGVECSHGNVVSLNLKDLCLHGTLALEIGKLVHIKSIILRNNYFYGDIPKEILQLENLGSS

SEQ ID NO: 161169 - protein, 61 aa, Glycine max
  Clone ID: PAT_MRT3847_116553C.1.pep
SVSNTMLLIQFSTLPNTASTCPLLRPILQQPARRHTRHSRNAHVTILHGMLAARNSTLPYD

SEQ ID NO: 161170 - protein, 204 aa, Glycine max
  Clone ID: PAT_MRT3847_116554C.1.pep
NSRIRGRGTLTPRSGEIGTPSLRGVRKWFGVSNTAEEAALVYDNAPTRRRRPRARTYVTAPLAAVVSHNAALLPPAPLALTSVITPPAREETHCNSKNIFSPTSVLHCCSLSEEAESVTAKDDDYSSVSENKVKAESAFPPEIDFEFRACSTVPESLLFCDDDWSSEFLNSYEDFGFKSWHTDRNRDFFQDIDDLFVSDPLLAL

SEQ ID NO: 161171 - protein, 61 aa, Glycine max
  unsure (1)..(61): unsure at all Xaa locations
  Clone ID: PAT_MRT3847_116555C.1.pep
MSLVSSMFGCGVVMAAXQXMGIGRXXDGXLTXVCSSRXQKKXTAHHMKXXPRKTQHGIETQ

SEQ ID NO: 161172 - protein, 364 aa, Glycine max
  unsure (1)..(364): unsure at all Xaa locations
  Clone ID: PAT_MRT3847_116556C.1.pep
GDVPQAHRAACLLRKILQVIQLRFSNQAESMKNQNHLFKAREGKYQTRINALETLAVGTTEENEVVTSWVQQLKYALQVEQTKFEEKKKLEEQDFSRLKKEKVHSEIKISELKQDLEIAKRTYEEHVSELELQATESKAEYEKRIEGLKLHLADARMQVKELEAFSESRFLKWKNKEDTYQTIVNFQVGAFQELRAAMKSVKDDVIKTKRNYLEEFKYFGIKLKGLAEAAENYHVVIAENRKLYNEVQDLKGNIRVYCRIRPFLPGQSQSHTTIEFVGDDGELIVGNPLKQGKENRKLFKFNKGFGQATSQGEIFQDTQPLIRSVLDGVHCCICGYGXTRCGKKYTKNGTGLSLXSEWGVHYWA

SEQ ID NO: 161173 - protein, 102 aa, Glycine max
  unsure (1)..(102): unsure at all Xaa locations
  Clone ID: PAT_MRT3847_116557C.1.pep
GSRTFSVLIGNREWLRRNGLTISSDVSDSMTDHEMKGQTSILVTIDXVLCVMIAISDAVKQDAALSVHTLHSMGVDVVLITVDNRKTAIAIATQXGINKIFA

SEQ ID NO: 161174 - protein, 138 aa, Glycine max
  unsure (1)..(138): unsure at all Xaa locations
  Clone ID: PAT_MRT3847_116558C.1.pep
MLYFPTIISVLEVLAVTVPVLLTVAFVTIAERKTMASMQRRLGPNAVGXYGLLQAFADALKLLLKEYVSPTQANIVLFFLGPIITLIFSLLGYAVIPYGPGLVLLDYNLGILYMLAMSSLATYGILLAGWSANSKYAF

SEQ ID NO: 161175 - protein, 79 aa, Glycine max
  Clone ID: PAT_MRT3847_116559C.1.pep
KLAAHMFFYDTKGKQGGVKPQKHLNVQKPPEEGYPNLVSPKLKLKKQMACLSPLKKKQPPGRGHRGKKTREVMPFFWGT

SEQ ID NO: 161176 - protein, 283 aa, Glycine max
  Clone ID: PAT_MRT3847_11655C.1.pep
MLGALLLNANFKIHFSLISCQARVPLPVKPAPLRMPSPHYPHWASLQADIEAHLKQTIPLKEPLEVFEPMLHLAFSAPRTTVPALCLAACELVGGHRQQAMAAASALLLNLANAHAHEHLTDGPMYGPNIELLTGDGIVPFGFELLARPDGPASASPERVLRVMIEISRAVGSVGLQDAQYVKKTLWDGGEEVQNVESMQRFVLEKRDGGLHACGAASGAILGGGSEDQIERLRNFGFHVGMMRGMLQMGFMEKHVQEERHLALKELQFFMDRDVHVISSFIY

SEQ ID NO: 161177 - protein, 73 aa, Glycine max
  Clone ID: PAT_MRT3847_116560C.1.pep
GYRSYCWSCQGRSFMSGGEDLIGEQVHLSINKIKSPSRAGYFFMSGQTIEGGNSFLIALVQALILGNGQCVVP

SEQ ID NO: 161178 - protein, 82 aa, Glycine max
  unsure (1)..(82): unsure at all Xaa locations
  Clone ID: PAT_MRT3847_116561C.1.pep
MVLKTELCRLRGAKIYPVKGDKLARGDSXVFLSVNSKWKRYSHNLLKPSKLTWTVMHRKKHKMDIAXEAVRKRRRAAKKPYS

SEQ ID NO: 161179 - protein, 81 aa, Glycine max
  Clone ID: PAT_MRT3847_116562C.1.pep
GISNDYGGAVDASTISLFISIHLISCGICGSLSTKKHYIVPGVLQLEVLSLVRSFPEVLNKDNAKSTPVLLVGECVKKNIA

SEQ ID NO: 161180 - protein, 140 aa, Glycine max
  unsure (1)..(140): unsure at all Xaa locations
  Clone ID: PAT_MRT3847_116563C.1.pep
MVMATNLILLTDFVVSSNLDMSMILNDNVQTIASHRDEELMYMTEQWLVKNWMVYNAHXEKVNRFQIFKDNLIFIDHHNSQDDRTYKLVLNRYVDLTNEEYRAKFLGTKIDLNRRLLKTPGNRYSPRVGDKLPGLHDWRK

SEQ ID NO: 161181 - protein, 77 aa, Glycine max
  Clone ID: PAT_MRT3847_116564C.1.pep
VYGSDCLGGSDRKWIGDSLLMIRGYEMVRDYSNHGLASEPSGVEQLKKPVVNESSCQCEDHVKQGLACLLGSGLKQV

SEQ ID NO: 161182 - protein, 491 aa, Glycine max
  Clone ID: PAT_MRT3847_116565C.1.pep
MIFCHTSSLISNIGKDEGVYGCRFGVVTSISNFIINGGWSLFNCLSLFLSLLTAPTNPTSPSPPQSLSSNTMLFSRISRNLRGSFNSCRWFRSIGDHNHCFLSLHNFHSRGGDSTQQVMRSLIFSKGLPALHSSRYLIHHQSSSIVEDEHDPFSLVADELSLLGNKLRAMVVAEVPKLASAAEYFFKMGVEGKRFRPTVLLLMSTALNLPIHEAPPPIEIGGTLTTDVRSRQQRIAEITEMIHVASLLHDDVLDDADSRRGIGSLNFVMGNKLAVLAGDFLLSRACVALASLKNTEVVSLLAKVVEHLVTGETMQMTTTSDQRCSMEYYMQKTYYKTASLISNSCKAIAILAGQTAEVAMLAFEYGKNLGLAFQLIDDVLDFTGTSASLGKGSLSDIRHGIVTAPILFAMEEFPQLRTIVDEGFENPANVDLALEYLGKSRGIQRTRELAVEHANLAAAAIDSLPESDDEDVRKSRKALIDLTHRVITRTK

SEQ ID NO: 161183 - protein, 134 aa, Glycine max
  Clone ID: PAT_MRT3847_116566C.1.pep
KKPKNCCPPTFGGPKKKRKKPFKLGGSKIQKGGLDRKQNIQRWGKKKNHRTPHGPPWGHPFKKNRGGSFPPGGVLNPKKRATPPPALRGVIGPKGEKGGPLFFPPLKGKIPHLPVAYYKGGQGPGLGPLKRGPP

SEQ ID NO: 161184 - protein, 45 aa, Glycine max
  Clone ID: PAT_MRT3847_116567C.1.pep
ANPPTILIFFYLLKYPFKRTLYNKRNNHQPFLFYLSQHNSIYFHL

SEQ ID NO: 161185 - protein, 209 aa, Glycine max
  unsure (1)..(209): unsure at all Xaa locations
  Clone ID: PAT_MRT3847_116568C.1.pep
DKVRPDLEELNKIRRAQIFTYEELETATGGFKEESIVGKGSFSCVFKGVFKDGTVVAVKRAIVSPNMQKNSKEFNTELDLLSRLNHAHLLNLLGYCEEGEERLLVYEFMAHGSLHQHLHGTNQVLREQLDWIRRVTIAVQAARGIEYLHGYACPPVIHRDIKSSNILIDEKHNARVADXGLSLXGPADSGSPLAELPAWTLGYLDPEYY

SEQ ID NO: 161186 - protein, 137 aa, Glycine max
  unsure (1)..(137): unsure at all Xaa locations
  Clone ID: PAT_MRT3847_116569C.1.pep
LCLRSDLKSLAFASMTCKHWRATVXSYKKASRHVNLSSLGHSCTDSIMWNILNAYEKDKIESIVLIGCTNITAGMLEKIVLLFPGLSTVDIRGRTQFGELTLKFTNVKWIKSHSSHITNIASESHKMRSVQQFAVQT

SEQ ID NO: 161187 - protein, 44 aa, Glycine max
  Clone ID: PAT_MRT3847_11656C.1.pep
FLSPVKVSRKWLIGGFFPFAHKDVRPYSPEISAFQWAGRVFQYV

SEQ ID NO: 161188 - protein, 71 aa, Glycine max
  Clone ID: PAT_MRT3847_116570C.1.pep
LLPTNVFPYTQTWRLDRAICLKSMVICEPCHTMLSSGTILVFWRPFYWLSGPLRRKVEDSRNNLICLGLML

SEQ ID NO: 161189 - protein, 47 aa, Glycine max
  Clone ID: PAT_MRT3847_116571C.1.pep
RILSCSMCRFMSSVLNRGTLMCKMWGVGNSSQCKRDVEVDHSFNKGD

SEQ ID NO: 161190 - protein, 39 aa, Glycine max
  Clone ID: PAT_MRT3847_116572C.1.pep
PRVRLNLVFSITRSGDSFIHIKRNDTYPKPAPATCNELT

SEQ ID NO: 161191 - protein, 28 aa, Glycine max
  Clone ID: PAT_MRT3847_116573C.1.pep
TTADNKDKDKDKKSPICRSSRDGIHFPA

SEQ ID NO: 161192 - protein, 81 aa, Glycine max
  unsure (1)..(81): unsure at all Xaa locations
  Clone ID: PAT_MRT3847_116574C.1.pep
PPAVALGALFKAVXSGVIKALPRTVVFSTVLGLKFTQSKFDSLFKAIKVLACRYAKLPMQVKADFGSVMHVFKTSLLCKAH

SEQ ID NO: 161193 - protein, 173 aa, Glycine max
  unsure (1)..(173): unsure at all Xaa locations
  Clone ID: PAT_MRT3847_116575C.1.pep
IQYPFNGGIMQIFGRALTGKTITLEVEASDTIENVKAKIQDKEGIPPDQQRLIFAGKQLEDGRTLADYNIQKESTLHLVLRLRGGMQIFVKTLTGKTITLEVEXPSDTIENVKAKIQDKEGIPPDQQRLIFAGKQLEDRRTLADYNIQKECTLHLVLRLRGGMQIFVKTLTGK

SEQ ID NO: 161194 - protein, 516 aa, Glycine max
  unsure (1)..(516): unsure at all Xaa locations
  Clone ID: PAT_MRT3847_116576C.1.pep
KIIISKDQVLRSENENSKGTEHLAFHRVPSVVNLKNLTSKLSDLNLSEVSTRESDNDTKVQSQTFPLTGNTGQDVSQEFPPEAKSRPTQGDILIDXIEDRFPRDFLYDMFSKAIISEDSSSIGPLPTDRAGLSLNMGNHEPKRWSYFQNLAIEGFDNVSLIDQDNLGFSSAVRKVQEGDSKSQPSAPLPAGGVLAGRTDSHLNIGEENQKNVPVATKTEASIFHQKYEHSQLKGNENKNMDAIMENIRPQESEYQDDKNEPRNVVVAGEFDTSTVQFIKNEDLEELRELGSGTFGTVYHGKWRGSDVAIKRIKKSCFAGRSSEQERLTIEFWREADILSKLHHPNVVAFYGVVQDGPGATLATVAEYMVDGSLRNVLLRKDRYLDRRKRLIIAMDAAFGMEYLHSKNIVHFDXSMIQRNRLVSGGVRGTLPWMAPELLNGSSNKVSEKVDVFSFGIVLWEILTGDEPYANMHYGAIIGGIVNNTLRPTIPSYCDLEWKTLMEQCWAPKLAVTIPSY

SEQ ID NO: 161195 - protein, 247 aa, Glycine max
  Clone ID: PAT_MRT3847_116577C.1.pep
MAATEHRLSLEPEKKNLLRHHTEKHFTAGEIVRDIIIGVSDGLTVPFALAAGLSGANATSSIVLTAGIAEVAAGAISMGLGGYLAAKSETDHYARELKREQEEIIAVPDTEAAEVAETLAQYGIEAHEYAPVVNALRKNPQAWLDFMMKFELGLEKPDPRRALHSAMTIAIAYILGGVVPLVPYMFIQKAAEAVVFSVVVTLVALLIFGYAKGHFTGNKPFRSALETALIGAIASAAAFGLAKAFNP

SEQ ID NO: 161196 - protein, 205 aa, Glycine max
  Clone ID: PAT_MRT3847_116578C.1.pep
MAATLEPEKKSLLRHHSEKHFTAGEIVRDIIIGVSDGLTVPFALAAGLSGANATSSIVLTAGIAEVAAGAISMGLGGYLAAKSESDHYARELKREQEEIIAVPDTEAAEVAEIMAQYGIEAHEYAPVVSALRKNPQAWLDFMMKFELGLEKPDPRRALHSAMTIAIAYILGGVVPLLPYMFIPEAAEAVVFSVLVTLGALLNFGY

SEQ ID NO: 161197 - protein, 78 aa, Glycine max
  Clone ID: PAT_MRT3847_116579C.1.pep
NHLQLLFQRPNIRMLCAFTILFLKMKPKYDDCESNGNLGKTGRKTLFQAALRDEQPLLNKGAVPDQPLQLLPQYACPS

SEQ ID NO: 161198 - protein, 113 aa, Glycine max
  Clone ID: PAT_MRT3847_11657C.1.pep
VIYQFIFHCQHWPVTQHFLGMQSSPTSHERPACTPHSPVAAQRSVRHPTCSFSHIPANGASMRSQYGSVVGPKLQRISSKSLHTCGQTPDRQAKPAPICKERPFRMPAPTRPR

SEQ ID NO: 161199 - protein, 86 aa, Glycine max
  unsure (1)..(86): unsure at all Xaa locations
  Clone ID: PAT_MRT3847_116580C.1.pep
DQGEGLSLGEYKXAVSWSKYLVSSGAAIKGEGEEEWSADLSQLFIGSKXXALAGHSRIYRGIYKHMGCCIKLVSQPEEDEDLAVLL

SEQ ID NO: 161200 - protein, 102 aa, Glycine max
  unsure (1)..(102): unsure at all Xaa locations
  Clone ID: PAT_MRT3847_116581C.1.pep
MEGTVFTPALEGINXVKSEQGEILTQPFLDACKHILPVIDKFGAAMALVKSDIGGNISRLESKYSSNPTKFNYLYSLVQVEVETKTAKSSSSCTNGLLWLTR

SEQ ID NO: 161201 - protein, 337 aa, Glycine max
  unsure (1)..(337): unsure at all Xaa locations
  Clone ID: PAT_MRT3847_116582C.1.pep
TSLRMEVVSDEEAFLFGMELAGASAVSMVLKSALELGILETIAKAGPGAYLSPSHIXYNILTYSLHQLPHGKAERHYGLHPKAKYLVNNEGGVSVAAYFLMEHDKVLKDMWFHLTDSVKEGGHPFSNAYGMTAFEFHDTNPRFNKLFNKGLSDISSITMKKILETYNGFEGVGSVVDVGGGTGAIINMVASKYPTTKXLNFDLPHVIKEAPAYTGVEHISGDMFVSVPKGDVIFMKWVCHDWNDEQCLKLLKNCYDSLPDATGKVILAEGISPETPDSNLAARCEFQMDVIMLCHSPNGKESSEKEYKALAKGAGFHGFRIASCVLNTHVMEFLKKA

SEQ ID NO: 161202 - protein, 59 aa, Glycine max
  Clone ID: PAT_MRT3847_116583C.1.pep
DALDHTSVDPDSAVKFDSSFALSTVSYRFERIPSLVVPCSGEMTPFYRSIFAAQYTPRS

SEQ ID NO: 161203 - protein, 81 aa, Glycine max
  unsure (1)..(81): unsure at all Xaa locations
  Clone ID: PAT_MRT3847_116584C.1.pep
RAWSEGSTGVGVAXXTXPSTFHSKPQSQFAPPFXFFFFCHFLHILQXNHXVCLSIGSGSKKDPSFFDENGAAATWGVTXTT

SEQ ID NO: 161204 - protein, 161 aa, Glycine max
  unsure (1)..(161): unsure at all Xaa locations
  Clone ID: PAT_MRT3847_116585C.1.pep
MDEANSISSPMVGGCKLTQTGYEYFSDPSLYRSVLGALQYATIARPEISFSVNKGCQFMSKPTDQHWIAVKRILRYLKGTINFGLXMQPNFSFSHYSVHAYCDADWASDPDDRRSTLGAAIFLGPNLVSWWSKKQSVVARSSTEAEYRSLAKSVSLTMVSS

SEQ ID NO: 161205 - protein, 90 aa, Glycine max
  unsure (1)..(90): unsure at all Xaa locations
  Clone ID: PAT_MRT3847_116586C.1.pep
FVRLRTRGVTEDTGVTTGLAITSAMKRRSRGGAYTDSYTNCYXDCAAWTTAWTIAMTINPNSDACCEAWMKGTVNHCEINCDTIWTSCMD

SEQ ID NO: 161206 - protein, 53 aa, Glycine max
  unsure (1)..(53): unsure at all Xaa locations
  Clone ID: PAT_MRT3847_116587C.1.pep
PDQIHEINDFLLTARRKDARSVXINMSRDVLEVRLDAPKXMYTLCVFDHAKAD

SEQ ID NO: 161207 - protein, 87 aa, Glycine max
  unsure (1)..(87): unsure at all Xaa locations
  Clone ID: PAT_MRT3847_116588C.1.pep
TTGACLSVSEMLANLINLTGTTRPDPSASTPAXFKTEAPLYKNNTSPPKESAATAPANDKLTKSYPPDTMIFSPDYLLDLSEIPYYL

SEQ ID NO: 161208 - protein, 237 aa, Glycine max
  Clone ID: PAT_MRT3847_116589C.1.pep
GTWAQSTIAIAAAVEEPPDAHASECGPDVDGVNDHQTAHFSSGPKKSELRIGESSAFFTYVKASILKSNLEGVVNVDKNGATHVRMEVMHQTCAQQGVNDLQIRENGEAYESQSQDDLPSSTSIPDSLSIERSCTPPASMEVSQQKHYREENLHQGVMHPRNGTHCSELEVSGMASQQVYPYYISGVVNHVMMPSSAQMYHQKNIQDLQNHPSSAMISQYSHLSQGGPHGNDDILPH

SEQ ID NO: 161209 - protein, 46 aa, Glycine max
  Clone ID: PAT_MRT3847_11658C.1.pep
FSFLNLDSTYKDNGGDFGGYNNPTYTEGCTEAHTESYVIDTLSLAP

SEQ ID NO: 161210 - protein, 122 aa, Glycine max
  Clone ID: PAT_MRT3847_116590C.1.pep
NSAREVSNPSSLLLLILVQKPFFIIFRMAAGTVKPSSWYPSYHSRSFTFFYFFDPFFFHEFNNLKTQTFSFFFCALGKGQPLNTGQGDPTFTTIVKKVIGRETKFFFLGGGNGNKVDISLQF

SEQ ID NO: 161211 - protein, 144 aa, Glycine max
  unsure (1)..(144): unsure at all Xaa locations
  Clone ID: PAT_MRT3847_116591C.1.pep
PYPSHAPSXYISPYHNPSPCXIFTWSFSRSSLSSFFHSLPSFEASFGCSRRCSFFLFLPLCLLDFSAPSSSYCSLTGESSLSFLPSYRESDHSTSIKTLKMQQLGLGVPKSNQSQHFRRKHALLLNNHSNTEIQATVRVCYLEG

SEQ ID NO: 161212 - protein, 91 aa, Glycine max
  Clone ID: PAT_MRT3847_116592C.1.pep
HASDICYGQKKKKKKKKKNQKKKKKKKKKKKKKKKKKKKKKKKKKKKKKKKKKKKKKKKKKKKKGGPLKKTKFNNPGMENKNFLKGAQKKK

SEQ ID NO: 161213 - protein, 65 aa, Glycine max
  Clone ID: PAT_MRT3847_116593C.1.pep
WLEQKEITELFQPAPTNLRAWQILICNKDRPNNNNDWFPYLPRIILLFSPPSPDPVPLLRMYFIL

SEQ ID NO: 161214 - protein, 65 aa, Glycine max
  Clone ID: PAT_MRT3847_116594C.1.pep
PCSGKFTLPYELWNYFKLTNPNYSYSKINLAGTVLEKNEPFSFTTVIKKSLLTFPKLGDNEAYQD

SEQ ID NO: 161215 - protein, 149 aa, Glycine max
  Clone ID: PAT_MRT3847_116595C.1.pep
ILNFQSPSIAQIVIYFDHATNIWNDLKECFSQGDLLQIAELQEEIYRLKQGSHTVLDFFTKLKFVWEELDNYGLMNPCTCPSRTYHQQDFVIHFLKGLDERFSVVCSEVLLMDHLPSTKRIFSMVIQHETQHASHTSAEAQNRFINVAW

SEQ ID NO: 161216 - protein, 49 aa, Glycine max
  Clone ID: PAT_MRT3847_116596C.1.pep
VLSAENLPIDCLQRMNGRDRVRHLECLSTCLYGFAKCNSLLPPFTSYGM

SEQ ID NO: 161217 - protein, 134 aa, Glycine max
  unsure (1)..(134): unsure at all Xaa locations
  Clone ID: PAT_MRT3847_116597C.1.pep
RGPPQWSVFVPSNPQTLPVTVAVPLVKEGMTYFFSGDYDGAPSKSGPPFKINVPFGQGFPKSFXSPEEAPFPPSPVAGDDDSAPAPFVPSHFGPPQKENFFSKVSGAPKFSGFVSILRRAPLPLVFLGVLLFFF

SEQ ID NO: 161218 - protein, 125 aa, Glycine max
  Clone ID: PAT_MRT3847_116598C.1.pep
LKGFGVTPITSSVYQNFIQEIDSSADHSFNQQVNTSADHSFIQQTNSPANHSFIQQTNSSANHSFIQQINTSADHSFIQQVNFSADHIFIQQMEVPSSMLFTQILAIIIILLIPFWFLVVKRRRL

SEQ ID NO: 161219 - protein, 77 aa, Glycine max
  Clone ID: PAT_MRT3847_116599C.1.pep
IFTTCDKIGTLINLLTLSNLKTQIYHQLFLSKGWKTLTSIQLKSNIVEWLGALGTVCTHKPNPKEQSMVLPWQRQFY

SEQ ID NO: 161220 - protein, 885 aa, Glycine max
  unsure (1)..(885): unsure at all Xaa locations
  Clone ID: PAT_MRT3847_11659C.1.pep
QKESFLWLDVNLLKNSNTFAVGLLPSSLFWKTEFSYPRVRLLSKKAMRTTQILLVLLWFFCIYAPSSFXANVTYDHRALVIDGKRRVLVSGSIHYPRSTPEMWPDLIQKSKDGGLDVIETYVFWNLHEPVRGQYNFEGIGPIWFXKTVAAAGLYVHLRIGPYVCAEWNYGGFPLWLHFIPGIKFRTDNEPFKAEMKRFTAKIVDMIKEENLYASQGGPVILSQIENEYGNIDSAYGAAGKSYIKWAATMATSLDTGVPWVMCQQADAPDPIINTCNGFYCDQFTPNSNTKPKIWTENYSGWFLAFGDAVPYRPVEDLAFAVARFFQRGGTFQNYYMYHGGTNFGRASGGPFVATSYDYDAPIDEYGIIRQPKWGHLKEVHKAIKLCEEALIATDPTITSLGPNLEAAVYKTGSVCAAFLANVDTKSDVTVNFSGNSYHLPAWSVSILPDCKNVVLNTAKINSASAISSFTTESLKEDIGSSEASSTGWSWISEPVGISKADSFPQTGLLEQINTTADKSDYLWYSLSIDYKGDAGSQTVLHIESLGHALHAFINGKLAGSQTGNSGKYKFTVDIPVTLVAGKNTIDLLSLTVGLQNYGAFFDTWGAGITGPVILKGLANGNTLDLSYQKWTYQVGLKGEDLGLSSGSSGQWNSQSTFPKNQPLIWYKTTFAAPSGSDPVAIDFTGMGKGEAWVNGQSIGRYWPTYVASDAGCTDSCNYRGPYSASKCRRNCGKPSQTLYHVPRSWLKPSGNILVLFEEKGGDPTQISFVTKQTESLCAHVSDSHPPPVDLWNSDTESGRKVGPVLSLTCPHDNQVISSIKFASYGTPLGTCGNFYHGRCSSNKALSIVQKACIGSSSCSVGVSSETFGNPCRGVAKSLAVEATCA

SEQ ID NO: 161221 - protein, 57 aa, Glycine max
  Clone ID: PAT_MRT3847_1165C.1.pep
YIYGETQYLFATSKIYKTTCLDTLILRKLKHPNQCLKDPNKKRNIIFNYKIIYDKVI

SEQ ID NO: 161222 - protein, 52 aa, Glycine max
  Clone ID: PAT_MRT3847_116600C.1.pep
PRVRTSSSKDKRALKLAKRKLGTHKRAKKKREEMAGVLRKMRSAGTHTDKKK

SEQ ID NO: 161223 - protein, 59 aa, Glycine max
  Clone ID: PAT_MRT3847_116601C.1.pep
WPHAPTLTYMRDMSRGASTVPWVLVYEQPLKKSSRHDHNASDTWWRKASICAATMATRS

SEQ ID NO: 161224 - protein, 88 aa, Glycine max
  Clone ID: PAT_MRT3847_116602C.1.pep
LIGNMQTYLQSTTVRLEEWRVKRTDTEQWMHHRQLPPELRESVRKYDQYKWLATRGVDEEALLKGLPVDLRRDIKRHLCLDLVRGVPL

SEQ ID NO: 161225 - protein, 46 aa, Glycine max
  Clone ID: PAT_MRT3847_116603C.1.pep
SSECSVHMTMWMYCYNYRMSLFRSTRAVRFTSGELYGVDTGILLKH

SEQ ID NO: 161226 - protein, 63 aa, Glycine max
  unsure (1)..(63): unsure at all Xaa locations
  Clone ID: PAT_MRT3847_116604C.1.pep
GFIVGEFYPLNPKFLEFVLPHIKKRKVVYLENISXVFRKVPQXLVGLYSGRKVGKQMVVVARD

SEQ ID NO: 161227 - protein, 612 aa, Glycine max
  unsure (1)..(612): unsure at all Xaa locations
  Clone ID: PAT_MRT3847_116605C.1.pep
ARGNLCKKMAPPLVTLLSAEPEIQYVALRNINLIVQFGPTILAHEIKVFFCKYNDPIYVKMEKLEIMIKLASDRNIDQVLLEFKEYATEVDVDFVRKAVRAIGRCAIKLERAAERCISVLLELIKIKVNYVVQEAIIVIKDIFRRYPNTYESIIATLCENLDTLDEPEAXERIDNADELLESFLESFPEEPAQVQLQLLTATVKLFLKKPTEGPQQMIQVVLNNATVETDNPDLXDRAYIYWRLLSTDPEAAKDVVLAEKPVITDDSNQLDPSLLDELLVNIATLSSVYHKPPDAFVTRVHSAQRTEDEDYAEGSETGFSESPANPANGPASPPTARQSAPTSAIGAPATPPPVAPVPDLLGDLMGMDNSIVPIDQPATPTGPPLPILLPAATGLGLQISAQLTRQDGQIFYSLLFENNSQVPLDGFMIQFNKNTFGLAAAGPLQVSQLQPRMSARTLLPMVMFQNMSQGPPSSALQVAVKNNQQPVWYFSDKISLLVFFTEDGRMERSSFLETWRSLPDSNEVSKDFPAIVIGNADATLERLAASNMFFIAKRKNANQDVFYFSAKLPRGIPFLIELTTLIGNPGVKCAIKTPSPEMSALFFEAIETLLMG

SEQ ID NO: 161228 - protein, 138 aa, Glycine max
  unsure (1)..(138): unsure at all Xaa locations
  Clone ID: PAT_MRT3847_116606C.1.pep
LQVAVKNNQXQPVWYFNDKFSFHVLFTEDGIMERSAFLETWRSLPDSNEVSKDFPAIVIDSVEATLDRLAASNVFFIAKRKNANQDVFYFSAKIPQGIPLLIELTTVVGNPGAKCAIKTPSPEMSAFFFEAIETLLRS

SEQ ID NO: 161229 - protein, 58 aa, Glycine max
  Clone ID: PAT_MRT3847_116607C.1.pep
RFHSLIGRNKKIKIGLQIPNFVSNNTQVSNCIRNKRAGKNKFHLWFPTNWGFAHFRWP

SEQ ID NO: 161230 - protein, 630 aa, Glycine max
  unsure (1)..(630): unsure at all Xaa locations
  Clone ID: PAT_MRT3847_116608C.1.pep
AVVLSAVKMILQQMELITSTDVARNLCKKMAPPLVTLLSAEPEIQYVALRNINLIVQRRPTILAHEIKVFFCKYNDPIYVKMEKLEIMIKLASDRNIDQVLLEFKEYATEVDVDFVRKAVRAIGRCAIKLERAAERCISVLLELIKIKVNYVVQEAIIVIKDIFRRYPNTYESIIATLCESLDTLDEPEAKASMIWIIGEYAERIDNADELLESFLESFPEEPAQVQLQLLTATVKLFLKKPTEGPQQMIQVVLNNATVETDNPDLRDRAYIYWXRLLSTDPEAAKDVVLAEKPVITDDSNQLEPSLLDELLANIATLSSVYHKPPDAFVTRVHSAQRTEDEDFAEGSETGFSESPANPANGPASPPTSATGAPATPSSVAPVPDLLGDLMGMDNSIVPVDQPVTPTGPPLPILLPASTGQGLQISAQLTRQDGQIFYSLLFENNSQVSLDGFMIQFNKNXFGLATVEPGMSARTLLPMVMFQNMSQGPPSSVLQVAVKNNQQPVWYFXDKISLLVFFTEDGRMERSSFLETWRSLPDSNEVSKDFPAIVIGSADATVERLAASNMFFIAKRKNANQDVFYFSAKLPRGIPFLIELTTLTGNPGVKCAIKTPSPEMSALFFEAIETLLMG

SEQ ID NO: 161231 - protein, 38 aa, Glycine max
  Clone ID: PAT_MRT3847_116609C.1.pep
RNRKMSGKNQQTLNRWGWPTYLDHVYWYERHSFWVQAT

SEQ ID NO: 161232 - protein, 129 aa, Glycine max
  unsure (1)..(129): unsure at all Xaa locations
  Clone ID: PAT_MRT3847_11660C.1.pep
IIIHITANSVTSILLISLYVTTCPSIKLIARITLPXTSYSDPLFTMKLLRLVLHECYLEGXYASMILLWSNTVKCDSTNSSGSGIXSIGSSERVLEXLCPGTGSCADIIALAASDAHQIARSCMINIPT

SEQ ID NO: 161233 - protein, 128 aa, Glycine max
  Clone ID: PAT_MRT3847_116610C.1.pep
KGTLLLLLLQKGGHHLKHLVFSSSMGKKKTRVFPSLTDNILKRGLFSFCKSQKGPPFRGPRCFPPLHSTKLQVDRGLFVRPRNRFLPPKGQAFFFPTQYFLLPCNHISSFARSTSPLLKSIKTQNHHI

SEQ ID NO: 161234 - protein, 48 aa, Glycine max
  Clone ID: PAT_MRT3847_116611C.1.pep
LVNSSRLLLQADTKMSINHAKGTNDRLRGYVSKQLDRLSKGIYIYIYI

SEQ ID NO: 161235 - protein, 148 aa, Glycine max
  Clone ID: PAT_MRT3847_116612C.1.pep
PSPLCLISAGSRPDPIGALAPQQLALAHPLARTSRQDAQPQPEHGQGAAAGDVQFALARQRQLAGSLAHSDGRQEPTLSRDAPAVVISEQGHMDKDEEWKEGQKGLAHQVVSEDGLKGWWTVDTKGKRGVCEGEHGGKCLEAVLEVLK

SEQ ID NO: 161236 - protein, 37 aa, Glycine max
  unsure (1)..(37): unsure at all Xaa locations
  Clone ID: PAT_MRT3847_116613C.1.pep
PIQSYLNGMLVTXSIXHHICGLQEQFEXLGYLLXLFL

SEQ ID NO: 161237 - protein, 268 aa, Glycine max
  unsure (1)..(268): unsure at all Xaa locations
  Clone ID: PAT_MRT3847_116614C.1.pep
IIVKVXXXDQXXXEDXXXVXXXHACLSVESNEDTTALEKXXWEIVKKCNGLPXAAISLGGLLRTKHHVWEWNDVLNNVLWGLSESVFPALEARDHYLSPHLKQCFVYCSLYPIDYEFWKEELILLWMAEGLLNPQRNGKTLEETGDDYFDDLVSRSFFQPSTSWPQHKCFVMHQLMRDLAISFGGEFYFRSEEPREEIKIGVYTRHLSFTKFGDIVLDNFKTFDKVKFLRTFLPINFKDAPFNNENAPCIIMSKLKYLRVLSFCGFQS

SEQ ID NO: 161238 - protein, 40 aa, Glycine max
  Clone ID: PAT_MRT3847_116615C.1.pep
LVLLCGDCSLLSSHSYSCGWQLTVKSLPSKLPWPWNPTSP

SEQ ID NO: 161239 - protein, 89 aa, Glycine max
  Clone ID: PAT_MRT3847_116616C.1.pep
KHTSNPPILISKTTNNSLLITHYVTAYARYPRTPFPWESNLILHTLNAIYQIYNQIHRMNQKKFNGPQHPHTRTFIHYHFHSTDTGQYA

SEQ ID NO: 161240 - protein, 49 aa, Glycine max
  unsure (1)..(49): unsure at all Xaa locations
  Clone ID: PAT_MRT3847_116617C.1.pep
TKIIKGGLESGWGQNYWGXDRKGFLVRMGQIMGINPGGNLGCMNQRPFG

SEQ ID NO: 161241 - protein, 71 aa, Glycine max
  Clone ID: PAT_MRT3847_116618C.1.pep
NNALFFLFVNFICRFLMFLTHKIFSSDQERKDERLQGPQPLGSAGTERKDSANCWHARNLYLHEELFSNIF

SEQ ID NO: 161242 - protein, 33 aa, Glycine max
  Clone ID: PAT_MRT3847_116619C.1.pep
VENVTHTGPSKLVLYFTGATNILYTFGGHAVTV

SEQ ID NO: 161243 - protein, 117 aa, Glycine max
  Clone ID: PAT_MRT3847_11661C.1.pep
SSTTTTLPPPDSAATNGISPTAEETSQPPRPTPPPELRVPIWWPEDGTLSMDWVENLMRCFDWCSRNVPPSELPSVLPVEVFDSLILVASKMLHKEPNCVPVDPFRPTLDDNSTPSD

SEQ ID NO: 161244 - protein, 764 aa, Glycine max
  unsure (1)..(764): unsure at all Xaa locations
  Clone ID: PAT_MRT3847_116620C.1.pep
RPRKLGIRLEEWSKCRSDFNKVWAEIYAKNHYKSLDHRSFYFKQQDSKNLSTKSLVTEIKEIKEKQQKEDDIIQSIAAGNKQPLISHLEFEYSDVGIHEDLYKLVRYSCEELFSSKELLNKIMRLWSTFLEPMLGVPSQSHGTERAEDRKTGHNHXLRWTIKREAGVAPSRGPCNKFMHTXTDKDVADCRITVVKMFHDHTLASDDIRKXGSVGGEIVSRDDPLMDKGQKNVEYNDKASGFSKQIXASDEEGAKNNVSIAIRGENSLNRTNLDASSGRALTPSQPTDVDDSVSKSQGVNAPSVEGCDMATPVPVANGVLSESSKVKTHDESVGPCKIEKEEGELSPNGDSEEDNIVAYGDSNVQSMAANGEDESCPEAGGDNDADADDEDSENVSEAGEDVSGSESAGDECXREDHEDKEDIEHDDVDGKAESEGEAEGICDAQAGGDGTSLPLSERFLSSVKPLTKHVSAVSFVEEMKDSRVFYGNDDFYVLFRLHQALYERILSAKTHSMSAEMKWKAKDASSPDPYSRFINALYNLLDGSAENAKFEDECRAIIGNQSYVLFTLDKLIYKLVRQLQTVATDEVDNELLQLYEYEKSRKPGKLNDSVYHANAHVILHEENIYRLQCSSTPSRLSIQLMDNMNEKPELFAVSIDPNFSFYLHNDFLSVFPNKKEPHGIILHRNKRQYGKLDELSAICSAMEGVKVINGLECKIACSSSKISYVLDTQDFFFRPRKKRRTPSGTTTSQFRRDREERFRKLLACS

SEQ ID NO: 161245 - protein, 144 aa, Glycine max
  Clone ID: PAT_MRT3847_116621C.1.pep
MTEIESNDKTTNFPSVYEEGAPNLAERAKQETMRPNKHSSHHHNRESHGLNSDIDENTSVDDVRAPNVFERAKEELQALAEVFHHKKRAPTSDIRDEDQIAESSEHRQVSPSSPSETKAKEANISVKSGEIKAIIHHDKSDTSS

SEQ ID NO: 161246 - protein, 60 aa, Glycine max
  unsure (1)..(60): unsure at all Xaa locations
  Clone ID: PAT_MRT3847_116622C.1.pep
MGDAEDIEPLVCENGSGMVXAGFVGDDAXREMXYSIVGRPRHTGVMVGMGQKDAYVGDEA

SEQ ID NO: 161247 - protein, 91 aa, Glycine max
  Clone ID: PAT_MRT3847_116623C.1.pep
ATPGNHRKNPGPIGPLNKTKKPPGGLPKKTKKGGQTALKKTPLLKKKPGGNPAQGDHPGATKAPPLEAPPRNPKKPRNGKQGNPNPPKNPP

SEQ ID NO: 161248 - protein, 112 aa, Glycine max
  unsure (1)..(112): unsure at all Xaa locations
  Clone ID: PAT_MRT3847_116624C.1.pep
TKITSSWVPLSVSYDTRFYLFELVCLSISDFHIERKSTVTSHIKRQCNSPPTLIVIGAGISXIAAARCLHDASFKVIVLESKDRIGGRIYTDYSFGLPRDMGASWLHGACNE

SEQ ID NO: 161249 - protein, 52 aa, Glycine max
  Clone ID: PAT_MRT3847_116625C.1.pep
RMTSFTNSRLGLTRGSYAEVFPKTKQLKNEEPFPPFSGPFCSNFSKLITSKG

SEQ ID NO: 161250 - protein, 278 aa, Glycine max
  Clone ID: PAT_MRT3847_116626C.1.pep
MDSIQNKVYYCCVSKGNNVMYVYSGGDQEDENVAALCLERAPPFHRWYFETIGKRTFGFFMEDGYVYFTIVDKGLGNPVVLQFLEHVRDEFKKLSRKGSRGILPNMNSIYIQEKLVPVIRGLITSLESVSHGSSNWRDETSLSFQVDLSPSPSNLNGQIEGASSTKAPLLGKSNKPDKKKVKDHVIAMRDVELEEHRKSTDRGARVDSGNLDGVSQGGAGASVSLQKDMGSMRMRSAPQNIRKKWWRQVRIVLAIDAAVCILLFIIWLVICHGISCIR

SEQ ID NO: 161251 - protein, 78 aa, Glycine max
  Clone ID: PAT_MRT3847_116627C.1.pep
FCGQEVAYEYLALVLCSNALLQKMVFAVYLGVVIGFCSGNLRLGFFVGWGAAFSLRPHVLPRQSWFYCLFRLFVSSFL

SEQ ID NO: 161252 - protein, 231 aa, Glycine max
  Clone ID: PAT_MRT3847_116628C.1.pep
PRVRNFPYQDGEGCWFSSESQLGIQEEDRVRVLINKMMVNNSVSIAGEGIVGRAAFTGNYQWILLNNFTRDAYPPEVYPELHYQFSAGMQTVAVIPVLPHGVVQLGSFSPIMEDIGFVNDVKNFILQLGCVPGALLSEDYSAKVSNEKFAGPVTVDPPVITSNCTPSVANGSNQLTNSPLASRPVAQPPHPLRGGINNYQGSLLTPQAYNPNQVFDGICQPKAHSMIKTNV

SEQ ID NO: 161253 - protein, 63 aa, Glycine max
  Clone ID: PAT_MRT3847_116629C.1.pep
FLPCFAVAPFFCESYVLSLQSVLLIGIFSSHPLIPWPFFRCGRNKSCVLNCALVLNSALAALA

SEQ ID NO: 161254 - protein, 161 aa, Glycine max
  unsure (1)..(161): unsure at all Xaa locations
  Clone ID: PAT_MRT3847_11662C.1.pep
MRATQIVLVLFWLLCIHSPTLFCANVEYDHRALVIDGKRRVLISGSIHYPRSTPEMWPDLIQKSKDGGLDVIETYVFWNLNEPVRGQYDFDGRKDLVKFVKTVAAAGLYVHLRIGPYVCAEWNMGGFPLWLHFIPGIKFRTDNEPFXAEMKRFTGKIVDMI

SEQ ID NO: 161255 - protein, 36 aa, Glycine max
  Clone ID: PAT_MRT3847_116630C.1.pep
THLRWYLIDINRLKAYIATSNFLLASPPPLNCGHPR

SEQ ID NO: 161256 - protein, 50 aa, Glycine max
  Clone ID: PAT_MRT3847_116631C.1.pep
TLSTYPAHVMHVMSSSKSNENLHLLYDTYTTVRTHSVSSDNAYIQLGADR

SEQ ID NO: 161257 - protein, 67 aa, Glycine max
  Clone ID: PAT_MRT3847_116632C.1.pep
FIFFSFLSIYTTHSFHCISFVYIALIIQIMISNSFIGQFHDSLRMTLYISLSLFVQIFLTFYNEAIK

SEQ ID NO: 161258 - protein, 209 aa, Glycine max
  Clone ID: PAT_MRT3847_116634C.1.pep
VISKHANFYLHPQIETLQEDGRVTFVDGSSILADSILYCTGYSYAFPFLDTKEMVVVDDDRVGPLYEHTFPPSLAPSLSFIGIPRKIIGFPFFESQAIWIAQLLSGKKVLPSWEEMMKSIKEFYQSREAAGIPKHCTHEIANFGYCDKYGDNVGFPRIEEWRKQLCLSALINSDANLETYRDSWDDHELLQEALQSPHFTQLGLEDSPM

SEQ ID NO: 161259 - protein, 279 aa, Glycine max
  Clone ID: PAT_MRT3847_116635C.1.pep
MNLFGSFTSCYLTSGPFSKTAVNYNAGCKTAMANVVQAIVMALTLQFLAPLFGFTPLVALSAIIISAMLGLIHYEEVIHLYKVDKFDFVICMAAFLGVIFISMDVGLMLSVGLGVLRALLYVARPAPCKLGKLPEIGLYRDTEQYNVSTYPGVLVVQLGSPVYFANSIYVKERIMRYIRSEESSTGDVVEHIILDLSGVTAIDTTAIKGLDELIKILGKNGVKVLFVNPRLEVMEKLIISKFVEKIGKESFYLILDDAVMASQYTLRSSKAANNAQEVV

SEQ ID NO: 161260 - protein, 314 aa, Glycine max
  Clone ID: PAT_MRT3847_116636C.1.pep
MMAKIQHSEVEVKGLKLHVAEIGSGSKAVVFLHGFPEIWYTWRHQMIAAANAGYRAIAFDFRGYGLSEHPAEPEKETMYDLVDEIVGLLDALNITQAFLVGKDFGAIPGYLTAAVHPERVAAVITLGIPFMLPGPSAVQNHLLPKGFYITRWQEPGRAEADFGRFPVKSVIRNIYTLFSRSEVPIAADDQEIMDLFDPCTPLPPWFSEEDLATYASLYEKSGFRYALQVPYRSLNVETGLSDVKVTIPSLLIMGEKDYVIKFPGMEDYIRSGTVKNFVPDLEIVYIPDGSHFVHEQMPEKVNQLIIEFLNKQSI

SEQ ID NO: 161261 - protein, 137 aa, Glycine max
  Clone ID: PAT_MRT3847_116637C.1.pep
FWRSEVPIAADDQEIMDLFDPCTPLPPWFSEEDLATYASLYEKSGFRYALQVPYRSLNVETGLSDVKVTVPALLIMGEKDYVINFPGMEDYIRSGMVKNFVPDLEIIYIPEGSHFVHEQIPEKVNQLIIEFLKKQIV

SEQ ID NO: 161262 - protein, 71 aa, Glycine max
  Clone ID: PAT_MRT3847_116638C.1.pep
KTTQCGLLILLKLKNTFIVANIYFVSYERRLLCSLNTNKKSIHEILKRYIYLSGHLYYDNYYYKTFMKCLV

SEQ ID NO: 161263 - protein, 100 aa, Glycine max
  Clone ID: PAT_MRT3847_116639C.1.pep
MESDQKVQMASRSEVVSSVAGVEFQGAPNLGQGGGGGGLQRQPSMTKSNCLCSPTTHAGSFRCRLHRAPSLQRTKSMESESLQDQASTVHSLIVDACAGA

SEQ ID NO: 161264 - protein, 141 aa, Glycine max
  unsure (1)..(141): unsure at all Xaa locations
  Clone ID: PAT_MRT3847_11663C.1.pep
APSGSDPVAIDFTGMGKGEAWVNGQSIGRYWPTYVASDAGCTDSCNYRGPYXRLKWGRNCGKPSQTLYHVPRSWLKPSGNILVLFEEKGGDPTQISFXTKQTESLCAHVSDSHPPPVDLWNSDTEPRTKRRPVLSLTCPHD

SEQ ID NO: 161265 - protein, 76 aa, Glycine max
  unsure (1)..(76): unsure at all Xaa locations
  Clone ID: PAT_MRT3847_116640C.1.pep
PPRVRTGERGRQNGAQEDDTPQIARAVFNAKRWTKIAELLAERSXVLPLHRWEKXQNPEPGKGPRTQDVETRPYSF

SEQ ID NO: 161266 - protein, 72 aa, Glycine max
  Clone ID: PAT_MRT3847_116641C.1.pep
NGTFESIKGAQGMPRTILSCGSSHCAHPYHLTLTVAGHFSLSPTKCSQHKHGRLLRLSRRKASSVLITRGIF

SEQ ID NO: 161267 - protein, 68 aa, Glycine max
  unsure (1)..(68): unsure at all Xaa locations
  Clone ID: PAT_MRT3847_116642C.1.pep
PTCYSTTWPPAGWRRPRTTPDYELIRQVVPEEGEAEEDDSLLNAEHQSASYKAKLAKTXANKEEHDQS

SEQ ID NO: 161268 - protein, 58 aa, Glycine max
  Clone ID: PAT_MRT3847_116643C.1.pep
AFLVRLGGKGLWIGIQSGAFVQCILLSIITGCINWEKQAIKARKRLFDEKISADNILV

SEQ ID NO: 161269 - protein, 53 aa, Glycine max
  Clone ID: PAT_MRT3847_116644C.1.pep
SIISKSAYYSDCVCNMMVDLDFHETFDALSSQLTSHLINTINKHHPNCKCYQN

SEQ ID NO: 161270 - protein, 160 aa, Glycine max
  unsure (1)..(160): unsure at all Xaa locations
  Clone ID: PAT_MRT3847_116645C.1.pep
MASANDLTETERSTAKSLRHVGRKLLKCSSVHKLLQLLDKLELLLSTLEQEPTKPIQESLVPSMKALISDELLRHTDEDVKISVTSCINEITRITAPDVPYDDEQMKEIFKLTVASFEKLSHISGRGYXKALTILNNVNKVRLCLVMLDLECNDLVIEMF

SEQ ID NO: 161271 - protein, 46 aa, Glycine max
  Clone ID: PAT_MRT3847_116646C.1.pep
VNYYRCIGLRDYYYEMKERNNKMDSPLILYNISIYACLVTEVEKES

SEQ ID NO: 161272 - protein, 44 aa, Glycine max
  Clone ID: PAT_MRT3847_116647C.1.pep
PKHPYFISPIRGGIHKRYTSHKNIHTTLTFLKVLLPTSINSFLA

SEQ ID NO: 161273 - protein, 62 aa, Glycine max
  Clone ID: PAT_MRT3847_116648C.1.pep
LYIDPEKLVDIVAVNRSGFQSFFPFVGRVYINNLFSFYQTIPMPQILKVTFGLLESCSKEWK

SEQ ID NO: 161274 - protein, 109 aa, Glycine max
  Clone ID: PAT_MRT3847_116649C.1.pep
GSERYRRQSFHQFVAGPNLLGEGEPKLTYISYHLSTAPTTHNYLTSTLTQPADLTFYQTTNLEAISLFPRYYRLDCEVFHVGFPCTLRGPHKPPKKLIEPAVQGNPETF

SEQ ID NO: 161275 - protein, 130 aa, Glycine max
  unsure (1)..(130): unsure at all Xaa locations
  Clone ID: PAT_MRT3847_11664C.1.pep
MAYQNSIPFYEKYWYKHNYKRVTDSLLLILLLSLLGYRVISINNYSLFPWFVAFLCESWFTFSWFLTLTTQWSPAVTKTYPHRLLQSVXELPPVDLFVTTAXPELEPPIITVNTVLSLLALIPTPQLLVS

SEQ ID NO: 161276 - protein, 66 aa, Glycine max
  Clone ID: PAT_MRT3847_116650C.1.pep
SSSLPGDPLESTCSLLPAYWSLRQKAFAEWILFTSSGIASGLYHACDVGTWCALNFNVLQVTALFL

SEQ ID NO: 161277 - protein, 84 aa, Glycine max
  Clone ID: PAT_MRT3847_116651C.1.pep
RPSVRICSCKKKKKKKKKKKKKKKKKKKKKKKKKKKKKKKKKKKKKKKKKKKKKIKKKRKKKKMEKTKIKGGGGKTLLGSKINC

SEQ ID NO: 161278 - protein, 123 aa, Glycine max
  unsure (1)..(123): unsure at all Xaa locations
  Clone ID: PAT_MRT3847_116652C.1.pep
MAEETFLFTSESVNEGHPDKLCDQISYAELHACLXLDPDMKGACXTCTTTNMGMVLGEITTQASVDYEKIARYTCRNIGFVXDDDGHDSDNCRGLVSIDQPSADTAQGGHGHLTXKPEEIGAG

SEQ ID NO: 161279 - protein, 128 aa, Glycine max
  unsure (1)..(128): unsure at all Xaa locations
  Clone ID: PAT_MRT3847_116653C.1.pep
FFINIAYCSVIKIXXLLFFLXTIFVAWQFHAYDMFPLRMNTGYFARTPEVKCSTWRLSFEAHNIXXFRPFLNSAFXSTKEYIHCXQYTSYSKTFNQQTYFYAIDLXIHPKDTFVFSIYCTVLSNIPYY

SEQ ID NO: 161280 - protein, 65 aa, Glycine max
  Clone ID: PAT_MRT3847_116654C.1.pep
FEYRSSVNEKEKRLFLLFFFSFPLFSFCIAPFLFFIFSSMYHPPFPIHLFFFSILSPQLKLIFLF

SEQ ID NO: 161281 - protein, 33 aa, Glycine max
  Clone ID: PAT_MRT3847_116655C.1.pep
RTFTFHVRICELESVRAARLIYQCKCLTLVRLK

SEQ ID NO: 161282 - protein, 65 aa, Glycine max
  Clone ID: PAT_MRT3847_116656C.1.pep
ELERRGSQGGVEWESEVAIRERVENLRACFGVLRSGADNIVAQLDDFFDEIVEGRKRLLDFCSHR

SEQ ID NO: 161283 - protein, 100 aa, Glycine max
  Clone ID: PAT_MRT3847_116657C.1.pep
ILTHDSSIRYLQEIYNSNNQKIVNLKEKVAQLEAQCQEPCKDTVQIHDITGKDCQDIANKGAKQSGLYFIKPLKANQQFLVYCEIDGSGNGWTVFQKRLD

SEQ ID NO: 161284 - protein, 295 aa, Glycine max
  Clone ID: PAT_MRT3847_116658C.1.pep
MNIAQVTAWQPGICVKNMSQLHRLQSKPCVIPKSFGPLTCVLLSLRARQSFSSKCWPILQSRKPLHICLAGGKGMMGNDENSPWKSIEKAIGKFKGESSIEDVLRRQIEKGVYYDSGGGGVKPPGGGNSGGGPDGSGESEEESLAGMWEENIQVILATLGFIFLYIYILTGEELTKLARDYIKYLFGGSQSVRLKNAMYQWGQLYESMTAQKEEEDEYWLQKAILDTPTWWHDPADYREALKNYLLSGTDEAIAARNYLELDSDADVRYCLESDDEEDEDEDQYQYKDDYEEKFA

SEQ ID NO: 161285 - protein, 78 aa, Glycine max
  unsure (1)..(78): unsure at all Xaa locations
  Clone ID: PAT_MRT3847_116659C.1.pep
MAFLLNQTSIAXHFRANSQKNEDXASFTSRRFHVKPLAREKSLLADEATLKPFKSYKKSVKKLRKTGNALTIAVAARC

SEQ ID NO: 161286 - protein, 51 aa, Glycine max
  Clone ID: PAT_MRT3847_11665C.1.pep
WLFSYLIVNERVHCFNIIWSTIQTIWALFLPLRFLRLGWIYGRSLFTPINV

SEQ ID NO: 161287 - protein, 82 aa, Glycine max
  Clone ID: PAT_MRT3847_116660C.1.pep
FFPVYDCCKTLVSCIGVGSHYKRSFQLQSRVRKFGYFKAAPPFYFYLWFLFFFLFFFLYFLFFCFFFSLVFFFFFLTDSELR

SEQ ID NO: 161288 - protein, 110 aa, Glycine max
  unsure (1)..(110): unsure at all Xaa locations
  Clone ID: PAT_MRT3847_116661C.1.pep
PEITAKADSLYLGRQGTTILIYTXPILLIATLASLYFHLQLKHPNDNXKARLGLVRFASWQRPLFATDPLEIITITQLSFIMLFDTLLNWTLRFYIHDMLASGVLYARNE

SEQ ID NO: 161289 - protein, 93 aa, Glycine max
  Clone ID: PAT_MRT3847_116662C.1.pep
KGIFYTLPEKGTLAKVYTELPGSTLRESCPLFGGWKNLWCILLKNQKMLGCVSSKKLSHGRHRPSLVLFCLRTTNSFNFRCARALLWGPTLMV

SEQ ID NO: 161290 - protein, 58 aa, Glycine max
  Clone ID: PAT_MRT3847_116663C.1.pep
KKTTTHIPHSIPLIITLSPYTFILPSFPISLPLSLLLSISILILPHAKYKHIYSSNQC

SEQ ID NO: 161291 - protein, 52 aa, Glycine max
  unsure (1)..(52): unsure at all Xaa locations
  Clone ID: PAT_MRT3847_116664C.1.pep
HXYRRKLCTSQNARXXVKRLDSSKEAGRLFLSFXSYFFXFIVXXKDPIPXES

SEQ ID NO: 161292 - protein, 133 aa, Glycine max
  Clone ID: PAT_MRT3847_116665C.1.pep
MAEEESNPGSPHSLKNRLRFSLCFSCCFPHHQRVRPRIVRSASRHNKPRSTDFPFPQLKEKCCNFINRIGGRHRRRHSADFHYDALSYALNFQDYATADERHVDELKSFSARLPASPPPKVSPTSAAIAIASA

SEQ ID NO: 161293 - protein, 158 aa, Glycine max
  Clone ID: PAT_MRT3847_116666C.1.pep
DSDSDSSDSGSDSGSHSRSRSRSPTGTGSGSSSDSESDASSSSKEGQEGSDEEIDIMTSDDEKESKQKTEVSDQRMPLPIPVKSPDGRSMQNVVDEKQDGNESDAVEIEKDLPEEQGTEMALPPATISNRGGKYAEETRPFPLDYQQLQERQNYIEFV

SEQ ID NO: 161294 - protein, 43 aa, Glycine max
  Clone ID: PAT_MRT3847_116667C.1.pep
MLKHHVLVQTLVLFFFPKKPKKARPPSSMHVDPAIYLPSRLLQ

SEQ ID NO: 161295 - protein, 69 aa, Glycine max
  Clone ID: PAT_MRT3847_116668C.1.pep
MVSTHYKQKLSQNLDLLDTEISDHSCKGVQQDVLDEHMETIVNVMDECSRVDFKLKPTCLQSNSFAETE

SEQ ID NO: 161296 - protein, 62 aa, Glycine max
  Clone ID: PAT_MRT3847_116669C.1.pep
FPGIIPQELGPLGIEEGPILWASVFEVVSDLDGSMMFFLHGREKGVNYVYPGSVKVADRSCN

SEQ ID NO: 161297 - protein, 63 aa, Glycine max
  Clone ID: PAT_MRT3847_11666C.1.pep
LSVAQVWVHRCSISSRCRTCRSFRNRSSQGRNTFSGDIKNERELRPSKEEDRDPTSNNVTLEP

SEQ ID NO: 161298 - protein, 346 aa, Glycine max
  unsure (1)..(346): unsure at all Xaa locations
  Clone ID: PAT_MRT3847_116670C.1.pep
MAEKEVRNKQLVLRDYVTGFPKESELYVTSNGTIKLKLEGDSKRVLVKNLFLAADPHLRPLMKKADNLSVLQSFTPGLPLYGYGVAKVVDSRHPDFEEGDFVWGITGWEEYTIISSFEHLFKIQHSDVPLSYYAGILGMPGLTAYSGFFEVCDPKKGEHVFVSAAAGGVGQLVGQXCKLMGCYVVESAGSKEKVDMLKDKFGFDEAFNYKEEHDLEAALKRYFPQGIDIYFDLVGGKMLDAALVNMRVHGRIGVCGVISQLTLKEPEALKNAMCLVYKRVRMQGFNVVDYYHIYPKFLDLLLPQIREGKISCLEDIVEGLENGPHALIRVFSGHAIGKQVVSVANE

SEQ ID NO: 161299 - protein, 210 aa, Glycine max
  Clone ID: PAT_MRT3847_116671C.1.pep
MEPEHHDSSNMLLFLPDDVFAIVSRFMSPRDVCNLCLCCKSLNALVASEKLWLTQCDLLSTVPHKDLVEWRKGVASYKALCRFLMSVKPLIGIWVHQNPELGNVVYVMPGFVSVVGCRIIPQELGPLGIEEGPILWASVFEVVSDLDGSMMFFLHGREKGVNYVYPGSVKVADRSCNVLLLEVEPGGCRNVSALLQKKMFVHHSGVEESS

SEQ ID NO: 161300 - protein, 64 aa, Glycine max
  Clone ID: PAT_MRT3847_116672C.1.pep
GIEPYAKKCTGHTKRLLTKANKQKWCNKPKENGFITKQVISKMAQMTNRLCGPHEKLTPERTHP

SEQ ID NO: 161301 - protein, 80 aa, Glycine max
  unsure (1)..(80): unsure at all Xaa locations
  Clone ID: PAT_MRT3847_116673C.1.pep
MKKGENKGRTRTFPVDPNVPRWVCQNCRNPLCIVGADSYADKFFNDPSRYGMQGSSIHVASSVLSTTKMDNSYXVLPKQK

SEQ ID NO: 161302 - protein, 42 aa, Glycine max
  Clone ID: PAT_MRT3847_116674C.1.pep
YSQRCIRENFLSTPFLEVTVTKFSYWMALSGLYPTPHFVSHI

SEQ ID NO: 161303 - protein, 102 aa, Glycine max
  Clone ID: PAT_MRT3847_116675C.1.pep
HYWCKPGWERKLTRKTHNTHGVKAMGAQNEASQKKPRETKRGLQAKRKIPQREKKRPQKAGPKTAGKKNLGKIGWEKRRPMPRMPWKKKNRSQVNPNKGYPF

SEQ ID NO: 161304 - protein, 81 aa, Glycine max
  Clone ID: PAT_MRT3847_116676C.1.pep
HGWAIWVALSLACWAPPAADTIRDSSASLAAASRYFPIKSKSHTPQLKSAASKSSAISGSPRSPLPRGRCCWRRQRSLSSI

SEQ ID NO: 161305 - protein, 61 aa, Glycine max
  Clone ID: PAT_MRT3847_116677C.1.pep
RFAFHCDWNASSEYMTLDGGIDQVFMRIVALRCGTHVIVMHQAGPYASRTSSSPMSYWNGH

SEQ ID NO: 161306 - protein, 57 aa, Glycine max
  Clone ID: PAT_MRT3847_116678C.1.pep
KSSTHLKHKAQLLCYILIHPNEGPTPSPIMAPSPMPGETDKSIPCVFIPTKCGKHWT

SEQ ID NO: 161307 - protein, 141 aa, Glycine max
  Clone ID: PAT_MRT3847_116679C.1.pep
GLYLRPCPSLRLTYSAAIPDSFAFDGLFFPTHCPPIIVLRCLSLFATHATIPTTPLLHDMGCTTTGLLAALFHVLLTERCLRLTTSPCFLSLSSPPCLLFFGLCNYLARFTAVYALLPPNRRPGSGPVFSSQFLNSTYPPP

SEQ ID NO: 161308 - protein, 70 aa, Glycine max
  Clone ID: PAT_MRT3847_11667C.1.pep
SCEFQQTLTNRNCVASIPNFTIRSQSANHQLNEPVKPDARNQCKITQHNNFLRQKSHISGHQHSKEQLRN

SEQ ID NO: 161309 - protein, 73 aa, Glycine max
  Clone ID: PAT_MRT3847_116680C.1.pep
SIQKMEAHVVPSPWPSKDLVHLLGLSPGPSFEIAKGASMCISDLKEVSTEGWRTIQVGEALHVDFPFLACQKI

SEQ ID NO: 161310 - protein, 46 aa, Glycine max
  Clone ID: PAT_MRT3847_116681C.1.pep
DAWVVLLIIKCRCDSMAYLGNRLHWNVRLDGKHMCIYYLAIVGMPF

SEQ ID NO: 161311 - protein, 86 aa, Glycine max
  unsure (1)..(86): unsure at all Xaa locations
  Clone ID: PAT_MRT3847_116682C.1.pep
VLSAPSSPCSTSTTNGTTTSPTTTTTTTTTTTXPSTPTTSYSTLPPPWTPPPPAPPTFSLPIPNPPFLSTPSIWAFLTLKLLLLPL

SEQ ID NO: 161312 - protein, 58 aa, Glycine max
  Clone ID: PAT_MRT3847_116683C.1.pep
YPCLDSRRKCVPFPVIAALNKTMKQKKNDKMYYASFYSTFLFFFYKYDPIFGGHPRFF

SEQ ID NO: 161313 - protein, 83 aa, Glycine max
  Clone ID: PAT_MRT3847_116684C.1.pep
EGSAVSYGTCSQINSLGKGLYTPWEQLFLIFSLILQHLISKHTLLETEHNYISKDIVLADFFSNKQCNSSHLNTSLSASTPKI

SEQ ID NO: 161314 - protein, 58 aa, Glycine max
  Clone ID: PAT_MRT3847_116685C.1.pep
SIYFYISLYLFLLFYFYLIFILFFLSFRFLSYIFLILSFYFPLSFYFFYLIFYFYFSL

SEQ ID NO: 161315 - protein, 62 aa, Glycine max
  unsure (1)..(62): unsure at all Xaa locations
  Clone ID: PAT_MRT3847_116686C.1.pep
TSSFMALSSPSLAGDAVNLGPSVPXLGRVIIRNTVAYQDSSRIPXYCPDRFNYLGPFSGELP

SEQ ID NO: 161316 - protein, 94 aa, Glycine max
  Clone ID: PAT_MRT3847_116687C.1.pep
CGSLDSYNESFWTQLNLDDISYNVPCEIVSKDFNGSFQSTNATQILDSCAMSPTTSESNIVLDNDFVDFLDAYEDAMVDNLWTESYVANMFHIP

SEQ ID NO: 161317 - protein, 70 aa, Glycine max
  Clone ID: PAT_MRT3847_116688C.1.pep
SRQGFFPPNSSASTGVVAGNSNMLRFRTDDAPGLKISPTVVLVMSLCFIGFVTALHVFGKLYRSKSGGTV

SEQ ID NO: 161318 - protein, 54 aa, Glycine max
  Clone ID: PAT_MRT3847_116689C.1.pep
FKFCFIIILCKLEANVFFPKDQIGGHPTTCALIFPMEMRLYHPQEKEIEHRTSM

SEQ ID NO: 161319 - protein, 81 aa, Glycine max
  Clone ID: PAT_MRT3847_11668C.1.pep
EGWCQLLRLTLKLWLWLLLGKNKMFFVVVEVQAEDPDPNPKKGKEKIKSKTERRGRGWIQISISEEKISRERAATEIGVRA

SEQ ID NO: 161320 - protein, 673 aa, Glycine max
  unsure (1)..(673): unsure at all Xaa locations
  Clone ID: PAT_MRT3847_116690C.1.pep
MGYVHDGDLDLYTRNMELKMSKKVVPNCYPTNVKKLLSTGILDGAVVKYIYNPGKVELQGIIDGGGYLCGCSMCNYSRVLSAYEFEQHAGAKTRHPNNHIFLENGRPIYSIIQEIKTAXRDEVIKNVAGSSVNEESFQAWKESLLQSNGKVQAHKSYSTKLVGMPHTNISQSVESTSHLSSLHVPSHYEQHMYMNQTTDEWKRVVKKPSSYTSNSGVLQKRSADGCTKRRDNDLHRLLFMPNGLLIVSEFSYYVKXCKLLGGYKQGNGIVCGCCDIEISPSQFEAHAGMAARRQPYRHIYTSNGLTLHDIALSLANGQNLTTGDSDDMCAVCGDGGDLILCNGCPRAFHAACLGLQCVPDSGWQCLNCIDNAGNGRESSIVRPIMIRLTRVDKTPEVEMGGCVVCREHDFSVAKFDERTVIICDQCEKEYHVGCLRDMGLCELEELPKDKWFCCDDCNRIYAALQNSVSAGAEIIPASFSELIIRKHEDKGLCTYGAMNDIQWRILSGKSRYPEHLPLLSRAAAIFRECFDPIVAISGRDLIPVMVYGRNISGQEFGGMYCIVLIVNYVVVSAGLLRIFGRNVAELPLVATSRAHQGKGYFQVLFSCIERLLSSLNVEKLVLPAAGDAESIWTKKLGFRKMSEDQLSKHLREVQLTLFNKTSMLEKTVQLAIE

SEQ ID NO: 161321 - protein, 98 aa, Glycine max
  Clone ID: PAT_MRT3847_116691C.1.pep
TYDLESAAFAISRRFLPIGPLIASDSNKSSLWQGDTTFLDWLDQQPPQSVIYVAFGSLAVIDHNQLKELALGLNFLDKPFLWVVRPSNDNEANNACSD

SEQ ID NO: 161322 - protein, 54 aa, Glycine max
  Clone ID: PAT_MRT3847_116692C.1.pep
LEFTKVLEAIKANFHGKYFEYKKKWGGGIMGSQSPAETRAKEKLLAKETAQKMT

SEQ ID NO: 161323 - protein, 70 aa, Glycine max
  Clone ID: PAT_MRT3847_116693C.1.pep
CSGMNVIRQLGDHRIRSLCQWFWDGQGLSRSCFPVKVYHKRVIKRKMYVWSVSATCAGAYEWLGTSRFLF

SEQ ID NO: 161324 - protein, 85 aa, Glycine max
  Clone ID: PAT_MRT3847_116694C.1.pep
YLIFILLSLPFSSKIMLMGEEKKQKTKRHCVEISFPFVRRRNLAKIFTIIIYIWKFREKLPGYTYGGDHNWTEKCFLKLTSLKNA

SEQ ID NO: 161325 - protein, 496 aa, Glycine max
  Clone ID: PAT_MRT3847_116695C.1.pep
MGKESSTCVLLSLLILSLFVAEIYGNRQVQALNKLHKSTKFRGNSQIDRSEFEVEELAYDGIVHSQEGLKEKDRIESLPGQPPVSFSHYGGYVTVDKEAGRAFYYYFVEAQRSKQTLPLLLWLNGGPGCSSLGYGAMQELGPFRVNSDGKTLHRNIFSWNKVANVLFLESPAGVGFSYSNKSKDYDNNGDKKTAADNYLFLVNWLERYPEYKDRDFYIAGESYAGHYVPQLAHTILYHNKKANKKIINLKGILIGNAVINEETDSDGLYDYLASHAIISDKAAYLNKACQSSSSKIQESVCDAAGDEVGDDIEYIDLYNIYAPLCKNANLTSLPKRNSIVTDPCSEYYVYAYLNRKDVQEALHANVTNLKHDWEPCSDVITKWVDQASTVLPLLHEFLNNSLRVWIFSGDTDGRVPITSTKYSVKKMNLPIKTAWHPWFSYGEVGGYVEIYKGGLRLATVREAGHQVPSYQPARALTLIKYFLDGTPLPGPPKRKD

SEQ ID NO: 161326 - protein, 47 aa, Glycine max
  unsure (1)..(47): unsure at all Xaa locations
  Clone ID: PAT_MRT3847_116696C.1.pep
LSTTAIEDYASMTSSLIEMGATNQDVHAKAFVKDLEKXFSSIKELDT

SEQ ID NO: 161327 - protein, 46 aa, Glycine max
  Clone ID: PAT_MRT3847_116697C.1.pep
HVAVSTCTSLSSTVSLLISLRGISSDAIVLIVSLSLSRTQRHCIAI

SEQ ID NO: 161328 - protein, 41 aa, Glycine max
  Clone ID: PAT_MRT3847_116698C.1.pep
LKWVLQIRMFMLRHLSKIWKKVFSSIKASLVTHIYSLVNHV

SEQ ID NO: 161329 - protein, 84 aa, Glycine max
  Clone ID: PAT_MRT3847_116699C.1.pep
LVNIFPILVCCFAENNMSSIGARSAEIYVMEKRQKEKLKRMEEERVRRGEVSTEERKEISSSVGKNKVHPGSEQGVTSDNVFRA

SEQ ID NO: 161330 - protein, 74 aa, Glycine max
  unsure (1)..(74): unsure at all Xaa locations
  Clone ID: PAT_MRT3847_11669C.1.pep
RGTKEKELEEQCDIELYMSNHSLFSYYXKTDCTAVLKDVCDVIQGFINISILSKRPLIIQLEFFVPIIDASYTN

SEQ ID NO: 161331 - protein, 133 aa, Glycine max
  Clone ID: PAT_MRT3847_1166C.1.pep
HRALFSGRGSEKVESWKKELSTQSSTWDVSETSKPASKTRSEEAKISAWENLQKAKAEAAIRKLEMKLEKRRASSMDKIMNKLRLAQKKAQEMRSSVPHNQTDRVVRTSHKASSFLRTSQMRSLSGCFTCHVF

SEQ ID NO: 161332 - protein, 66 aa, Glycine max
  Clone ID: PAT_MRT3847_116700C.1.pep
ATRTVTYTVTTTVRVCETMVSTLLTRKNPITATRFHACLNSLYGLKGGPCGAGTRMAYYKVKVIDR

SEQ ID NO: 161333 - protein, 190 aa, Glycine max
  Clone ID: PAT_MRT3847_116701C.1.pep
MEGATICSTTDSIEEGFDLTQISLRPISLDDLDDLMLWTTDEKVARYCTWEPYTSKEDGINFIQNIAGKSLWFRAICLNNRAIGCIDFFSCEGQRRNRHKSVELGYALASIYWGKGIATHAVKQVIKVAFSEFPHLERLQALVDVENVASQKVLEKAGFQREGVLRKYVVIKGKSRDMVMFSVLSNDPLS

SEQ ID NO: 161334 - protein, 390 aa, Glycine max
  Clone ID: PAT_MRT3847_116702C.1.pep
LELQKIAPLEALRLLEDDRRGKKPEEKTLSSFGHTARYRRYTIEEMEEATNMFSESLKIGEGGYGPVYRCELDCTQVAIKVLKPDAAQGREQFQQEVEVLSCIRHPNMVLLLGACPEYGCLVYEYMANGSLDDCLFPRGKSRPPLPWQLRFQIAAEIATGLLFLHQTKPEPLVHRDLKPGNILLDRNYVSKISDVGLARLVPPSVADTVTQYRMTSTAGTFCYIDPEYQQTGMLGIKSDIYSLGIMLLQLVTAKPPMGLTHHVGRSIEKGTFAEMLDPAIPDWPLEQTLHFAKLSLGCAEMRRKDRPDLGKVVLPELNKLRAFAEQCMSPMMMFALRSTGGAGGGAGGGAGYVPRNSNSSGLSSSTQDMSEVSGFSGYESRSSTSSLGRI

SEQ ID NO: 161335 - protein, 127 aa, Glycine max
  Clone ID: PAT_MRT3847_116703C.1.pep
PRGPPEKPPVSKRIFLVGGVFPFCFSPIKWSVFGKLPFCFKTPLTGFWGGGVSFSPGPRGRGPVFPPPKPVVGEIWGTKFPLSLFWIKKLGFFKVFFFFFFPIFESPCCPPPFPIIFFFPSIYSMPL

SEQ ID NO: 161336 - protein, 70 aa, Glycine max
  Clone ID: PAT_MRT3847_116704C.1.pep
PSGRLDLTPHTCLNLLLTESISNEVIAFVLIHAMYDLYVIHWKKGCSRCKNYCVCFFLFNLGSINIKIKL

SEQ ID NO: 161337 - protein, 134 aa, Glycine max
  unsure (1)..(134): unsure at all Xaa locations
  Clone ID: PAT_MRT3847_116705C.1.pep
PEFYMGRSVHFESAVIPFMGGVAPSXTYRGWERGANLPAXXSLXGFXGVPVQRAXQTFWCLXEGYVXXXGDLTLPPXSLSALSHREREITNAXXGAXTQPTXAEGAYEGSLRCXTNMCRPGIEVTQAELXPHLN

SEQ ID NO: 161338 - protein, 99 aa, Glycine max
  Clone ID: PAT_MRT3847_116706C.1.pep
YSIQRIHLCILLTVGHHLSEEIFLQRKRKKKRKMLQLFFTVAFSAVPLTLYVPPIRSLNLFVETMEYVVRESRTHRNRVYPRLRIAWSRMLDIMLCNTR

SEQ ID NO: 161339 - protein, 86 aa, Glycine max
  unsure (1)..(86): unsure at all Xaa locations
  Clone ID: PAT_MRT3847_116707C.1.pep
GILKCQSLVSIDVSSNQLNGTLPEDISGLKSIVNLNISGNSFQGSIVDLFQGXLEVLDLSRNQFQGHIPQVVEVSTSKTGKHGHAK

SEQ ID NO: 161340 - protein, 62 aa, Glycine max
  Clone ID: PAT_MRT3847_116708C.1.pep
MPTGLPKANSSVAPDDQRWLWTQITADAHRDTELEPTLAIYLYSAILSHSSLIRSLSFHLGN

SEQ ID NO: 161341 - protein, 128 aa, Glycine max
  unsure (1)..(128): unsure at all Xaa locations
  Clone ID: PAT_MRT3847_116709C.1.pep
ADGLGPYTVDADGRILKWDGEETCFTIFAATKSNMLKCSLPFEPKLEHIWVMPLGLGSDKKSGYRTIADSYLRLIIMXVYSEIDSPKRYLHVLGQPSSFTDSIDIIDHSHAIYCTASTSIFQTMHFML

SEQ ID NO: 161342 - protein, 77 aa, Glycine max
  Clone ID: PAT_MRT3847_11670C.1.pep
YSACILGAFGLEDELQQGVLECIECLRIAGLKVWDLTCDDHDTAIIMDFSSDLLTSNMTHIIIYSSSRESCKESLQD

SEQ ID NO: 161343 - protein, 29 aa, Glycine max
  Clone ID: PAT_MRT3847_116710C.1.pep
NWKVSCHFLQFLFQVLLPKQILVTFKYQS

SEQ ID NO: 161344 - protein, 62 aa, Glycine max
  Clone ID: PAT_MRT3847_116711C.1.pep
ALSHSFLSIWQHLQTLFSFSLSLTLQQRGYSLICHSMASCWCCCCVVKSSVAVLALSVVVFL

SEQ ID NO: 161345 - protein, 286 aa, Glycine max
  Clone ID: PAT_MRT3847_116712C.1.pep
MSQQQRSMPAPFLTKSYLLVDDPATDDVVSWSEGGNTFVVWKHADFANDLLPKYFKHNNFSSFVRQLNTYGFRKTVPDKWEFANEYFKRGQKDLLAEIKRRKTVSSVSGKSGSGGNISASHSGGDDMGSTSTGSMEAATATVTTTQCADLSGENEKLKKDNEKLSDELARTKKHCDDLVAFLRDSLNVGPDVIDCIIRQGTCGSSNDDAVRFDATENLNNHNHDDDENAVGECEPEQPKGDNGESLKLFGVWLKGQNGKENSIGSCRKRGRQDPIAATAKELKTLV

SEQ ID NO: 161346 - protein, 116 aa, Glycine max
  Clone ID: PAT_MRT3847_116713C.1.pep
VIKKETRLLARDCVGSQRVEKRRETRKKERKDNQEMMSTTNVNHSLFEEQDQIPTQMGLFNIIPFPPNQTYPPLGCQTVTLKSISAIAPSLSSAANFSETLLSTAVNQRPREGDLT

SEQ ID NO: 161347 - protein, 77 aa, Glycine max
  Clone ID: PAT_MRT3847_116714C.1.pep
GFEQIRPCKEAVGKSTFGEDVSYSNKVRHVKGISLNNLGWVAAPPPANMRTQYKKTLLLESRPPTFWGPDGLSQNNK

SEQ ID NO: 161348 - protein, 60 aa, Glycine max
  Clone ID: PAT_MRT3847_116715C.1.pep
KVKLERWFTPLVFPTLRSPPMLFTKEIFFIPLIFKGLSKGANCLEKKNNGQYIEARMGII

SEQ ID NO: 161349 - protein, 55 aa, Glycine max
  Clone ID: PAT_MRT3847_116716C.1.pep
IYMFYHVYLHFDEVEQMHTFGQILVIVVPLVLSVMNLVWFAKIIKGLRKTLAKRQ

SEQ ID NO: 161350 - protein, 69 aa, Glycine max
  Clone ID: PAT_MRT3847_116717C.1.pep
GTLRGRIFKVPCSSRVLRAPSRLPHSCLPTSASCRPNCLRTSIALTSSGADLLSLSHSLIISSRSSRTP

SEQ ID NO: 161351 - protein, 66 aa, Glycine max
  Clone ID: PAT_MRT3847_116718C.1.pep
PDAEPIPYVDRLLVAAATAEGLKWAMGASAYTMFSEGRNDLSDKGSTLISPVEMRKCQFKVGTFFN

SEQ ID NO: 161352 - protein, 42 aa, Glycine max
  Clone ID: PAT_MRT3847_116719C.1.pep
ALMILIPKIVMVRPTEGAGIVGVLFLVFGLAAGSVIAWVWVI

SEQ ID NO: 161353 - protein, 148 aa, Glycine max
  Clone ID: PAT_MRT3847_11671C.1.pep
RLEQVPYGDDSHIFKSVIPGSEIPGWLNNEHEGNCVSLDASPVMHDHNWIGVAFCAIFVVPHETISAMGVSGPDRSHLGPDWRYYGTYCGIPVDFYGDLDVDLELVLDKSDHMWLFYVDRKEFIDEFHLKNYYIGRLILKCDDKGRVL

SEQ ID NO: 161354 - protein, 73 aa, Glycine max
  Clone ID: PAT_MRT3847_116720C.1.pep
MSYYTTLSVAYYCKLIHYALQNRRLNNNSLTGGIPISLTNVSSLQVLDLSNNHLKGEIPVNGSFSLFTPIKLV

SEQ ID NO: 161355 - protein, 98 aa, Glycine max
  Clone ID: PAT_MRT3847_116721C.1.pep
MAWRGHLSKNIKELRFLMCQSSPASSPARAFVERNYKELKTLNPKLPILIRECSGIEPQLWARYDLGVEKGIKLEGLSEAQIFKALEDLSKAGQSLKA

SEQ ID NO: 161356 - protein, 98 aa, Glycine max
  Clone ID: PAT_MRT3847_116722C.1.pep
MAWRGNLLKNIKELRFLMCQSSPASSPTRAFVERNYKELKTLNPKLPILIRECSGVEPQLWARYDLGVEKGIKLEGLSEAQIFKALEDLVKAGQSMKA

SEQ ID NO: 161357 - protein, 68 aa, Glycine max
  unsure (1)..(68): unsure at all Xaa locations
  Clone ID: PAT_MRT3847_116723C.1.pep
YQTYIISTSTLQTLGSTLNEEELADIKDQFDAIDVDKNGSISLEEMRQILCXALAKDLPWKLKESRVL

SEQ ID NO: 161358 - protein, 54 aa, Glycine max
  Clone ID: PAT_MRT3847_116724C.1.pep
PLLICYYLQIFHMDIFYNITSRVSARILYQDVYLQAYFPELLCPQESLDLEGYM

SEQ ID NO: 161359 - protein, 69 aa, Glycine max
  Clone ID: PAT_MRT3847_116725C.1.pep
RSGLQLYKASSQVDQYPTVSKSNHQDRIQHPESPSATKCSLRISSIESEHLLCHYMLLEPSVVYTKIVL

SEQ ID NO: 161360 - protein, 84 aa, Glycine max
  Clone ID: PAT_MRT3847_116726C.1.pep
PVLNISPQFPYPKKLKPLQGVLCTESPIVVCSDAWCHGRARQTKVYEGFSFTCCAIGTHSVQKKNVEFHPLPVKALAIIGCTVE

SEQ ID NO: 161361 - protein, 99 aa, Glycine max
  Clone ID: PAT_MRT3847_116727C.1.pep
EREPLLIFCTNLFSLFTHHAPPAPYHHYPYQHSSHHHHHTLPLLIEFPPQKPIINTATPDLDITVSINFCSLCSYLGTAETMTNLSEIALPGTESFLAD

SEQ ID NO: 161362 - protein, 2132 aa, Glycine max
  unsure (1)..(2132): unsure at all Xaa locations
  Clone ID: PAT_MRT3847_116728C.1.pep
MLLNYVLFFLEIPGFGPQMTIYLNGLVMERNGDGKAQDSEPLPPHSVLKMGLRERSNSSSMEDPDGTLASVAQCIEQLRQSSSSMQEKEYSLKQLLELIDMRENAFSAVGSHSQAVPVLVSLLRSGSLNVKIQAATVLGSLCKENELRVKVLLGGCIPPLLGLLKSSSAEGQVAAAKTIFAVSQGGAKDHVGSKIFSTEGVVPVLWEQLQKGLKTGNVVDNLLTGALKNLSSSTERFWNATIQAGGVDILIKLLTTGQSSTLANVCFLLACMMMEDASVCSKLLTAETTKQLLKLLGPGNDAPVRAEAAGALKSLSAQCKDARKEIANSNGIPALINATIAPSKEFMQGEYAQALQENAMCALANISGGLSYVISSLGQSLESCSSPTQAADTLGALASALMIYDDKAESTWASDPLVVEQTLLEQFKPHLPFLVQERTIEALASLYSNPILSIKLTNSDAKRLLVGLITMAANEVQEELLKSLLTLCNTECSLWRALQGREGVQLLISLLGLSSEQQQECAVALLCLLSNENDESKWAITAAGGIPPLVXFLKSGSEATQEAALDALFLLRQAWQNFYCNHSEDIRACVESAEVVPALLWLLKKSVGNPSVFCKLTLGNTPPRQTKVVSTGPNPEWDESFTWSFESPPKGQKLHISCKNKSKMGKSSFGKVTIQIDRVVMLGAVSGEYTLLPESKSGPSRNLEIEFQWSNXSDIPVSVFTVTALXNWNTVEKKFLSKFCIIYLASVHSHSYLFFVAELATCAVANLILDSEIAEKAVAEEVILAATRVLREGTISGKTHAAAAIARLLHSKRQVDYSVTDCVNRAGTVLALVSFLDFAIDEHSSTSEALEALAMLSRSDLTSAHSKPAWAVLAEFPKSIIPIVLSIVDSEPTLQDKTIEILSRLCKDQPVVLGDTIVSAPGCISSIAKRIISSTNVKAKIGGAAVLICAAKVNHQKLVEDLNLSNLCANLVQSLVDMLIFSQATLDNQGDDSREVISICRHTKEANDCKSSTGTALISSANLAIWLLSVLACHDEKSKIAIMEAGAIEVLTDRIADCFSQYSQIDYKEDSSMWICALLLAVLFQDRDIIRAHATMKSIPALANLLKSEESANRYFAAQSIASLVCNGSRGTLLSVANSGAAGGLISLLGCADSDIQDLLELSDEFSLVHYPDQVALERLFRVDDIRVGATSRKAIPALVDLLKPIPERPGAPFLALGLLTQLSIDCPSNKIVMVEAGALEALSKYLSLGPQDATEEAATDLLGILFSSAEIRRHESAFGAVTQLVAVLRLGGRAARYRAAKALESLFSADHIRNAETARQAVQPLVEILNTGLEREQHAAIAALVRLLSENPSKALAVADVEMNAVDVLCRILSSDCSMDLKGDAAELCSVLFGNTRIRSTMAAAHCVEPLVSLLVSEFSPAHHSVVRALDRLVDDEQLAELVAAHGAVIPLVGLLYGRNHVLHEAISRALVKLGKDRPACKMEMVKAGVIESILDILHEAPDYLCAAFAELLRILTNNASIAKGPSAAKVVEPLFMLLTREEFGPDGQHSALQVLVNILEHPQCRADYTLTCHQVIEPLIPLLDSPISAVQQLAAELLSHLLLEEHLQKDPVTQQQRAVKALVSIALIWPNEIAKEGGVIEISKVILQSDPSIPHALWESAASVLASILQFSSEYYLEVPVAVLVRLLRSGSESTVVGALNALFVLENDDGTSAEAMAESGAIEALLELLRSHQCEETAARLLEVLLNNVKIRETKVTKSAIVPLSQYLLDPQTQAQQARLLATLALGDLFQNEALARTSDAVSACRALVNVLEEQPTEEMKVVAICALQNLVMYSRSNKRAVAEAGGVQVILDLIGSSDPETSVQAAMFIKLLFSNHTIQEYASSETVRAITAAIEKDLWATGSVNDEYLKALNSLFSNFPRLRATEPATLSIPHLVTSLKTGSEATQEAALDALFLLRQAWSACPAEVSRAQSIAAADAIPLLQYLIQSGPPRFQEKAEFLLQCLPGTLVVIIKRGNNMKQSVGNPSVYCKLTLGNTPPRQTQVVSTGPNPEWGESFSWTFESPPKGQKLHISCKNKSKVGKSKFGKVTIQIDRVVMLGSVAGEYALLPQSKSGPPRNLEIEFQWSNK

SEQ ID NO: 161363 - protein, 62 aa, Glycine max
  Clone ID: PAT_MRT3847_116729C.1.pep
RYILEWPPNFFFFCFLHFFSSFFIFFNFFVHVTLKGRKLIYNLKPKRYHIKVKLREHLKKEI

SEQ ID NO: 161364 - protein, 70 aa, Glycine max
  Clone ID: PAT_MRT3847_11672C.1.pep
LLCSESCPLELVSPAPFRVPASSPFGPLRFLVCFGIPSGGGLQSVPWLRIASPVLKVPPSRCSSVPWARK

SEQ ID NO: 161365 - protein, 2221 aa, Glycine max
  Clone ID: PAT_MRT3847_116730C.1.pep
MEDPDGTLASVAQCIEQLRQSSSSMQEKEYSLKQLLELIDMRENAFSAVGSHSQAVPVLVSLLRSGSLNVKIQAATVLGSLCKENELRVKVLLGGCIPPLLGLLKSSSAEGQVAAAKTIFAVSQGGAKDHVGSKIFSTEGVVPVLWEQLQKGLKTGNVVDNLLTGALKNLSSSTERFWNATIQAGGVDILIKLLTTGQSSTLANVCFLLACMMMEDASVCSKLLTAETTKQLLKLLGPGNDAPVRAEAAGALKSLSAQCKDARKEIANSNGIPALINATIAPSKEFMQGEYAQALQENAMCALANISGGLSYVISSLGQSLESCSSPTQAADTLGALASALMIYDDKAESTWASDPLVVEQTLLEQFKPHLPFLVQERTIEALASLYSNPILSIKLTNSDAKRLLVGLITMAANEVQEELLKSLLTLCNTECSLWRALQGREGVQLLISLLGLSSEQQQECAVALLCLLSNENDESKWAITAAGGIPPLVQILESGSAKAKEDSATILRNLCDHSEDIRACVESAEVVPALLWLLKNGSPNGKEIAAKTLNHLIHKSDTATISQLTALLTSDLPESKVYVLDALRSMLSVVALTDLLREGSAASDAIVTMIKLLSSTKEETQAKSASALAGIFETRKDVRESSIAVKTLWSAMKLLNVESESILMESSRCLAAIFLSIKENKDMAAIARDALPSLAALANSSVLEVAELATCAVANLILDSEIAEKAVAEEVILAATRVLREGTISGKTHAAAAIARLLHSKRQVDYSVTDCVNRAGTVLALVSFLDFAIDEHSSTSEALEALAMLSRSDLTSAHSKPAWAVLAEFPKSIIPIVLSIADSTPVLQDKAIEILSRLCKDQPFVLGDTVVTASGCISSIAKRIINSTSKNVKVKIGGAAVLICAAKVNHQKLVEDLNLSNLCANLVQSLVDMLIFSQATLDNQGDDSREVISICRHTKEANDCKSSTGTALISSANLAIWLLSVLACHDEKSKIAIMEAGAIEVLTDRIADCFSQYSQIDYKEDSSMWICALLLAVLFQDRDIIRAHATMKSIPALANLLKSEESANRYFAAQSIASLVCNGSRGTLLSVANSGAAGGLISLLGCADSDIQDLLELSDEFSLVHYPDQVALERLFRVDDIRVGATSRKAIPALVDLLKPIPERPGAPFLALGLLTQLSIDCPSNKILMVEAGALEALSKYLSLGPQDATEEAATDLLGILFSSAEIRRHESAFGAVTQLVAVLRLGGRAARYRAAKALESLFSADHIRNAETARQAVQPLVEILNTGLEREQHAAIAALVRLLSENPSKALAVADVEMNAVDVLCRILSSDCSMDLKGDAAELCSVLFGNTRIRSTMAAAHCVEPLVSLLVSEFSPAHHSVVRALDRLVDDEQLAELVAAHGAVIPLVGLLYGRNHVLHEAISRALVKLGKDRPACKMEMVKAGVIESILDILHEAPDYLCAAFAELLRILTNNASIAKGPSAAKVVEPLFMLLTREEFGPDGQHSALQVLVNILEHPQCRADYTLTCHQVIEPLIPLLDSPISAVQQLAAELLSHLLLEEHLQKDPVTQQVIGPLIRVLGSGIHILQQRAVKALVSIALIWPNEIAKEGGVIEISKVILQSDPSIPHALWESAASVLASILQFSSEYYLEVPVAVLVRLLRSGLESTVVGALNALLVLESDDGTSAEAMAESGAIEALLELLRSHQCEETAARLLEVLLNNVKIRETKVTKSAILPLSHYLLDPQTQAQQARLLATLALGDLFQNEGLARTSDAVSACRALVNVLEDQPTEEMKVVAICALQNLVMYSRSNKRAVAEAGGVQVILDLIGSSDPETSVQAAMFIKLLFSNHTIQEYASSETVRAITAAIEKDLWATGSVNDEYLKALNSLFSNFPRLRATEPATLSIPHLVTSLKTGSEATQEAALNALFLLRQAWSACPAEVSRAQSIAAADAIPLLQYLIQSGPPRFQEKAEFLLQCLPGTLVVIIKRGNNMKQSVGNPSVFCKLTLGNTPPRQTKVVSTGPNPEWDESFTWSFESPPKGQKLHISCKNKSKMGKSSFGKVTIQIDRVVMLGAVSGEYTLLPEKDKSYRDIAPHYVYSTTPTPRLPPTVRPSFRATALGLFVHRRRSAKVSAPPRSLMLRISVPPRRCARSASSSLAVVRLRDCVLSQVSAPPFSLALRISILSQSLCATALRRRCCRNLSVTLLRLHGTETITVVNVSET

SEQ ID NO: 161366 - protein, 2151 aa, Glycine max
  Clone ID: PAT_MRT3847_116731C.1.pep
MATSLAWRLAANNGTTLAANDLERNGDGRTQDSEPPTPHSVLKMGLRERNSSMEDPDGTLASVAQCIEQLRQSSSSVQEKEYSLRQLLELIDLRENAFSAVGSHSQAVPVLVSLLRSGSLNVKIQAATVLGSLCKENELRVKVLLGGCIPPLLGLLKSSSTEGQIAAAKTIYAVSQGGVKDHVGSKIFSTEGVVPVLWEQLKTGLKAGNVVEGLLTGALKNLSSNTEGFWNATIRAGAVDILVKLLATGQPSSLANVCNLLASVMVEDASVCSKVLTAEVTKQLLKLLGPGNDDSVRAEAAGALNSLSAQCKEARREIANANGIPALINATIAPSKEYMQGECAQALQENAMCALANISGGLSFVISSLGQSLESCTSPTQIADTLGALASALMIYDNKAESSRASDPLVVEQTLLKQFKPRLPFLVQERTIEALASLYGNSILSNKLANSDAKHLLVGLITMAANEVQDELIKALLTLCKSEGSLWRALQGREGVQLLISLLGLSSEQQQECAVALLCLLSYENDESKWAITAAGGIPPLVQILETGSAKAKEDSATILKNLCNHSEDIRACVESADAVPALLWLLKNGSPNGKDIAAKTLNHLIHKSDTTTISQLTALLTSDLPDSKVYVLDALRSMLSVAPLSEILREGSASSDAFDTMIILLSSTKEETQEKSASALAGIFETRKDVRESSIAVKTLLSAMKLLNAESESILIESSHCLAAIFLSIKENRDVAAVARDTLSTLVALANSSVLEVAEMATCALANLILDSEIAEKAIAEEVILPATRILCEGTISGKTHAAAAIARLLHSRDVDYAVTDCVNRAGTVLALVSFLDSAVNGSVATSEALEALAILSRSEETSANIKSACAVLAEFPKSISPIVLCIVDSEPTLQDKTIEILSRLCKDQPVVLGDTIVSAPGCISSIAKRIISSTDVKAKIGGAALLICTAKANHQRLVEDLHSSNLCADLIRSLVDMLTSAQPSLGYLDDDNKEFISICRYTREEANGCESNTSTSIICGADLAIWLLSILACHDEKNKIAIMEAGAIDVLIDRISNCFSQYSQIEYKEDSSMWIHALLLAILFQNRDIIRAHPTIKSVPALTSLLKSEESANKYFAAQSIASLVCNGSRGTLLSVANSGAAGGLISLLGCADTDIQDLLELSEEFSLVRYPDQVALERLFRVDDIRVGATSRKAIPALVDLLKPIPDRPGAPFLALGLLTQLGKDCPSNMSVMVESGALEALTKYLSLSPQDATEEAATDLLGILFSSAEIRKHESAYGAVAQLVAVLRLGGRGARYSAAKALESLFSADHIRNAEIARQAVQPLVEILSTGSEKEQHAAIAALVGLLSENPSRALAVADVEMNAVEVLCRIISSNCSIDLKGDAAELCCALFGNTRIRSTAAAACCVEPLVSLLVTQFSPAQLSVVRALDRLVDDEQLAELVAAHGAVVPLVGLLSGRNYILHEAISRALVKLGKDRPACKVEMVKAGVIESVLDILHEAPDYLCAAFAELLRILTNNASIAKGPSAAKVVEPLFMLLTREEFGPDGQHSALQVLVNILEHPQCRADYSLTSHQVIEPLIPLLDSPISAVQQLAAELLSHLLVEERLQKDPVTQQAIGPLIRVLGSGIHILQQRAVKALVSIALTWPNEIAKEGGVIEISKVILQADPSLPHALWESAASVLSSILQFSSEFYLEVPIAVLVRLLRSGSDSTVVGALNALLVLENDDGTSAEAMAESGAIEALLELLRSHQCEETAARLLEVLLNNVKIRETKVTKSAIVPLSQYLLDPQTQAQQARLLATLALGDLFQNEALARTSDAVSACRALVNVLEEQPTEEMKVVAICALQNLVMYSRSNRRAVAEAGGVQVVLDLIGSSDPETSIQAAMFVKLLFSNNTIQEYASSETVRAITAAIEKDLWASGTVNDEYLKALNSLFTNFPRLRATEPATLSIPHLVTALKTGSEACQEAALDALFLLRQAWSACPAEVSRAQSIAAADAIPLLQYLIQSGPPRFQEKAEFLLQCLPGTLVVIIKRGNNMKQSVGNPSVYCKLTLGNTPPRQTQVVSTGPNPEWDESFTWSFESPPKGQKLHISCKNKSKMGKSSFGKVTIQIDRVVMLGAVSGEYTLLPESKSGPSRNLEIEFQWSNK

SEQ ID NO: 161367 - protein, 80 aa, Glycine max
  Clone ID: PAT_MRT3847_116732C.1.pep
CSELILIKACLLKKNVVCIFKGTFYKSVKPLWIVDFSIPFKPEKGKRFILIILNKPLRSYIFKTKFRFWAKLGRFPLPYS

SEQ ID NO: 161368 - protein, 104 aa, Glycine max
  Clone ID: PAT_MRT3847_116733C.1.pep
HQFNIYPILYIRLYLLDNICLHEILDVKYKVSKTTNKNKNPNKIVDVFLSIPLHLQNHLLFQPFFIPNFSFFLVKIIKIPFAHFSIKALCLFYCLIRKTKHYLL

SEQ ID NO: 161369 - protein, 146 aa, Glycine max
  unsure (1)..(146): unsure at all Xaa locations
  Clone ID: PAT_MRT3847_116734C.1.pep
EYIVLTNMHYYQKHGDGVDELNETLYDERLNKGDASALPETVKNYSKLXSLGFKRVCLARGYLDKMAVTXAYLLRAGFHTWEQIILRDPHLITPNALSYKSAMRENLQTQGYRIAGLIGDQWSDLLGDHRREGRTLKRPNPMYYIE

SEQ ID NO: 161370 - protein, 75 aa, Glycine max
  unsure (1)..(75): unsure at all Xaa locations
  Clone ID: PAT_MRT3847_116735C.1.pep
MATSAIXAIQHSLVQTALKQLNEFVRXTGGAGKGRTNMRRTVKSAPQSIWYGLTSQVLGPISEQFHTDGDLVTRM

SEQ ID NO: 161371 - protein, 56 aa, Glycine max
  unsure (1)..(56): unsure at all Xaa locations
  Clone ID: PAT_MRT3847_116736C.1.pep
HRMVLRNNNQRXTKPVMRRLARTGGAQRTRGLFYEETGGFFNILLQTLILDALTYS

SEQ ID NO: 161372 - protein, 54 aa, Glycine max
  Clone ID: PAT_MRT3847_116737C.1.pep
FHWGIGLNHIQQVPLVLLHTTDDALISDYWLPTAMPGAITHVMLSLTGTTHHRG

SEQ ID NO: 161373 - protein, 132 aa, Glycine max
  Clone ID: PAT_MRT3847_116738C.1.pep
VEQLVDNADERRVLENEALDEVCFRTLKLSRPSFGDRKRRLSATMSGVTCCLRFAGQVNSDLRRLAVTLIHFWRLHFFTVGLAPLISRGSQHYRALTVPELRYQLWDDRTMMCAADVRHGRHLTASAMFRGN

SEQ ID NO: 161374 - protein, 105 aa, Glycine max
  unsure (1)..(105): unsure at all Xaa locations
  Clone ID: PAT_MRT3847_116739C.1.pep
PXAXPPHPPAXPXXPPXPEXPXQPPXPPPXXGARXPPPXXGPGPPPRXXRRAXXPXQAXXXPRXGGPQPXXPXPHPXXRGPPPKKAAKQPGQPRPKGEGREEPPT

SEQ ID NO: 161375 - protein, 128 aa, Glycine max
  Clone ID: PAT_MRT3847_11673C.1.pep
SVHIHLHFRHSYVHIHFRSPLSVPFVFYDFSLIIMPSSHVDVHIFPVSLHIHIDQFVISVSFFSANVDVHILSRRRVNIYQAEHVHVRVAFLSLQFIIFSSFDCEIEQNQLNSEETEEEGAVHFILKN

SEQ ID NO: 161376 - protein, 176 aa, Glycine max
  Clone ID: PAT_MRT3847_116740C.1.pep
MIEATYSSRMFRGVRFVLRGFNPVAENQIRFKLVNGGGVDVGQYGGSCTHVIVDNIAYDDPVCVAARNDRKTVVTALWVEHSADIGMPVDATSVMYRPLKDLDGIPGAKDLIMCLTGYLRQDRDDIMTMVGLMGAQFSKPLVANKVTHLICCRLGGEKGELADQLGAVGLGGGGGG

SEQ ID NO: 161377 - protein, 52 aa, Glycine max
  Clone ID: PAT_MRT3847_116741C.1.pep
GGPSAHHLFLPCDRRSRAQAVLPVPMVSLAPASSVAHGQALRVMAWPQLALE

SEQ ID NO: 161378 - protein, 58 aa, Glycine max
  Clone ID: PAT_MRT3847_116742C.1.pep
YISIFPHFPIGLSHRPVLYTFLMNRNILNINHLYQEDLPQTSPQNEKTDSNLHILPEV

SEQ ID NO: 161379 - protein, 42 aa, Glycine max
  Clone ID: PAT_MRT3847_116743C.1.pep
KVLITFCVSDIINDSFPNKIFYFFFFLKDTSYHLSLNNCNYK

SEQ ID NO: 161380 - protein, 51 aa, Glycine max
  Clone ID: PAT_MRT3847_116744C.1.pep
VEITFILSSVLVIEFYLLDLFIFGEVEGVAWFMLSWCNISLSSFSRVFSEE

SEQ ID NO: 161381 - protein, 39 aa, Glycine max
  Clone ID: PAT_MRT3847_116745C.1.pep
PADISKILEAWRREASKSVPSAIVSCLEEVSALSTEELG

SEQ ID NO: 161382 - protein, 467 aa, Glycine max
  Clone ID: PAT_MRT3847_116746C.1.pep
DRGSRGINFILSSMVFNVVPTILEISMVAGILAYKFGAPFALITSLSVAAYVAFTLTITQWRTKFRKAMNKADNDAGTRVIDSLINYETVKYFNNEVYEADNYDKYLKRYEDAALKTQRSLALLNFGQNVIFSTALSSAMVLCSHGIMDGTMTVGDLVMVNGLLFQLSLPLNFLGSVYRETIQSLVDMKSMFQLLEERADIRDKENAKPLKFNGGRIQFENVHFSYLTERKILDGISFVVPAGKSVAIVGTSGSGKSTILRLLFRFFDPHSGSIKIDDQNIREVTLESLRKSIGVVPQDTVLFNDTIFHNIHYGRLSATKEEVYEAAQQAAIHNTIMNFPDKYSTVVGERGLKLSGGEKQRVALARAFLKAPAILLCDEATSALDSTTEAEILSALNSVANNRTSIFIAHRLTTAMQCDEIIVLENGKVIEQGPHEVLLSKAGRYAQLWGQQNNTVDAIDTAIKLEA

SEQ ID NO: 161383 - protein, 264 aa, Glycine max
  Clone ID: PAT_MRT3847_116747C.1.pep
MERQWSGESGGNVMSSPSHTHSQSRNGHSRSSSLTLTGGGISTVKRTQNVAAKAAAQRLAQVMASQTAVAAADDDDDEDDLGFRYTAPPPLSLSRGSAKSPSPALARNLVEESMYLRPAPTPGNRPPLSLRTPAPVPPLDPPIHNNKPKDKRFPFDTALLQPKDSGYQREASTLCDEVDMLQEENQSILDKLRLEEDRCKESEARVRELEKQVASLGEGVSLEAKLLSRKEAALRQREAALKMPKTLRKEFDRKSHLYRLKFEM

SEQ ID NO: 161384 - protein, 528 aa, Glycine max
  unsure (1)..(528): unsure at all Xaa locations
  Clone ID: PAT_MRT3847_116748C.1.pep
MERKWSSESGGNVISSPSHSRNGHSRSSSLTIPGGGISTVKRTQNVAAKAAAQRLAQVMASQTADDDDDDEDDLGFRYTAPPPLSLSRSSARSPSPALARNLVEESSMYLRPAPPAAGNNRPPLSLRTPAPVLPFDPPIHNNNKPKDKRFPFDAGLLQPKDSGDQREASALRDEVDMLQEENESILDKLRLEEERCKESEARVRELEKQVASLGEGVSLEAKLLSRKEAALRQREAALKNAKDSKEGVDKEITSLQTEIENAKVETETAVRQLNGAESEVKALRSMTQRMILTQKEMEEVVLKRCWLARYWGLAAKYGICADVAVSKYELWSSLAPLPFEVVVSAGQKAKEECWEKGDDAIEKRSKLVPDLNDLTGEGNIESMLSVEMGLKELASLKXVEDAIVRALAKQRXPNSARQLVSDIKSPGDPKFMEAFELSPEESEDVLFKEAWLTYFWRRAKAHGIEEEIAEERLRFWISRSGHSPTSHDAVDVEQGLSELRKLGIEHRLWEASRKEVDQDSTIARKLLT

SEQ ID NO: 161385 - protein, 72 aa, Glycine max
  Clone ID: PAT_MRT3847_116749C.1.pep
SASSDSSELNETEIGIFLTSRSLYSKLRLSQRMISDHFMPVYRRQIERLIKELEEESNEGHNTRGSAIVKDR

SEQ ID NO: 161386 - protein, 145 aa, Glycine max
  unsure (1)..(145): unsure at all Xaa locations
  Clone ID: PAT_MRT3847_11674C.1.pep
MEISVPCGTPLNWAVFVLVLVSWVYRTGLFLLACVLFRLNCELQILRFEGLHKLFERCGSDANMTFREHVRIRRQLWITSHGYRFFIISCLVTVTVSQLGSLLMVLESKSDTTFFNSGDLVIXSAVQLCGFFXLCLMGAAGITHR

SEQ ID NO: 161387 - protein, 67 aa, Glycine max
  unsure (1)..(67): unsure at all Xaa locations
  Clone ID: PAT_MRT3847_116750C.1.pep
MSLLSDLINLNLSDTTEKVIXEYIWIGGSGMDLRXKXXXLXGXXSXXGXLXRRXXXXXPSXXXXSGN

SEQ ID NO: 161388 - protein, 162 aa, Glycine max
  Clone ID: PAT_MRT3847_116751C.1.pep
RLRASFLYGNFDNNNVYPKFDISVGATHWSTIVISDANSIEMRELIFLASSPTVSVCLSNATTGQPFISTLELRQFNGSVYYTQFEQHFYLSVSARINFGAESDAPIRYPDDPFDRIWESDSVKKANYLVDVAAGTEKISTTVPIDVNRDEMPPVKVMQTAV

SEQ ID NO: 161389 - protein, 37 aa, Glycine max
  unsure (1)..(37): unsure at all Xaa locations
  Clone ID: PAT_MRT3847_116752C.1.pep
INKNXQTTGAIYKNTCPPTTNLTTLPKPKQTLTNLML

SEQ ID NO: 161390 - protein, 62 aa, Glycine max
  Clone ID: PAT_MRT3847_116753C.1.pep
EKWTEMWRHLKSISHHYEFRYPPKTEDAVDMLWRQAKHKLPGVKLSVHRNRRLKIPDWWQGR

SEQ ID NO: 161391 - protein, 51 aa, Glycine max
  Clone ID: PAT_MRT3847_116754C.1.pep
MNKISNLSCVRSSDLIDAKLEEHQLCGSKQCPGCGHKFEGKPDWLGLPAGV

SEQ ID NO: 161392 - protein, 112 aa, Glycine max
  Clone ID: PAT_MRT3847_116755C.1.pep
QIEFRKQYPQAVILYADYYDAYRTVMKNPSKYGFKETFNVCCGSGEPPYNFTVFATCGTPNATVCSSPSQYINWDGVHLTEAMYKVISSMFLQGNFTQPPFNFLLEKKERVG

SEQ ID NO: 161393 - protein, 170 aa, Glycine max
  unsure (1)..(170): unsure at all Xaa locations
  Clone ID: PAT_MRT3847_116756C.1.pep
ARAKSHCNKKVVGARVFYHGYEAAIGRINEQKEYKSPRDQDGHGTHTAATVGGSPVHGANLLGYANGTARGMAPGARIAAYKVCWVGGCFSSDIVSAIDKAVADGVNVLSISLGGGVSSYYRDSLSVAAFGAMEXGVFGSCSAGNAXPDPASLTNVSPWITTVGASTMDR

SEQ ID NO: 161394 - protein, 516 aa, Glycine max
  Clone ID: PAT_MRT3847_116757C.1.pep
MEERPETELISIPATPRVSTPEILTPGQRSPRAASKEGKSWTPTSFISPRFLSPIGTPMKRVLVNMKGYLEEVGHLTKLNPQDAWLPITESRNGNAHYAAFHNLNAGVGFQALVLPVAFAYLGWSWGILSLTIAYCWQLYTLWILVQLHEAVPGKRYNRYVELAQAAFGERLGVWLALFPTVYLSAGTATALILIGGETMKLFFQIVCGPTCTSNPLTTVEWYLVFTSLSIVLSQLPNLNSIAGLSLIGAVTAITYSTMVWVLSVSQQRPPSISYEPLSLAQPSASVFLAMNALGIIAFSFRGHNLALEIQSTMPSTFKHPARVPMWKGAKVAYFFIAMCLFPIAIGGFWAYGNQMPPGGILTALYAFHSHDISRGILALAFLLVVFNCLSSFQIYSMPAFDSFEAGYTSRTNRPCSIWVRSGFRVFYGFVSFFIGVALPFLSSLAGLLGGLTLPVTFAYPCFMWVLIKQPPKYSFNWYFNWILGWLGVAFSLAFSIGGIWSIVNDGLKLKFFKPN

SEQ ID NO: 161395 - protein, 122 aa, Glycine max
  unsure (1)..(122): unsure at all Xaa locations
  Clone ID: PAT_MRT3847_116758C.1.pep
MFVGPLCXTSAXMXXTXXVSGLVHELLYYXLTRXXPTWEVTCFFVLHGVCMVVEVAVKKVALRRGWQLHRAVSGPLVVALLAVTANWLFFPQLLRNGLDRKSIEEYAILVDFVKSKLPFKNV

SEQ ID NO: 161396 - protein, 516 aa, Glycine max
  Clone ID: PAT_MRT3847_116759C.1.pep
MEERPEAELISIPATPRVSTPEILTPGQRSPRAASKEGKSWTPTSFISPRFLSPIGTPMKRVLVNMKGYLEEVGHLTKLNPQDAWLPITESRNGNAHYAAFHNLNAGVGFQALFLPVAFAYLGWSWGILSLTIAYCWQLYTLWILVQLHEAVPGKRYNRYVELAQAAFGERLGVWLALFPTVYLSAGTATALILIGGETMKLFFQIVCGPTCTSNPLTTVEWYLVFTSLSIVLSQLPNLNSIAGLSLIGAVTAITYSTMVWVLSVSQQRPPSISYEPLSLSQPSASVFLAMNALGIIAFSFRGHNLALEIQSTMPSTFKHPARVPMWKGAKVAYFFIAMCLFPIAIGGFWAYGNQMPPGGILTALYAFHSHDISRGILALAFLLVVFNCLSSFQIYSMPAFDSFEAGYTSRTNRPCSIWVRSGFRVFYGFVSFFIGVALPFLSSLAGLLGGLTLPVTFAYPCFMWVLIKQPPKYSFNWYFNWILGWLGVGFSLAFSIGGIWSIVNDGLKFKFFKPN

SEQ ID NO: 161397 - protein, 47 aa, Glycine max
  Clone ID: PAT_MRT3847_11675C.1.pep
TKGEDFGQCAGPVVSLYPKPILCFGVLKANHIVTCCFLEDISIWIQC

SEQ ID NO: 161398 - protein, 401 aa, Glycine max
  Clone ID: PAT_MRT3847_116760C.1.pep
MASSVSSMVSTTLLLITICTLSSLLSVASAATEEGRTRPFKRVYAFGDSFTDTGNTQNAEGPSGFGHVSNSPYGTTFFNHSTNRYSDGRLVIDFVAEALSLPYLPPYRHSKGNDTFGVNFAVAGSTAINHLFFVKHNLSLDITPQSIQTQMIWFNRYLESQDCQESKCNDFDDTLFWFGEIGVNDYAYTLGSTGSDETIRKLAISSVSGALQTLLEKGAKYLVVQGLPLTGCLTLSMYLAPPDDRDDIGCVKSVNNQSYYHNLVLQDKLQEFRKQYPQAVILYADYYDAYRTVMKNPSKFGFKETFNVCCGSGEPPYNFTVFATCGTPNATVCSSPSQYINWDGVHLTLVCFCRRKQYPQAVILYADYCEAMYKVISSMFLQGNFTQPPFNFLLGKKERVG

SEQ ID NO: 161399 - protein, 145 aa, Glycine max
  Clone ID: PAT_MRT3847_116761C.1.pep
EINEASRLFILPNQQNSESSEHLVGLSDDVGAGFISGHSTQPATSSELNVDRSVDLPPQDEIGNLGVSKVIRADQKRFFFDLGSNNRGHFLRISEVAGSDRSSIILPLSGLKQFHEIVGHFVEITKDRIEGMAVANVRTIDPPQR

SEQ ID NO: 161400 - protein, 215 aa, Glycine max
  unsure (1)..(215): unsure at all Xaa locations
  Clone ID: PAT_MRT3847_116762C.1.pep
GGGGGGNDVELLCKTLQVEHKLFYFDXGENRRGRFLKVSEASVSRNRSTIIVPAGSSRDEGWAAFRNVLAEINEASRLFILPNQQNSESSERLVGLSDDVGAGFISGHSTQPATSSELNVDRSVDLPPQDEIGNLGVSKVIRADQKRFFFDLGSNNRGHFLRISEVAGSDRSSIILPLSGLKQFHEIVGHFVEITKDRIEGMTVANVRTVDPPQR

SEQ ID NO: 161401 - protein, 283 aa, Glycine max
  Clone ID: PAT_MRT3847_116763C.1.pep
MEGNSGGGGGGNDVELLCKTLQVEHKLFYFDLKENPRGRYLKISEKTSATRSTIIVPFSGISWFLDLFNYYVNSDDQDLFSKELQLDTKVFYFDIGENRRGRFLKVSEASVSRNRSTIIVPAGSSRDEGWAAFRNVLAEINEASRLFILPNQQNSESSERLVGLSDDVGAGFISGHSTQPATSSELNVDRSVDLPPQDEIGNLGVSKVIRADQKRFFFDLGSNNRGHFLRISEVAGSDRSSIILPLSGLKQFHEIVGHFVEITKDRIEGMTVANVRTVDPPQR

SEQ ID NO: 161402 - protein, 71 aa, Glycine max
  Clone ID: PAT_MRT3847_116764C.1.pep
PLGGRVKTVLFLPGEEPASSTRGGPSPPPPQCCLSSIQKALKALMEKSVGDPHEFAFANIKRPRPPLISIS

SEQ ID NO: 161403 - protein, 74 aa, Glycine max
  Clone ID: PAT_MRT3847_116765C.1.pep
IWRGHQHKGRKGIIHRPWKNQVQCPKLEQQETWVKVVQGRKGLQGKKGKLGKLKVLGSQSKKCSVESNFLRFIG

SEQ ID NO: 161404 - protein, 85 aa, Glycine max
  unsure (1)..(85): unsure at all Xaa locations
  Clone ID: PAT_MRT3847_116766C.1.pep
MKSLVAFCLASKTNRGPSGFTNALFTKAFIITFALFTIFFLIQGRFITLGMSYQYIFGKLLPLKYIISIFFFSXTPNFLFALYLL

SEQ ID NO: 161405 - protein, 80 aa, Glycine max
  unsure (1)..(80): unsure at all Xaa locations
  Clone ID: PAT_MRT3847_116767C.1.pep
XTTXXXQTXXIXXXTXXXXSLXXXXSXXXKXXXXXKXXXIXKXILXSXFYXIXXXXXXXXXXXIXTQXTXXTXXLXXXLI

SEQ ID NO: 161406 - protein, 48 aa, Glycine max
  Clone ID: PAT_MRT3847_116768C.1.pep
RRRLRIMIVLEGSTNITRHSRPLRREIDNCRHDCCLYLDALYKLYYAL

SEQ ID NO: 161407 - protein, 88 aa, Glycine max
  Clone ID: PAT_MRT3847_116769C.1.pep
KTTRNRKKSSTPSWRACLSVQGCHGRSGGEHHSHSVGAHGGGATISAIILSSGAGRAAGSGSRAAAAHHRHRHRGRRRAAAAARGRSA

SEQ ID NO: 161408 - protein, 92 aa, Glycine max
  unsure (1)..(92): unsure at all Xaa locations
  Clone ID: PAT_MRT3847_11676C.1.pep
MESQQANREELHERARXGETVVPGGNGGKSLEAQEHLAEGRNRGGQTRKEQMGREGYQEMGRKGGLSAMDKSGVERAEEEGIDIDESKFKNK

SEQ ID NO: 161409 - protein, 58 aa, Glycine max
  unsure (1)..(58): unsure at all Xaa locations
  Clone ID: PAT_MRT3847_116770C.1.pep
SPSLFLVEHFKFSQFPSFISSLLLYFDGMVVEXNGVSCNINHVNRYMFLLSCIFFSVK

SEQ ID NO: 161410 - protein, 323 aa, Glycine max
  Clone ID: PAT_MRT3847_116771C.1.pep
LRRDIKGSNLLIDKNGMLKIADFGLANFYGPDRHRPLTSRVVTLWYRAPELLLGDTDYGVGVDLWSAGCLLAEMFTGIPIMPGRNEVEQLHKIFRLCGTPSEEYWRKLKLSTTFRPPSSLGLLCTLLALDPAFRGSASKALKNQFFITSPLACDLSGLPVIVREDDELVQANEQIKYMNSKIRRSRTYLERRKNSTSKRPIEHTVSSKQELIRNAKPETFVPIEDTDSTSTSSSVNPGGAKDQSPFFLSPFGALDQKLSPKTHHHVNGGEKNIKNLPPLPKSKPNATKKDDIKYRPDHFFRSASTREFRYLKREERLLLEIDD

SEQ ID NO: 161411 - protein, 42 aa, Glycine max
  Clone ID: PAT_MRT3847_116772C.1.pep
TGQILLAWVGGSTCLTTCYEGPVESTTLIWNLFMCNTDAPSS

SEQ ID NO: 161412 - protein, 94 aa, Glycine max
  Clone ID: PAT_MRT3847_116773C.1.pep
QLKRLKQNLRQFSKPCIFWCDFGLFEPRKKSFNNSKAENKQQILWQTKICTFLRFWTHGKNLHKTLTTQLLQFTHLSIEQSKKQSGRLHHHLYL

SEQ ID NO: 161413 - protein, 103 aa, Glycine max
  unsure (1)..(103): unsure at all Xaa locations
  Clone ID: PAT_MRT3847_116774C.1.pep
RRKAKKQRRTQXSXAXTGASPKGNSRXXAGXTSKXXSXNXXAKTXXXXEGXXAKAAKEAXXRDKTXPXAXXRXHXXDXXGRGREAAEPRKAKGSNKAEKEGPP

SEQ ID NO: 161414 - protein, 122 aa, Glycine max
  Clone ID: PAT_MRT3847_116775C.1.pep
NFNVLKNQYTMATSKNNALQVETQKFRVEILAPKKREPPKPPTPTKKPKGSPPNKIRTTPPLKLYFSQTPNITSLFFVPQGKPKSPFFPPFFINPPGVFHLFPIFLTPKVSSFQKFHPMVKK

SEQ ID NO: 161415 - protein, 169 aa, Glycine max
  unsure (1)..(169): unsure at all Xaa locations
  Clone ID: PAT_MRT3847_116776C.1.pep
SCGDLYDDHKAYHHRVSYRIILAVIGSGLAVFMSVTIVVLLFMIRERQEKVAKDAGIVEDGTNDNPTIIAGTIFVDNLKQAVDLDVVVKATLKDSNKLSSGTFSTVYKAIMPSGVVLSVRRLKSVDKTIIHYQNKMIXELERLSKVCHDNLMRHIVYVTYEDVAHRLHQ

SEQ ID NO: 161416 - protein, 153 aa, Glycine max
  unsure (1)..(153): unsure at all Xaa locations
  Clone ID: PAT_MRT3847_116777C.1.pep
ADIKVDAAATRAAQPKKKTFKKFXFKGVDLDTLLDMSTNKLMKMFSAHARRKFQRGLTKKPMALIKKLRKXKKEAPXSKKPEPXXTHLHNIIIIPKMINXIIKVYNDKTFNRIKIKPEIINHYLAEFSMSYKPXKHYRPNISATHSSRFIPLK

SEQ ID NO: 161417 - protein, 162 aa, Glycine max
  Clone ID: PAT_MRT3847_116778C.1.pep
GILSNLPVSDKKVTDALKRANLLPILVSIMDLGTGSNSPAKSILMESIAGIAIRFTSSSDKKLQLLSAKHGVIALLVKLLSSGSAITKLKAATALGQLSQNSPSLRRSRKSRWLCVAPSVDAYCEVHDGYCFVSSTFCLIKAGAVSPLIQILEDKDWEAVEA

SEQ ID NO: 161418 - protein, 346 aa, Glycine max
  Clone ID: PAT_MRT3847_116779C.1.pep
MDLEFEYQEEYRRNSRGVQLFTCKWLPFSSPKGLVFLCHGYGMECSGFMRECGRPLACAKYAVFGMDYEGHGRSEGARCYIKKFDNIVNDCYDFFKSVSELQEYKAKARFLYGESMGGAVSLLLHKKDPSFWDGAVLVAPMCKISEKVKPHPVVVNILTKVEDIIPKWKIVPTKDVIDSAFKDPAKRERIRKNKLIYQDKPRLKTALEMLRISMSLEDSLYKVTLPFFVLHGEADTVTDPEVSRALYERASSKDKTIKLYPGMWHGLTSGETDENIEKVFADIIMWLDKHTSNATHASSQQIETCNYGIERFTTVASSPKIVKQANGRRSYLCGLKGNRMLYHSAI

SEQ ID NO: 161419 - protein, 66 aa, Glycine max
  Clone ID: PAT_MRT3847_11677C.1.pep
KGFLFPLFNPLKKKLKTGFYKIKLNPFYPARKSFFNKFYGKTRSFPFYWQKFCKGLNFRKGYFFFP

SEQ ID NO: 161420 - protein, 156 aa, Glycine max
  unsure (1)..(156): unsure at all Xaa locations
  Clone ID: PAT_MRT3847_116780C.1.pep
SFTCKWLPFSSPKGLVFLCHGYGMECSGFMRECGVRLACAKYAVFGMDYEGHGRSEGARCYIKKFDNIVNDCYDFFKSVSGMDPNNLNSQLYXNLRYFGKTLWLIIHLHISELQEYKAKARFLYGESMGGAVSLLLHKKDPSFWDGAVLVAPMCKV

SEQ ID NO: 161421 - protein, 196 aa, Glycine max
  Clone ID: PAT_MRT3847_116781C.1.pep
MMMGLKEESNNKCKLKNSVVVSSARSSKMKLWMIRATTSVLLWTCVVQLTTLGDMWGPRVLKGWPSCFTHDESAALIELPSATTPRVLPPKRVYKNNGYLMVSCNGGLNQMRAAICDMVAIARYLNVTLIVPELDKASFWADPSEFQDIFDVDHFITSLRDEVRILKELPPTLKTRVDNGLLYTMPPISWSDISYY

SEQ ID NO: 161422 - protein, 55 aa, Glycine max
  Clone ID: PAT_MRT3847_116782C.1.pep
GHGCQFSYWRGVCSFPPFGIFLWHIPFSCARVTSFILVASKGNMLRCLCHIVGIF

SEQ ID NO: 161423 - protein, 158 aa, Glycine max
  Clone ID: PAT_MRT3847_116783C.1.pep
MFPPPPQTTLPSLPDLLLTALSVCFLVSSSKPHIGGSTRCPFPRRFLKIPAMSLTNTTTSKSSKNNNLNNTLLPPRRHSFASPQSLSEWLKPRLPSESFASWGVKPGTKNVHNLWLELSQGETFLADSTPPVRTVHVVLVRVTGKHGMILVESHQELS

SEQ ID NO: 161424 - protein, 291 aa, Glycine max
  unsure (1)..(291): unsure at all Xaa locations
  Clone ID: PAT_MRT3847_116784C.1.pep
MFPPPTQTTLPSLPDLLLTALSVCFLVSSSKPHIGGSTRCPFPRRFLKIPAMSLTTITTTSTSSKNNNNLNSHLPPRRHSFASPQSLSEWLKPRLPSESFAXWGVKPGTKNVHNLWLELSQGETSLADSTPAVRTVHVVLVRVTGXHGRILVESHQDLSDGSVRKRGRPLSEKMKPNEDPESAAVRGIMEELGSAIGGGAKNFEIDDIVTIDPNSYEMRVEERDSGSYPGLPGCYVLHTLSATVECLPEGDFCTYEVDEYGGVFEDKIVADEAVSVKKHYWTWVSADSIGT

SEQ ID NO: 161425 - protein, 76 aa, Glycine max
  Clone ID: PAT_MRT3847_116785C.1.pep
TLAFIITTASFTSHQPHQSHHPPPPLTSPPQQQEQEEREARRERRVRRVKKHVFTQEEETLLPASVNSYLVLLLYF

SEQ ID NO: 161426 - protein, 81 aa, Glycine max
  Clone ID: PAT_MRT3847_116786C.1.pep
TKYHHLYISLSLEKLGYVSSKPQQALGFLFSLPSTQKHTTLSNHHVLSSLLPLIIRPSLSSSPPHLLPPTNRTKAIILLCL

SEQ ID NO: 161427 - protein, 40 aa, Glycine max
  Clone ID: PAT_MRT3847_116787C.1.pep
LEVQSLLCGQDEHNVSQDNTRPLRYLCNRGPSSALIQIHV

SEQ ID NO: 161428 - protein, 159 aa, Glycine max
  Clone ID: PAT_MRT3847_116788C.1.pep
MDETSALIEAILREQEEEEEEAHRRRRNLTTQNTTIKSNNQWQTVSYHKRNRNNNKSSSKQPLAADPSPDVFSSVQRHSEHSRRRLLESQIASEAEAAAAAAPSRSKRHSDDEDDGDAEHEASAVQEVKKAKQKKPNKPNVTVAEAASRISADDLDAFL

SEQ ID NO: 161429 - protein, 43 aa, Glycine max
  Clone ID: PAT_MRT3847_116789C.1.pep
KVILSIFCYTIYLILIFVSILNCRKIDPLDFFSLRFLNFSAYT

SEQ ID NO: 161430 - protein, 138 aa, Glycine max
  unsure (1)..(138): unsure at all Xaa locations
  Clone ID: PAT_MRT3847_11678C.1.pep
PCVRLEMINSLXGGHQKLTRERTHLLSASXSRMAIGKKDVWRVECGIPFRFPLTSICNSIFNEMLIKYSYEKFLGPAIAPRMFLQSFNNSVSLXCRDDNLIYVHEYVKPYYIGSXLKSYLAGHNSTITDGIDTTRATL

SEQ ID NO: 161431 - protein, 70 aa, Glycine max
  Clone ID: PAT_MRT3847_116790C.1.pep
NASSRAGALSDELALWSILLCGLLPAGADIYGLTQCKESMQFENREKQSILKLESWLKLLQAGSARALGH

SEQ ID NO: 161432 - protein, 71 aa, Glycine max
  Clone ID: PAT_MRT3847_116791C.1.pep
VSFRVSVIGDESAGSVLSTNIDDARSVSAMLSEHVGSDEAAVDMLPDVLHQDFSSRCAKFGIGSNQQLSGS

SEQ ID NO: 161433 - protein, 148 aa, Glycine max
  unsure (1)..(148): unsure at all Xaa locations
  Clone ID: PAT_MRT3847_116792C.1.pep
MMQISSTIPAHNLHMFQMRRASFRCRASPLNPTTTTTTITTTTSSSPQSMKPVTDSTRLHLSNLDKLLQKQSPTTQPNHKQQQELALATTIQSNITTTTTEKKGKNVLEGLNLARLWPDMKATEEMSXXHLNXLQRLLSKTGEYSPRT

SEQ ID NO: 161434 - protein, 39 aa, Glycine max
  Clone ID: PAT_MRT3847_116793C.1.pep
SIKNKNISYKIFKFLVYLLLVFTFYCLFLVHRLAYKIVD

SEQ ID NO: 161435 - protein, 78 aa, Glycine max
  Clone ID: PAT_MRT3847_116794C.1.pep
GKTPPARSKGKIIVFVTTVNPYPVAPLAVLFSVKNANVSSNTSNRMITRQLESCKSFRYMADQFLFAIVSVVWNIPLT

SEQ ID NO: 161436 - protein, 169 aa, Glycine max
  unsure (1)..(169): unsure at all Xaa locations
  Clone ID: PAT_MRT3847_116795C.1.pep
GFEVKNHVGPGVVLSYVISGISAMLSVFCYTEFAVEIPVAGGSFAYLRVELGDFVAFIASGNILLEYVIGGAAVARSWTSYFATLCNQPFDKFLIQVHGLAADYSQLDPIAVVVLVVIGFFAVFSTKGSSRFNYIASIVHVIVLIFIIVAGLTKAEAKNYSDXLPFGPR

SEQ ID NO: 161437 - protein, 80 aa, Glycine max
  Clone ID: PAT_MRT3847_116796C.1.pep
PIDETTVGSITEPAAARYEYRRARSISVESFDREVCKSKTLTLPSVSLHVPLVSHVPSVFLTYLCLLHRPSVFSPTLCLA

SEQ ID NO: 161438 - protein, 284 aa, Glycine max
  Clone ID: PAT_MRT3847_116797C.1.pep
PLFVHAQQALSCSWSSLLQDGRAKVPDVHDILSGSDLKVEVMEETILRDLTREMCSLLSVIASPPLNTRVDPRVRSGHVSRLDMSSLKNLDTVASCSMVGFLLKHEGLALPTLRMCLEAFTWTDGEAVTKISSYCSALVVLAIVTNHAELIEYVSRDLFTSIIKGLALESNAIISADLVGICREIFVYLCDRHPAPRQVLMSLPNITTHDLVAFEESLTKTFSLKEQKQLTRSLFQLATGNKLKALAAQKTVNIITNVSTRPRPANAPESKVDDGDVVGLAAIM

SEQ ID NO: 161439 - protein, 149 aa, Glycine max
  Clone ID: PAT_MRT3847_116798C.1.pep
EKGCATSKSPDTTQRELSTFVNSDVRAKLAKDLPSISMVQSHDANVAERQEGTEVVQPSMSVMAGPLLSMQDSMKSDEILRSPNKDGLDIVDIDSVELKDPQVWSSYAPDIYNSIFVKEFERRPSSDYMDMLQQDITPSMRRILIDWLV

SEQ ID NO: 161440 - protein, 83 aa, Glycine max
  unsure (1)..(83): unsure at all Xaa locations
  Clone ID: PAT_MRT3847_116799C.1.pep
XSLHSAXXGQPXXXXXXLXXXXXXLXXLXAXXHXTXXGXAXXXXXXXRXXXIXXLXIXXGXXXXXXRXEPGFTXXXVTXXXEX

SEQ ID NO: 161441 - protein, 62 aa, Glycine max
  Clone ID: PAT_MRT3847_11679C.1.pep
MEKKKIKIPQTNVPLEQKKTSQLFPLFPKKKKKKKKKKKKKKKKKKKKKKKKKKKKKKKKDF

SEQ ID NO: 161442 - protein, 50 aa, Glycine max
  Clone ID: PAT_MRT3847_1167C.1.pep
KPKTRKKMSCNGNSLTLKVNLDICTVKPIFVCSSKIYKTRCLDTFIFKKL

SEQ ID NO: 161443 - protein, 219 aa, Glycine max
  Clone ID: PAT_MRT3847_116800C.1.pep
MVRENAVMGGASEERGVRVTRAMARAVLGGVSASSRPSFKKQHKNNKGFGRVALADVTNISKKGCATSKSQARGGYKKTNTKGASNVSIQVLSTQEDVRAKLAKDLPSISMVQSHDANVAERQEGTEVVQPSMSVMAGPLLSMQDSMKSDEILRSPNKDVDMMITEKLKLSDGLDIVDIDSVELKDPQVWSSYAPDIYNSIFVREFERRPVSDYMDMLQ

SEQ ID NO: 161444 - protein, 55 aa, Glycine max
  Clone ID: PAT_MRT3847_116801C.1.pep
GTFLSIQHLHYILRSNTHLPLFNIIPLFLNLPITLKIKLLKNIASTLILITLHLL

SEQ ID NO: 161445 - protein, 56 aa, Glycine max
  Clone ID: PAT_MRT3847_116802C.1.pep
NRITPWGSQAQVMILPPIKLHSVSKLQTKLHFPHTIYLTIPLPMDYDLCYLSLKGS

SEQ ID NO: 161446 - protein, 56 aa, Glycine max
  Clone ID: PAT_MRT3847_116803C.1.pep
PLRRPALFFFFLARGTTPSLQSHATINPIGLSVLISWPHRAPPLNERRSLRGGRPY

SEQ ID NO: 161447 - protein, 285 aa, Glycine max
  Clone ID: PAT_MRT3847_116804C.1.pep
FTVISTLQILHNNLPIKPRKRGYDCEWKEDSWVPAYYALAVLTMLWSAAAMVEAQVYVISGTIANWYFSKEHQTPKRSIRTPLRNVFGPSSGTICLSGLLVCVVRMVRSAVDSARQEDTPGIVNLVLRCCVNALLTAVDFLNKFTINFAAITGEAYCSSARMTYELLRRNLLSAVFVETISSRILAGIVFVFSASYTIVACVILKAGTNLGSDSYFVAAMAWVLLMVVLGYLVHVLDNVIDTIYVCYAIDRDRGEVCKQDVHEVYIQLPISRSLRQSVTTRTLGV

SEQ ID NO: 161448 - protein, 65 aa, Glycine max
  Clone ID: PAT_MRT3847_116805C.1.pep
RRRIHPVSSIGGGRKNLSHKSQPMYACYCSPLIEFTGKNAKVRQGEKEEERLREGFREKMSLGRV

SEQ ID NO: 161449 - protein, 44 aa, Glycine max
  Clone ID: PAT_MRT3847_116806C.1.pep
TEQSLSYSSHIGRLQWIYGQKKSRSYFYFFMRSPLFWELELIGV

SEQ ID NO: 161450 - protein, 70 aa, Glycine max
  Clone ID: PAT_MRT3847_116807C.1.pep
FPIKIFYLLMSDVYSPNFLTHSSTSLVKKRMHLVHWMHRIHCNTCHAKQEDWLENVARRFRLGQNIYAVL

SEQ ID NO: 161451 - protein, 98 aa, Glycine max
  Clone ID: PAT_MRT3847_116808C.1.pep
MAPSFTYVKIFSSLVADGFSNALTRRGYAVASQSATKGGVASMSGKMAPKSGEDNKGVSTYKVSWVPDPVTGYYKPENINEIDPAELRAMLLGKKFNN

SEQ ID NO: 161452 - protein, 168 aa, Glycine max
  Clone ID: PAT_MRT3847_116809C.1.pep
MPSTSIPPLPSKSSEMASKILMQLDKLVSPKEKSPTKLSSSMLRGQALRSMETVDSSKFLDNVWDNGLDGTHGNLSAGAQKLKSKIDETESGQSKLVAPTDVLVPVDAYATAPKKQDISILKSGDSSGTKSNSHPPQKKRAFHMSAPEVCDTKLFSGIGLFSYLDFQI

SEQ ID NO: 161453 - protein, 167 aa, Glycine max
  Clone ID: PAT_MRT3847_11680C.1.pep
QQSAGGGAGRSANPHNWPPVPSFIPVEPCFYQDIDVEIPVQFQETVRLVYYVYLTYVLALVVNVVASLFFMLFAAGGIGLLLLAIIQVVLFTPCSFLFWFRPVYKAFRDDSSFNFMIFFLVLFFHTMFCFIQVLGLSQYACGWSNTVYAFQEGHIFIGLLMLCSAVA

SEQ ID NO: 161454 - protein, 83 aa, Glycine max
  Clone ID: PAT_MRT3847_116810C.1.pep
DSHMDRGFRFLCQAGTTRLVSFVGITVAIVFMVQYSELPSSKFLSSVTTKFTSFTMDTSSSVNSKVEGNNLHLNGSNSNSTHA

SEQ ID NO: 161455 - protein, 324 aa, Glycine max
  Clone ID: PAT_MRT3847_116811C.1.pep
MELCKPDLEERMKVLAMSTTEDEEMGDTFADRAETYYQKRPQLLSLLQDLYNGYITLSDRYIQTLAKHKHHSRHSSQVSTVDEGFSDQEEEASGVSHSDSDIESSISYQHPQHMMMPIGLPKSSMLDVDAIVAELLIRNIEYDMLMHEVGVMERRYCESSRKSELQKSLLEVLESERIVLLNENASLGYRVNTLVEENKELASESVFIKRKAGELAKCVLKMREDHRVYLLHRKIEDLQAQIHALEKRNKEYYDKLLRRDGHEDGKKGVALEVCVQMDKQKRFKWKDGNTSGMKKFHGKKSPPSLWKKLKNMDLLLCGTNPTCA

SEQ ID NO: 161456 - protein, 233 aa, Glycine max
  Clone ID: PAT_MRT3847_116812C.1.pep
MILMERDPNMGKEKVISNSTFLPSSTKVFKDKGISNNSMPSWLLTNISDLEERMKVLAMSTTEEEEMGDTFAERAETYYQKRPQLLSLLQDLYNGYITLSDRYIQTLAKHKHHSRHSSQVSTVDEGFSDQEEASGVSHSDSDIESSISYQHPPPMMMMPIGLPRSSSMLLDVDAIYAELVMRNVEYDLLVHEVGVMHNKKKKKWDTLLLKEQKLTTKRGLSYCPFCKTCTMAT

SEQ ID NO: 161457 - protein, 68 aa, Glycine max
  Clone ID: PAT_MRT3847_116813C.1.pep
WRETPLPQLMEPIIAHANISFWLHNECTHPPSYPYPIGKMPTLFHTSLLITRFIDSYKHCLLTEHFID

SEQ ID NO: 161458 - protein, 46 aa, Glycine max
  Clone ID: PAT_MRT3847_116814C.1.pep
SIPFNFHTMSTEPLTIKIQLNRRGGQQTNCTLFNKNNLGALGKLCV

SEQ ID NO: 161459 - protein, 64 aa, Glycine max
  Clone ID: PAT_MRT3847_116815C.1.pep
RPLPEGEKGKKNPLKEQHPPPSGGNPPKGETPPQAFPKKKNRFFCPHPGGGPGFPPSLLTGPGG

SEQ ID NO: 161460 - protein, 64 aa, Glycine max
  Clone ID: PAT_MRT3847_116816C.1.pep
NWSTGFSVISQTRISLLILMSVALHKQSVTSMLAILDNARVCVSTSPESRPKIKSVLRMLLNAR

SEQ ID NO: 161461 - protein, 60 aa, Glycine max
  Clone ID: PAT_MRT3847_116817C.1.pep
RYYPYHYYSQDHLQTSIMTITVSYCNCRHLCPPPDCELFKSKDHALFSSVPSTPHSKSIS

SEQ ID NO: 161462 - protein, 98 aa, Glycine max
  unsure (1)..(98): unsure at all Xaa locations
  Clone ID: PAT_MRT3847_116818C.1.pep
NSRVDPRVRGRVGGQLAMASMASLDLFSGGEQIDARKLQEKMMVVQKEREEKLAEILKDRLHQYVQGDKEGFISQADAEATYLXYGNYGVDMLNTIGY

SEQ ID NO: 161463 - protein, 71 aa, Glycine max
  Clone ID: PAT_MRT3847_116819C.1.pep
VPGPIAHLRSIGYRFRAPALDRHHWLAALQTNTLKEGQREDSWLYEAKPRKKLVSPRRLRSRGAGRPESDG

SEQ ID NO: 161464 - protein, 57 aa, Glycine max
  Clone ID: PAT_MRT3847_11681C.1.pep
SPLQLFVFCKRAGDSLNLVSYSLVRTEENIKISDLLCNIFRACSDVPTLIQLVERIR

SEQ ID NO: 161465 - protein, 75 aa, Glycine max
  Clone ID: PAT_MRT3847_116820C.1.pep
FQHCHPNPSQLIQKRSYPSLTSPIVVSLFQCGPPIPFVVQLVGPQSVDRRNSFSQTRFSPKITSFYLKKKNKKKT

SEQ ID NO: 161466 - protein, 59 aa, Glycine max
  Clone ID: PAT_MRT3847_116821C.1.pep
TLFFRNHKEKPGQGKDWPPKEYNEVCEQGMRATLSVGAKNLTDTEGKNYEKKESESDGD

SEQ ID NO: 161467 - protein, 62 aa, Glycine max
  Clone ID: PAT_MRT3847_116822C.1.pep
PLLWVEPSGFLPIRRLGCPIIMAENPYYQVYSLRPSGVARDNLERLNDEYKLKTGVYLRMVG

SEQ ID NO: 161468 - protein, 65 aa, Glycine max
  Clone ID: PAT_MRT3847_116823C.1.pep
FALSDILHIQDTPAVPLATSLLKDSSDCTHKFMIDTISWTSHVSHTIPSEICGTLCGLPLTNFNG

SEQ ID NO: 161469 - protein, 53 aa, Glycine max
  Clone ID: PAT_MRT3847_116824C.1.pep
KTTCQKKVGKKKAKPHHASIIDMLLLTPNGQAQNEFLSYPLKNKTGEHFYTPT

SEQ ID NO: 161470 - protein, 75 aa, Glycine max
  Clone ID: PAT_MRT3847_116825C.1.pep
GGRVYVSGWVWDLTAVQDIHMSHCHWCLRQLLSLNLSMMLWGMVTDYNGCVSAMAKDPLPVNSNSYELLRRKLII

SEQ ID NO: 161471 - protein, 63 aa, Glycine max
  Clone ID: PAT_MRT3847_116826C.1.pep
QKDQWGYVLTILFNPSYQSSMTQPSGDFALILNFPNYYYYYIFGEKCYWFFVCKKLIPPLYYT

SEQ ID NO: 161472 - protein, 60 aa, Glycine max
  Clone ID: PAT_MRT3847_116827C.1.pep
LSPSSSKESSFERNIVLIPFRKRHSLHRPPRHPLHHSTPSPPSCKQACSPQSGAKTPIYQ

SEQ ID NO: 161473 - protein, 59 aa, Glycine max
  Clone ID: PAT_MRT3847_116828C.1.pep
MSSLSLASDSSTAKPSLMFFKMFGPSFEADFVESVVKMGQIGVKTGFLGEIRRVCSAFN

SEQ ID NO: 161474 - protein, 90 aa, Glycine max
  Clone ID: PAT_MRT3847_116829C.1.pep
STGAWEHFKNFVWKKGWPPNCPNWSNKLTVYSPHSIFNSPPGALQLSGRGFPRLKFFKKKKSNFAKFRGGAQVSGNCTLERESQIPHPQF

SEQ ID NO: 161475 - protein, 166 aa, Glycine max
  unsure (1)..(166): unsure at all Xaa locations
  Clone ID: PAT_MRT3847_11682C.1.pep
XSXEFGSSNIGARRRREGREREREVAFVSYHLDQHAHFIFATLSTSLNTLHTRSQLCSENNIYCMDFSPLNTNPIVNYTHLSISDNRKDDNSAVWVANRNQPVDKHSAVLMLKHYGVLKIESSKDAKPIILFSSPQPLNNNNTEAKLLDTGNFVVQQLHPNGTNTV

SEQ ID NO: 161476 - protein, 124 aa, Glycine max
  Clone ID: PAT_MRT3847_116830C.1.pep
KPKGQNGIWEKTPKWKQGLGEILTPSRNSITGKETTSKRGAGGKKNQKRGENKIENPHQKTFFFPPQKKGSQKWPPFPQNKNHLSFLKRGGVFGNRGQLKGGGGGTTRGIPAWICPPPIRTQGF

SEQ ID NO: 161477 - protein, 149 aa, Glycine max
  unsure (1)..(149): unsure at all Xaa locations
  Clone ID: PAT_MRT3847_116831C.1.pep
PMPPPPPPPPSPPPVRPPLPPLQRPPPFLTHPPPPPPPLSSPPPPQSHPHPPLSPPPTXPALSSPPPPCRLAPKPTFCSMPXPKLPPHSHPFIAISVATSVVGHNSLAPPQPGSGSLGEFLIACAEVYCVVEHAATCHVRRAICSCLTL

SEQ ID NO: 161478 - protein, 116 aa, Glycine max
  Clone ID: PAT_MRT3847_116832C.1.pep
NESQNREATPLSPTSLFHRDCPPKRKNGGRVKKINTRTICIPYLHRCVLHLSLSVLLSIILILFVSCRLFHLQLDYSLLHLLSPIFLSDTCKPLRFLRSLRPLLHRPLRLYVPVHL

SEQ ID NO: 161479 - protein, 200 aa, Glycine max
  unsure (1)..(200): unsure at all Xaa locations
  Clone ID: PAT_MRT3847_116833C.1.pep
MVSLPIVQYEEKIIETVERNPVVVVIGETGSGKSTQLSQMLHRRGYGKIAITQPRRVAAVSVARRVAHELGVQLGEEVGYAIRFEDRTSHSTRIKYLTDGVLLRESLANPELNEYSVIILDEAHERSLNTDILMGLMRRLVNIRPXSQVLITSATLDGEKVSKFFADCPVLNVPGNLYPXEVLYSXERPSSYLDSSLKQP

SEQ ID NO: 161480 - protein, 116 aa, Glycine max
  unsure (1)..(116): unsure at all Xaa locations
  Clone ID: PAT_MRT3847_116834C.1.pep
LKITATELCKLQIADGVIPEPLLICDVHHQVAQVXHHLQFVVAHAHSQFTSHQIKKAIKEPMDELMKMNTEELLKHRMLKFRKIGGFQEGIPIDPKRKAQGRRKLGNLMLQAGESG

SEQ ID NO: 161481 - protein, 709 aa, Glycine max
  Clone ID: PAT_MRT3847_116835C.1.pep
MAASSASLSGASASDLLRSSTSGFNGVPLRTMGKGKLVLKRRDFTVAARLRKVKKHEYPWPANPDPNVKGGVLSHLSLFKPLKEKPKPVTLDFERPLVDLQKKIIDVQKMANETGLDFSDQILSLETKYHQALKDLYTHLTPIQRVNIARHPNRPTFLDHVFNITEKFVELHGDRAGYDDPAIVTGLGTIDGRSYMFIGHQKGRNTKENIQRNFGMPTPHGYRKALRLMEYADHHGFPIVTFIDTPGAYADLKSEELGQGEAIAHNLRSMFGLKVPVISIVIGEGGSGGALAIGCANKLLMLENAVFYVASPEACAAILWKTAKASPKAAEKLKITATELCKLQIADGVIPEPLGGAHADPEWTSQQIKKAIKETMDELTKMNTEELLKHRMLKFRKIGGFQEGIPIDPKRKANMKKRDLSIAKIPDAELEVEVEKLKQQVLEAKESSPVPPKLDLDEMLKQLAREVDLEYSEAVKATGLTDSLLKLREEVSKANADNQIVDPLLEGKIEKLRVEFEQQLRAAPNYGRLQNKLNYLSELCKVKLLSDGKKNNEAVTFKQELKKKIDDALSDPKIRETFEALKAEIKGVGASSASDLDDELKKKIIEFIKEVKEVKEVKEVIENQIESLVNSSDDIKSKILQLKLEVPKAGETPDSEPKNRIGALVQLIKPSLVEAVDSSGLKDLFENLVSNDGSLTHGDPARDSLTDDQ

SEQ ID NO: 161482 - protein, 123 aa, Glycine max
  Clone ID: PAT_MRT3847_116836C.1.pep
LLVRPRVRTVGRLSTEGWGLLEDDRRVRLLEDYRWVRLREDDRRVRLLEATEGDSLRQTTTTSFYFHILSSFINDLYEVLSLKHTLNTPLIISHSPSLTVRIRLHLFLSLPLFLDLQLFPDFC

SEQ ID NO: 161483 - protein, 690 aa, Glycine max
  Clone ID: PAT_MRT3847_116837C.1.pep
MAASSASLSGASASDLLRSSTSGFNGVPLRTLGKGKLVLKRRDFTVAAKLRKVKKHEYPWPANPDPNVKGGVLSHLSLFKPLKEKPKPVTLDFEKPLVDLQKKIIDVQKMANETGLDFSDQILSLENKYQQALKDLYTHLTPIQRVNIARHPNRPTFLDHVFNITEKFVELHGDRAGYDDPAIVTGLGTIDGRSYMFIGHQKGRNTKENIQRNFGMPTPHGYRKALRLMEYADHHGFPIVTFIDTPGAYADLKSEELGQGEAIAHNLRSMFGLKVPVISIVIGEGGSGGALAIGCANKLLMLENAVFYVASPEACAAILWKTAKASPKAAEKLKITATELCKLQIADGVIPEPLGGAHADPEWTSQQIKKAIKETMDELTKMNTEELLKHRMLKFRKIGGFQEGIPIDPKRKANMKKRDLSIAKIPDAELEVEVEKLKQQVLEAKESSPVPPKLDLDEMLKQLAREVGLEYSEAVKATGLTDSLLKLREEVSKANADSQIVDPLLKDKIEKLRVEFEQQLRAAPNYGRLQNKFKYLSELCKVKLLSDANKDNQAVTFKQELEKKVDNALNDPKIRETFEALKAEIKGAGASSASDLDDELKKKIVGFMIELKEVKEVKEVIENQIESLVNSSDDIKSKILQLKLELPKAGETPDSESNNRIGDFIFKKSSKIIMAILLRDMFGNFKEIPC

SEQ ID NO: 161484 - protein, 690 aa, Glycine max
  Clone ID: PAT_MRT3847_116838C.1.pep
MAASSASLSGASASDLLRSSTSGFNGVPLRTLGKGKLVLKRRDFTVAAKLRKVKKHEYPWPPNPDPNVKGGVLSHLSMFKPLKEKPKPVTLDFEKPLVDLQKKIIDVQKMANETGLDFSDQILSLETKYQQALKDLYTHLTPIQRVNIARHPNRPTFLDHVFNITEKFVELHGDRAGYDDPAIVTGLGTIDGRSYMFIGHQKGRNTKENIQRNFGMPTPHGYRKALRLMEYADHHGFPIVTFIDTPGAYADLKSEELGQGEAIAHNLRSMFGLKVPVISIVIGEGGSGGALAIGCANKLLMLENAVFYVASPEACAAILWKTAKASPKAAEKLKITATELCKLQIADGVIPEPLGGAHADPEWTSQQIKKAIKETMDELMKMNTEELLKHRMLKFRKIGGFQEGIPIDPKRKANMKKRDLSIAKISDAELEVEVEKLKQQVLEAKESSPVPPKLDLDEMLKQLTREVDLEYSEAVKATGLTDSLLKLREEVSKANADNQIVDPLLKDKIEKLRVEFEQQLRAAPNYGRLQNKFNYLSELCKVKLLSDANKDNEAVTFKQELEKKVDNALSDPKIRETFEALKAEIKGAGASSASDLDDELKKKIVEFMIELKEVKEVKEVIENQIESLVNSSDDIKNKVLQLKLEVPKAGETPDSESKSRIGDFIFRTSSRIIMAILLRDMFGNFKEIPC

SEQ ID NO: 161485 - protein, 50 aa, Glycine max
  Clone ID: PAT_MRT3847_116839C.1.pep
RPATATPPIKLLTRMEQLKLLGKAEKAGTLAAAEKGGLSLATIERLGTPS

SEQ ID NO: 161486 - protein, 146 aa, Glycine max
  Clone ID: PAT_MRT3847_11683C.1.pep
FGVVLLELITGRKPIEARRSSGEENLVLWAKPFLQKGKGAIEELLDPQLKCSFKFSNQMGRMIEAAAACVPNEKSRRPGIHEIIAILKGEKKPLLSKKKKSSFFGKGWVIDCYSQFPPTNNEMKSPLALAMSGVAKFEDDDYLYGR

SEQ ID NO: 161487 - protein, 43 aa, Glycine max
  Clone ID: PAT_MRT3847_116840C.1.pep
LDSRTCTFHIFSSSQQRHQSIKNHGRLQWRRDRTFDRLTRCRC

SEQ ID NO: 161488 - protein, 36 aa, Glycine max
  Clone ID: PAT_MRT3847_116841C.1.pep
TKVYYNLYVFINEIGSDSGSFRLLEQLNSKWIKATK

SEQ ID NO: 161489 - protein, 72 aa, Glycine max
  Clone ID: PAT_MRT3847_116842C.1.pep
CDNEPAPWTSDEIGDRPRPLPKIDELKGAVDITERKGDPSWDFDEKGSWLWKKPPPESKKSVDIPFCRLLQP

SEQ ID NO: 161490 - protein, 30 aa, Glycine max
  Clone ID: PAT_MRT3847_116843C.1.pep
GLVSLMLNTSIERGVTKTDPWFFDPTSVVA

SEQ ID NO: 161491 - protein, 65 aa, Glycine max
  Clone ID: PAT_MRT3847_116844C.1.pep
LWMISSFFFSHNSPIKFPALLQFHLHLSNRSLYLSDLKMQVRSEFCEIELPLNCYCVKERHKSEE

SEQ ID NO: 161492 - protein, 38 aa, Glycine max
  Clone ID: PAT_MRT3847_116845C.1.pep
SGAPFFGAIPYPNGGPEIEGLFRYCGPTPFFGALPWAQ

SEQ ID NO: 161493 - protein, 80 aa, Glycine max
  Clone ID: PAT_MRT3847_116846C.1.pep
GPLCTKVFYIDIQDICFRINDVFQHGASQIPSTLKQRNLNINPHVPDMIIWSENINGVCTTKSGSAAPNSSWSSFLRVVS

SEQ ID NO: 161494 - protein, 62 aa, Glycine max
  Clone ID: PAT_MRT3847_116847C.1.pep
NHYNHTFSFAIYNTGSSGRPLNADRAFKFFAFRITLNFRFSSISAILSDLLYLFVYIFGMIC

SEQ ID NO: 161495 - protein, 103 aa, Glycine max
  unsure (1)..(103): unsure at all Xaa locations
  Clone ID: PAT_MRT3847_116848C.1.pep
MLKQTSSNEYISNLVPSPRNVVFLINFSIGEPPVPXLIIMDTGSSFTWVMCHPCSSCSQQSVPIFDLSKSSTYALTFSECNKCDVVNCECPCSVEYVGSGSSK

SEQ ID NO: 161496 - protein, 87 aa, Glycine max
  Clone ID: PAT_MRT3847_116849C.1.pep
QRNCFSGLSKPFFPPAPLNKANLVFPHPVLYCTPSCLEFFRREVRLGLVRIRAAKRKVGMNGGEELAGFGWLPPFSATFFFCFFLYF

SEQ ID NO: 161497 - protein, 186 aa, Glycine max
  unsure (1)..(186): unsure at all Xaa locations
  Clone ID: PAT_MRT3847_11684C.1.pep
EFGPKIERFENENQLLGEKSNRDIRRAPSFSGPLMLPNRASANSLSAPIKSSGGFRDSLDDKSKANLVQIFXRFSVTSENLDLVKDIPVSSVSRRSSQGSPMRKSASVGDWMVDFKQMSSNDSANINIPASLLVPHLHNLFQQTSIQQXSQNGKLPPLPRNSENNGSVDTAVSEREQLLLGRISEL

SEQ ID NO: 161498 - protein, 215 aa, Glycine max
  unsure (1)..(215): unsure at all Xaa locations
  Clone ID: PAT_MRT3847_116850C.1.pep
MSMAEEESPSVMPKVITFLSSLLERVAESNDHNQQHQKISVFHGLTRPNISIHSYLERIFKYANCSPSCFVVAYVYLDRFTQRQPSLPINTFNVHRLLITSVMVAAKFMDDMYYNNAYYAKVGGITKIEMNFLELDFXLFGLGFHLNVTPGTFQAYCVNLQREMLLIQQPLNFADSTLNLGQSLKAHLCFNEDECSHQKQTTASCLIPCIFSVHV

SEQ ID NO: 161499 - protein, 44 aa, Glycine max
  Clone ID: PAT_MRT3847_116851C.1.pep
FDLHMNPRNFKLSPNLGGDSIITMPVLFPTIKVATWQYIHLHLD

SEQ ID NO: 161500 - protein, 49 aa, Glycine max
  Clone ID: PAT_MRT3847_116852C.1.pep
GLNLKVSMCGQIPLAEVQMRQTPSSFCEIGGSSIYLSGLFRVCLWFLWD

SEQ ID NO: 161501 - protein, 88 aa, Glycine max
  unsure (1)..(88): unsure at all Xaa locations
  Clone ID: PAT_MRT3847_116853C.1.pep
AHSERKLIERERERVRRAYWLFIKIGIYRDSMHKRRATGGKDKAWRLKSKYHLXLRHANTYLSSIKSLXRIRVTYHCFSYRSLRLNTG

SEQ ID NO: 161502 - protein, 173 aa, Glycine max
  Clone ID: PAT_MRT3847_116854C.1.pep
TRKLGFIYKDKLAERHLKMGDVYQIPAGSAFYLVNIEEAQKLHIICSIDPSESLGIDIFQSFYLGGGAHPASVLSGFEPQILETAFNASGEELRKMFTRQHEGPIVHVGDSHATSIWTKFLQLKEEDKLQHLREMVQQEQEEEEEEFVAEEEKQTSWSWRKLLESVFGDEIKN

SEQ ID NO: 161503 - protein, 55 aa, Glycine max
  Clone ID: PAT_MRT3847_116855C.1.pep
QVYIALQFSHHLNSPSGLRTDCKHARSGSTHLHSSTYAAEQLHILLIASDIQSID

SEQ ID NO: 161504 - protein, 54 aa, Glycine max
  Clone ID: PAT_MRT3847_116856C.1.pep
KQTYSQFSTDHSSGHILANNNKRLNLTVTLLCHILLFHRLLSDHMLMHNPHHDL

SEQ ID NO: 161505 - protein, 83 aa, Glycine max
  Clone ID: PAT_MRT3847_116857C.1.pep
KNGRSLPKKYTRVFIRKHRGTQPREFILLRMKKEAFQPLPKGLKKALLVPNLAPSPGNRFRATLTPPIEGYFDQVREPPNRFR

SEQ ID NO: 161506 - protein, 110 aa, Glycine max
  unsure (1)..(110): unsure at all Xaa locations
  Clone ID: PAT_MRT3847_116858C.1.pep
XXXXXKXRNRGXXXVXSSSXXXWXXXXXVXRXSMRASHMXSHDMHLQWWXSHGWNXXXLFXYXXXXXGDXSLXRPCTXXHSXSILSXXXXLEPNRLEXRAEFRAXRTRAC

SEQ ID NO: 161507 - protein, 55 aa, Glycine max
  unsure (1)..(55): unsure at all Xaa locations
  Clone ID: PAT_MRT3847_116859C.1.pep
NNIKHKIKSQNYXSLCKLDYLRTQLVSRILYLIXSSPEYYCIEYTCPLTNILLIN

SEQ ID NO: 161508 - protein, 110 aa, Glycine max
  unsure (1)..(110): unsure at all Xaa locations
  Clone ID: PAT_MRT3847_11685C.1.pep
SFLPPPAPPAAPSLSIYLAVPQGQLVGRSVFGELIPSGPVIVMGASFTNVSYPRLPCSNKKDRFKYLCAAGNNSNPIPDPSWGIXLFNLSRNVQAPVDAWAGNSTTRSPF

SEQ ID NO: 161509 - protein, 61 aa, Glycine max
  unsure (1)..(61): unsure at all Xaa locations
  Clone ID: PAT_MRT3847_116860C.1.pep
LGQRDGGDXWTSDAGPLEAFKRFGKKLEETEKKRREKSEDDTLRNRYGGEKMPDSRGYPHS

SEQ ID NO: 161510 - protein, 87 aa, Glycine max
  unsure (1)..(87): unsure at all Xaa locations
  Clone ID: PAT_MRT3847_116861C.1.pep
STQAHLPPLLCSAAAAGXNLPPPPTSXPPRKRAKDQXELXXQRGQGQXRQXXCESLPDPXDXKPREKRRRSXVRTPPAANTENETGR

SEQ ID NO: 161511 - protein, 36 aa, Glycine max
  Clone ID: PAT_MRT3847_116862C.1.pep
SSVCSRALYIKSCCSIRFYCPMEPQHQPKLEPEPEL

SEQ ID NO: 161512 - protein, 88 aa, Glycine max
  Clone ID: PAT_MRT3847_116863C.1.pep
IFAVLAPQQWPSRKLTKCCGSVFSPGWDPHQAPRGQNNIFSIRKKKVFAGCFPPPPHSSICIRWLSNKASNAHMLDATIQDLVKALMV

SEQ ID NO: 161513 - protein, 556 aa, Glycine max
  Clone ID: PAT_MRT3847_116864C.1.pep
MVNDAAGVTDNTAKEQVAGSAEDPTKNQAAGGAEDPPKDQVAGGAENPLNDLIDLAQNPESEQAGSEENLLNNQAGGVENSAKNHAAAGAGDPPNDQAADGSENSAKNISARSAGDPPHDQTADGIENSLSNQSEATEKLVNDEQGPAESFVEDEVHVIETPEKCQKYGVETPISSKAERLPEEAKEILKSLASKWEDVFDANALQVIPLKGAMTNEVFQIKWPTTTGELSRKVLVRMYGEGVDVFFNRDNEIQTFEFMSKNGQGPRLLGRFTNGRVEEFIHARTLSASDLRNPSISALIAAKMKEFHDLDMPGEKKVHLWDRLRNWLSEAKRLSSPKEVEAFYLDTIDKEISILEKELSGSHQQIKFCHNDLQYGNIMLDEETNSVTIIDYEYASYNPVAFDIANHFCEMAANYHTEEPHILDYNKYPDFEERQRFVQAYLSTSGEQPSDSEVEQLLQEIEKYTLANHLFWGVWGIISAQVNTIDFDYKEYAKQRFQEYWARKPYLLINSEAPSPYNVPEGTGELASALPTKSKNSGIFRKMKRVLGLGLFKSKS

SEQ ID NO: 161514 - protein, 411 aa, Glycine max
  Clone ID: PAT_MRT3847_116865C.1.pep
SAKNHAAAGAGDPPNDQAADGSENSAKNISARSAGDPPHDQTADGIENSLSNQSEATEKLVNDEQGPAESFVEDEVHVIETPEKCQKYGVETPISSKAERLPEEAKEILKSLASKWEDVFDANALQVIPLKGAMTNEVFQIKWPTTTGELSRKVLVRMYGEGVDVFFNRDNEIQTFEFMSKNGQGPRLLGRFMNGRVEEFIHARTLSASDLRDPSISALIATKMKEFHDLDMPGEKKVHLWDRLRNWFSEAKRLSSPKEFEAFYLDTIDKEISILEKELSGPHQRIGFCHNDLQYGNIMLDEETNSVTIIDYEYASYNPVAFDIANHFCEMAANYHTEEPHILDYNKYPDFEERQRFVQAYLSTSGEQLSNSEVEQLLQEIEKYTLANHLFWGVWGIISVSSLSHSVLFVL

SEQ ID NO: 161515 - protein, 87 aa, Glycine max
  unsure (1)..(87): unsure at all Xaa locations
  Clone ID: PAT_MRT3847_116866C.1.pep
SKLAYPPHVHFSPSPSSNYLFLKTHKPSATHLSSSXHATPXTMPXXXAAANXTTRSPLPFTVXGAARGKFERKKPHVNXGXIGXVDR

SEQ ID NO: 161516 - protein, 69 aa, Glycine max
  unsure (1)..(69): unsure at all Xaa locations
  Clone ID: PAT_MRT3847_116867C.1.pep
XNXTXXXXIXXQXXXPFWVXXKXKXGXVKXXXXPXQXSRXLXVQXEXTXRDLXCXXSXXPSSTXAXXRX

SEQ ID NO: 161517 - protein, 95 aa, Glycine max
  Clone ID: PAT_MRT3847_116868C.1.pep
ARNSAPKIGSETENGPGTWAGPDPSSQRGASRKKRPKTLKKNPWKSARFITSWTPPLLHPDSGPMFPKGTRKKSLVLIKVFSTLKIKLPHRCISL

SEQ ID NO: 161518 - protein, 80 aa, Glycine max
  unsure (1)..(80): unsure at all Xaa locations
  Clone ID: PAT_MRT3847_116869C.1.pep
KYVXXXXXXXXXXVWALDTXAXPYEWRKLEPEGEXPPPCMYATASARSDGLXLXXGGXDANXVPXSSAYGLAKHRYGRXX

SEQ ID NO: 161519 - protein, 704 aa, Glycine max
  Clone ID: PAT_MRT3847_11686C.1.pep
MGNGSRSYSANRSDYKLLEEVGYGASATVYRAIYLPYNEEVAVKCLDLDRCNINLDDIRREAQTMSLIEHPNVVRAYCSFVVERSLWVVMAFMAQGSCLHLMKAAYPEGFEEAAIGSILKETLKALEYLHRHGHIHRDVKAGNILLDDNGQVKLADFGVSACMFDTGDRQRSRNTFVGTPCWIAPEVLQPGTGYNFKADIWSFGITALELAHGHAPFSKYPPMKVLLMTIQNAPPGLDYDRDRKFSKSFKEMVAMCLVKDQTKRPSVEKLLKHSFFKQAKPPELSVKKLFADLPPLWNRVKSLQHKDAAQLALKKMPSAEQEAISQSEYHRGVSAWNFDIDDLKAQAALMQDGDDIAEMREEDENKFFSSYKGTADSQFIVDEKNSNNLQQYEFTSQVGSNDIPQCEKRNGSVAEATPSTLENDVGTSKVKTQSVKLGKTQSGPLMPGLVLGHSSSERGRTFERFENENQLAGEKSNRDIRRAPSFSGPLMLPNRASANSLSAPIKSSGGFRDSLDDKSKANLVQIKGRFSVTSENLDLVKDIPVSSVSRRSSQGSPMRKSASVGDWMVDYKQMPIGQSSNDSANINIPASLLVPHLHNLFQQTSIQQDLIMNLLNSLQTAEAIDTSQNGKLPPLPRNSENNGSADTAVSEREQLLLGKISELQSRMINLTDELTYEKLRYVQLQQQLTGLYSQEQNGEREEFA

SEQ ID NO: 161520 - protein, 39 aa, Glycine max
  Clone ID: PAT_MRT3847_116870C.1.pep
FLFKQRHRYWSDRQRMTVRFIRRNHNFSLGNSVTFNIYP

SEQ ID NO: 161521 - protein, 40 aa, Glycine max
  Clone ID: PAT_MRT3847_116871C.1.pep
HFVLSLSDSLHNKATNIMLLNSIVSYSKLQLHSLNHKLEN

SEQ ID NO: 161522 - protein, 51 aa, Glycine max
  Clone ID: PAT_MRT3847_116872C.1.pep
NNLIFLTYFFSKLFYLNSPPRIYFHLFIKKRYLSHHRFINFIFLKMPPPYI

SEQ ID NO: 161523 - protein, 34 aa, Glycine max
  Clone ID: PAT_MRT3847_116873C.1.pep
LYQHSCDRLVYCTIKCLLIMFSGEFSNSPPNHFF

SEQ ID NO: 161524 - protein, 133 aa, Glycine max
  unsure (1)..(133): unsure at all Xaa locations
  Clone ID: PAT_MRT3847_116874C.1.pep
MSDEPPSPASPETPKEPATQAIEVPLPAVPETTKEPATPASEVPSPAAPETTKEPPTPASEVAPPVAPETTMEPPTQAXEVPSPAAPETTMEPPTQALEVPTPAASETTMVPPTQALEVTSPASADTTMEPPT

SEQ ID NO: 161525 - protein, 52 aa, Glycine max
  Clone ID: PAT_MRT3847_116875C.1.pep
HNDPHRLVVLRPESRCAGYCYFINKYSRPPSLINLSIEDHDALGSTRTDTLL

SEQ ID NO: 161526 - protein, 51 aa, Glycine max
  Clone ID: PAT_MRT3847_116876C.1.pep
SFYSFYPFVSFRICLQSRNYVTSFCPITFNEVLISGSRMNLSVRFVFSLLH

SEQ ID NO: 161527 - protein, 92 aa, Glycine max
  Clone ID: PAT_MRT3847_116877C.1.pep
NEIACTKGPHGPVPRVCFFPGGESYAPGFEDGPLRIWQAGPLPLDGSETGFANGSVYKVKVSPNKVSHKIEGFPIPDEGEFKKKNGAVGEPS

SEQ ID NO: 161528 - protein, 358 aa, Glycine max
  Clone ID: PAT_MRT3847_116878C.1.pep
MISLADAYHVVAATVPLYVTLILAYISVKWWKIFTPDQCSGINKFVAKFSIPLLSFQVISSNNIYKMSLKLMYADFLQKLLAFLALIAITKISGRGGLKWIITGLSITTLPNTLILGIPLVKAMYKSEAVVLLAQIIFLQSMIWYNLLLFLYELDAVKTRPTAAASSSQGSGETDTGREVQSKGEEDAEPRIKRKRKVLLILVTVGKKLIKNPNTYATLLGFIWSSIKFRWGLHMPEVVSQSIEILSNGGLGMAMFSLGLFMASQSSIIACGPRMAMVAIGLKVVLGPTLMAVASFVIGLRDTLFKVAIVQAALPQGIVPFVFAKEYNVHPAVLSTAILLGMLIALPVELAFYFLLAI

SEQ ID NO: 161529 - protein, 58 aa, Glycine max
  unsure (1)..(58): unsure at all Xaa locations
  Clone ID: PAT_MRT3847_116879C.1.pep
AGIWNLRGEKAKIRFLGQQLXGSVLFPNGSLRDGDTPPKTQLVWGIVKDMLKPPPFSS

SEQ ID NO: 161530 - protein, 74 aa, Glycine max
  Clone ID: PAT_MRT3847_11687C.1.pep
GHGRTRLNLKLYAAKIKIFRLVMSWRQTDYCRPRQFIAHILFKNKATVFFKRTCSTKNVGGQRFLHESGIASNY

SEQ ID NO: 161531 - protein, 146 aa, Glycine max
  unsure (1)..(146): unsure at all Xaa locations
  Clone ID: PAT_MRT3847_116880C.1.pep
ERPLILWGLPPPPFVWVSEMKEILFFFFSGPIGVFPNLGPFAPPVDLGFLRILFFKTPWLPRAFLGGFSXITHNGTPVFVNYAEKGGALFPPKAPPPFLIPEVFFFKGEGQRKPQRAIFAFFRVWPRVGASHVFSYPVGGPEFRDS

SEQ ID NO: 161532 - protein, 86 aa, Glycine max
  Clone ID: PAT_MRT3847_116881C.1.pep
VILNMETIMDEFEIIGNPKPYMDSDIPTVRASDSASADSTVENLPRSYNSNNSSAGQNASHNNTQNFRPTIQPPYQPPPLYKGRGP

SEQ ID NO: 161533 - protein, 84 aa, Glycine max
  Clone ID: PAT_MRT3847_116882C.1.pep
TLTLILNQTACYRKRISVSSVRPPKEKTTPPSNQQTPPRRYSTLTKHTAHGYLQQTHPQRRIHTPKTTIYPVRNPRTQILTLDH

SEQ ID NO: 161534 - protein, 202 aa, Glycine max
  Clone ID: PAT_MRT3847_116883C.1.pep
MPSKRKTRSSASPAAAPPSKRASRSSASRVADSAPVKSEAEEVVAASSVVKEEAQASFTDVTDGNVSDGEGTNARFVGEPVPDEEARRRWPKRYQEKEKKQSAGPKSNRNDEDEEIQQARRHYTQAEVDGCMLYKLYDDAHVKAEEGEDNYICKIVEIFEAIDGALYFTAQWYYRAKDTVIKKLAYLIEPKRVFFSEVQDDN

SEQ ID NO: 161535 - protein, 82 aa, Glycine max
  unsure (1)..(82): unsure at all Xaa locations
  Clone ID: PAT_MRT3847_116884C.1.pep
ELFKMVCEENETDVDIGIPAVMLXPQDAGLTLERHIENKSNVXIQLYSPLRPLVDVXEVFLWXMAVXTIXIXSXXSAWSDRE

SEQ ID NO: 161536 - protein, 57 aa, Glycine max
  Clone ID: PAT_MRT3847_116885C.1.pep
YWTVISQCYRSLSDAISLCKIRAHTGSSFRRGISIHYDSSHYNGTNIMYCTTCREFV

SEQ ID NO: 161537 - protein, 89 aa, Glycine max
  Clone ID: PAT_MRT3847_116886C.1.pep
VLMASTYFHILHPKTMPQPPAYFQILVLIMLLLLLLVVLKQIYYFIVNPVLDVKTTPSTSSQTIWDLRFGHPDANVLRLMLNHCKYTHS

SEQ ID NO: 161538 - protein, 60 aa, Glycine max
  unsure (1)..(60): unsure at all Xaa locations
  Clone ID: PAT_MRT3847_116887C.1.pep
KTKYKVLLLLIIGXYNHIYYKQKILYLFEIHVINLYKHPSFVYSNTRISIHYKSFLLFKH

SEQ ID NO: 161539 - protein, 54 aa, Glycine max
  Clone ID: PAT_MRT3847_116888C.1.pep
TRYINGFISHKQLNLHLQLLNHSQIIQFNFRQPLNKHPTNCTSLTFTKDKIILI

SEQ ID NO: 161540 - protein, 74 aa, Glycine max
  Clone ID: PAT_MRT3847_116889C.1.pep
KKISYMVYFIIHLLVFNNINLETSPPTLLISSCHHMGNFQSAFPALLLFASFFLHYKNFNVLIFMINTQLKNFA

SEQ ID NO: 161541 - protein, 709 aa, Glycine max
  unsure (1)..(709): unsure at all Xaa locations
  Clone ID: PAT_MRT3847_11688C.1.pep
MGSGSRSYSANPADYKLLEEVGYGASATVYRAIYLPYNEEVAVKCLDLDRCNSNLDDIRREAQTMSLIEHPNVVRAFCSFVVERSLWVVMGFMAQGSCLHLMKAAYPEGFEEAGIGSILKETLKALEYLHRHGHIHRDVKAGNILLDDNGLVKLADFGVSACMFDTGDRQRSRNTFVGTPCWMAPEVLQPGTGYNFKADIWSFGITALELAHGHAPFSKYPPMKVLLMTIQNAPPGLDYDRXLCGTVKIXDRKFSKSFKEMVAMCLVKDQTKRPSVEKLLKHSFFKQAKPPELSVKKLFADLPPLWNRVKSLQHKDAAELALKKMPSAEQEAISQSEYHRGVSAWNFDIDDLKAQAALMQDDDDIAEMREEDENKFFSSYKGTTDSQFIVDKKNSNNLQQDEFTSQVGSNDIPKSEKRNGSVAEATPSTLENDVGTSKVKTQSVKLGKTQSGPLMPGLVLGHSSSERGRTFERFENENQLLGEKSNRDIRRAPSFSGPLMLPNRASANSLSAPIKSSGGFRDSLDDKSKANLVQIKGRFSVTSENLDLVKDIPVSSVSRRSSQGSPMRKSASVGDWMVDFKQMQSSNDSANINIPASLLVPHLHNLFQQTSIQQDLIMNLLNSLQTAEAIDTSQNGKLPPLPRNSENNGSVDTAVSEREQLLLGRISELQSRMINLTEELTYEKLRYVQLQQQLALYSQEQNGEREEFA

SEQ ID NO: 161542 - protein, 88 aa, Glycine max
  Clone ID: PAT_MRT3847_116890C.1.pep
GKHLNHCISNRTIGPKRYYNTNYIDNKNPPIIWRALTRGLDAKLLLTLYSANGSITKTTTTTTWMGQNHCTIQICPAYSANWQLLTHH

SEQ ID NO: 161543 - protein, 50 aa, Glycine max
  unsure (1)..(50): unsure at all Xaa locations
  Clone ID: PAT_MRT3847_116891C.1.pep
ARAHVSPATGIIRPDQIVEVSLHHEEFQTLEELADGXXHNSWXEHSRDKE

SEQ ID NO: 161544 - protein, 88 aa, Glycine max
  Clone ID: PAT_MRT3847_116892C.1.pep
MLKWLVSVSAIDTRFTTFGIYVQRHGFGGYNVTRDLGAYALVCTAIFRMGNGIPLGVLWAPSSLRGQPYRVTDYAMLGGYHHRSQPAW

SEQ ID NO: 161545 - protein, 140 aa, Glycine max
  unsure (1)..(140): unsure at all Xaa locations
  Clone ID: PAT_MRT3847_116893C.1.pep
GDLIADLAIEATTTVGVEIGQGXTDVDMHAEDWILLLKIEEEYIEELCMQILKFKPDLVILDQGLTDLATHYLSKHGVSAMRRLSKSDNNRIAKASGVVIMNXRPDELQESDVGTGAGLFEVNKIGEEYFSYIVNCKEPT

SEQ ID NO: 161546 - protein, 68 aa, Glycine max
  Clone ID: PAT_MRT3847_116894C.1.pep
LQTDPKLKHKQIRSKFETHKIKNTTLSPIRLCFKKEKVETVGRRKNDFQCHTVAGKKPASQEIRSRSD

SEQ ID NO: 161547 - protein, 39 aa, Glycine max
  Clone ID: PAT_MRT3847_116895C.1.pep
TLLLVQHLHIGRPVLAVTGDCTKVAPALHEAYIITYMSV

SEQ ID NO: 161548 - protein, 82 aa, Glycine max
  unsure (1)..(82): unsure at all Xaa locations
  Clone ID: PAT_MRT3847_116896C.1.pep
KQQPPTXXLSXPSLAGXXXKLGHIXPEVGXVSMRXXVNKQASXGSPWXGPDXVKYLGPFSGEAPSYXXGEFPGDYGXDNAGF

SEQ ID NO: 161549 - protein, 120 aa, Glycine max
  Clone ID: PAT_MRT3847_116897C.1.pep
LSKALPPGGPPPPFLKVFPRFFGGPLKIFKKKPFFLVPPLLRVFPQKMVGKIGLTPLVFKMVKAFNLFLFSQIPLLRLFLDCFDWPPPFPKKIGWGLCSLPEAGYFLGVFPPPLLNFPGF

SEQ ID NO: 161550 - protein, 160 aa, Glycine max
  Clone ID: PAT_MRT3847_116898C.1.pep
LAPSTFKTGFLSYTTNSAKVVFLNQRPQTRNFRGSGNFCSTCDRSLQDPYHFCSLSCKINYLVRTTDSLCGYLFECNYLPLLESGLDDGLMMTPDSVLEPSGSGGYGGVDCRTTLACTATTEIVRKKRTGGAAFRLPFPAGVLAGLGNLGVSHEPGGKGT

SEQ ID NO: 161551 - protein, 108 aa, Glycine max
  unsure (1)..(108): unsure at all Xaa locations
  Clone ID: PAT_MRT3847_116899C.1.pep
NVGKGYCFSLFIYFLKRLYFYFFFXFKFHNFYLFPIFKIFKPTTKLIYFIFLFYNTYFFFFFFFFFFFFFLFFFFFFFFFFFFFFFFFFKLNHINVIYSTTLFNYMAK

SEQ ID NO: 161552 - protein, 63 aa, Glycine max
  Clone ID: PAT_MRT3847_11689C.1.pep
KLKRSRGFTRFSLPKCLLKRSPKKPIRSQASPLSCPQINDAEKLLVKYDVLLMACLVFKPSKQ

SEQ ID NO: 161553 - protein, 348 aa, Glycine max
  unsure (1)..(348): unsure at all Xaa locations
  Clone ID: PAT_MRT3847_1168C.1.pep
ECQDRRSRSEALLKRLXSLDLNNASGSGSLPRLQTLKKTSISSRRSGTATFPSPGTLNYRVAMHKGWSSERVPLHAGATRKHVLPFNNGKTLPSKWEDAERWILSPVSADGTGRASLNAPQRRPKSKSGPLGPPGVAYHSMYSPAAPVFEVGNGGSFMEGSPFTGDGLIICTSSLHALCSALGGPRLTESVIINAXQEDKFGGFKDVGTNVSRATSRRDMATQMSPQGSSRSSPNLRPSFSASTPSTLPVTELRTVGSSKVDIRDVQVDEHVTVTRWSKKHRALFTGRGSEKVESWKKELSTQSSTWDVSETSKPASKTRSEEAKISAWENLQKAKAEAAIRKLEVTS

SEQ ID NO: 161554 - protein, 74 aa, Glycine max
  Clone ID: PAT_MRT3847_116900C.1.pep
GPPGPVAPKGPPPLSQLKNPVVPKKAPGHPKLGHPPPPPKGPPKFFLPKYSGPLREQGHHQGEVKPSFPKVPFF

SEQ ID NO: 161555 - protein, 308 aa, Glycine max
  Clone ID: PAT_MRT3847_116901C.1.pep
LRGWKTCDVEYQSYFALDDLWESFKEWSAYGAGVPLVLDQRQSVVQYYVPYLSAIQVYGQSDKKSNAKPRYTSEDSDGDYCRDSSSDGSSDSEYGKRTELFTAQRNSHYHTGDASFQMSTLSVHDKCNTMQEGFSSDDSETGNPQDLLFEYFEQDPPYSREPLADKIQDLARHYPTIKSLRSCDLLPVSWVSVAWYPIYRIPTGPTLKDLDGCFLTYHTLHTPLTGNGGTQAPILVYPNDIDGGVPKISLPTFAMASYKLKGSIWTQNGVSESQVVNSLLQAADNWLRLLQVNHPDYQFFVSHGTYNR

SEQ ID NO: 161556 - protein, 387 aa, Glycine max
  unsure (1)..(387): unsure at all Xaa locations
  Clone ID: PAT_MRT3847_116902C.1.pep
MLGTALQFGGVRGDDRFYIPVKTRKSQNQRKQSHRAKNNEPENTDLASKSKIDVSEDNNSNSDSNLNQSLKPTLSPSVEAVSNIDRFLEFTTPSVPAQYFSKTTMRGWKFCDVEYQSYFTLSDLWESFKEWSAYGAGVPLVLDQSDSVVQYYVPYLSAIQLYAHSAEKSSAKPRYTSEDSEGDYCRDSSSEGNSDSEFGKRSELFIAQRNSQYHTGDASFEMSRLSVHDKHNNNTMQVGFSTDDSETWNPKDLLFEYFDHDPPYSREPFSDKXYPIYRIPTGPTLKDLDAWFLTYHTLHTPLTGNGGTQAPILVYPNDIDGGVPKISLPTFAMASYKLKGSXIWIQNGVSESQLANSLLQAADNWLRLLQANHPDYQFFVSHSTYHR

SEQ ID NO: 161557 - protein, 44 aa, Glycine max
  Clone ID: PAT_MRT3847_116903C.1.pep
SSRSIRSIGWSTQPKLCKLIKHIPIKLASDGSHAKKGFSDLRPL

SEQ ID NO: 161558 - protein, 44 aa, Glycine max
  Clone ID: PAT_MRT3847_116904C.1.pep
LISHRSAYPLMLDPITATITRVTSSTTGDSTHPESLQCQFTSLP

SEQ ID NO: 161559 - protein, 130 aa, Glycine max
  Clone ID: PAT_MRT3847_116905C.1.pep
MEADAIAVDSTELKLTELLKEVNVDHSHQFSKLVDDTVSAIKTSIDKIPNDFKVTADLASRFVTDIGADKVEFKFKKPASVKIGGSYSIQSIAKPEVNVDLIIRVPKECFHEKDYLNYRYYAKRGLYLLL

SEQ ID NO: 161560 - protein, 84 aa, Glycine max
  Clone ID: PAT_MRT3847_116906C.1.pep
EQQQLIDDHFLFDKPVSPLLLASGMARDWPDARGIWHNDNKTFMVWVNEEDHLRVISMQKGGNMKEVFTRFCTGLTQIETLFKS

SEQ ID NO: 161561 - protein, 70 aa, Glycine max
  Clone ID: PAT_MRT3847_116907C.1.pep
RTMSQPTLFSSGFELASSVTSSVVLHRSWNVITSRYAGIVTNVGHGVSWKVYREPGSDLTIIAFEVKLDF

SEQ ID NO: 161562 - protein, 48 aa, Glycine max
  Clone ID: PAT_MRT3847_116908C.1.pep
SRWIIDEKGGLESHALARIHGTMSLAMGVYNWGFGGRDWLRILGKQEL

SEQ ID NO: 161563 - protein, 59 aa, Glycine max
  Clone ID: PAT_MRT3847_116909C.1.pep
IESTDYLHFAFFQLIMSNKIDYIIHNTANHKTHQDSLTPSFHAPSIPTHLCLFSNIYMH

SEQ ID NO: 161564 - protein, 174 aa, Glycine max
  unsure (1)..(174): unsure at all Xaa locations
  Clone ID: PAT_MRT3847_11690C.1.pep
VVELISLVIGQCLYNNVRKRPTTMXSLSNLKELNVSFNELEYVPESLCFATSLVKMNIGNNFADMRSLPRSIGNLEMLEELDISNNQIRVLPDSFRMLTRLRVLKVEENPLEIPPRHVAEKGAQAVVRYMADLVEKKDAKLQPLIKKKKGWAHHMCFFSKSNKRKRDGVDFVKT

SEQ ID NO: 161565 - protein, 77 aa, Glycine max
  unsure (1)..(77): unsure at all Xaa locations
  Clone ID: PAT_MRT3847_116910C.1.pep
XXXFFFFFFFFFFFFXXKKEFSHYLDGILPHSPFLFSKKPIRKVLKPLFLDLNFLNLVSWLEIFWIGRFFDLRKNNL

SEQ ID NO: 161566 - protein, 58 aa, Glycine max
  Clone ID: PAT_MRT3847_116911C.1.pep
TPAKTIYRVTYFFPKNSKRPFYSTFEGPLSRWGTPPENSIALNTSFSPMTPFQLTRPA

SEQ ID NO: 161567 - protein, 155 aa, Glycine max
  Clone ID: PAT_MRT3847_116912C.1.pep
MPMGKTWWIGPKANHASVKERLEAAMGYLREYTNNNIQIWVPLRRSAGQELGTDESDTIAFERNRNVKLRLFRSQEGCVGVPVLERGSGTCLGVLEIVMEDEVVSEMMVVKVCVGRKRCLWHWHGLHASNRSKPSTAGIQGMRAMCRLWRERALS

SEQ ID NO: 161568 - protein, 119 aa, Glycine max
  Clone ID: PAT_MRT3847_116913C.1.pep
GFGMARRHSSSSSESSEDDVRKRRGSESEDGERDRYRHGGGSSKKSSGHFSHRANGDDSDSGEERNGAKRDGKSKSRERKEEPESSEEEGQIVSKERVREENEEDGRLQWCHEGRGGET

SEQ ID NO: 161569 - protein, 91 aa, Glycine max
  Clone ID: PAT_MRT3847_116914C.1.pep
SQPRAPMWAHMCIHLHAMVHDTPEPTIPGELVNGAKQTTRTNMRAHGLNHGIPCLAPLRTIPHGIIQETVWNQRAPERTPMHFDTSTQSFR

SEQ ID NO: 161570 - protein, 96 aa, Glycine max
  unsure (1)..(96): unsure at all Xaa locations
  Clone ID: PAT_MRT3847_116915C.1.pep
MQMAIFKTASALSRLRSREGQQSNLXRNSIRWGLTSSSGNTDLYSELKELDADYQERVHTLMKDHGSVALRKNTADIGLGGKRGTTGLAWLALTCR

SEQ ID NO: 161571 - protein, 95 aa, Glycine max
  unsure (1)..(95): unsure at all Xaa locations
  Clone ID: PAT_MRT3847_116916C.1.pep
PDQIDKPDWDYDGTRKGDPNGSLQHTDEVKTPDQIERMRETCPIAREELDAPARIIHPGVTTDEIDRAAHDATIAAXGYPSPLNYLYFPKSSCTS

SEQ ID NO: 161572 - protein, 69 aa, Glycine max
  Clone ID: PAT_MRT3847_116917C.1.pep
NKILIVLIYTSNITLKLKISYKKVKKIIKNSKNTVKTFAVQVGKKYKKKKKLSKFNTEMYIEINFKKRN

SEQ ID NO: 161573 - protein, 91 aa, Glycine max
  Clone ID: PAT_MRT3847_116918C.1.pep
VSVHIARLISDFIYCLQGSRLQDTQWTRRGPTGSWSCQALITILCQFYGVSVTSSKGIRPPLLIELSSRSTASPGRWQAQGETPQQHWDGR

SEQ ID NO: 161574 - protein, 240 aa, Glycine max
  unsure (1)..(240): unsure at all Xaa locations
  Clone ID: PAT_MRT3847_116919C.1.pep
ILTRIRSHNPVCTIKIRFSSAYLYQDNIEMECAIKQDVTELIGNTPMVYLNKVVEGCVARIAAKLESMEPCSSVKDRLALSMIKDAEDKGLITPGKTVLVETTSGNTGIGLAFIAALKGYRLILAMPASMSLERRVVLRALGAELHLTDPAKGFKGSLQKAEELLRETPDAFMPHQFENPANPKIHYETTGPEIWTDSGGKVDALVAGIGTGGTITGAGKFLKERXPKIKVYGVEQEVQS

SEQ ID NO: 161575 - protein, 62 aa, Glycine max
  Clone ID: PAT_MRT3847_11691C.1.pep
KLLKKPEFQETKRIFLETMRLGGNPPQICFFPKVFFKHPFFFFFLKKNFCFCLNQGPKIRNG

SEQ ID NO: 161576 - protein, 289 aa, Glycine max
  Clone ID: PAT_MRT3847_116920C.1.pep
MGMADAKQRYAVVTGANKGIGLETVKGLASNGIKVVLTARDVKRGYQAVEELKREFGFSDLVVFHQLDVTDPSSVASLVEFVKIHFGRLDILVNNAGISGFNTDGMVPSKINWKELPQTYEMAEKCLTTNYYGAKETTEAFIPLLQLSNLPMIVNVSSEAGLLKYISNEWAMSVLDDTENLTEELIDEVLKEYMKDLDDGLLEKKGWPTYLSAYMVSKAAINSYTRLLAYRHQKLCINCVCPGSVKTDINRNTGILSVENGAASVVRLALLPNGSPSGHFFTRQEVSSF

SEQ ID NO: 161577 - protein, 209 aa, Glycine max
  Clone ID: PAT_MRT3847_116921C.1.pep
TRPLVQRERDPPEGPIPHLVARLCVLLCIVPLAIANVLRDDSEHNSSSVQVSMESEYRHEMKSGSSMKLGLISSVQVLGHFSGLLCPPTLVIDAANQAARKAASFIYNTMNGKGESGTGIHANTNTKAGGNLRHLIVEACIARNLMDTSVYFWPGYVSTSVLSLSDSSPLEKSPWSIFMEGTPLNNTLINSLTVTPASAWWNRKYTILH

SEQ ID NO: 161578 - protein, 233 aa, Glycine max
  unsure (1)..(233): unsure at all Xaa locations
  Clone ID: PAT_MRT3847_116922C.1.pep
MWPPWLNSPSXSATAPPPSPSPSHSRTRSFSFSCSSFKDIQSLLQEKPEPAAPKSPSLFRRVRISTAVLRAWGASRAAAPAALPPGLDQGVVVYFTSLRVVRRTFDDCRAVRSILRGLRVAVDERDVSIDDRFRDELHAVLGCRGNLALPRVFVGGVYVGGADDVRQLHESGELHRLIERLPRSNLNACDSCGGFRFVVCDECNGSHKVFAEKNGFLCCSSCNANGLIRCPAC

SEQ ID NO: 161579 - protein, 114 aa, Glycine max
  Clone ID: PAT_MRT3847_116923C.1.pep
KREKKRKKKGGKEDEGSDPLKRKCKRKGPPGGVLFDPGYPLAMKESKKIQQVKNPEEEEEWRGQKNQNFSGMEAEQREGWFPHALHVPLPVTTFPPLRIVEGSHGCDGGENDGQ

SEQ ID NO: 161580 - protein, 54 aa, Glycine max
  Clone ID: PAT_MRT3847_116924C.1.pep
ECCNKKARARIAERYVSRSSATVISFFYKCHTKILILLCRTFYITHTFILFNGK

SEQ ID NO: 161581 - protein, 84 aa, Glycine max
  unsure (1)..(84): unsure at all Xaa locations
  Clone ID: PAT_MRT3847_116925C.1.pep
RAWHSERHQPMRGSIIRQIFRVVAEAHSAATKSNKEWQEKLPIVVLRAEEIIYSKANSEAEYLXPETLLDRLNDAINTIIRXDE

SEQ ID NO: 161582 - protein, 61 aa, Glycine max
  Clone ID: PAT_MRT3847_116926C.1.pep
VNKFYDLATSFYEYGWGQSFHFAPRWKGESVREGIKRHEHFIALQLCLKPGQKVFMLDGAN

SEQ ID NO: 161583 - protein, 45 aa, Glycine max
  Clone ID: PAT_MRT3847_116927C.1.pep
LFKHQFFIGTTQTVCPLGHNAHNMGGNQTIRSSIIATQNLESIRL

SEQ ID NO: 161584 - protein, 95 aa, Glycine max
  unsure (1)..(95): unsure at all Xaa locations
  Clone ID: PAT_MRT3847_116928C.1.pep
SSPQMPNVPLVAPEDKASPLSHLHYAPCNNTEXQEAYLVNLPDVIRALPLHSTDEARHLRKTAMYRIVRMLKAPVTTITQIDNPHTTHSTINALD

SEQ ID NO: 161585 - protein, 181 aa, Glycine max
  Clone ID: PAT_MRT3847_116929C.1.pep
MSAALDMTLEDIIKNNKKSSLANTRGRGRASGPGPARRLPNRAANRAAPYAAAKAPETAWKHDMYANQPVAAAYPGGRASSIETGTKLYISNLDYGVSNDDIKELFLEVGDVKRHTVHYDRSGRSKGTAEVVFSRRADAVAAVKRYNNVQLDGKPCFEFCLLFTYSLMRNSRNCRRLKLKC

SEQ ID NO: 161586 - protein, 247 aa, Glycine max
  Clone ID: PAT_MRT3847_11692C.1.pep
CSLVNCLRYAPQQGSALAFNDALNNAFPKYDSKTHFWQSFTVKLLSGGLAGAIANTICYPFDFARTRLASDLKGGQGRFKGIGDCIMTTVKQQGITGLYTGWSVTVAGAFIYRAGQLGCFKQIQDLNPYQNDKGPIGAVASFVAATAARTVIMPFNYPFDTVRRRMMLESEKPLAERQYRGSFDCARKVLSKEGLKGMYKGMIPELFRGGGGFLVIVPYDRVNINLQPLNLPLLFPPLLPFLLISFS

SEQ ID NO: 161587 - protein, 79 aa, Glycine max
  Clone ID: PAT_MRT3847_116930C.1.pep
MQDIYFFRSQGQPTTGSQAWGLLIHRTLCEPYLTASFSWMEDRSKYRGWLSCQPVMNRWPSCGHTCKGCSLNVWIPIPR

SEQ ID NO: 161588 - protein, 122 aa, Glycine max
  Clone ID: PAT_MRT3847_116931C.1.pep
AHLLKMTGKGVRVCQKVIVAKLIDLKKIDNEATLRVERSKTKFVSLPLVSTQHQMDTNTLGVDPKKRKTSSVENVFNLQARETLDHEIAKMFYSSGLPFHLARNPHYRKAFAYVANNQISGY

SEQ ID NO: 161589 - protein, 80 aa, Glycine max
  Clone ID: PAT_MRT3847_116932C.1.pep
MKSRIFFALFLFCAFTTSYVPSAIPDVVLDNEGNALENGGTYDILSDITAVGGIRSAPAGTDICPLNVVESRNDLGQMDW

SEQ ID NO: 161590 - protein, 68 aa, Glycine max
  Clone ID: PAT_MRT3847_116933C.1.pep
GLNGLFKPLVRETGFLFAVPNQKKFCCAPISCGGEIIFFVQISAGRPKNKKIHVLFIDPPKLCWTSPG

SEQ ID NO: 161591 - protein, 70 aa, Glycine max
  Clone ID: PAT_MRT3847_116934C.1.pep
MEKDYSPLTWPKNEPHNAGPIFGLGEMVPPRTFLGQGRIGNSLSRSDALGDHSQTKITSILREGPFKHPF

SEQ ID NO: 161592 - protein, 55 aa, Glycine max
  Clone ID: PAT_MRT3847_116935C.1.pep
NLFNMSNNNKVKGLLIGLRFISQIFGTWHSLIGIISNELCYLFLFSNIKVEKEYG

SEQ ID NO: 161593 - protein, 91 aa, Glycine max
  Clone ID: PAT_MRT3847_116936C.1.pep
KLISAKIFMHVKVDITTQNRPFPGLCRSDPKLHVSPQLVIHIIPIIIPILGVRLPSVNGRHGDRMYHGHPTLRVGYHILTWNLHLLHKHQN

SEQ ID NO: 161594 - protein, 90 aa, Glycine max
  Clone ID: PAT_MRT3847_116937C.1.pep
PHVRSLPLSFTYNPTAYSGWADTTEASAQNIVLLLYVMDLNLATHTNSTWGRGILTEAYNLPTLQYLNVQVTINTLYFFYQLNLFYCTIT

SEQ ID NO: 161595 - protein, 62 aa, Glycine max
  Clone ID: PAT_MRT3847_116938C.1.pep
FVLENLLQKNWLIPPQYPCFSWVQVQARFWSMFGPGHSIMSVLTRSVMFIQHKHVVSLMLVQ

SEQ ID NO: 161596 - protein, 57 aa, Glycine max
  Clone ID: PAT_MRT3847_116939C.1.pep
SFIFLSLQLSSILFFSSNRSFDYSCLFCFPSLYFFLREREISFYISFSSHYRILIIK

SEQ ID NO: 161597 - protein, 92 aa, Glycine max
  Clone ID: PAT_MRT3847_11693C.1.pep
KFHLLVINLLGGKIPLPEKFENDVIRIYTFYAMKYRIFGKYPVVLYSLGRRRSRLSYIRGHVQNFIRYAKVIVGKEHIGVSLGLNITNFSRG

SEQ ID NO: 161598 - protein, 83 aa, Glycine max
  Clone ID: PAT_MRT3847_116940C.1.pep
TLYFFSHSLTLYVFLYVFCSFYLSPVISVSKILIPFCSVLLLNYLVPKPHCQVLFIGFVFVILLLSLYLSVFLISSCLCTPPV

SEQ ID NO: 161599 - protein, 73 aa, Glycine max
  Clone ID: PAT_MRT3847_116941C.1.pep
VYSSVSHALPGVRRSRVLDIGVRGQVPCGEVTFWPRRPALIEPRAVLGVSALGRKPDSLAKGRLPSATARSHS

SEQ ID NO: 161600 - protein, 70 aa, Glycine max
  Clone ID: PAT_MRT3847_116942C.1.pep
INLMILFSELLDVTYGFYFVLLNHQFYFQFLVFSINEKGEIRRQKYHSRAIFIPWKGSEDCSIHGMQESC

SEQ ID NO: 161601 - protein, 56 aa, Glycine max
  Clone ID: PAT_MRT3847_116943C.1.pep
SESRHEAFLSSNSQCISSSGAFHGVYLGAQTLYFFRVVEKPVTQFSIVCSPVNLEP

SEQ ID NO: 161602 - protein, 55 aa, Glycine max
  Clone ID: PAT_MRT3847_116944C.1.pep
CVPQKHPNATQMDDESPRLHQAPIDISERYATKGMKNSNVLSITDCHIHIFSKFI

SEQ ID NO: 161603 - protein, 58 aa, Glycine max
  Clone ID: PAT_MRT3847_116945C.1.pep
EQVFLLPVLSSLGVVEKKQKLYIKLYFLIIFNLKLKKMNLFCYIYVTYFLEVISTSFV

SEQ ID NO: 161604 - protein, 82 aa, Glycine max
  Clone ID: PAT_MRT3847_116946C.1.pep
SLILSLIRATCIVEFIPSRSVQICRGATIVLSLYADIILFCAFIPKGQLPGTSTVPAYLWTSHNEQASDNGYEGICKLPSHF

SEQ ID NO: 161605 - protein, 119 aa, Glycine max
  unsure (1)..(119): unsure at all Xaa locations
  Clone ID: PAT_MRT3847_116947C.1.pep
TRVHTSAHAACVAAQLLAHLGLKVKEKGHVKVHIIVHVNVHVYSTTCNITDQLIYMLERIDKRVIERSDKVAAKTNKNAFKHAXLLDKLKAGLAIGITIDNAVTTYDSSTYYCAPIHTP

SEQ ID NO: 161606 - protein, 39 aa, Glycine max
  Clone ID: PAT_MRT3847_116948C.1.pep
DSSAAPERRNRRGVTIGGLEDLGPYPSTLRQVPSKCILS

SEQ ID NO: 161607 - protein, 125 aa, Glycine max
  Clone ID: PAT_MRT3847_116949C.1.pep
KTLGGPLIGPGKKLNPFFKGGKTFEVLILWVSKIACVKVKKGETLQGGTRVYFWVPPSNSRGKNKWVLGAPQFPFLGVFCLGIRGKKILNRAPFLFFYRGSLKKGKLVIKRENISCPNKKCLFSQ

SEQ ID NO: 161608 - protein, 81 aa, Glycine max
  Clone ID: PAT_MRT3847_11694C.1.pep
TRPASFSFLLTIPIFSLTHVVFLRKQRKRKKEKKMFRLPPPPSLPDGGVPAIPAFVIIAIFVFIFLFVKITDSSTNYCIYS

SEQ ID NO: 161609 - protein, 110 aa, Glycine max
  Clone ID: PAT_MRT3847_116950C.1.pep
KTSDNGEKKLLAVARLIDKTLGHNITMSDDIFHILSHFDGRFLRENLSENGADVDPRGCAELDHYVESLDRRICSYVCYDRTIWVDDDDDDDFLDAEDELAGDVAEWNQL

SEQ ID NO: 161610 - protein, 99 aa, Glycine max
  Clone ID: PAT_MRT3847_116951C.1.pep
LPSFFYYCILLYAKLQREYVVATILMYRISEYLNSRHPSLANLHQQRLYPMVIQRISGYASSRLLTAHKLWNWKDLVSTPFDRSPRTNVQRRGYGINRN

SEQ ID NO: 161611 - protein, 88 aa, Glycine max
  Clone ID: PAT_MRT3847_116952C.1.pep
VAQSFVSHHFVLCFIEEDAISICMCHIYQISSRFIRQGDYLCLNILGFVLTVRLVVAGISELGFAFLCPLAVAHCLFYLFFFIQFILF

SEQ ID NO: 161612 - protein, 67 aa, Glycine max
  unsure (1)..(67): unsure at all Xaa locations
  Clone ID: PAT_MRT3847_116953C.1.pep
TLIHRFQICVTYCLXPSEPYVMPHMHALELCLHTGFLSSLNVVASSGSHRTTHHIVNLTLSLSHLAN

SEQ ID NO: 161613 - protein, 165 aa, Glycine max
  Clone ID: PAT_MRT3847_116954C.1.pep
LTADQLLMKCLSSDKILDPSLFDQVIEFLPNQLCHDLKLINDCINDVLMEVCRNYFGVSPCVSFKNPSIRLSPNMKKVVLMVWKGVCWHFLPLPPPRTLDKIIKKDMDKNGAWLDHNLDAETIGFEMGEAILAELMEDTILSCVSKSPESECSQLQFEYKANENS

SEQ ID NO: 161614 - protein, 441 aa, Glycine max
  unsure (1)..(441): unsure at all Xaa locations
  Clone ID: PAT_MRT3847_116955C.1.pep
MTIATDSLLQVVEEEEGPPDFALLDPEDNSRPRRIALFVEPSPFAYVSGYKNRFQNFIKYLREMGDEVMVVTTHEGVPKEFYGAKLIGSRSFPCPWYQKVPLSLALSPRIISAVAEFKPDIIHASSPGIMXFGALIIAKLLSVPIVMSYHTHVPVYIPRYTFSWLVQPMWWVIKFLHRAADLTLVPSAAIAKDLEEARVTAANKICLWNKGVDSESFHPRFKSHEMRLRLSNGEPEKPLIVHVGRLGVEKSLDFLKSLMDRLPEARIAFIGDGPYREELEKMFEGMPAVFTGMLGGEELSEAYASGDVSVMPSESETLGLVVLEAMSSGIPVVXARAGGVPDIIPEDQDGKIGYLYTPGDLEDCLSKLKPLLDDKELRETMGEAARLEMEKYDWRAATRKIRNENYKAAIWFWRKKRAQLLRPFQWLAQPIFPSPDPEANS

SEQ ID NO: 161615 - protein, 441 aa, Glycine max
  Clone ID: PAT_MRT3847_116956C.1.pep
MTIAEDSLLQVVEEEEGPPDFALLDPEDNSRPRRIALFVEPSPFAYVSGYKNRFQNFIKYLREMGDEVMVVTTHEGVPKEFYGAKLIGSRSFPCPWYQKVPLSLALSPRIISAVAEFKPDIIHASSPGIMVFGALIIAKLLSVPIVMSYHTHVPVYIPRYTFSWLVQPMWWVIKFLHRAADLTLVPSAAIAKDLEEARVTAANKICLWNKGVDSESFHPRFKSHEMRLRLSNGEPEKPLIVHVGRLGVEKSLDFLKSLMDRLPEARIAFIGDGPYREELEKMFEGMPAVFTGMLGGEELSQAYASGDVFVMPSESETLGLVVLEAMSSGIPVVGARAGGVPDIIPEDQDGKIGYLYTPGDLEDCLSKLKPLLDDKELRETMGEAARLEMEKYDWRAATQKIRNENYNAAIWFWRKKRAQLLRPFQWLAQRIFHSPDPEANT

SEQ ID NO: 161616 - protein, 78 aa, Glycine max
  Clone ID: PAT_MRT3847_116957C.1.pep
SGPQKFPSFVLQESPPGKKRGRFPLFRAAAAIESPPRTGVTKRNPIGPVTRGLTGPLLKTEKLGFLARAGVKKNRFWI

SEQ ID NO: 161617 - protein, 47 aa, Glycine max
  unsure (1)..(47): unsure at all Xaa locations
  Clone ID: PAT_MRT3847_116958C.1.pep
SSKKNLCHINNSSXXNKYKTTARILKEDKTIXGKPKXQSEPSDSATI

SEQ ID NO: 161618 - protein, 272 aa, Glycine max
  unsure (1)..(272): unsure at all Xaa locations
  Clone ID: PAT_MRT3847_116959C.1.pep
TAARRRQKGEKEKQELEEELEEYRQKVMEYEAKEKLRVLRRMKDGSVRSRDSSSSCSNMNYTDELSIDLNREAQDEDNVLFNHEESSHINATDDTVSNMEEMALDCVKHVSALDDTLAEFEEERASILEQLKALEEKITTLADNEEFLDDIKLIEHSSMYGDKDLNENCNFSSVEEENGYSNGFSDDKHSPIGSLAKKLLPYLDAAENETEETYTLEGQLESESSDMQNSVPILEMDSMKTCIEXEVDRVYERLQALETDKGFLQHCMGSKQ

SEQ ID NO: 161619 - protein, 43 aa, Glycine max
  unsure (1)..(43): unsure at all Xaa locations
  Clone ID: PAT_MRT3847_11695C.1.pep
PLSRHDGRSYVKXLTGKTIXLEVXSSDTIXNVKAKIQDKEXIP

SEQ ID NO: 161620 - protein, 323 aa, Glycine max
  unsure (1)..(323): unsure at all Xaa locations
  Clone ID: PAT_MRT3847_116960C.1.pep
RAVSEDPLTVKVDHLKDKTYNKDDDIIKATSFEVISTLRDVLKTSSLWRDHVQTYTKHIGDFTYPRLADFGAAISGANKLQCQQVLEELDVYKRLKLTLELVKKEMEISKIQESIAKAIEEKISGEQRRYLLNEQLKAIKKELGLETDDKTALTGKFRERIEPKREKCPPHILQVIDEELAKLQLLEASSSEFSVTRNYLDWLTALPWGEYRVPYLDVPPFCXCLGDVQFGLTAVLASLLHPLPVGWVRGASQGKIICLSGPPGVGKTSIGRSIARALNRKFFRFSVGGLADVAGIKGYRRTYIGAMPRKIVQCLKKGGKSNP

SEQ ID NO: 161621 - protein, 76 aa, Glycine max
  Clone ID: PAT_MRT3847_116961C.1.pep
QHYMTSFDIRPMASFERAWVVARISCAPAYLTRASDHTEARAVAGYALAGHWLRHGSRPPPLIARSHLPTAKKYVW

SEQ ID NO: 161622 - protein, 121 aa, Glycine max
  Clone ID: PAT_MRT3847_116962C.1.pep
QRQHLPHLSSPVAPNLTLTTRLYNMSDVAKPDPAADQTAAPGATLVKDETAKVTTDKLSDKPENAGATSTDDKPITEKATEAATSAAAAVKDNVFSMFGGGPAKAKKEETDDVDEPSGATK

SEQ ID NO: 161623 - protein, 83 aa, Glycine max
  unsure (1)..(83): unsure at all Xaa locations
  Clone ID: PAT_MRT3847_116963C.1.pep
MQIFVKTLTGKTIXTLKVESSXTIDNVKAKIQDKEGIPPDQQRLIFAGKQSRRRTLAINIQRINLYCLRSGERLRKIHGNKLE

SEQ ID NO: 161624 - protein, 91 aa, Glycine max
  Clone ID: PAT_MRT3847_116964C.1.pep
SIYLFYIHLKYVIFACVVFFCLTCILIYGNWECGSDVSCGLFSAAERQPCRNGLSGVMKILNLLGILIACNLEMVLLTKFLWDDTMNLLTR

SEQ ID NO: 161625 - protein, 55 aa, Glycine max
  Clone ID: PAT_MRT3847_116965C.1.pep
ILQNVGEGSPRMKLLLDASGSKKVPYFIDHNTGFQSGDYTTILSYLFETYSAVIL

SEQ ID NO: 161626 - protein, 94 aa, Glycine max
  Clone ID: PAT_MRT3847_116967C.1.pep
GKRGFPQGPARKIRGATGGGVFYMKRWYACIFKNGNPGWDREGGFFLGGGGGQTIKKERGAPLFGKRCFLLKVCPPHSKKGKRRGRGGFFFQKN

SEQ ID NO: 161627 - protein, 100 aa, Glycine max
  unsure (1)..(100): unsure at all Xaa locations
  Clone ID: PAT_MRT3847_116968C.1.pep
AGDDIRGLTGDIPEPYDPSGSDRTRPDRPVXRPAVTLVAPSMMPIPGRAGSLQRMTAIVHTLTHTESWSIDLSWEXIPRFGTQESMPTHFPRHFVNAAHD

SEQ ID NO: 161628 - protein, 401 aa, Glycine max
  Clone ID: PAT_MRT3847_116969C.1.pep
MTLQAFHGSACCFRSHLLHFSSSTASSPPFLASRRFQSCPSTRKSLKLNCSSSGNNGDQDYLLDAPVSVGDGFSFSGGKYSDGPSPSDEWFKQGKKVKAYSIPGTGEKAKDPIFGLAMGSGSQATGDRFRWFCVESGSADNPSVILIHGFPSQAYSYRKVLPVLSKDYHVIAFDWLGFGFSDKPQPRYGFDYTLDEYVSSLESLIDELAATKVSLVVQGYFSPVVAKYASIHQEKVRNLILLNPPLTAQHAKLPPTLSIFSNFLLGEIFSQDPLRASDKALTSCGPYKMKEEDAMVYRRPYLTSGSSGFALNAISRNMNKDLKRYVEDMQTILKDKNWKVQTTICWGQRDRWLSYDGVEDFCKDSNHKLIDVPTAGHHVQEDCGEEVGQLIRGIISKRTKI

SEQ ID NO: 161629 - protein, 853 aa, Glycine max
  unsure (1)..(853): unsure at all Xaa locations
  Clone ID: PAT_MRT3847_11696C.1.pep
KLNENSTTLWHKHLDHISKQRIQRLVSDEILDPLDLLDFEVXVECIKRKRTNIRKLGAERAKDVLELIHMDIRGSFLTASWNGQQYFITFIYDYSRDGYLYLIHEKSXSLDVFKTFKVEVELXLGKKIKVVKSDRGGECYGIYDESGEQRLGPFVFFLKGCGIILQYTMSGKPSMNGVVEXRNQTLNDMVRSMINHSSLPESLWGEALNISVYILNRVLCKIVNKNPFEHWTRKKPSIKHLHNWGCPVEVGPYRPHERKLNSRIISCYFVGYVERSRGNNFCNPTSRSFFEMGNARFLKEIEFEKEENMRNVVFEEEPIIYSDQVLIPIPTQDINLVIENNVQTIIDDILLEQDNNERRTIIPNDYIIFLQEHEDDVGLIVEDPINFYQAMHNSYSQNWINAMKDEMKSMKDNNVWDLVELSEGVKPISCKXIFKMKMDSKGNIERYKACLVAKGFTQKEGIDYKKNXSSVSLKDSFRTMMALIAHFDFEFHQMNFKTAFLNGNIEETIYMVQPENFVSSDSKSAMCNLKKSIYGLKQASHQWYYNFHQVITSYGFEANVVDDCVYHKFSGSKYILLLXNDIGFLEEAKRFLTKXFEMKDFGEAFFVIXKILRDHSQGILRLLQVNYIDKALDRFSIKDSKXGDSPIAKGDKCSLKQCLNNDLXRIEMQEIPYLSTVGGLMYTQVCTHPDIAFFVGVLGRYLSDSRMQHWKAAKRVMRYLKRTKGYILTYQKSENLEIIRYXNSNFTRCQDNKHFTSGYIYMLARRAISWKFTKQVLVTSSTMVAEFVACFEASNHRIXIEXFVTSLRVVDVIEIPLRIYCDNKSVVQYSNINSSTTKLKFIDIKFLVVKERV

SEQ ID NO: 161630 - protein, 55 aa, Glycine max
  unsure (1)..(55): unsure at all Xaa locations
  Clone ID: PAT_MRT3847_116970C.1.pep
LHTRPTKLRLDKVSSYLLIQYEKIVIHFLLQHMDKWNSNLGLLXPVSELLVWLSI

SEQ ID NO: 161631 - protein, 100 aa, Glycine max
  Clone ID: PAT_MRT3847_116971C.1.pep
CKILLCYTLQNIIKESFSPFVKHSGATKANLKHRFWHLMLSKQWIILEKMGGGEANNYNHLQNFDIPWGICSEQGGTITGRPNKLGDTTWPESSTLLPKR

SEQ ID NO: 161632 - protein, 89 aa, Glycine max
  Clone ID: PAT_MRT3847_116972C.1.pep
ECSIRNLDFTLGGINTIFLVLPNGSFALPLNKLCNCFRTTNSSFLPNMFLSFFFLLSLHLLKGNRKLINVIESLSCRFLSMSRGVEFEE

SEQ ID NO: 161633 - protein, 68 aa, Glycine max
  Clone ID: PAT_MRT3847_116973C.1.pep
FGWTHSVRPKVKHHGTIAWILVLGDSGSGWTQLLVTFLFLYIKWCCPSAPTRAVALLGGFACTAGFDA

SEQ ID NO: 161634 - protein, 55 aa, Glycine max
  Clone ID: PAT_MRT3847_116974C.1.pep
REHNTTSTYYMRVHAGILSQCFAQTNRSSRNMYRALGYYWLTIAIYTCNVYKFSH

SEQ ID NO: 161635 - protein, 58 aa, Glycine max
  Clone ID: PAT_MRT3847_116975C.1.pep
SFYFFFFFYGFFFAFFWDTRKNFFCEEIKKTQAGVFKGAAHQTNEPRGASHILFKLGG

SEQ ID NO: 161636 - protein, 86 aa, Glycine max
  Clone ID: PAT_MRT3847_116976C.1.pep
QQILASNVSSPQTKPLIIQCFNAINTKNAEIYHRRSWKRVVLTANLSYDVLVHFTSLHSSAARGESRTGEEEMRVFNDSSFNRARK

SEQ ID NO: 161637 - protein, 72 aa, Glycine max
  Clone ID: PAT_MRT3847_116977C.1.pep
HYCIKHVTKIRLHSHIYAKRMGDITGMTTQSFPKTSRNSPKVSAVHVYTNNSHQKCVCKKNHRRSTNTHAHL

SEQ ID NO: 161638 - protein, 124 aa, Glycine max
  unsure (1)..(124): unsure at all Xaa locations
  Clone ID: PAT_MRT3847_116978C.1.pep
RYANRHKTLELIWKCNYRIFWSFMGPHSGRMGGFKNIHETFLHMLYPIILLTQNMLLKLSRPPHILVKYRIMSTSSKNQFXNIYLLFKLIGSVHPSVIVTYVDLTHGHHLIFNHHMLRAHTLIP

SEQ ID NO: 161639 - protein, 128 aa, Glycine max
  Clone ID: PAT_MRT3847_116979C.1.pep
AKFGKPLYSTRIILGEVNPVFEETTVLMVSMDEVKSKEDLAAMLWDSDKMSADDLVGRVQIPVTELMSKPNQMHRREDSLMGFEDANDMPGKLVWSIGYFEKVPLRKELERAPTAEEVKVTPEPSKTV

SEQ ID NO: 161640 - protein, 37 aa, Glycine max
  unsure (1)..(37): unsure at all Xaa locations
  Clone ID: PAT_MRT3847_11697C.1.pep
GMLAVYNALSEDEKRESEKAYSASYYPCMEISXECYE

SEQ ID NO: 161641 - protein, 121 aa, Glycine max
  Clone ID: PAT_MRT3847_116980C.1.pep
DPLCLLNPSLSGALPESPSFVPIASVWLLPHSRSDVVFKTALLKPVALHPQLSPLNDWFPTVDTEVCSLNIVCGPELRCGTQFSLFPKPPLHCVISGSCLLLYTFLIFIVFLQIQFCTMLL

SEQ ID NO: 161642 - protein, 79 aa, Glycine max
  Clone ID: PAT_MRT3847_116981C.1.pep
ELVPKFIPEIIGKEIEKAPFSFSPFQNVFVCKVKILKAPKFVFGKLMGVHGDYSKDVGAKVTKPADEIVAKEPPEIVGA

SEQ ID NO: 161643 - protein, 42 aa, Glycine max
  Clone ID: PAT_MRT3847_116982C.1.pep
DLFFFFFFFFFLHINGIYMSHCCVSPDKKESEKMCKSKLWTN

SEQ ID NO: 161644 - protein, 92 aa, Glycine max
  Clone ID: PAT_MRT3847_116983C.1.pep
TCINLKIILGNKMDTTRKSSVALTFLLAFFIIASDMCMESEARGPIVHVHCSRDDDCKYRPCRAKCGCVCSNSYCTCVFSFMDNVLTHAPTN

SEQ ID NO: 161645 - protein, 439 aa, Glycine max
  Clone ID: PAT_MRT3847_116984C.1.pep
MKKLCPNLDREDGLETVLEVPIPEEILTHKSGTTKAWHNMKNWMKPHAESRSNSASMAAVFGGKNTEIQLLLGVVGAPLIPSPIAPDNQPITRSIKDQHIEVSMAKYIVKQYVAAVGGERALNSVDSMYAMGQVKMAASEFSAGEGSVNSKKMVKVKNLQMKGEVGGFVVWQKRPELWCLELVVSGYKITAGSDGKVAWRQTPWHHSHASRGPPRPLRRFLQGLDPRSTANLFSNSICIGEKTVNNEDCFILKLEAESSTLRARSNSNVEIVRHTVWGYFSQRTGLLVQLEDSHLLKLKSHESESIYWETNMESLIQDYRSVDGIQVAHAGKTRVSLFRFGGGPETHSRTRMEEVWQVEEVDFNVKGLSIDCFLPPSDLKREEEENEESCGGGVVASNNNNNAKLPYKIRSASFRISASKVAAVNLDDSCTSSESDEDL

SEQ ID NO: 161646 - protein, 75 aa, Glycine max
  Clone ID: PAT_MRT3847_116985C.1.pep
MASWKKTITTPFKKACTVFKQQQPPRDQKKSQTEQERQVMDLQGEVMACGYEDVQVMWSILDKSKSTNCNITSST

SEQ ID NO: 161647 - protein, 76 aa, Glycine max
  Clone ID: PAT_MRT3847_116986C.1.pep
MASWKKTITTPFKKACTFFNQQPTSARDQKKSQTEQERQVMDLHGEVMACGYEDVQVMWSILDKSKSTNCNITSST

SEQ ID NO: 161648 - protein, 89 aa, Glycine max
  Clone ID: PAT_MRT3847_116987C.1.pep
EPKLDTWTLVRDILPLLADSAPFAIYPQYLQPLATCMHNLQLEKMAIGLQITEPWLGEYQVLPSRTHPCMQMSSFGGYILSGTKICSTE

SEQ ID NO: 161649 - protein, 62 aa, Glycine max
  unsure (1)..(62): unsure at all Xaa locations
  Clone ID: PAT_MRT3847_116988C.1.pep
ISTIVNDKSTRGSTVXWHNRVLVKQQIWLCFGRAEWEMEMKTTTHHQPHISALRQPHGDLDI

SEQ ID NO: 161650 - protein, 46 aa, Glycine max
  Clone ID: PAT_MRT3847_116989C.1.pep
LINNGFTFFPHVLTFSCTLYYFFPCFNIVMYFVWFFLHVNFILLPL

SEQ ID NO: 161651 - protein, 204 aa, Glycine max
  unsure (1)..(204): unsure at all Xaa locations
  Clone ID: PAT_MRT3847_11698C.1.pep
MGQLHNIMVILIVIAVAATMLKSTKAAEYTVGDNTGWTSAPPGGASFYSDWASNITFREGDILVFTFTASHTVAELTDRASFDGCSAEXKXXGSXLPSXTINXPTPHRTGDFYFACTIQGHCNSGQKLSIATITSTSSPPTQGPSPPSGTTPTPPSSGDETPPPQFPPTEPGSTTPPPSRGEATSLVATFSILLITLLINSLLF

SEQ ID NO: 161652 - protein, 1238 aa, Glycine max
  unsure (1)..(1238): unsure at all Xaa locations
  Clone ID: PAT_MRT3847_116990C.1.pep
MAAPMVAANMCQYLLQVVSLMMVGHLGVLVSFSGVAIATSFAEVTGFCVLMGMAGALETLCGQTYGAEEFSEIGNYTFCAIVTLLLVCLPISMLWIFVDKILLLFGQDPEISHVAHEYCIYSIPALYGFAVLQCQIRYFQTQSMIFPMVFSSIAVLCLHVPICWALVFKLALGHVGAAYAIGISYWLNVIGLGIYMNFSPAYFFSLNTTTLHYIIPYAVGASASTRISNELGAGNPKAAQGIVRVIVIIGIVDGVIVSIFFVCCRHILGYAYSNDKEVVDYVSDIVPILCGSFTADSLIGALSGIARGGGFQQIGAYVNLGAYYLVGVPLAFLLGFVLHFNAKGLWMGSLTGSVLQVIILTVVTVLTDWQKELGTFQIHLEMVENTRNQSLLCEAEERLSSKLDERFLQLAGSLWQTLCEDMDELLQQQAMGHSPSSSAGIAAPGFGEVYEDPMGELMRSQTGCANDGEDVPAIFNSEGFFFSQNVDDNSDSEGKDVVSEELVVSSASEPLLSVNALTGTTSFRTIRVTGCRTEVIPSLNVVVADGNKVQISNVVKSFTWWLVTLGDITWNFDKLTMEFVTQGRRHVLRGASNAKLKIEPTNLPPVRPEYLHSGIIQNNSSPYSSPVVLVGEKDGSWRLCVDYRELNKATMKNRFPIPLVDDLLDALHGSKWFSKIWLQSGEGVATDPAKVEAVKDVAKPLNDMLKKDNFCWTQEAKLAFQKLKDLLVSTHVLALPNFDKEFVVEADASSTGIGAVLMQDNHPIAFISRSLNVQQWSLSTYEKGLLAVGQENLVVDALSRGSLVECNVVFVVQLESDMLTRIKASWKSDLDVQKLISELQSDSNSHKHFSWWLHSSACGGHSSRDATLKRVKAVVFWKGISMDVKLFIHQCITCQRCKYDSAAYPGLLQPLPIPEHVWQHITMDFIEVLPDLRGKQVIFVVVDRLSKVVHFMALHHPYSVADVVQCFMDNVFKLHGFPDSITSDRDPIFVSRFWQEFMAYQGMQVQLSTAYHPQTDRQSEVVNRCLETYLRCMCYDNPKQWSKWLPLAEWWYNTAYHSSIKANPYEIVYGQAPPAYLPYLPGESKVELVDRSLAQDRMKQLAYKHRSDRKLQIGDLVYVKLHPYRQVSIAFRSNAKLTPKYYGPYPVLDQIGVVAYKVQLSPNSLIHNVFHISQLKKFIGETSTFVNCPNTDEEISHKEPEVILDRMTVKRGTKAVTKXVLIKWKHQLPEDATWKFYY

SEQ ID NO: 161653 - protein, 114 aa, Glycine max
  Clone ID: PAT_MRT3847_116991C.1.pep
GAPPIHFLTVTRTYHIYSARQTPAPGATTQGERGTLNSQHVLSTKMHAESMQEYTEAKQHKPIKPSTKGETTDRVATSLTRTCGIGTDLAWVQRTRIWCQLRTNQHPPSGVSAR

SEQ ID NO: 161654 - protein, 334 aa, Glycine max
  Clone ID: PAT_MRT3847_116992C.1.pep
YNQFTNKCNFVPSDDDADAQSGVCYGRLGNNLPTPQEVVALYNQANIRRMRIYGPSPEVLEALRGSNIELLLDIPNDNLRNLASSQDNANKWVQDNIKNYANNVRFRYVSVGNEVKPEHSFAQFLVPALENIQRAISNAGLGNQVKVSTAIDTGALAESFPPSKGSFKSDYRGAYLDGVIRFLVNNNAPLMVNVYSYFAYTANPKDISLDYALFRSPSVVVQDGSLGYRNLFDASVDAVYAALEKAGGGSLNIVVSESGWPSSGGTATSLDNARTYNTNLVRNVKQGTPKRPGAPLETYVFAMFDENQKQPEFEKFWGLFSPITKQPKYSINFN

SEQ ID NO: 161655 - protein, 48 aa, Glycine max
  Clone ID: PAT_MRT3847_116993C.1.pep
TVDYGNRKCRGQDLKDHKKRAHQLPFCPQASFNKWAVWEWRVHKRISK

SEQ ID NO: 161656 - protein, 57 aa, Glycine max
  Clone ID: PAT_MRT3847_116994C.1.pep
MKYVLVTGGVVSGLGKGVTASSIGLLLKACGLRVTAIKIDPYLNTDAGTMSPFEHGE

SEQ ID NO: 161657 - protein, 122 aa, Glycine max
  Clone ID: PAT_MRT3847_116995C.1.pep
CPEWRQSPDVYRASRSKGFRRRFLCLLFPNANRTRRIRDGDMNMARKVQGGQWLEWQALNLPAAKSTRKRSPELTLPLQLYSETKRRAFRPLTGCSWFLSDNRSPGCGAKMETAPQPLTAKG

SEQ ID NO: 161658 - protein, 94 aa, Glycine max
  Clone ID: PAT_MRT3847_116996C.1.pep
DEVHEVIYNINLTEVKMKENEVGATHHVGEVINILQMTTHHLFDPDDLLTVAFDKIGSMTTNTISKQRKKQEPEVMKELDQRIRRLNSLRMEDK

SEQ ID NO: 161659 - protein, 59 aa, Glycine max
  Clone ID: PAT_MRT3847_116997C.1.pep
GELFPTMPDEWVNNGNAPALAETIKNYSKLLSQGFNIIYLPRRTLDIQRRSRNKLKDGG

SEQ ID NO: 161660 - protein, 203 aa, Glycine max
  Clone ID: PAT_MRT3847_116998C.1.pep
DLVSLHQQQQNLVIKRETAWKVGGGEKFRFWEDPWTDNGMPLMEKFPRLYLISSQQNTRIMQMGCINKSGWEWKLTWRRDLFDSEVEMADIFIGDISKQQVQPHREDTWIWKHDQSGSYSTKSGYDLIRRELTGADHDSDFTDLWKLKISSKVAMFAWRLIMNRLPTRMNLRRRQVMVNDSMCPLCGLQEEKAAHYFSAAGRL

SEQ ID NO: 161661 - protein, 125 aa, Glycine max
  Clone ID: PAT_MRT3847_116999C.1.pep
GRTEAEKGTFLGDIPPRLTPEKRKGTQVLARDTKGTETEEELDKSKRKKHPQAESGLQPNHEESTKGKSHQGDRKRRQRLDRGRKKEREKGRDRTKKRETGRNKPRDRTREREPKPHATRTETQR

SEQ ID NO: 161662 - protein, 45 aa, Glycine max
  Clone ID: PAT_MRT3847_11699C.1.pep
VCLYLLCIRSKNECCQLKCIFQLCDWRGEIIQTSDEIEVTRHNGN

SEQ ID NO: 161663 - protein, 39 aa, Glycine max
  Clone ID: PAT_MRT3847_1169C.1.pep
TQDNNRTHHTNRLRGLMSRRSLMSDLALTNRFALSEHFP

SEQ ID NO: 161664 - protein, 388 aa, Glycine max
  unsure (1)..(388): unsure at all Xaa locations
  Clone ID: PAT_MRT3847_116C.1.pep
ATHASGEPENXRDPRMIFCVDTGEFFMIEVLFDSEGPKVNLSECLYKGLPCKALLWVESGYLAALVEMGDGMVLKLEDGRLCYINPIQNIAPILDMEVVDYHDEKQDQMFACCGVAPEGSLRIIRNGINVENLHRTASIYQGVTGTWTVRMRVTDSHHSFLVLSFVEETRILSVGLSFTDVTDSVGFQPNVCTLACGLVTDGLLVQIHKSTVKLCLPTKAAHSEGIPLSSPICTSWSPDNVSISLGAVGHNFIVVSTSNPCFLFILGVRLLSAYQYEIYEMQHLVLQNELSCISIPGQEIEQKQSNSSISANNSSISSFQIQSGVDINKTFVIGTHRPSVEIRYFAPGGGITVVACGTISLTNTAGTAICGCVPQDVRLVFAGQLYSS

SEQ ID NO: 161665 - protein, 61 aa, Glycine max
  Clone ID: PAT_MRT3847_117000C.1.pep
FSIFEPNQPCVKVKKIVAFTLLGKRLENHSPNLKPGLTSYAELNPKSFNTKWPLLSSSRSR

SEQ ID NO: 161666 - protein, 120 aa, Glycine max
  unsure (1)..(120): unsure at all Xaa locations
  Clone ID: PAT_MRT3847_117001C.1.pep
PRVRFLLQPHFCSAIIRGKGKIGINGFXRIGRLVTKVALQRDDIGLVAVNHLFISIVYMTYMFKYDSVHGHWKHYDVTGKDEKTLLYRDKPITIIGHRNPEEIPXWGEXGADIIVQSTRV

SEQ ID NO: 161667 - protein, 220 aa, Glycine max
  Clone ID: PAT_MRT3847_117002C.1.pep
GWRARNAVTWCRDRTGVFIDRHWPMVCRGCSRLGSLLRLSVIFWKDSALRGFQSFIRFGPVMLLLIMWSCFLSLTSMYCLVYVLVSMGVAGVAVQYLGYTPGLFFVGLFAILILWMYANFWITGTLLIVGGYLFSLNHARLVVLVGTIYAIYCVQVRVGWLGVFLAINLAFLSNDILNFLLQWFDNVSESLHSEDQKQSETAMEDDFSEECEYPIPTNES

SEQ ID NO: 161668 - protein, 52 aa, Glycine max
  Clone ID: PAT_MRT3847_117003C.1.pep
KINHFLLHKVFVVPLISGFVLSKILHNTNRFLPKFFYLTHGGNRLPAYQNFD

SEQ ID NO: 161669 - protein, 70 aa, Glycine max
  unsure (1)..(70): unsure at all Xaa locations
  Clone ID: PAT_MRT3847_117004C.1.pep
FSVWANQTSWHWSLRIDNPKQSTAFDINGGIXTNNEIAGDSLMPGYCVAQATDRASENAGSYARPGICVL

SEQ ID NO: 161670 - protein, 58 aa, Glycine max
  Clone ID: PAT_MRT3847_117005C.1.pep
PSSEFKLPYYSKPSSQSGYTGLHSRFLSGYTKILFLLMAYRTQNAAPFNNHLRTFSHC

SEQ ID NO: 161671 - protein, 101 aa, Glycine max
  Clone ID: PAT_MRT3847_117006C.1.pep
IRLELPQWDSHLGRRIYGTIIRLPTPDYHLKKCSFLLCRSSSAPSPNTHFSLLSIYFFLLKSSSFFGAIFLYQQLHQNPLTQTKSKVDPLSPTMPPSPMLS

SEQ ID NO: 161672 - protein, 52 aa, Glycine max
  Clone ID: PAT_MRT3847_117007C.1.pep
FSFFFFFFFFFFFFFFFCFFGEKLNGSRCFPCYSLQGPTKEQKVPLISKGSN

SEQ ID NO: 161673 - protein, 62 aa, Glycine max
  Clone ID: PAT_MRT3847_117008C.1.pep
YLPPECLRSQTLAVFYSVPLPYGLYLFSRRHGDHIAPSLKPKLRRDFTAPNDKQTRNFLTAS

SEQ ID NO: 161674 - protein, 164 aa, Glycine max
  Clone ID: PAT_MRT3847_117009C.1.pep
MVLKTELCRFSGAKIYPGKGIRFVRGDSQVFLFANSKCKRYFHNRLKPSKLTWTAMYRKQHKKDIAQEAVRKRRRAAKKPYSRSIVGATLEVIQKKRAEKPEVRDAAREAALREIKERIKKTKDEKKAKKAEVASKSQKAGGKGNVSKGAMPKGPKLGGGGGKR

SEQ ID NO: 161675 - protein, 219 aa, Glycine max
  Clone ID: PAT_MRT3847_11700C.1.pep
GKWKAWLILTPVSPVRIHTPDGYSKSTASGKQAKPMKGRCLKFTGIGVYLEDKAVPSLAAKWKGKTSEELVHTLHFYRDIISGPFEKLIRGSKILPLAGAEYSKKVMENCVAHMKSVGTYGDAEAAAIEKFAEAFKNVNFAPGASVFYRQSPDGILGLSFSEDATIPEKEAAVIETMLENKAVSAAVLETMIGEHAVSPDLKRSLASRLPAVLSHGIIV

SEQ ID NO: 161676 - protein, 109 aa, Glycine max
  unsure (1)..(109): unsure at all Xaa locations
  Clone ID: PAT_MRT3847_117010C.1.pep
GSSHASCISHEAHHAMQAQEKHLWEGNLSCDIKPRCRLEQDTSTYAQFASAKTSXSDLMVAGAHSXQDSPEKEXMNNPYKIDARWTLXMDPLYNRVQAQMPTKLVKTAS

SEQ ID NO: 161677 - protein, 57 aa, Glycine max
  Clone ID: PAT_MRT3847_117011C.1.pep
MGTDKVHISIVVIVYIDSGISTINGHMIYKLVRIDKRDIDMLDMEVAVMNRRYLKYA

SEQ ID NO: 161678 - protein, 119 aa, Glycine max
  Clone ID: PAT_MRT3847_117012C.1.pep
TWRGHGGLYCCCLPCLFPSYVYYTFYLIPGIIYIILLLFSSFIVIVPCPRLLSLFNMLVHTFLRVTGNLFLLVITHVLPLIALLRDRTPPACLYFHSRCPPPPPKEGGRHTVMTGNLPW

SEQ ID NO: 161679 - protein, 58 aa, Glycine max
  Clone ID: PAT_MRT3847_117013C.1.pep
VLDLSIYHHTIQVNFPLILYDRIGNDSTYLSFIFTHHTLIHIFITSHLSFLIPSNAQL

SEQ ID NO: 161680 - protein, 68 aa, Glycine max
  Clone ID: PAT_MRT3847_117014C.1.pep
LGGFARISGAQLSVGVRQSDEGSCFVPPRAQLVLAIAVAILSKPEGKRLALEVHLPLTQLVFYYRLSM

SEQ ID NO: 161681 - protein, 45 aa, Glycine max
  unsure (1)..(45): unsure at all Xaa locations
  Clone ID: PAT_MRT3847_117015C.1.pep
LIELLISFPFEAMVKYAEMMPMLVXVFILNIXIIYVXFRAAAITV

SEQ ID NO: 161682 - protein, 117 aa, Glycine max
  unsure (1)..(117): unsure at all Xaa locations
  Clone ID: PAT_MRT3847_117016C.1.pep
MAGSLQNQRQQLLGIIKEEEQEKLQKQKEETEGNNNNNNNNKSDMAPTAGNSIHRSGSRPQLDVSKAEIQGNVEEKYPTILLPNQSDDLSHLALDIGGSLISWCTFXRHEDQSWMIK

SEQ ID NO: 161683 - protein, 113 aa, Glycine max
  Clone ID: PAT_MRT3847_117017C.1.pep
MASSSGTSSGSSLLQNSGSEEDLQAVMDQRKRKRMISNRESARRSRMRKQKHLDDLVSQVAQLRKENQQILTSVNITTQQYLSVEAENSVLRAQVGELSHRLESLNEIVDVLN

SEQ ID NO: 161684 - protein, 166 aa, Glycine max
  Clone ID: PAT_MRT3847_117018C.1.pep
MACSSGTSSGSLSLLQNSGSEEDLQAMMEDQRKRKRMISNRESARRSRMRKQKHLDDLVSQVAQLRKENQQILTSVNITTQQYLSVEAENSVLRAQVGELSHRLESLNEIVDVLNATTTVAGFGAAASSTFVEPMNNNNNSFFNFNPLNMGYLNQPIMASADILQY

SEQ ID NO: 161685 - protein, 122 aa, Glycine max
  unsure (1)..(122): unsure at all Xaa locations
  Clone ID: PAT_MRT3847_117019C.1.pep
MYMSPGQDMSSMSNDRNNMSMMMHNSFYWGKDAIVLFPRWPENNVGMYILALIFVFLLAMAVEVLSNQPLLKPGTSPLVGGLIQAGVHLFRITFVYMAMLAVMCFNAGIFIAAXGGHTLGFF

SEQ ID NO: 161686 - protein, 35 aa, Glycine max
  Clone ID: PAT_MRT3847_11701C.1.pep
VGRRSNVLLLSDKGRIISGRKHDQCLTKVSPQLKQ

SEQ ID NO: 161687 - protein, 66 aa, Glycine max
  Clone ID: PAT_MRT3847_117020C.1.pep
KPLLCQNEGDSLWISENKARDSAMGQTPTSLHERTESILGFLKEHHLENPTTPCDPGSVEVTKIHA

SEQ ID NO: 161688 - protein, 89 aa, Glycine max
  unsure (1)..(89): unsure at all Xaa locations
  Clone ID: PAT_MRT3847_117021C.1.pep
KRTTINNMSAXGLNPGMSGARHMGTIPQSMSQFTVWNQMGAESTTLNLDSSKRSFREMSMDLLGGGILAXRTGEWITLIQNCSSTNLAR

SEQ ID NO: 161689 - protein, 137 aa, Glycine max
  Clone ID: PAT_MRT3847_117022C.1.pep
IIAISIELSKVLSPERQNTTGDKPNQYSPVRHGCHGLSAGWYYLFLTLRVVLLVPTHQASGTPTVETVYLDHEMATRTSLSMLLNPTENGTHGRYICYGDPESSVANGEPRRTCRQQGCTTHHIRCNTRRPKSTAYI

SEQ ID NO: 161690 - protein, 184 aa, Glycine max
  Clone ID: PAT_MRT3847_117023C.1.pep
ILNGVTWTLVSLLIGAFLWFVKTLLLKILASNFHVKSFFDRIQESLFHQYILQNLSGPPLVEEAEKVGASYSVGRFSFRSTDGKGGTKKETIDIAKLHRMKQEKVSAWTMKVLVDAMTTSGLSTISSALDESFDEGENEQTDKEITNEMEATAAAYYIFRNVAAPGCTYIDEDELRRFMIKEEV

SEQ ID NO: 161691 - protein, 100 aa, Glycine max
  Clone ID: PAT_MRT3847_117024C.1.pep
NPFLKSFFFFFFIFLSLFFLCISFFFLFFLGPGGEPWGTPGNSERGPEGKPTFLIERRIKTGGIKGKNGTRRKKGIRYKIPHKIQPGTKKGKAGGAKRGN

SEQ ID NO: 161692 - protein, 110 aa, Glycine max
  Clone ID: PAT_MRT3847_117025C.1.pep
NEAQEKEILFCLKIGFTLFLRVQIAVPPLLGDWDPLKWSAPISRDLFPFRKGIFWALVFFKKNFPGIDFWGGVLPLFPPLKKVPFLVFKFLFFFFQKFPSLFQKMFFPPL

SEQ ID NO: 161693 - protein, 423 aa, Glycine max
  unsure (1)..(423): unsure at all Xaa locations
  Clone ID: PAT_MRT3847_117026C.1.pep
MSSPYLPATTEHFALATEAKDPSEAISILYRVLDDPSSSPDALRXKEQAITNLTKLLTDENRGEDLRSLLTQLRPFFSLIPKAKTAKIVRGIIDSVAKIPGTSDLQIALCKEMVLWTRAEKRXTFLRQRVEARLAALLMESKEYSEALTLLSGLVKEVRRLDDKLLLVDIDLLESKLLFSLRNLPKAKAALTAARTAANAIYVPPAQQGAIDLQSGILHAEEKDYKTAYSYFFEAFESFNALDDPKAVFSLKYMLLCKIMVNQADDVGGIISSKAGLQYLGPDLDAMKAVADAHSKRSLKLFEIALRDYKAQLEEDPIVHRHLSSLYDTLMEQNLCRLIEPFSRVEIAHIAELIELPTDHVERKLSQMILDKKFAGTLDQGAGCLVIFDDPKTDAIYPATLETISNVGKVVDSLYVRSAKIMA

SEQ ID NO: 161694 - protein, 310 aa, Glycine max
  Clone ID: PAT_MRT3847_117027C.1.pep
MSERMESSSIESSTVSSMTMMEEDEHPHQFSSISKLHSNGPTTTSVHDLLECPVCTNSMYPPIHQCHNGHTLCSTCKTRVHNRCPTCRQELGDIRCLALEKIAESLELPCRYISLGCPEIFPYYSKLKHEAICNFRPYNCPYAGSDCSVVGDIPCLVAHLRDDHRVDMHSGCTFNHRYVKSNPMEVENATWMLTVVFHFFGQYFCLHFAAFELGMAPVYMAFLRFMGDEREARNYSYSLEVGGNGRKLTFEGSPRSIRDSHKKVRDSHDGLIIYRNMALFFSGGDRKEMRLQIRRGISATAWSWEEMDVT

SEQ ID NO: 161695 - protein, 311 aa, Glycine max
  Clone ID: PAT_MRT3847_117028C.1.pep
MESSSIESSTVSSMTMMEEDEHPHHQFSSISKLHNSGPTTTSVHDLLECPVCTNSMYPPIHQCHNGHTLCSTCKTRVHNRCPTCRQELGDIRCLALEKIAESLELPCRYISLGCPEIFPYYSKLKHEAICNFRPYNCPYAGSDCSVVGDIPCLVAHLRDDHRVDMHSGCTFNHRYVKSNPMEVENATWMLTVFHCFGQYFCLHFEAFQLGMAPVYMAFLRFMGDEREARNYSYSLEVGGNGRKLTFEGSPRSIRDSHKKVRDSHDGLIIYRNMALFFSGGDRKELKLRVTGRIWKEQQNPEGGVCIPNLCS

SEQ ID NO: 161696 - protein, 236 aa, Glycine max
  unsure (1)..(236): unsure at all Xaa locations
  Clone ID: PAT_MRT3847_117029C.1.pep
MAVAVSVPARQKPSSDASLFTLCPFWSSRNANQSSSKTVSSVARSLLPPRRRLRLDPSNYLYFPYEPGKQVRSAVRLKNTSKSHVAFKFQTTAPKSCYMRPPGGILAPGESLIATVFKFVEQPENNEKLSDQKHTVKFKIMSLKVREGVDYVPELFDEAVELVTXQGILRVILIVVAIDPERQSSVLEKLKRQLAEADAAVEARKKPPVEAGPRVAAEGLVIDEWKERRENNKFKQ

SEQ ID NO: 161697 - protein, 99 aa, Glycine max
  unsure (1)..(99): unsure at all Xaa locations
  Clone ID: PAT_MRT3847_11702C.1.pep
KKKNKEKKKKKKGGGGMRGGRGHTERAKTKKNKRKGEKKKKKKKKKKKKKKKKKKKKKKKGVYPTKPTXNXYLYKXNLYNINDIPGDKKKTKKKKKSLI

SEQ ID NO: 161698 - protein, 264 aa, Glycine max
  unsure (1)..(264): unsure at all Xaa locations
  Clone ID: PAT_MRT3847_117030C.1.pep
MAVAVAGRQKPSSDASLFTLCPFWSSRNATQRSTKTVSSVARSLLRPRRKLRLDPSSYLYFPYEPGKQVRSAVRLKNTIRLEVAFKFQTTAPKSCYMRPPGGTLAPGESLIATVFKFVEQPENNEKLSDQKHKVKFKIMSLKVKEGVDYVPELFDEQKDLVTMERILRVVFIDPERQKSVSQTSKLSWFRSTGLVCDNDRVRXFRFWKNWKRQLAEADAAVEARKKPPVEAGPRVAAEGLVIDEWKERREKYLARQQVQAVDSV

SEQ ID NO: 161699 - protein, 72 aa, Glycine max
  Clone ID: PAT_MRT3847_117031C.1.pep
NGGAGSWERPFLPYPTLIYPNYEWKKPNRVEMLLITRRTTPTTPRCDLNAFGTEELTTQNARSELEQSELRT

SEQ ID NO: 161700 - protein, 55 aa, Glycine max
  Clone ID: PAT_MRT3847_117032C.1.pep
KGHANRISTISSYMKKKKKKKKSKFLISLNSIQFLTLRYTPLTAQFKPNLTDRFP

SEQ ID NO: 161701 - protein, 68 aa, Glycine max
  Clone ID: PAT_MRT3847_117033C.1.pep
HASEKMWQVFFRFHVIFYQLNYIIILFLYIMFKTLNFNIWCFKKFHFVFFTFSIKNIELPWCFKFKNN

SEQ ID NO: 161702 - protein, 46 aa, Glycine max
  Clone ID: PAT_MRT3847_117034C.1.pep
TILIEGKNNLFMCARCNVSVIIEQRSTYITYSQQTGSKLRTTAFFN

SEQ ID NO: 161703 - protein, 44 aa, Glycine max
  Clone ID: PAT_MRT3847_117035C.1.pep
FPVDPLFGKGFNYTQLTFILYLLVDFGLGIPRLVLHSPIIYQLR

SEQ ID NO: 161704 - protein, 60 aa, Glycine max
  Clone ID: PAT_MRT3847_117036C.1.pep
GEFMPTWSAEPARFYRPRLHLEHRISLLFYCSSRIDEGPARSVRLRSLDKQRVPGVALEP

SEQ ID NO: 161705 - protein, 107 aa, Glycine max
  unsure (1)..(107): unsure at all Xaa locations
  Clone ID: PAT_MRT3847_117037C.1.pep
MEFIRREHYPYYSQIVDQHPYFYARYLMLHDMDTFVFIINGSSLSNVAYXEXHGYGVEKLDFTLYDEWIKMASACSALDSLEYYIQASIGLKIYAWSCRPMYHHAVS

SEQ ID NO: 161706 - protein, 94 aa, Glycine max
  Clone ID: PAT_MRT3847_117038C.1.pep
HHNYDYGHCHGAKDTDAWIKFARAMLSLAISVGKKVTHDMTERPWNWLAGGVAQTHTMTSCRVCCSIPKPKVDQPQHACVIIENPANHHPMKAV

SEQ ID NO: 161707 - protein, 62 aa, Glycine max
  Clone ID: PAT_MRT3847_117039C.1.pep
ITVMLKYCSNNSHLQYRCGYFGVHGLGRHHVTVNQEFQDANVHSFRFLSAHLSLNSSRTPSL

SEQ ID NO: 161708 - protein, 103 aa, Glycine max
  Clone ID: PAT_MRT3847_11703C.1.pep
MADSLISRSKSDVTAMKETLLTQQQLLEKLYAELDEEREASATATSEALDMILRLQGEIAVVKMEARHYKRVAEEKIGHAEASLEAFEELMYQKEMQIASLEF

SEQ ID NO: 161709 - protein, 77 aa, Glycine max
  Clone ID: PAT_MRT3847_117040C.1.pep
AYVQGHKLHRVFILPYILYGHLADHLVRRPSGSTSSDAISLPSATYTSVAQRSLLAHHSMRCNELDPARQTGRQGEV

SEQ ID NO: 161710 - protein, 87 aa, Glycine max
  unsure (1)..(87): unsure at all Xaa locations
  Clone ID: PAT_MRT3847_117041C.1.pep
RATSAXHTLLSSKVQLTAFSSXXSWAXGQESEINGFVKNWAVWLPEFALQXRRCGARCSLTTPFITHRLHXHTXFKYRHVSHGHLEA

SEQ ID NO: 161711 - protein, 37 aa, Glycine max
  Clone ID: PAT_MRT3847_117042C.1.pep
RLNLWCEPQWVNTFSLIFRATNALVMLLRFALASVMI

SEQ ID NO: 161712 - protein, 107 aa, Glycine max
  Clone ID: PAT_MRT3847_117043C.1.pep
KRVFFKGAPVQGKPLGGFKSPTRGIFSPKIGEALGVKIFGVESLPFKRPPPPPRFGGFFFFFHPGVFFLKKGGFFPQKKGFLPWVYVTKFWGQFFWGVKKKKKARGP

SEQ ID NO: 161713 - protein, 94 aa, Glycine max
  Clone ID: PAT_MRT3847_117044C.1.pep
PRVRPRVRPRVRPRGRWTPSSAATPPGGGPGSGVFPHKINGGPKCAPAPDNRVQNRVGFPPRVSPIMGITPRAPFVFYHQRPFFLPNFPPISPP

SEQ ID NO: 161714 - protein, 166 aa, Glycine max
  Clone ID: PAT_MRT3847_117045C.1.pep
NTGPLGCLPQNIAKFGTDSSKLDELGCVSSHNQAAKTFNLQLHALCTKLQGQYPDSNVTYVDIFTIKSNLISNFSRYGFEQPIMACCGYGGPPLNYDSRVSCGETKTFNGTTITAKACNDTSEYISWDGIHYTETANQYVASQILTGKYSDPPFSDKMPFLLKLKF

SEQ ID NO: 161715 - protein, 112 aa, Glycine max
  Clone ID: PAT_MRT3847_117046C.1.pep
MGSQVTHGNLRRGVVPHPDTSSSNQYHGNTGNPLNTERFHVYLRKSLIFFVQLTAKFPLVIIFLLIVLYAIPASAAILALYVLVTILFALPSFLILYFSYPSLDWLVREIIT

SEQ ID NO: 161716 - protein, 37 aa, Glycine max
  Clone ID: PAT_MRT3847_117047C.1.pep
NSCAFLPQVQLIHELCKDYCLDPRKCLSMMNKTLSSN

SEQ ID NO: 161717 - protein, 112 aa, Glycine max
  Clone ID: PAT_MRT3847_117048C.1.pep
KLHQNDFTIGGRKIKVFLQQNYCSTHALILKSVAGKTIQNCFRRCYQALTTASCYLYQSHSCEKWLNVTWIKRKCLFFGPSMNFFHVVHRTFNDVENAVMLSDLRLKGKNNY

SEQ ID NO: 161718 - protein, 129 aa, Glycine max
  Clone ID: PAT_MRT3847_117049C.1.pep
PNLMEVKVVVSFCAHNGPFGPPGVKRLKTLGLIDSVPGIKPLSLTKAEDPLVNPPREVVPGIIVPGMEVLKIYGAPRMGPPFGPIFFSGQKPPPLALRSLGLPHPLVFVGNVLPELVLAAVEFAEIPPA

SEQ ID NO: 161719 - protein, 52 aa, Glycine max
  unsure (1)..(52): unsure at all Xaa locations
  Clone ID: PAT_MRT3847_11704C.1.pep
XXXXVVVWRXVXXXMXXIRRXXXCYXXXXTAXWWXXEXCXSSRIXSYXXCSX

SEQ ID NO: 161720 - protein, 415 aa, Glycine max
  Clone ID: PAT_MRT3847_117050C.1.pep
MGRHSCCYKQKRRKGLWSPEEDEKLLRHITKYGHGCWSSVPKQAGLQRCGKSCRLRWINYLRPDLKRGTFSQEEETLIIELHAVLGNRWSQIAAQLPGRTDNEIKNLWNSCLKKKLRQRGIDPVTHKPLSEVENGEEDKTRSQELSNELNLLNSESFKSDEGSYEQRASSSIAPKAYEMEGSCSSKINTTKNDTNLMSNCSNKDMFLDSYTTSCQPSDLMGNYPLQITDTLPTNSNSCHWFSQTARPFDMNSEFTITSNVMSILPPTTTSFLPSTSFCYKPSLGVPSEDISTASFALNGPNYWEASASNNSNGSNNTSDGSRELTTTSSKNSVLSSWGLTEETKWSEYLQNPMLMLAAPESLCNQIRPATHLVPDNTLGSIIVPDSKDQQQQQQSQNSSIFSKDTQKLTAAFGHI

SEQ ID NO: 161721 - protein, 44 aa, Glycine max
  Clone ID: PAT_MRT3847_117051C.1.pep
KKGQGMGKPKGGFCETGANPNVPPICFVKSKINPGGGGIFRLLN

SEQ ID NO: 161722 - protein, 45 aa, Glycine max
  Clone ID: PAT_MRT3847_117052C.1.pep
WALAHSTKAGVLWRMTDEVRWKVATRPLKTPTTGFRVAERHEDSP

SEQ ID NO: 161723 - protein, 52 aa, Glycine max
  Clone ID: PAT_MRT3847_117053C.1.pep
PRRKITKWKTHKPISYTKAGHGNGITNIYKLITTLSISSCLPHIAAIKKKAK

SEQ ID NO: 161724 - protein, 124 aa, Glycine max
  unsure (1)..(124): unsure at all Xaa locations
  Clone ID: PAT_MRT3847_117054C.1.pep
KDLLEGNLSLGVKSRSRWEKVSSTKAQFVRGKTRKYDIIGAGSHSSGDFPAKEDQEKPKKIDTGLRHRIDPQYNEVXLQMVTNYFKWTADDGETTKGSMLDLKISXSKIALTKDTVGGTILRNV

SEQ ID NO: 161725 - protein, 208 aa, Glycine max
  Clone ID: PAT_MRT3847_117055C.1.pep
MHIDPNGDDIGSYSTERERAQLDWNWLERWMSSQSPNLRPRETLYRTLATATSTTDDMSEEKTVEMDMGATLDSTHANMGFMNGESFDTSPISNRYHQRHHSAGVPSYMAPTQSAKAKVRSQGPQGPFKQRGSPGPHWNSSTRRSSAIGLGCDSSSSGGPTSAHVSPRSPNPKINEIRLQSRRISGGSPDNVHIEDWALPLGATNGWP

SEQ ID NO: 161726 - protein, 597 aa, Glycine max
  Clone ID: PAT_MRT3847_117056C.1.pep
VNKRRTMSLVISTELADTSYGNAKLYTLKGTDVTPDLSSHNFAPDKHRNMYMTKSYSCESYEKYFHDSPTEELIEPSSSSISGNSVHPDGASSYLLRASSGASVIVNNPFDTSIWSTRHRDAYQSNSVSDFVENGSPDGLDFDGEMRLKLQELERALLSDEEEEEQGIFETVQSMEIDPDMVEWANPLQDMLLHDSPKESSSSDSSNLSSISSTTKDTSQNSPQTPKQLLYDCARILSEGNEQEATSMINKLRQMVSIQGDPSQRIAAYMVEGLAARVATSGKCIYQALRCKEPPSNDRLAAMQILFEVCPCFKFGYIAANGAIAEAVRDEKKVHIIDFDISQGTQYITLIQTLASMPGRPPHVRLTGVDDPESVQRSIGGINIIGQRLDSSRSSRFGSSEFRAVASGTSNVTQSMLDCRPGEALVVNFAFQLHHMRDETVSTVNERDQLLRMVKSLNPKLVTVVEQDMNTNTSPFLPRFVEAYNYYSAVFNTLDATLPRESQDRMNVERQCLAKDIVNIVACEGEERIERYEVAGKWRARLSMAGFTPSPMSTNVREAIRKLIIKQYCDKFKIKEEMGGLHFGWEDKNLIVASAWK

SEQ ID NO: 161727 - protein, 180 aa, Glycine max
  unsure (1)..(180): unsure at all Xaa locations
  Clone ID: PAT_MRT3847_117057C.1.pep
MAADSSMALSSPSLAGKAAKLVPSAPEVGRVSMRNTVTKQASSGSPWYGPDRVKYLGPFSGEPPSYLTDEFPGDYGWDTAGLSADPETFARNRELEAIHSRWAMLGALRCVFPELLYRNGVKFGEAVWIKAGSQIFSEGGLDYLGNSSLVHXQSILAMCATQDILMSAVEGYQIDAGTLG

SEQ ID NO: 161728 - protein, 172 aa, Glycine max
  unsure (1)..(172): unsure at all Xaa locations
  Clone ID: PAT_MRT3847_117058C.1.pep
MAAASSMALSSPSLAGKAVKLGPSAPEVGRVSMRKTVTKQVSSGSPWYGPDRVKYLGPFSGEPPSYLTGEFPGDYGWDTGGLSAHPKTFAKNRELEVIQSMWAMLXALGCVFPELLSRNGVKFGEAEWVKGRFQIFSEGGLYYLSNPSLIHAQSILCIWATQCILMGACDVY

SEQ ID NO: 161729 - protein, 47 aa, Glycine max
  Clone ID: PAT_MRT3847_117059C.1.pep
DAIYRVCGLACIANNHKPTDKLYFDDKDQMTSETDQALSFPRSWDPA

SEQ ID NO: 161730 - protein, 231 aa, Glycine max
  Clone ID: PAT_MRT3847_11705C.1.pep
EITKAKLAFEGMTERETASWNALINGFAVNGCAKEALEVFARMIEEGFGPNEVTMIGVLSACNHCGLVEEGRRWFNAMERFGIAPQVEHYGCMVDLLGRAGCLDEAENLIQTMPYDANGIILSSFLFACGYFNDVLRAERVLKEVVKMDEDVAGNYVMLRNLYATRQRWTDVEDVKQMMKKRGTSKEVACSVIEIGGSFIEFAAGDYLHSHLEVIQLTLGQLSKHMKVEII

SEQ ID NO: 161731 - protein, 53 aa, Glycine max
  Clone ID: PAT_MRT3847_117060C.1.pep
HVYECIQIDSDGEVLYSLCLYRSTSVDIPTMLLYNNRLSLWICSGPRPYNNFC

SEQ ID NO: 161732 - protein, 156 aa, Glycine max
  unsure (1)..(156): unsure at all Xaa locations
  Clone ID: PAT_MRT3847_117061C.1.pep
GALGCVFPXLLSRNWLKFXXAVWFKAGSQIFSEGGLDYLGNPRLIHAQSILAIWGTQVILMGAAECYRIAGGPLGEVTDPIYPRGSFDPLGLADDPEAFAELNVKELKNGRLDMFSMFGFFDHAIVTGKGPLDNLSDHLADPVNNNAXSYDTNFIP

SEQ ID NO: 161733 - protein, 177 aa, Glycine max
  unsure (1)..(177): unsure at all Xaa locations
  Clone ID: PAT_MRT3847_117062C.1.pep
YGWDTAGLSADPETFAKNRELXVIHSRWAMLGALGCVYPELLSRNGVKFXESVWFKAGSQIFSEGGLDYLGNPTLIHAHSILTIWATQVILMGAVEGYRIAGGPLGDVTDPIYPCGSFYPLGLADDPEAVAEHNVKVLKIGRLAMFSMCGXFDHAIGTGQGSLENLAIHLSDPVNND

SEQ ID NO: 161734 - protein, 35 aa, Glycine max
  unsure (1)..(35): unsure at all Xaa locations
  Clone ID: PAT_MRT3847_117063C.1.pep
PPXFXXFWSFXSHCTXKMLXVTXNILKFRTSSLLY

SEQ ID NO: 161735 - protein, 196 aa, Glycine max
  unsure (1)..(196): unsure at all Xaa locations
  Clone ID: PAT_MRT3847_117064C.1.pep
AATSSMALSSPSLAGKAEKLGPSAPKVRRVSMRKTVTKHASFGSPWYGPDRVKYLGPFSGEPPSYLTGEFPGDYSWDTAGLSADPETFARNRELEVIHSRWAMLGALRCVFPELLSRNGVKFGEAVWFKAGSQIFSEGGLDYLGNPSLVHAQSILIIWATHGILMGADAGYRIASGPIXEVTDPILPAGSYEHRAR

SEQ ID NO: 161736 - protein, 160 aa, Glycine max
  unsure (1)..(160): unsure at all Xaa locations
  Clone ID: PAT_MRT3847_117065C.1.pep
AAASSMALSSPSLAGKAVKLGPSAPEVGRVIMRKTVTKQASSGSPWYGPYRVKYLGPFSGEPPSYLTGEFPGDYCWDTAGLSADPETFARNRELEVIHSRWAMLGALSCVFPELLSRNGVKLGKAVWFXAESYIFSEGGLYYLGNPIRVSHQSNLASEPS

SEQ ID NO: 161737 - protein, 178 aa, Glycine max
  unsure (1)..(178): unsure at all Xaa locations
  Clone ID: PAT_MRT3847_117066C.1.pep
MAAASSMALSSPSLAGKAVKLGPSAPEVGRVSMRKTVTKQASSGSPWYGPDRVKYLGPFSGEPPSYLTGEFPGDYGWDTAGLSADPETFARNRELEVIHSRWAMLGALGCVFPELLSRNGVKFGDGLWFKAASHIFNEGGLELLGNPSXVHAQIIPRHLATQVIPMGAVEVHRIVVGP

SEQ ID NO: 161738 - protein, 65 aa, Glycine max
  Clone ID: PAT_MRT3847_117067C.1.pep
RGKGWAVAQKDRRSILSCLHRENPAITPLKLISAEVAFASWDGDNHAVTHVTPPELHRPFCNWDT

SEQ ID NO: 161739 - protein, 182 aa, Glycine max
  unsure (1)..(182): unsure at all Xaa locations
  Clone ID: PAT_MRT3847_117068C.1.pep
AAASSMALSYPSLAGKAEKLGPXVPEVGRVTMRKTDTKHACSGSPWYGPHRVKYLSPFYGEPPSYLTGEFPGDYGWNTDGLSDDPXTFTRNRELEVIHSTWAMLRALGCVFPELLSRNGVKFGEAVWFRASSHIFSEGVLDYXSNPSLEHPQSMQSIWANQVILMGAAERYRIACVPLGEVT

SEQ ID NO: 161740 - protein, 214 aa, Glycine max
  Clone ID: PAT_MRT3847_117069C.1.pep
MKVSIAKFHSLPLCFLLLLAINTQPLLAAEPEPVVDKQGNPLVPGVGYYVWPLWADNGGLTLGQTRNKTCPLDVIRDPSFIGSPVRFHASGLNHIPTLTDLTIDFPVVTVCNQPTVWRLSKEGSGFWFVSTRGNPQDLITKFKIERLEGDHAYEIYSFKFCPSVPGVLCAPVGTFVDADGTKVMAVGDNIDPYYVRFQKVSTFGQDKKQPFSIV

SEQ ID NO: 161741 - protein, 58 aa, Glycine max
  Clone ID: PAT_MRT3847_11706C.1.pep
PGDMIVFKNNACFPHNVVLDEDEITSGVDATKISMSEEDLLNAVGETYSDTVDAKRTY

SEQ ID NO: 161742 - protein, 51 aa, Glycine max
  Clone ID: PAT_MRT3847_117070C.1.pep
WPPPTPPPNPAPPPPPKPPLAPKPPPPPNPPPPPPPNPPPPIPSPPPAPNP

SEQ ID NO: 161743 - protein, 161 aa, Glycine max
  unsure (1)..(161): unsure at all Xaa locations
  Clone ID: PAT_MRT3847_117071C.1.pep
MAAGPSMALSSPSLAGKAEKLGPSAPEVGRVSMRKTVTKQVSSXSPWYSPYRVKYLGPFSGEPPLYLTGELPGDYSWDTAGLVVDPETFAKNRELEAIHSRWAMLGALGCVFPELLSRNGVKFREAAWLMAGSQIFTEGGLDYMGNPSLIHVPSILAIRPT

SEQ ID NO: 161744 - protein, 73 aa, Glycine max
  Clone ID: PAT_MRT3847_117072C.1.pep
CDNCMSNAVSGSVSIPMQGSSISNATVFLELETNMSARSTMVSGDGCVLRVTIYSEHLVELRLWKRECHIRAQ

SEQ ID NO: 161745 - protein, 36 aa, Glycine max
  Clone ID: PAT_MRT3847_117073C.1.pep
KPLNVRVHECLFLPTLIQLKHVLNKHREEEALLDPY

SEQ ID NO: 161746 - protein, 60 aa, Glycine max
  Clone ID: PAT_MRT3847_117074C.1.pep
KSVVSILPALLPTSTRSSYCDTSILRLHTLNSLHDSRPSPCLSEKQVEVAARRTSSEKVN

SEQ ID NO: 161747 - protein, 75 aa, Glycine max
  unsure (1)..(75): unsure at all Xaa locations
  Clone ID: PAT_MRT3847_117075C.1.pep
PPFPSPGEYGQPMGAHQTSAIPGHGTGQPXPGLFTKEVVGSHPIGTNKGPGGTPTAHNTRPGXSPNHYGYGIGGP

SEQ ID NO: 161748 - protein, 80 aa, Glycine max
  Clone ID: PAT_MRT3847_117076C.1.pep
RKTDLCPLDSFQHGPLLLYSAHAQGHPEPRTETLLDDSRFPTLKPLERFQGQALWQDPRAAQGHEGLCMRVTLQDTLLMR

SEQ ID NO: 161749 - protein, 101 aa, Glycine max
  Clone ID: PAT_MRT3847_117077C.1.pep
QFQPFYILLAVVVAPLSPRVFLVPCSVAVVASPSVVFVFLSLVRGKAVVSPIVIFSLEILADYEDGVETMEYCYAPPFLFTLAGCLPVWSKNLPFFLSLVS

SEQ ID NO: 161750 - protein, 62 aa, Glycine max
  Clone ID: PAT_MRT3847_117078C.1.pep
IGFPTRSFVWQLWLQFYRISFMGNWSPGMIESTKGLKKGVALAIMKGVVIKRTGPRNQFSTL

SEQ ID NO: 161751 - protein, 132 aa, Glycine max
  unsure (1)..(132): unsure at all Xaa locations
  Clone ID: PAT_MRT3847_117079C.1.pep
MGYGRPYASFXATDMSARGSMPGRIIGSRDDSFVKTDCAGWQMHTRXSHDWRHTAISTICTAEALLANMDAMYAVNHGPERLSNIAHRIHSLARALAIEINRLGTVEIHDLPLFHTVNDKTSYALAVADAAV

SEQ ID NO: 161752 - protein, 99 aa, Glycine max
  Clone ID: PAT_MRT3847_11707C.1.pep
YFPGPTDCFLFFIGTFTLSNLGMFGVDRFDAILPPGTGAIMAVGASEPTVVATKDGRIGMKNQMQVNVTADHRVIYGADLASFLQTLTQIIEDPKDLTF

SEQ ID NO: 161753 - protein, 62 aa, Glycine max
  Clone ID: PAT_MRT3847_117080C.1.pep
YLIHVAIVVLNLLLVNHFWACSSLFRFFATVWFAFSLPQLTHNLLCFWICPLWLKLCTVRSA

SEQ ID NO: 161754 - protein, 64 aa, Glycine max
  Clone ID: PAT_MRT3847_117081C.1.pep
LFFIYSFLIFSFGGSRYRTLVVILILVFGPSDYYDLCSEVMHCLRLFKLCFYLYMQPIMVGGHP

SEQ ID NO: 161755 - protein, 93 aa, Glycine max
  Clone ID: PAT_MRT3847_117082C.1.pep
MKLRSSIAFICILASASVTISESLSQQEQLSAYEVLEKYDLPVGLLPKGATGYELNEKNGHFTAYLNGTCYFSIESYELKYKSTIKGVISKGK

SEQ ID NO: 161756 - protein, 61 aa, Glycine max
  Clone ID: PAT_MRT3847_117083C.1.pep
SSSIPPMFIRVYHLLVPHSPPFIGLSCDPPIIRSYQIPPPFHRPSPLKFTSPPPPPPPPPS

SEQ ID NO: 161757 - protein, 47 aa, Glycine max
  Clone ID: PAT_MRT3847_117084C.1.pep
YLGIKVVFIVGGQSIEEQGFKIRYGCDIDIATPGRLIDCLERRYAVL

SEQ ID NO: 161758 - protein, 44 aa, Glycine max
  Clone ID: PAT_MRT3847_117085C.1.pep
LFASAYSYGNAAADLKKFFPILHSMWVRFEMIVFIMRLLFMKFF

SEQ ID NO: 161759 - protein, 70 aa, Glycine max
  Clone ID: PAT_MRT3847_117086C.1.pep
VLLNIGFATYSLSATPQFSKTQTSSLILNYETQPTFFSSISCLTVHGITNSISNPKCFSANDRVDSVIIV

SEQ ID NO: 161760 - protein, 79 aa, Glycine max
  Clone ID: PAT_MRT3847_117087C.1.pep
SNCPRSCHCNWRRGGGRCRCSKSVTFRGLIRVKALRMFFGYLFFIFVRFRRSKKYGSPGWGNDPFKLRYRLGNMPQENS

SEQ ID NO: 161761 - protein, 59 aa, Glycine max
  Clone ID: PAT_MRT3847_117088C.1.pep
GPYRCRSSRSPRYSSCATSTTTLPPSLRESYYSAFGLLLTPVTFSRQLASYNAANLIMP

SEQ ID NO: 161762 - protein, 157 aa, Glycine max
  Clone ID: PAT_MRT3847_117089C.1.pep
NFFMIIEKSPSCSCIFCCKFSVSSILISSTTSASMVFESLSSTPSSSPRWAPILLLAKHSRAFTESLSCGDFVTHTPNCKVDIVYMDCLSSFSNSRLIPLFSINNCSICLASLIPSMVFLILILEGCSSSMLSSLLTSRMFFELFSRPCFNSEMLIL

SEQ ID NO: 161763 - protein, 59 aa, Glycine max
  unsure (1)..(59): unsure at all Xaa locations
  Clone ID: PAT_MRT3847_11708C.1.pep
SNLNSVLSYVKFYKPIIHCILSSMTNATISLTFTLSKVTDXGIXFXWKKVLCLPLHXNL

SEQ ID NO: 161764 - protein, 212 aa, Glycine max
  Clone ID: PAT_MRT3847_117090C.1.pep
MVSLKLQKRLAASVLKCGRGKVWLDPNEVNEISMANSRQNIRKLVKDGFIIRKPTKIHSRSRARRMKEAKRKGRHSGYGKRKGTREARLPTKILWMRRMRVLRRLLRKYREAKKIDKHMYHDMYMKVKGNVFKNKRVLMESIHKSKAEKAREKTLSDQFEAKRAKNKASRERKIARREERLAQGPGEKPSAAPSAPSATASQPAQASKKSKK

SEQ ID NO: 161765 - protein, 212 aa, Glycine max
  Clone ID: PAT_MRT3847_117091C.1.pep
MVSLKLQKRLAASVLKCGRGKVWLDPNEVNEISMANSRQNIRKLVKDGFIIRKPTKIHSRSRARRMKEAKRKGRHSGYGKRKGTREARLPTKILWMRRMRVLRRLLRKYREAKKIDKHMYHDMYMKVKGNVFKNKRVLMESIHKSKAEKAREKTLSDQFEAKRAKNKASRERKNARREERLAQGPGEKPSAAPSAPSAIASLPAQASKKSKK

SEQ ID NO: 161766 - protein, 75 aa, Glycine max
  Clone ID: PAT_MRT3847_117092C.1.pep
TLTSTLPTESNITLNTKYLLQSTRVKTEKVLLLPQIINPSLPLLKHHLIQSIFTQTNFSSILYTSTIHHYTHILH

SEQ ID NO: 161767 - protein, 461 aa, Glycine max
  unsure (1)..(461): unsure at all Xaa locations
  Clone ID: PAT_MRT3847_117093C.1.pep
MDAKVFKFQILQGSIAKRVVIRSILLACAVSIVSIYRAQSLFDFGTLAPIATYFDCVSGFEGVTFRPGSHLLRTRFWASANCEKDANLTLSVVTDLTGNNILYTGAKSLCVGXGSSMAVTAMKQLGLSSVSTRPNAPVRAEERHXYEDNSYNFMFSRDLDKVSVPALLVLEVERVLKPXGIGAFLVGTTSSNPNDLIRAATPVSSLFKXSNVVHVGFVNDLNIVVFKKRVGNATSFYQHGNLPADCPSLTFTKSLIELMEPLVSEKQKPPPLEFHKRIPYLPKFVDVSTRKRLVYIDIGVGELLDANVSDWFLPSYPIDQKDFNIYFVHYNTSIMLSHVKQPGITFVYHPGLSGIDKVNAKLGSDDDDDMDPLLGEEEKFDFLAWFKETVQYADFVVLKMNAGSVELKFLSDIFENGAICYVDELFLKCPERGGDASKGSCMDIYKDLRSNGVYVHQWWGD

SEQ ID NO: 161768 - protein, 67 aa, Glycine max
  Clone ID: PAT_MRT3847_117094C.1.pep
GKSLSVLMKSGGHNCMQGSRVLILLMEVMSLLVNMVWYPYMDFRPVYVACMEASGRVYRPNSWRRYH

SEQ ID NO: 161769 - protein, 84 aa, Glycine max
  Clone ID: PAT_MRT3847_117095C.1.pep
HTECKAPANAEGWTRTGVNCIHFTMVHMPLYSCCDCDLGLILVFGFLFSVVLSPSDSHAIPPSVAFSHPFARKGARVGPPGNSA

SEQ ID NO: 161770 - protein, 55 aa, Glycine max
  Clone ID: PAT_MRT3847_117096C.1.pep
FGQFCIGNSNGGFILSGPRFNPPLIYICCFSGGSPLMIGFSFPLIWVFLPFANFV

SEQ ID NO: 161771 - protein, 61 aa, Glycine max
  Clone ID: PAT_MRT3847_117097C.1.pep
EAKNTKQTKLRTKLKLSVSKKFNPCRGEWCIVINTINIMSHITPKSKGKFFFLDRVRLNKL

SEQ ID NO: 161772 - protein, 100 aa, Glycine max
  Clone ID: PAT_MRT3847_117098C.1.pep
HIYYINYVLSFKEGDIGKTHPNMFISSFELKKREDGIILQCKLRYPIIFIRWMIYLFASKGCNINNKQNWPQANIIIYKNQNLRGDISKLTQTIKAIFAK

SEQ ID NO: 161773 - protein, 76 aa, Glycine max
  Clone ID: PAT_MRT3847_117099C.1.pep
EVPLLIFLFHRSLSINDIGEKHKGPAKGTTRLHCMKVYSQPTVEVSARNRSILGNRISHAFGTVLRKSLARVYHLS

SEQ ID NO: 161774 - protein, 158 aa, Glycine max
  Clone ID: PAT_MRT3847_11709C.1.pep
EESTDILPELAVALKPSPNVQWPNSQHYISAKTPIRAASSAAHAAYLDPCMRPMAGVSSGMEAELAAGSSVVATISWSNEQGTRRDMDLLGQIYTEPQILEPWMKEHGTAATTGSAFSNTGDIPTSGMKPAVPSEMVCTPTPDVTAAWTTPTSAVGSL

SEQ ID NO: 161775 - protein, 49 aa, Glycine max
  Clone ID: PAT_MRT3847_1170C.1.pep
GFVPIQLRTKKLREWITYSCIFNCTSCSYNLRAKFVFNTFSFNILTSNK

SEQ ID NO: 161776 - protein, 168 aa, Glycine max
  unsure (1)..(168): unsure at all Xaa locations
  Clone ID: PAT_MRT3847_117100C.1.pep
KACTDLLKRARKDLXNEGERNLQDAMHVARNIIKNPKLVPGGGATDLTVSAASKQYSSSIEGIKKQPYKTGALTFEAIPRTLAHNXGVNVIPTITAIQXKHAIVENAXIVIDGNTVSITVMKERKIWDAYDVNAHAFYTVIESNCMLLRIDDIKSGINNIQAPGAAAL

SEQ ID NO: 161777 - protein, 155 aa, Glycine max
  unsure (1)..(155): unsure at all Xaa locations
  Clone ID: PAT_MRT3847_117101C.1.pep
MLQMETLVVVAQHRNQCYTRSKSQRHAEFGSSSPSNDFRGINCRTFQTGCGILPTPLKRPKTPLTPSNPNKTRCKTTPSSAPVPINRKKEKKGFNVVPDGGILLSELWAGPTYSNSPPPSSLPIPKFSVRPKRSVSLDFPGSCPEVEMQXRANSA

SEQ ID NO: 161778 - protein, 57 aa, Glycine max
  Clone ID: PAT_MRT3847_117102C.1.pep
ALLYRRMILSSVYHPIAYDVHPLLPQSGKDLISTLSTVGIRVLGHPFSLSTSTSTDE

SEQ ID NO: 161779 - protein, 43 aa, Glycine max
  Clone ID: PAT_MRT3847_117103C.1.pep
SHYMLNVMVLVSTYHHFFCWLATCHLISQVNVFFSVNLSAFLQ

SEQ ID NO: 161780 - protein, 69 aa, Glycine max
  Clone ID: PAT_MRT3847_117104C.1.pep
MMMRTASQKWGYIRIMAGTIFGGILGFYVMHRLETNYKEKMNERLRDYEAELKRKKDERLNELEDSSRF

SEQ ID NO: 161781 - protein, 117 aa, Glycine max
  Clone ID: PAT_MRT3847_117105C.1.pep
SHLCLFSGWLCEFHGPGFLEVLAPQLVSKKVWVVVLPVGSRTLAKPYKLELAIYSRLQDAQPHTVIGLWNADLQEPKLHQSDPSVTVVNHTTSTLLYCALSPCSFSFPVRLSNSRVG

SEQ ID NO: 161782 - protein, 69 aa, Glycine max
  Clone ID: PAT_MRT3847_117106C.1.pep
IPLLELLQTQLSLMSGRSYRVHLLKQLHKVGRKGCMDIRQHSFTIMNKVLETQVDIRNVHIGPKQCCNH

SEQ ID NO: 161783 - protein, 91 aa, Glycine max
  Clone ID: PAT_MRT3847_117107C.1.pep
MSARCSGKRKDFCVILSSFRSCYTVNICFFLAIPLDQSSIAACKFCATFNVKGSALKAGSVVEQYKTNESYSGCTSLYNRICGDIVPPDAW

SEQ ID NO: 161784 - protein, 94 aa, Glycine max
  unsure (1)..(94): unsure at all Xaa locations
  Clone ID: PAT_MRT3847_117108C.1.pep
LQXHRAAVIIQKRMKTVXAXXRMXSSNGCCXQSYNHLFRXWXVXRRCXGDIGLSKPRGXXTNESDEVLVKSSXXAEXQRXXLKXEAXLREKXEX

SEQ ID NO: 161785 - protein, 62 aa, Glycine max
  Clone ID: PAT_MRT3847_117109C.1.pep
KHLSDSKALEGHFSDHSQSHSVGSGDGCLSLLKKRHSGIRPHAVRKRTPRVPISYSIGKDMG

SEQ ID NO: 161786 - protein, 91 aa, Glycine max
  Clone ID: PAT_MRT3847_11710C.1.pep
ERPLFKKMMCGPSCPLINSYKAWLSLLAKEFLVAHKRVHIVKLVLHVLFADQLALIVQDCLQYHLCLHENFRLKKKKKGRPRPSEQVARGI

SEQ ID NO: 161787 - protein, 128 aa, Glycine max
  Clone ID: PAT_MRT3847_117110C.1.pep
WTIVFLSNPCFCSIYQCTFSIIGSLITNDAWGSFNIANNSKDLDNSQDQPLPPGVASWPNYAFATSSAPYNFQQGTLSHYGFSSNAKPTEQHEENKAFHFNHVEITASDGATLSASNYYGAHFTGSRD

SEQ ID NO: 161788 - protein, 59 aa, Glycine max
  Clone ID: PAT_MRT3847_117111C.1.pep
VVSLNVNNFTTTPTLAGQWDTKISIDNPNDKLVAYFSNFKVDVAYRMALWQLIMRLGLC

SEQ ID NO: 161789 - protein, 116 aa, Glycine max
  unsure (1)..(116): unsure at all Xaa locations
  Clone ID: PAT_MRT3847_117112C.1.pep
XARVRKSEFGSRGXXXXXRGXXKXEXXXERSXXSKQXXXXPSCHLKSHRRXSCXNHRERKVXXWXXXLHXXARXVAXXXLKQFXXEMXRXXFXXLREGXRLHXPQSQRCTXNAHNL

SEQ ID NO: 161790 - protein, 35 aa, Glycine max
  Clone ID: PAT_MRT3847_117113C.1.pep
LRNPLQLNSQSGVSTLNKNQGRTIITITNLNGDHN

SEQ ID NO: 161791 - protein, 84 aa, Glycine max
  Clone ID: PAT_MRT3847_117114C.1.pep
SSTFHTPSTSPSSSTSFTHDTPSTSLSSFTAPTPSSFLSSFFSATPSSFLSSDASSTPSFLSSFASFTPPYILSSFAPFTPSTF

SEQ ID NO: 161792 - protein, 94 aa, Glycine max
  Clone ID: PAT_MRT3847_117115C.1.pep
NLSLPPSWPLHLFLFSPTIFSPKTEKKPPLSYFCLESAGSLKRKPSPNGFLERKRPPPGSGGEHETWYNNELFTHCTLVFMSPNIGNEKKPGPF

SEQ ID NO: 161793 - protein, 71 aa, Glycine max
  Clone ID: PAT_MRT3847_117116C.1.pep
YCAFGDPIYAHATLQIKNGPHVMWHCNRDHHVNGEAGSLLLYCSILYWGLYLRRRILPHFLLEVTPVAPSM

SEQ ID NO: 161794 - protein, 124 aa, Glycine max
  unsure (1)..(124): unsure at all Xaa locations
  Clone ID: PAT_MRT3847_117117C.1.pep
FVGGASHFFNFYXQVPPFFFFFLCFLPRLFPQKKXKNVRTKGFSPPPFFFPQKKKTFFLFSLTINGARPHKFPRDKIIFTQLKXXXVXXNXFFFXFFXXXXFXXPLXPKXXXXKKPXXILXPXF

SEQ ID NO: 161795 - protein, 36 aa, Glycine max
  Clone ID: PAT_MRT3847_117118C.1.pep
DTESPTSRTAIIVSLRPYPVSGFGSLGDLSRVEALN

SEQ ID NO: 161796 - protein, 150 aa, Glycine max
  Clone ID: PAT_MRT3847_117119C.1.pep
MDGFLVEFIYSSLGEKMTSKREREAGDRVEDEGLDNESKRQRLDEDSSPSPPPVSVANPLSGLANNYADIDEEEDDVRRERGSVNERSNDGSHHNGHNKYGEADDSDEEDDDSHEQFTGRNRQVEVRKDCPYLDTDNRQGLDLDFEKFCT

SEQ ID NO: 161797 - protein, 333 aa, Glycine max
  unsure (1)..(333): unsure at all Xaa locations
  Clone ID: PAT_MRT3847_11711C.1.pep
FFSGGSSEVLIESLEESQDDVSDFVVYQSEPEEEELSEYEFDKKLGLPHPFIDPKVNKPIEGTLSNDELWWNWRQPEKEQWSRWQRRKPDVETVFLNAMAETGQIKLHGEHPTLTETALYRARREIYKEERLQAEQERLERDGPIAYYSEWVKAWKRDTSREAIQKHFEETGEDETTQLIEMFCHQTDREYRIMMGTDVRIQRDPLAMRMREDQIKQTLFVEELLNXIFFPQETIDYRGPDFHEPMPNMVAYLKEQGKLISREEFDKIMAKEKTEQIELTEIDEAMAKAVDIXENDDEEDSDVDEGEGEEEKLSDYWSVLKSTPELCKSKIFL

SEQ ID NO: 161798 - protein, 166 aa, Glycine max
  Clone ID: PAT_MRT3847_117120C.1.pep
SSRPSPAKLANVNELELELLRRVQPIGLKPYRLLLQFTAFSNFPFSVTRGKNFPLNFFSLGENMASKREREASDRVEDEGVDNESKRQRLDEDSSPSPPPVSIANPLSGLANNYADIDEEEDYVRRERGSINERRNDGSQHYGHKKYGEADDSDEEDESHEQFNGR

SEQ ID NO: 161799 - protein, 42 aa, Glycine max
  Clone ID: PAT_MRT3847_117121C.1.pep
TLYQLMIKFYMIMYKLKSLINLGKKKFKVIKKGVNKGYKNNT

SEQ ID NO: 161800 - protein, 213 aa, Glycine max
  Clone ID: PAT_MRT3847_117122C.1.pep
MASKLLLSLSLLLLTLTLHTSCTTALAKRTNPNPTITTTTDFIKSSCKATRYPAACVQTLSGHASAIRQSEQQLAVTALSVSVSKRRSWGSFVKRMGSVKGMKPREYNALRDCVENMNDSVDRLSQSVKELGLVMGKGKGKKDFTWHVSNVQTWVSAAITDQDTCLDGFDGPHVDANLRASVRPRVVDASQVTSNALALVNRFASKYRSASQT

SEQ ID NO: 161801 - protein, 54 aa, Glycine max
  Clone ID: PAT_MRT3847_117123C.1.pep
TSWSVAGPFDYGPPGCAVKSNVLSFWRPFHGFGDLRLGFMDGFLVEFIYRSFGL

SEQ ID NO: 161802 - protein, 46 aa, Glycine max
  Clone ID: PAT_MRT3847_117124C.1.pep
KIEGLNLFLVFWASLLKITCYNYGRPLLLVVEMTKQHIPRLLIKPT

SEQ ID NO: 161803 - protein, 75 aa, Glycine max
  unsure (1)..(75): unsure at all Xaa locations
  Clone ID: PAT_MRT3847_117125C.1.pep
YVIHINSNSLXKSXNRLWXESGCXXXPXXEXREPXFLKIFFXXNXYFGGGXAWHXXXXXRDPDWYXLSXXDXREK

SEQ ID NO: 161804 - protein, 616 aa, Glycine max
  Clone ID: PAT_MRT3847_117126C.1.pep
MDKEVELGSLEGEMATQHISQPQKRKGGLVTMPFIIANEALARVASLGLLPNMILYLMGTYRLHLAQATQILLWSHATSNFTPVVGAFIADSYLGRFLAVGLGSAITFLGMTLLWLTAMIPQARPPTCSSNKAGGCKSATGGQMAILISALALMSVGNGGLSCSLAFGADQVNRKDNPNNRRVLEIFFSWYYASAAISVIIALTGIVYIQDHFGWKVGYGVPAALMLLSTVSFLLASPLYVKNKVESSLFTGFVQVIVVAYKNRKLPLPPNNSPEHYHHKKESDLVVPTDKLSFLNRACVIKDREQEIASDGSASNPWKLCTVDQVEELKAIIKVIPLWSTGIMMSVNIGGSFGLLQAKSLDRHITSHFQVPPGSFSVVMVLTIFLWIALYDRAILPLASKIRGKPVRISAKRRMGLGLFFSFIHLVTSAIVESVRRRRAIKEGYLNNANGVLHMSAMWLFPQLCLGGIAEAFNAIGQNEFYYTEFPRTMSSVAASLSGLGMAAGNLVSSFVFSVVQNATSRGGKEGWVLDNINKGRYDKYYWVISGLSALNIVYYLICSWAYGPTVEQVQVRKLGEENGSRELEPSTEFRNGSQVDKEFQISKENGSKEEEELTR

SEQ ID NO: 161805 - protein, 66 aa, Glycine max
  Clone ID: PAT_MRT3847_117127C.1.pep
MDPQTRNYQAGQAQGQAQEKTNNLMDMAGNAAQSAKETAQQAGQTVMASAQGAADAVKNATGMNKN

SEQ ID NO: 161806 - protein, 52 aa, Glycine max
  unsure (1)..(52): unsure at all Xaa locations
  Clone ID: PAT_MRT3847_117128C.1.pep
LDRDTVGRRPKSPSEFSYRIXRSRRHFKWPTLVCSASLHKNKREAVDVTRGR

SEQ ID NO: 161807 - protein, 60 aa, Glycine max
  Clone ID: PAT_MRT3847_117129C.1.pep
GKKNSTFFLRVNRGEPTLLASGWRENPGGNVVIITNNIPHHELGLHFVEKKKKRKKKKKK

SEQ ID NO: 161808 - protein, 59 aa, Glycine max
  unsure (1)..(59): unsure at all Xaa locations
  Clone ID: PAT_MRT3847_11712C.1.pep
KREREKKERSRPTVKERRQPSWETPLVGSIGCSLGGTCRPPVCQSSNYFSXLWITPDXP

SEQ ID NO: 161809 - protein, 184 aa, Glycine max
  Clone ID: PAT_MRT3847_117130C.1.pep
TGLVIAGASLVAVNVTGNAIYDPIGSIVVGNLLGMVAIFLIQRNRHALIGRAMDDHDMEKVLQFLKKDPVVDSLYDCKSEVIGPGFFRFKAEIDFNGEMVVQNYLKRTGREEWARQFREAAKQKDDTAMMKIMSNYGEEVVTALGSEVDRLEKEIQNLVPGIRHVDIEAHNPPTETTLSSESFQ

SEQ ID NO: 161810 - protein, 56 aa, Glycine max
  Clone ID: PAT_MRT3847_117131C.1.pep
MMKIMSNYGEEVVTALGSEVDRLEKEIQNLVPGIRHVDIEAHNPPTETTLSSESFQ

SEQ ID NO: 161811 - protein, 151 aa, Glycine max
  Clone ID: PAT_MRT3847_117132C.1.pep
MPAVPGLVIAGASLVAVNVTGNAIYDPIGSIVVGNLLGMVAIFLIQRNRHALIGRAMDDHDMEKVLQFLKKDPVVDSLYDCKSEVIGPGFFRFKAEIDFNGEMVVQNYLKRTGREEWARQVDTHYNVHVKPLIICCYVLLLLLVLFTYCCF

SEQ ID NO: 161812 - protein, 74 aa, Glycine max
  Clone ID: PAT_MRT3847_117133C.1.pep
EEWARQFREAAKQKDDTALMKIMSNYGEEVVTALGSEVDRLEKEIQNLVPGIRHVDIEAHNPPTEATLSSESFK

SEQ ID NO: 161813 - protein, 89 aa, Glycine max
  unsure (1)..(89): unsure at all Xaa locations
  Clone ID: PAT_MRT3847_117134C.1.pep
TTTNTTNTPQPPPPPTPPKVPTPLTTPLTNTAAAAPTTTAPXGITPITIITPTRITTPPKLVTPLPTPCAKAPPRTTRPQSSWWWRRRY

SEQ ID NO: 161814 - protein, 198 aa, Glycine max
  unsure (1)..(198): unsure at all Xaa locations
  Clone ID: PAT_MRT3847_117135C.1.pep
MQMQSMSTTMASFSPPTHFSAAPSSSKLRLVYKNNNFFSLRSKSLAFSPLKAAAAENGVGTAVEPPPEQAVSVPELPPPAVGNSVGTNGSAAVAVESEEVKVKTGFVDPRWVSGTWDLKQFQKNGTTDWDAVIDAEARRRKWLEDNPESSSNENPVVFDTSIIPWWAWXKRFHLPEAELLNGRAAMVGILMAYFVDSL

SEQ ID NO: 161815 - protein, 114 aa, Glycine max
  Clone ID: PAT_MRT3847_117136C.1.pep
ESDTGVDWSIKISKKPRIALVIWRLSSIRFQSRLLQSITGGGKITIQCRMLLSTPHNLCIRVRFSVQQRWQPEPQRFIFSAFSMNQSFEMHKVSKPSQYQPHRIKHVRQLRKLL

SEQ ID NO: 161816 - protein, 41 aa, Glycine max
  Clone ID: PAT_MRT3847_117137C.1.pep
EAISTTTTAATLLTEAIIMITTTVCIAIRNLSSTHMHFLRH

SEQ ID NO: 161817 - protein, 167 aa, Glycine max
  unsure (1)..(167): unsure at all Xaa locations
  Clone ID: PAT_MRT3847_117138C.1.pep
AFEVSEITPPYIKCTVSIFIAFGNLAADTIDXEAFPHTLVQFGEIHEKVALKFSQEDCVTAWPTQVHAATTLEDDGCPYLHAMVHDGSVATIPEDFVIGRKLTTINHMRAYGLNPGVXGSRGLGTMPHSIAQTTVWNQMATVRTPLDVDSNEPSFCQFSIDLVGGGI

SEQ ID NO: 161818 - protein, 46 aa, Glycine max
  Clone ID: PAT_MRT3847_117139C.1.pep
FLGNTTLGLLVLLDMGISIILIISLILNYYYHASSYFFFFLIYYSQ

SEQ ID NO: 161819 - protein, 178 aa, Glycine max
  unsure (1)..(178): unsure at all Xaa locations
  Clone ID: PAT_MRT3847_11713C.1.pep
XRTSAEYFIGVXSIKIDEXSVRVNTTLLSINSSGVGGTKISSVNPYTVLEASIFKAVTEAFVKASAARNITRVASVAPFEVCFSSENVVATRLGAAVPTIELVLQNQKTVWRIXFGANSMVSVSDDKVLCLGFVNGGEKPRTWIVIGRQSFXMATSRLGFSSLLYGSRTTCSNFYCRI

SEQ ID NO: 161820 - protein, 54 aa, Glycine max
  Clone ID: PAT_MRT3847_117140C.1.pep
LSSRSRPRSRDRGKGCSRRLDWNPRRTKTRSLRWKLLTIGLQAAKAPELLSLLG

SEQ ID NO: 161821 - protein, 121 aa, Glycine max
  Clone ID: PAT_MRT3847_117141C.1.pep
LPSSVRFGDPGELLSEVLLAFLRKWVSTVGAEPGRGVMGFRNRLVGAVRGGVRWRWGVGRSGMGMDPDSVVSRCRTSPRKLDEDSKLILRVSRRVRGLAQRDRGRQKSTAAHPQRKNYTET

SEQ ID NO: 161822 - protein, 45 aa, Glycine max
  Clone ID: PAT_MRT3847_117142C.1.pep
RHKFEFEKDKEGLVPILERLFWNICFQNNYSKIWKSTFKNSYFKI

SEQ ID NO: 161823 - protein, 68 aa, Glycine max
  Clone ID: PAT_MRT3847_117143C.1.pep
SLFDNKKMKHFLSLIHTLHLWNINSITIISLFVINDQSIFHTKTLLMGALTCVCTTRHDMIRIICILS

SEQ ID NO: 161824 - protein, 78 aa, Glycine max
  Clone ID: PAT_MRT3847_117144C.1.pep
LDPLLIFMNITCANATNHLIDYLDDLFVCILCYAGEINRGHFKVVIQIITEHCNGIILLHRIIGWISLFRIRRIKTII

SEQ ID NO: 161825 - protein, 101 aa, Glycine max
  Clone ID: PAT_MRT3847_117145C.1.pep
YMTLQGEAASLSDRYGLTIGLPAATAVLLKKQLLYRFSHGIEYSWTYMRADLDGLIEIRKLCEAGKMKIPVYKTFPITQVKEAHEAKDKKLIPGKVVLELD

SEQ ID NO: 161826 - protein, 69 aa, Glycine max
  Clone ID: PAT_MRT3847_117146C.1.pep
GLAIRMAIRIGNPYEPCGLPIRMFEKEIRTSSFSTMKNHRISPYIGKQRTYTTGDNKHSQKDANGSKLH

SEQ ID NO: 161827 - protein, 36 aa, Glycine max
  Clone ID: PAT_MRT3847_117147C.1.pep
PHPHFPQHHTLCPLITPTLLIRHHYRQTLVPPARYR

SEQ ID NO: 161828 - protein, 46 aa, Glycine max
  unsure (1)..(46): unsure at all Xaa locations
  Clone ID: PAT_MRT3847_117148C.1.pep
GQCVCLETSYMNCHGLIKCGXVLARSGTECSYPAVLXWGDKLYLKQ

SEQ ID NO: 161829 - protein, 102 aa, Glycine max
  Clone ID: PAT_MRT3847_117149C.1.pep
TRPNKINFLFLTSTLPLSLFLSLWLFCLFCFCNECSTTTLIIHTNLSLLILKPSLSFTPFLFIFNLSLQLSSLIHNLNFLHSEKGDESSTSSMNSQNHQFSS

SEQ ID NO: 161830 - protein, 164 aa, Glycine max
  unsure (1)..(164): unsure at all Xaa locations
  Clone ID: PAT_MRT3847_11714C.1.pep
SVCLLVDKTGDWLTLIQNSAISDLPXGAAWQTGCLMVNIVMHGNAAVKRSAWASLIHVLLTDSNNTEHFDACEWTKSXEPHSWELIFPIEACGPNNGSGMWRSECANQTVWPLSLLIDNAKQSTVLDTLLGISQESATAGHTLMPAVCVAHATGRSSEYADICA

SEQ ID NO: 161831 - protein, 67 aa, Glycine max
  Clone ID: PAT_MRT3847_117150C.1.pep
AWEFLWLALSFSIWYHRNANIFKNQQFSPEKVMDDALFHTWSWLKCVEKDFQMHFNFWSSNLKDVLS

SEQ ID NO: 161832 - protein, 46 aa, Glycine max
  Clone ID: PAT_MRT3847_117151C.1.pep
LSVRNPLIMDFHYRYDLHLLGSAYIATRDISSSELKPNDPYYYKIP

SEQ ID NO: 161833 - protein, 205 aa, Glycine max
  Clone ID: PAT_MRT3847_117152C.1.pep
MAYVPHGNANCNSLFQKFANSHVGISALPFLQPGLKSCTVFNRGTLIPLCLNGKRSFALSEKGFNCKFSKRERFSIPRSSSSSNSSGSTDETSKETNVKTPFGYTRKDVLLIGLGVTLLGIGLKSGLEFVGVDSLQAGNVVQLVLVLGLTVGWISTYIFRVSNKEMTYAQQLRDYESKVMEKRLESLTEAELQALLEEVEEEKSR

SEQ ID NO: 161834 - protein, 178 aa, Glycine max
  Clone ID: PAT_MRT3847_117153C.1.pep
MAYVPHGNANFNSLFLKFAISHVGISSLPFLHPGLKSCTVFNRGTLIRQCLNGKRNFSLSEKRFNCKFSKKDRFFIPRSSSSSNSSGSTDEPSNETEKTPFGYTRKDVLLIGLGVTLLGIGLKSGLEFVGVDSLQAGNVVQLVLVLGLTVGWISTYIFRVSNKEMTYAQQLRDYESKV

SEQ ID NO: 161835 - protein, 29 aa, Glycine max
  Clone ID: PAT_MRT3847_117154C.1.pep
RLRPLLLLAILNMDELHGLIVSYSIMPLY

SEQ ID NO: 161836 - protein, 55 aa, Glycine max
  Clone ID: PAT_MRT3847_117155C.1.pep
FSPAASEDFLWTSLPLLPDLLFRRPCFVPPWIERVQLGPPCQKPPFVFRPKNPLE

SEQ ID NO: 161837 - protein, 85 aa, Glycine max
  Clone ID: PAT_MRT3847_117156C.1.pep
KNREKRLELENGSCGSVRNCCCYCCSFLLGWFWILLNFSTFTSVMISRVAGMKLIFLILFRVLRDSLRGIYEALELRDGAISCHS

SEQ ID NO: 161838 - protein, 188 aa, Glycine max
  unsure (1)..(188): unsure at all Xaa locations
  Clone ID: PAT_MRT3847_117157C.1.pep
SEIHENMQCSRCQTFDGPRSTEAQSTITDSESDEETSDIGGFAEIAGCFXNLKRSEKQVGSPLEEDLGSWGHHFFPTSVPDAILQASAGDEVTFVFTNQVNGRLVPVESIISPKLQQKDPKKELLKSKQNGKQKPTPFSLHNRLPLQSASVGITKNISMNVAFKPQYSLVSKVLPQKRSCPANINDDN

SEQ ID NO: 161839 - protein, 67 aa, Glycine max
  Clone ID: PAT_MRT3847_117158C.1.pep
LLFTGHRKHPGEPASKTCHPIHLSSSPFCLINTSIRGERTLRLITNGIEEAFSFMPTRNWMLIRRID

SEQ ID NO: 161840 - protein, 55 aa, Glycine max
  Clone ID: PAT_MRT3847_117159C.1.pep
ARVPINSGTTLTLNTSCLPSMTYSQANSYLAAGGVVTSSNSYSTPDWSIPYTEYR

SEQ ID NO: 161841 - protein, 35 aa, Glycine max
  unsure (1)..(35): unsure at all Xaa locations
  Clone ID: PAT_MRT3847_11715C.1.pep
RVALPLSTSCIILDIQTLNPYQKDGSKRITXSWAQ

SEQ ID NO: 161842 - protein, 212 aa, Glycine max
  Clone ID: PAT_MRT3847_117160C.1.pep
RIRHGGVRAMTVGTITLFAGAEVGVFFAWRGSSKADSPFELVASLTGHTKAVVCLAVGCKMLYSGSMDQSIKVWDMDTLQCTMTLNDHTDVVTSHICWDQYLLSSSSDRTIKVWACIEAGSLEVIYTHTEENGVVSLFGMPDAEGKPILFSSCRDNSVHMYELPSFSERGRLFAKKDVALIELGPGGLFFTGDESGLLMVWKWLEVPKVASS

SEQ ID NO: 161843 - protein, 519 aa, Glycine max
  Clone ID: PAT_MRT3847_117161C.1.pep
MASSSLFQSLPFSLQTSKPYAPPKPAAHFVVRAQSPLTQNNNSSSKHRRPADENIRDEARRINAPHDHHLFSAKYVPFNADSSSSSSTESYSLDEIVYRSQSGGLLDVQHDMDALKRFDGEYWRNLFDSRVGKTTWPYGSGVWSKKEWVLPEIHDDDIVSAFEGNSNLFWAERFGKQFLGMNDLWVKHCGISHTGSFKDLGMTVLVSQVNRLRKMNRPVVGVGCASTGDTSAALSAYCASAAIPSIVFLPANKISLAQLVQPIANGAFVLSIDTDFDGCMQLIREVTAELPIYLANSLNSLRLEGQKTAAIEILQQFDWQVPDWVIVPGGNLGNIYAFYKGFKMCQELGLVDKIPRLVCAQAANADPLYLYFKSGWKEFKPVKSSTTFASAIQIGDPVSIDRAVHALKSCDGIVEEATEEELMDATAQADSTGMFICPHTGVALTALFKLRNSGVIKATDRTVVVSTAHGLKFTQSKIDYHSKDIKDMACRYANPPMQVKADFGSVMDVLKTYLQSKAH

SEQ ID NO: 161844 - protein, 101 aa, Glycine max
  Clone ID: PAT_MRT3847_117162C.1.pep
MAQFSGKTLVQWLVATLLIALLGGAQAVVLCSIDSSQLNLCRAAVTGQNPPPPDEKCCAVIRQANLPCLCRYKSILPLIGIKPEKALALPGKCGLQSPPNC

SEQ ID NO: 161845 - protein, 74 aa, Glycine max
  unsure (1)..(74): unsure at all Xaa locations
  Clone ID: PAT_MRT3847_117163C.1.pep
SWKARDVDVGKTTELSRREREEIEKQRAHERYMTLAEQGXSEQAQKDLERLALIRQHREDAAHQRDDEIAAIDQ

SEQ ID NO: 161846 - protein, 86 aa, Glycine max
  unsure (1)..(86): unsure at all Xaa locations
  Clone ID: PAT_MRT3847_117164C.1.pep
GEKXXXNLYLTLLFPPRKSIVCCFFNNSRPKKQCTPNRSSNSILIHPYILSNNLSINTHPNSYEYSLISFNINYHTNTSNKHTQSL

SEQ ID NO: 161847 - protein, 45 aa, Glycine max
  unsure (1)..(45): unsure at all Xaa locations
  Clone ID: PAT_MRT3847_117165C.1.pep
LEVHFNNFFFLVLITVGDLNHLISATMSGVTCCLRFPGXLNSDLR

SEQ ID NO: 161848 - protein, 99 aa, Glycine max
  unsure (1)..(99): unsure at all Xaa locations
  Clone ID: PAT_MRT3847_117166C.1.pep
VXXXRTXXXQSGSXFXXPHXXXXPGSXIXXRXXXSERLXGXGXAHIXSXGXXXMXIAVXXXSLXXWFXXXXXXXQXVIEXLRXYXXCVXXXXEVWWVLX

SEQ ID NO: 161849 - protein, 86 aa, Glycine max
  unsure (1)..(86): unsure at all Xaa locations
  Clone ID: PAT_MRT3847_117167C.1.pep
LXIDFRQDRVCSGGKCRLLTRHANFAGTVRKMQFSFFGPSLGTLRKASQNILITGAVVLASFSVLIEDTILATSFVLFLGFYRVVL

SEQ ID NO: 161850 - protein, 70 aa, Glycine max
  Clone ID: PAT_MRT3847_117168C.1.pep
WVARLIGQGQGWCHENCIPTLIMTVSHMQGKLTLISNCCEKPHSLPYHTSKILHLSLGLREVSETTRTPT

SEQ ID NO: 161851 - protein, 39 aa, Glycine max
  unsure (1)..(39): unsure at all Xaa locations
  Clone ID: PAT_MRT3847_117169C.1.pep
LFMCIFEQMRSDIRLDILSMIKMVHLXKSISREAKLALC

SEQ ID NO: 161852 - protein, 83 aa, Glycine max
  Clone ID: PAT_MRT3847_11716C.1.pep
STQKRQNAMLSLLPDMMEDSWENWLSHLEMNDDFGCTNAVSFDEMVRFNNDSSNVVAAIGPKVEYTVLFEEQRRGIWNKLLLA

SEQ ID NO: 161853 - protein, 81 aa, Glycine max
  Clone ID: PAT_MRT3847_117170C.1.pep
TSSLTKQAALTFDAPNVVPLAPTKSASHRTICTAKWKAPPSSPGVSPIRDATAEPDTLTVDYNCAVSLITAEACEAAGGEA

SEQ ID NO: 161854 - protein, 213 aa, Glycine max
  Clone ID: PAT_MRT3847_117171C.1.pep
MAKGDVNQGDKSFMGMPGFVVDFLMGGVSAAVSKTAAAPIERVKLLIQNQDEMLKQGRLDRKYNGISDCFKRTAASEGVMSLWRGNTANVIRYFPTQALNFAFRDTYKSMFAYKKDRDGYAKWMMGNLASGGAAGATSLLFVYSLDYARTRLANDAKSAKGSGDRQFNGLVDVYRKTLASDGIAGLYRGFGPSVLGIVVYRGLYFGMYDSIKP

SEQ ID NO: 161855 - protein, 57 aa, Glycine max
  Clone ID: PAT_MRT3847_117172C.1.pep
LLQNNFFGPLPLILNSLTFFVTFPHTCHVPLFGLQFQHYCMLPLMAFCLFMLIICEI

SEQ ID NO: 161856 - protein, 50 aa, Glycine max
  Clone ID: PAT_MRT3847_117173C.1.pep
KNKITRKENLLPLLQIHADSVTHAMHILVPLHTYLQHSLTVHTSLKFNTR

SEQ ID NO: 161857 - protein, 60 aa, Glycine max
  Clone ID: PAT_MRT3847_117174C.1.pep
NVKVHRIQSHVTLQVFGVVGFPHPFSILDSERGYLCYVGPVKYKPIETRQSSPSVVFSQP

SEQ ID NO: 161858 - protein, 255 aa, Glycine max
  unsure (1)..(255): unsure at all Xaa locations
  Clone ID: PAT_MRT3847_117175C.1.pep
TSSGSVSNASSESQSLRLNDNVSEHEVGNGSGNPYYHHRKVEAGEEDDHHGFELVSLLTGCVDAIGSRNVTAINHFIAKLGDLASPKGTTSISRICAYFTEALAIRVTRLWPHVFHIAAATTSRDMVEDDESATALRLLNQVTPIPKFLHFTSNEMLLRAVEGKDRVHIIDFDSTRGLQWPSLFQSLASRSNPPIHVRITGIGESKQDLNETGERLAGFAEVLNLPFEFHPVVDRXRDVRLWMPHVKEHETGAVN

SEQ ID NO: 161859 - protein, 62 aa, Glycine max
  Clone ID: PAT_MRT3847_117176C.1.pep
KKKKKKNFFLFLSPFFWGPGFFKLLYIITPHYKKRGARLKVPNLTNPSLQIKIFLFVYPKLI

SEQ ID NO: 161860 - protein, 60 aa, Glycine max
  Clone ID: PAT_MRT3847_117177C.1.pep
GKLWFVAAPYYPEGKDSIRFPISHAAVRPTEYNVRPESFLCGSGNIKVYSKKVVPFRTPH

SEQ ID NO: 161861 - protein, 63 aa, Glycine max
  Clone ID: PAT_MRT3847_117178C.1.pep
LPQCNGLVKCRHFRLQIQVVVLVMVIVEESQEYRHQVVHGLKKRGNRVDGEIKNASVVYDGFE

SEQ ID NO: 161862 - protein, 129 aa, Glycine max
  Clone ID: PAT_MRT3847_117179C.1.pep
CFVLLLVDVKDIKCVINYDFPTSLEDYVHRIGRTGRAGAKGTAYTFFTHANVKFARDLIKILQDAGQTVSPALTALVRSAGSGQFGSGGGFRSTGRGGYGNRGLTSGSNAIPLGKKNENRRKEDGMKKK

SEQ ID NO: 161863 - protein, 51 aa, Glycine max
  Clone ID: PAT_MRT3847_11717C.1.pep
GSQPTVFIHNSSIPMESHGIIECISDTVVLHKVDRKNRGDGESGKKELPFI

SEQ ID NO: 161864 - protein, 487 aa, Glycine max
  Clone ID: PAT_MRT3847_117180C.1.pep
MNPYDSRYSDASSFRGRRSDFVGPIPPPSFVGRGGAVSYGVPGPNGFRSAPVAPVPPFVPPSGGFNVGRGGGRAGYGHVSDRMGRSGGGRGRGGGGGGGEEDRHGGGSSRDDLNNIALPKQDFKNLVPFEKNFYVECPAVRAMSEQEVLHYRASVRITVQGNDVPKPVRMFHEANFPDYCLEVIANLRFADPTPIQAQGWPMALKGRDLIGIAETGSGKTLAYLLPALVHVNAQPRLAHGDGPIVLVLAPTRELAVQIQEEALKFGSRANKRSTCIYGGAPKGPQIRELKRGVEIVIATPGRLIDMLEAQHTNLKRVTYLVLDEADRMLDMGFEPQIRKIVAQIRPDRQTLLWSATWPREVETLARQFLRNPYKVIIGSPYLKANQSINQVVEVLTDMEKYNRLIRLLKEVMDGSRILIFMETKKGCDQVTRQMRVDGWPALSIHGDKNQAERDWVLAEFKSGRSPIMTATDVAARGLGRIIVCVEA

SEQ ID NO: 161865 - protein, 54 aa, Glycine max
  Clone ID: PAT_MRT3847_117181C.1.pep
LYYDNKLNEPTRLRTVKRMRINLVTRDDRIIMRTTCQMQQLGQAINSCREDHLY

SEQ ID NO: 161866 - protein, 81 aa, Glycine max
  unsure (1)..(81): unsure at all Xaa locations
  Clone ID: PAT_MRT3847_117182C.1.pep
AKAFVSKGENYQSRHQHYFKENVRKTETRFANFENKGLEVVYVWKGIXTLRARXKGRQPLIENAEHDWEIVDCRHLYFVFF

SEQ ID NO: 161867 - protein, 79 aa, Glycine max
  Clone ID: PAT_MRT3847_117183C.1.pep
IYWYYSHRKINLKFYKLIYKERKTDTKFLKNTLFKLMTLQFAIASRFENRKIIIKKLHNHHHTHYISRLFNSKIRTWTG

SEQ ID NO: 161868 - protein, 38 aa, Glycine max
  Clone ID: PAT_MRT3847_117184C.1.pep
VPLRTHYFRLFYNIFNGSKPSLRTISCHLFCPCLRPLS

SEQ ID NO: 161869 - protein, 142 aa, Glycine max
  Clone ID: PAT_MRT3847_117185C.1.pep
MASQSVQCFGKKKTATAVAHCKAGKGLVKVNGKPLSQVQPEILRFKVYEPILILGVDKFADVDIRVRVSGGGHTSQVYAIRQAIAKSIIAYYQKYVDEHSKNQLKQALIQYDRTLLVADNRRCEPKKFGGPGARARYQKSYR

SEQ ID NO: 161870 - protein, 70 aa, Glycine max
  Clone ID: PAT_MRT3847_117186C.1.pep
MLNSPLEYLIMPSYFIKLISPPRPLPFLKFQGIFMLVSGYFRLPHDIPKPVWRYPMSYISFHFWALQVNI

SEQ ID NO: 161871 - protein, 240 aa, Glycine max
  Clone ID: PAT_MRT3847_117187C.1.pep
MDRKSLLSLAIIAIVVAAVGGQSPAASPTTSPPAATTTPFASPATAPSKPKSPAPVASPTSSSPPASSPNAATATPPASSPTVASPPSKAAAPAPVATPPAATPPAATPPAATPPAVTPVSSPPAPVPVSSPPAPVPVSSPPALAPTTPAPVVAPSAEVPAPAPKSKKKTKKSKKHTAPAPSPSLLGPPAPPVGAPGSSQDSMSPGPAVSEDESGAETIRCLKKVIGCLALSWATLVLFF

SEQ ID NO: 161872 - protein, 143 aa, Glycine max
  Clone ID: PAT_MRT3847_117188C.1.pep
GDITRVSIPKDYESGAVKGFAYVDFSDVDSMGKALELHETELGGYTLTVGVAKPRDNQGSGGRGAGGRSGGGRFGGRSGGGGGGRFGGRGGGGRFGGSGGGGRFGGSGGGRFGGRGGGGRGRGNRPNLAAEGTGKKTKFADDE

SEQ ID NO: 161873 - protein, 46 aa, Glycine max
  Clone ID: PAT_MRT3847_117189C.1.pep
FGTHRLLFIFYKYIYIYIYIYIYIYIYIYIYIYTLQARHFLYTNQQ

SEQ ID NO: 161874 - protein, 130 aa, Glycine max
  unsure (1)..(130): unsure at all Xaa locations
  Clone ID: PAT_MRT3847_11718C.1.pep
RWRSQIQTERFRLWLWFWLVLLPSGGCLCCFWLSVSLWRGSRXRRCCWGRVCALRLLGLGVLRPCLALFVXXXXFCFFLRXGCGFVWPLGPVCLFVGRXSLFGALXVGVGSRGVFYSXPGGGRGPRRTRG

SEQ ID NO: 161875 - protein, 40 aa, Glycine max
  Clone ID: PAT_MRT3847_117190C.1.pep
AALKLAHILSVACHLANKTQILCVLQLSNSSGLIKQRISL

SEQ ID NO: 161876 - protein, 161 aa, Glycine max
  Clone ID: PAT_MRT3847_117191C.1.pep
MSLIPNFFGGRRSNVFDPFSLDVWDPFKDFPFPNTLSSASFPEFSRENSAFVSTRVDWKETPEAHVFKADIPGLKKEEVKVQIEDDKVLQISGERNVEKEDRNNTWHRVERSSGKFMRRFRLPENAKVDKVKASMENGVLTVTVPKEEVKKADVKNIQISG

SEQ ID NO: 161877 - protein, 111 aa, Glycine max
  Clone ID: PAT_MRT3847_117192C.1.pep
MSAPRATSPSNTASSGSTTARPASPKPPGGPATVMRRKAAADRAEKTANLRPSSTRAAGAGGSSSTMLRLYTDESPGLKVDPVVVMTLSVVFIFSVVALHVIAKVMRRFSA

SEQ ID NO: 161878 - protein, 25 aa, Glycine max
  Clone ID: PAT_MRT3847_117193C.1.pep
TTQDFLIGTCLQTSVPYSETNYSLK

SEQ ID NO: 161879 - protein, 59 aa, Glycine max
  Clone ID: PAT_MRT3847_117194C.1.pep
NSVLNNKDALSWRLSSTFNYSGGKAKSHNGYGEKRRIKDWGDTKFEKEKGVVRNINASS

SEQ ID NO: 161880 - protein, 72 aa, Glycine max
  Clone ID: PAT_MRT3847_117195C.1.pep
PVAVLFSNKQVASEALAFNTTNIERDRPHLCLLPYSTIYYVYMNAYLCELPMYVFEFFSFSDEWSNAWTNAW

SEQ ID NO: 161881 - protein, 120 aa, Glycine max
  Clone ID: PAT_MRT3847_117196C.1.pep
SIVEKQVNIKHMHDDTSQSDECGRDQTNRCLLRPPQSEFIHPHHPLRPLWRVILTGSSSWCVSVGRDTISRERDQEGESCMRDTEAGHGSTDVSRLHYWCLLATEQLKCRGLVIAILSCA

SEQ ID NO: 161882 - protein, 69 aa, Glycine max
  Clone ID: PAT_MRT3847_117197C.1.pep
TVRGRLGSHYIGVPQSFRQRRDRVPRREVGPGQLGSDRARPNRVRFRLSRIHRPWARGERRQPGHKASL

SEQ ID NO: 161883 - protein, 80 aa, Glycine max
  unsure (1)..(80): unsure at all Xaa locations
  Clone ID: PAT_MRT3847_117198C.1.pep
TRLRGVVFDMDCTLTAPVIDFAAMYWAVLGDXEYLRLSAXNPSGIHILGHIHGWPPHKQRTGFDAIAEVERQGLKRLQIM

SEQ ID NO: 161884 - protein, 213 aa, Glycine max
  Clone ID: PAT_MRT3847_117199C.1.pep
MEGRFAEELYAESLQLSKLELTSTSADDQENKANVCDGDDLSLWDESDDKLESSSDLDREWQRRHDQFHTIGYRDGLIAGKEAAAQEGFNFGFKQSVLDGHSWGVVRGVTSAFSHLIHQLKERLIETQKKRNELLGLYESVHSLSTTDCLRLFSEEIKAQEALEQSEHSEVSHHTAGLQEQPSHGSQLRSYRGQLESLLCDFPAIDIHLPEPK

SEQ ID NO: 161885 - protein, 211 aa, Glycine max
  Clone ID: PAT_MRT3847_11719C.1.pep
TGVTVLNNLAQIGIAQGEEDTTTLLSIFSDAPFVGRLGGGVVSEHFVRTKTIPRTVWMTCTQTLMLVVYLLFAYAINGTLYPAIAFLGVCYGVQVSVMLPTVSELFGLKHFGVLSSFMSLGNPIGAFLFSALLAGNIYDNEAAKQHGIGLLLDSGVSCIGPNCFKLTFFILSGVCAAGIVLSIILTLRIKPVYQMLYAGGSFRLPQTSSNH

SEQ ID NO: 161886 - protein, 217 aa, Glycine max
  Clone ID: PAT_MRT3847_1171C.1.pep
GSTWWNSTRLKTTPRERLFPVIAFRRYCRDFAGHKACFLSYGTIGNVVQQSFQYLAAGATGGTGDVKQLSPKKTKGPRNFGFQPPISRKTPTGKITQSFLFPYSRKRAMAGRTRKFHLRSGQKKGKRAPTKTLFRPSLGNQSPNVVRVPGFLQITLENRQTPAQRKLFKGLTALDLEPNPNKQRFSKYSCRRQRRPSRGISSYRDQGQTSAPNSLTS

SEQ ID NO: 161887 - protein, 76 aa, Glycine max
  Clone ID: PAT_MRT3847_117200C.1.pep
LEGCLGIDDDCLDVDLLKQGCMTLKKLDISGCQNISHVGLSKLTSISGGLEKLISADGSPVTLSLADGLNKLSVLQ

SEQ ID NO: 161888 - protein, 97 aa, Glycine max
  Clone ID: PAT_MRT3847_117201C.1.pep
RHYVHHCMHQESCRDNVHVRNPTETLWYVTVRDRNPVETLCTQESYNDIVQTLFMVLCVIDSGVDMVQTLLMVLYLQLSMQFRLLNVTPFILIYIFI

SEQ ID NO: 161889 - protein, 77 aa, Glycine max
  unsure (1)..(77): unsure at all Xaa locations
  Clone ID: PAT_MRT3847_117202C.1.pep
GFRIDIDHGCHHFDFLDLCKCPAGAGMALDAVANNCQNLTELPIEFXPNNGHEGLSAIGTVCLHSEAHIPQKTCIGV

SEQ ID NO: 161890 - protein, 114 aa, Glycine max
  Clone ID: PAT_MRT3847_117203C.1.pep
EFSSRPVLDFIVVDCNLGDMSMKSFKLALFFVILAIEACYGDSLSNEQLTKDQVITIVPCQTKQDCIRNIRFMKCGPSVVFCYEGYCACKHLNKESGHSFSEDPMTKTGMDRST

SEQ ID NO: 161891 - protein, 66 aa, Glycine max
  Clone ID: PAT_MRT3847_117204C.1.pep
CECYFAFVCFCPDGVNVLYEYTYLCSLLTPLYLGTSFLPGCRFSCVVGEGFHSHRNERICLGQKHC

SEQ ID NO: 161892 - protein, 269 aa, Glycine max
  Clone ID: PAT_MRT3847_117205C.1.pep
TSTTTARVEYSGNYTPPSSPSLPNLPNFNDTRAALNFITNLRGLPERAPSHGSTNITTQIVTTISVNTLPCPNGRNDCQGLNGTIFSASMNNISFRIPTIDILKAYYYHINGVYEPGFPTFPPFIFNFTGDFLPITLNTPKQGTRVNVLNYGATVEIVFQGTNLVGGIDHPIHLHGYSFHVVGYGLGNFNQSVDPMNFNLVDPPYLNTVIVPINGWAAIRFEAVNPGVWFMHCHLERHQSWGMETVFIVKDGESENLRLPPPPPDMPPC

SEQ ID NO: 161893 - protein, 50 aa, Glycine max
  Clone ID: PAT_MRT3847_117206C.1.pep
RTLPKVLIPFPPARFGDLSLKSPNYFFLCSLPSMLIKPSPQGNQSLFSPG

SEQ ID NO: 161894 - protein, 84 aa, Glycine max
  Clone ID: PAT_MRT3847_117207C.1.pep
MMRLSMAGFRSSLPFSALIRQVEQEMETVMKVLQPGPLGIIEHKFSADEIRKANATVSKAVTNWRTNAILEDYNHVLKDYIHNK

SEQ ID NO: 161895 - protein, 167 aa, Glycine max
  unsure (1)..(167): unsure at all Xaa locations
  Clone ID: PAT_MRT3847_117208C.1.pep
EEKSQAKNPVGDGLEARCRYVLIHPSKKKGAIALLTYLYNLPCTAIMSTKRHNGSVHKAMRKKSYPSNTQCTCNVTKPAVVIKVNPLTGILIIWQRTHGPQNGAMPSRSTEHPRLNNIPNDQLRTDRPCLGYNMTIARPSSDPKPALMVXGATVRTDTPIAYDSGND

SEQ ID NO: 161896 - protein, 88 aa, Glycine max
  Clone ID: PAT_MRT3847_117209C.1.pep
DGGLEVFIHQYEVLFHRQKLELFNCYPFRRNYSFMFLERSETHFFGFAYMRSFLWSSIHGNLLLSPQVHRRQFRGFGGTYKVKNWFSM

SEQ ID NO: 161897 - protein, 143 aa, Glycine max
  Clone ID: PAT_MRT3847_11720C.1.pep
MSFPYHTTSYGLNSNELVPSWSKVPQFLRASPPKPPPNNQLHFTNPATFWNASEAANIKDVRPSFFPSLQPPFSTPNFEVQSKNISEVRESGTVVKKSGNEPAPKRTRNETPSPLPAFKVRKEKMGDRITALQQLVSPFGKTD

SEQ ID NO: 161898 - protein, 189 aa, Glycine max
  unsure (1)..(189): unsure at all Xaa locations
  Clone ID: PAT_MRT3847_117210C.1.pep
MNMATPNPNVVFIDTNLDTHLALVVSDLDTVSDLKKXILSEHPLCFPKIGKILFHGIKVERKGYFYHLTDSMPVRSAFRGINGSWFLSVDVSVLRECSQNEQLFSHGSPNQVATLGIANNALLWVLHPRGCPPLTISSCLSWRTDKMKKFMLLVHVFQNILAKELNRLLTTTWKPHYLVLFMRQRTIAL

SEQ ID NO: 161899 - protein, 71 aa, Glycine max
  unsure (1)..(71): unsure at all Xaa locations
  Clone ID: PAT_MRT3847_117211C.1.pep
GLLTLKCHAPNPHDHDGYTLNVLHVSILCTPYTPSEPMSXKRAYSSXLPRDQPRMHHLTSLVATRSITPRA

SEQ ID NO: 161900 - protein, 43 aa, Glycine max
  Clone ID: PAT_MRT3847_117212C.1.pep
YRIPLSREVAVILKKHGEFVQSHENSGIASVIYSKKMSMERKY

SEQ ID NO: 161901 - protein, 126 aa, Glycine max
  unsure (1)..(126): unsure at all Xaa locations
  Clone ID: PAT_MRT3847_117213C.1.pep
AGSXXRGGYLELIPYFSPAAQAQXAEVYLDFFPAEVDSQEGVAHIGESKSGAYVPXXTKTNXAETPKEWQLDQTCDKIPSVLTTTEERPXXTEHEGYEPFLGGKQKYATPKMPLDEEILSKDAQDM

SEQ ID NO: 161902 - protein, 122 aa, Glycine max
  unsure (1)..(122): unsure at all Xaa locations
  Clone ID: PAT_MRT3847_117214C.1.pep
GGFSPPPPFCGEKNKFFFEAPREKPKPPFFFXVRKREGEQNLSRRSVDVKKYAGGGGAQFFPNPPWKMKKPALQKWWLFFCPTKRKGGCVTSPWGGKKKGEALFAHLRKRGEDLVPFFLQRN

SEQ ID NO: 161903 - protein, 81 aa, Glycine max
  unsure (1)..(81): unsure at all Xaa locations
  Clone ID: PAT_MRT3847_117215C.1.pep
MVGDGRTCRKASXLVAKALGVETSQGEGFAANLFHCNVCLDTARDPGLTCCGHLFCWPCFHKLSYADSDVRKCPVCKGDVP

SEQ ID NO: 161904 - protein, 101 aa, Glycine max
  Clone ID: PAT_MRT3847_117216C.1.pep
LISVIHYNNFLDFFLHALSILQVFIPITLYVKVYNMFDCVRRSTVKKFLSKQHRKIDYQSLALGNLQEVRHVFARIVFDTVYPLCPNQNQSLRSNCISQGG

SEQ ID NO: 161905 - protein, 127 aa, Glycine max
  Clone ID: PAT_MRT3847_117217C.1.pep
MEEESALRPMDAEQLREQAHKMVDFIADYYKTIEDFPVLSQVQPGYLGKLLPDSAPDSPESLQNVLDDVQEKILPGVTHWQSPNYFAYFPFNSSIAGFLGEMLNAGLNIVGFSWITFSAATELETIV

SEQ ID NO: 161906 - protein, 331 aa, Glycine max
  unsure (1)..(331): unsure at all Xaa locations
  Clone ID: PAT_MRT3847_117218C.1.pep
MEEESALRPMDAEQLREQAHKMVDFIADYYKTIEDFPVLSQVQPGYLGKLLPDSAPDSPESLQNVLDDVQEKILPGVTHWQSPNYFAYFPSNSSIAGFLGGCVSAGLNIVGFSWITSPAATELETIVLDWLAKAFQLPDYFYSSGKGGGVIQGTASEAVLVVLLAARDKILRRVGRNALPKLVMYASDQTHSALLKACQLKCFFTSPWQIAGINPELCRLLKTDSSTNYALSPDVLSEAISNDIAGGLVPFFLCATVGTTSSTAVDPLPALGKIAKTNKLFFHVDAAYAGSACVCPEYRHCIDGVEETDSFNMNAHKXWFLTNFDCSLLWV

SEQ ID NO: 161907 - protein, 110 aa, Glycine max
  Clone ID: PAT_MRT3847_117219C.1.pep
HLITVTCIPCGYLNLPNSSKFQAPAFGFDFCFLASNDDKPLPSPTGECDPTGACSCSCTGIVWPFLASIESLGGMSFASFFAPSAFPLSTASGVTPEFIIFRSWVRGGKD

SEQ ID NO: 161908 - protein, 40 aa, Glycine max
  Clone ID: PAT_MRT3847_11721C.1.pep
HYMDPLKFVLFFILIVYTIIFFAVKQGFLLFGIKGYYIRT

SEQ ID NO: 161909 - protein, 1057 aa, Glycine max
  unsure (1)..(1057): unsure at all Xaa locations
  Clone ID: PAT_MRT3847_117220C.1.pep
GMQRDWNEELQSCREFPHTSPQERILRDRALYKVTSDFVDAAINGAIGVISGCIPPINPTDPECFHMYVHNIFFSFAIDADLEKLPKKRVDANSKSWSSSTLQSSSDKDSIPLHGESQVPNGGKDDSSSSEDLNGTEITQDVSPEAQLAENEQATYASANNDLKGTKAYQEADVPGLYNLAMAIIDYRGHRVVAQSVLPGILQGDKSDSLLYGSVDNGKKICWNEDFHSKVSEAAKCLHLKXHLVLDGSGNLFKLAAPVECKGIVGGDDRHYLLDLLRVTPRDANYTGPGSRFCILRPELITAYCQAQAAEALKSKEKNFQEANSLATESQNAAEADQLVNDSQNAADADKLDSTKEEKAEDVKELASVIAKASDGCEDIVFNPNVFTEFKLAGSPEEIAADEDNVRKVSQYLTDVVLPKFIQDLCTLEVSPMDGQTLXTEALHAHGINVRYIGRVAGGTKHLPHLWDLCNSEIVVRSAKHIIKDLLRETEDHDLAPAVSHFLNCLFGKXQAPSGKVPANSTQSNTPKKEHAGQRSPGKHSKGLARWKGRASLRKTQPLYASISSEALWLDIQEFAMVKYKFELPADARSRVKKISLIRNLCLKVGITVAARKYDLSSATPFQTSDVLDLRPVVKHSVPACSEAKELVETGKLQLAEGMLSEAYTLFSEAFSILQQVTGPMHREVANCCRYLAMXVLYHAGDMAGAIMQQHKELIINERCLGLDHPDTAHSYGNMALFYHGLNQTELALRHMSRALLLLSFSSGPDHPDVAATFINVAMMYQDIGKMNTALRYLQEALKKNERLLGEEHIQTAVCYHALAIAFNCMGAFKLSHQHEKKTYDILVKQLGEDDSRTRDSQNWMNTFKMRELQMNAQKQKGQALNAASAQKAIDILKAHPDLIHAFQAAAVAGGSGSSGASANKSLNAAVMGEALSRGRGIDERAARAAAEVRKKAAARGXLSVRPHGVPVQSLPPLTQLLNIINSGVTPDAVDNGNADGAKKEANDIPPSDSIDAKKGQTMPVQEQEHAPVGSHSPVGLGKGLSSLDAKKQKSKPKAGA

SEQ ID NO: 161910 - protein, 266 aa, Glycine max
  Clone ID: PAT_MRT3847_117221C.1.pep
RAALVGITGVISEIQKEKKGRDVYILGSANVGKSAFINALLKTMAINDPVAASAQRYKPIQSAVPGTTLGPIQINAFLGGGKLYDTPGVHLYHRQTAVVHSEDLPILAPQSRLRGLSFPSSILSSVEEGASTIVNGLNAFSIFWGGLVRIDVLKVLPETCLTFYGPKRIPIHMVPTEQAVEFYQTELGVLLTPPSGGENAENWKGLESERKLQIKFEDVDSYDPKPACDIAISGLGWFTVEPVSRSLKISQTKTVETAGEIDFGCA

SEQ ID NO: 161911 - protein, 29 aa, Glycine max
  Clone ID: PAT_MRT3847_117222C.1.pep
SIILHQSSSLIHVVRGARCCLIKSINMST

SEQ ID NO: 161912 - protein, 53 aa, Glycine max
  Clone ID: PAT_MRT3847_117223C.1.pep
RIQSLFPTYGPVSLSTGGGKTSISKKAMGRFIILAQPPAYSLLLPFPNGFIFL

SEQ ID NO: 161913 - protein, 175 aa, Glycine max
  Clone ID: PAT_MRT3847_117224C.1.pep
SQAPSIEEEVIRIKNEHPDDAQCIVNGRVKGRLKVTRAFGAGFLKQPKWNDAVLEMFRNEFIGTAPYISCSPSLCHHRLCQRDQFLILSSDGLYQYLNNDEVVSHVESFMEKFPEGDPAQHLIEELLLRAAKKAGMDFHELLDIPQGDRRKYHDDVTVMVISLEGRIWKSSGKYP

SEQ ID NO: 161914 - protein, 148 aa, Glycine max
  unsure (1)..(148): unsure at all Xaa locations
  Clone ID: PAT_MRT3847_117225C.1.pep
NVVQFQSAYGDNYNVYIVMELCRGDNLLERTLTKKHQRYAEXEVIPIVRQMLNIXQCHSHHAVHRDFKPKNFLFRSSSKNSTLKASDFGLSQFLETGEXFIVCWYTLLNKVLSGKSSYASDFWSISIIIYLLFSGQHPFLKYFGSNIF

SEQ ID NO: 161915 - protein, 76 aa, Glycine max
  Clone ID: PAT_MRT3847_117226C.1.pep
LLGLSPLFPPLASSASRSRGTCVPLRDSWGPFGPLRPGFLGHYCSGAPPRWFPPWPGPPFFLCELHVRTNNLKTKN

SEQ ID NO: 161916 - protein, 120 aa, Glycine max
  unsure (1)..(120): unsure at all Xaa locations
  Clone ID: PAT_MRT3847_117227C.1.pep
VSWADAWADAWAFFIAHGHLADDTKNFEAYPHKLVPLAEMQEKDVLKLAQDELHTARSTQERPATTLLAEGXTYTHAMEHDSAESTTPGDSRIGVKKATINNTSAYGLNGGTTRTRLLGT

SEQ ID NO: 161917 - protein, 56 aa, Glycine max
  unsure (1)..(56): unsure at all Xaa locations
  Clone ID: PAT_MRT3847_117228C.1.pep
VALASSLLRRLSHPSFLHSLGVFILMAFRHASNLGPFLLLSVGXFQGLWRATFGCG

SEQ ID NO: 161918 - protein, 76 aa, Glycine max
  Clone ID: PAT_MRT3847_117229C.1.pep
NPCKKSGRVIKLGGPIKKVSPCHPRDVKLEPPKRAPPEILFATQQHILFPFPQCFFLVLDSFPFLDAWSYRVKKAF

SEQ ID NO: 161919 - protein, 60 aa, Glycine max
  Clone ID: PAT_MRT3847_11722C.1.pep
TVDAYPSWIEELKSLVCNVSSSLFGIVDLEAALSTVPVPGSRSRYIIRHMIREQSILARA

SEQ ID NO: 161920 - protein, 39 aa, Glycine max
  Clone ID: PAT_MRT3847_117230C.1.pep
HASPYNLFHFGASCLTRCPSLILSVFWSIYDFICYCTTT

SEQ ID NO: 161921 - protein, 73 aa, Glycine max
  Clone ID: PAT_MRT3847_117231C.1.pep
PRVLLSDLPRVSKGANRKYRQMNAHRKVGRVGRPDKGEPEHRGERDFSTGRQIKAERSHDHRRIKRELCMKNT

SEQ ID NO: 161922 - protein, 67 aa, Glycine max
  Clone ID: PAT_MRT3847_117232C.1.pep
VHASAHASGKLKWFTNLSRGSPWVLFKHGKTEHTPILCPQLHRSLQPRHQPIRQLTQRGMFGFRFFL

SEQ ID NO: 161923 - protein, 125 aa, Glycine max
  Clone ID: PAT_MRT3847_117233C.1.pep
LNFFFFFFFFEASFGCSRRCSFFLSLPLCLLDFSAPSLSYCSLTGESPLSFLPSYRESDHSTSIRTLQRVFELKRILRRERNANEQRVRFSAEFGRHYSQRSVSSVKGSFCSPSVVFSQPYGRVG

SEQ ID NO: 161924 - protein, 176 aa, Glycine max
  Clone ID: PAT_MRT3847_117234C.1.pep
QVYQKLNYIKPLEGFIIHYLSSMGVSTRRRFPEKIPHFVRNKFKAKHEAKEKEKEKLIADKDSIKPVTLGDLVNQSSSTSLQSNHTNHSFNGQSILKSDKPMVSNQVMTNAQSFQNTPSTKAAITTNKNVTFPSPPERMMFSPTKPTVITLPCGQLMVRNSAPNTPVNLNQSASLL

SEQ ID NO: 161925 - protein, 56 aa, Glycine max
  Clone ID: PAT_MRT3847_117235C.1.pep
MRDACTLNIPYRNEHNFPISKSVQKLPLVFSIRQGKILTSERNTRYPVGWAWKKEV

SEQ ID NO: 161926 - protein, 44 aa, Glycine max
  Clone ID: PAT_MRT3847_117236C.1.pep
IGLTSLWKKIKWQVKPLQLINISSPCIELESQTLYGYLIPDMDC

SEQ ID NO: 161927 - protein, 93 aa, Glycine max
  Clone ID: PAT_MRT3847_117237C.1.pep
IGKKGGGPGEIFWRVFLKNFIWPFLKGFFLTGRIKIPLFTILKDPFLNILFVTHNEKAVLCFLVFKTSKISFYFKENGFLNSKWAPKKVSPPG

SEQ ID NO: 161928 - protein, 85 aa, Glycine max
  Clone ID: PAT_MRT3847_117238C.1.pep
AQTAKEEDTDSDSAPQVQFTQHNDGGRSSNSRGRGGRSGYVYRGGRNYGNNDNRNFENGYFRNYGNAGNYGNTDSIKYSVKSATS

SEQ ID NO: 161929 - protein, 58 aa, Glycine max
  Clone ID: PAT_MRT3847_117239C.1.pep
LVPNSARGLVPNSCSPGDPLVLERPPPRWSSNSPYSESYYARSLAVVLQRRDWETQFA

SEQ ID NO: 161930 - protein, 75 aa, Glycine max
  Clone ID: PAT_MRT3847_11723C.1.pep
MIVAQMLPLGQEVQKIQGTMVVIHNNVLDINSITSVKLIVDQRLRFIRLSVDALTFAATKIFIQLISATKADLGK

SEQ ID NO: 161931 - protein, 65 aa, Glycine max
  Clone ID: PAT_MRT3847_117240C.1.pep
LEGIYSCLVGCCLSHCFAEEYSSIHGVGRLPGLNACRHRRYSKSALLPHSCAICTTEDLVLRYCQ

SEQ ID NO: 161932 - protein, 101 aa, Glycine max
  Clone ID: PAT_MRT3847_117241C.1.pep
GSREMSRKNVDHYLGKDNVWEYVLDACRNLLDSPSEQQIDECVTKLDIVCSPWPMCVGYANETWIVPHKENFDTTYTNMVMPLGDTATDRGVSAHWAIYRV

SEQ ID NO: 161933 - protein, 92 aa, Glycine max
  unsure (1)..(92): unsure at all Xaa locations
  Clone ID: PAT_MRT3847_117242C.1.pep
SVSLASSGKSGGPIRTVSMXHXMPKXKXWNEXLSATXTNXXXXVXXSXXPXXXVXAPLEXLGLVGRRSXTAXNIXXLXXXYTSSRXSAYRVS

SEQ ID NO: 161934 - protein, 72 aa, Glycine max
  Clone ID: PAT_MRT3847_117243C.1.pep
SLRLILLSGCHSQFNTHLLFHYILRRPTSTPTEVALQILMMLIQLNRHPLLQVSCPVAPMSYPLAYAGFNNV

SEQ ID NO: 161935 - protein, 25 aa, Glycine max
  Clone ID: PAT_MRT3847_117244C.1.pep
NHLFLKLANDVKFNLQHSLCNKFIA

SEQ ID NO: 161936 - protein, 460 aa, Glycine max
  Clone ID: PAT_MRT3847_117246C.1.pep
MQKREQGKSGGSAGGGATPPAKRGRPFGSGNNSSSAAASAADSAAPSTLLGPSLHVHNSFADQNNKRIVLALQSGLKNELTWALNTLTLLSFKEKDDMRKDATPLAKIPGLLDALLQVIDDWRDIALPKEFAKTTRVRTLGANSVVSGFGSEYQALGSTGTHHRPGVGSGSAGIESTQQNGVTKSRFSELWLDEDSLFNLDDEGRTEKQQCAVAASNIIRNFSFMPDNEVIMAQHRHCLETAFQCIEDHLVEDEELVTNALETIVNLAPLLDLRIFSSSKPSFIKITEKRAVQAIMGMLESAVKAWHCAAAELLGRLIINPDNEPFLLPFFPQIHKRLIDLISMPALDAQAAAIGALYNLAEVNMDCRLKIANERWAIDRLLKVIKMPHPVPEVCRKSAMILESLVSEPQNRSLLLAYENAFAEIVFTDGRYSDTFARILYELTSRPSNKVAAARGIWGM

SEQ ID NO: 161937 - protein, 139 aa, Glycine max
  unsure (1)..(139): unsure at all Xaa locations
  Clone ID: PAT_MRT3847_117247C.1.pep
MLIMWMMIEDEELVTNALETIVNLAPLLDLRIFSSSKPSFIKITEKRAVQAIMGMLESAVKAWHCAAAELLGRLIINPDNEPFLLPFFPQIHKRXIDLISMPALDAQAAAIGALYNLAEVNMDCMLKIANERWAIDPLL

SEQ ID NO: 161938 - protein, 115 aa, Glycine max
  Clone ID: PAT_MRT3847_117248C.1.pep
GCWVNVHLKCGKITSLMEFINVLYWNIVCFYPKPRGTPILWGHTFFWKKGGGKKKCPKSFSPGGLGGPPLLGGAILQPTPFSPDQPLPTIFFLPFFFFFFFGGAFFGEKIIFFLP

SEQ ID NO: 161939 - protein, 81 aa, Glycine max
  Clone ID: PAT_MRT3847_117249C.1.pep
GFAPCPGCPSYSFFVRLLRAFCVVRHRAPGRCAHVIPLLCFLPWYTCPPIPRLLVEFCAFWYMFIHLLHPGPPPSKLNTFE

SEQ ID NO: 161940 - protein, 35 aa, Glycine max
  unsure (1)..(35): unsure at all Xaa locations
  Clone ID: PAT_MRT3847_11724C.1.pep
VRQCSXDXECLXRRXPMVXVLXSXAKMPXPGVAMY

SEQ ID NO: 161941 - protein, 172 aa, Glycine max
  unsure (1)..(172): unsure at all Xaa locations
  Clone ID: PAT_MRT3847_117250C.1.pep
SIFTEKTAGNAKQLSAAQNAKLTLAHEDIRNAVGDSSRXKQLQMFVGMTLFKHLPXISLQPVHLPSRPCGFVLKPTANLFPISAGEASLLSYKRKGQAWICPHPAEVVQIFIYLGQPTHVSXLLLTLSHGAHDPSYALADDAQTGGHXDGLKLVLEGASIPRCASGTNLLIP

SEQ ID NO: 161942 - protein, 127 aa, Glycine max
  Clone ID: PAT_MRT3847_117251C.1.pep
MARGGKLTKLKSVLKKWNSFGNNSKHSRHHSISAVADDESSSRSDLHAVYVGKSRRLYRVASDVVDHPVFRELVERSRDSDQQQQSEDTTINVVACEVVLFEHLLWMLDNADPQPESLNELVDFYAC

SEQ ID NO: 161943 - protein, 72 aa, Glycine max
  Clone ID: PAT_MRT3847_117252C.1.pep
PGHVRKLSSPHHGTHGLFTYHSRGLCASGCPLMAVLLPNGVDLSIGSPAEGTLRSIEQRYSSSIRHACSYAW

SEQ ID NO: 161944 - protein, 56 aa, Glycine max
  Clone ID: PAT_MRT3847_117253C.1.pep
SKLVPKIMLCVVPTLPLHIIEIHLYPILYRFHFNLMLLQFLQNPNLNFLLIALVSK

SEQ ID NO: 161945 - protein, 90 aa, Glycine max
  unsure (1)..(90): unsure at all Xaa locations
  Clone ID: PAT_MRT3847_117254C.1.pep
SADPEVVTVALIDLFYVGDWCIRWAGAYGTQALTGSKIKKGWDXGLVKREDLGITMKLWCXDHAPDDAPDALDLTXQELQLDYLDLYLIH

SEQ ID NO: 161946 - protein, 69 aa, Glycine max
  Clone ID: PAT_MRT3847_117255C.1.pep
IWCVEAHIYGAAVCDSCSTCLWNLKRRKSEGHAYGMVLEVFFGRYIIKSMTGAAYPTEDPDRISLIHRY

SEQ ID NO: 161947 - protein, 82 aa, Glycine max
  unsure (1)..(82): unsure at all Xaa locations
  Clone ID: PAT_MRT3847_117256C.1.pep
ERKGIPMAGVLLTMVXFFIASSSSHLVRASDDSDDAVISILLLLSSCRDASLILQCLCPXIFYESFDEDFDLPWIVSDNYDY

SEQ ID NO: 161948 - protein, 33 aa, Glycine max
  Clone ID: PAT_MRT3847_117257C.1.pep
SCLMSLHRLTSDSLPTLSPSSILNMSWCKCSKE

SEQ ID NO: 161949 - protein, 45 aa, Glycine max
  Clone ID: PAT_MRT3847_117258C.1.pep
YIPIRALPGGTRELRRVRFSRERFGEMHARLWWEKNRARIQEQYL

SEQ ID NO: 161950 - protein, 379 aa, Glycine max
  unsure (1)..(379): unsure at all Xaa locations
  Clone ID: PAT_MRT3847_117259C.1.pep
MTSSMVEGGRDEGKHEPSDLITETMNLTAPNLSLPSETETFLSAAISLKDKVVEETWNRRDQVVDPTVYTGLLGTAFTCLRSYQVTGCRNDLILSSEIIDTCVTAARASLRHVTFLCGRGGVYALGAVVANYXGTYDLLYGRAGFLWXSLFVNKHLGEDAVPKDILMLIIDAVLAGGRAGASDVKDCPLMYRWHGTRYLGAANGLAGILHVLLHFPLPSEDAEDVKGTLWYLMSKRFPHSGNYPSSEGNPRDKLVQWGHGATGMAITLSKAAEVFPNDRELRDAAIEAGEVVWKSGLVKKVGLADGVSGNAYAFLSLYRLTKEGIYEERAKSFASFLYDNAKSLAAANGYSLFQGLAGTACLWFDLLAPDNSRFPGYEL

SEQ ID NO: 161951 - protein, 62 aa, Glycine max
  Clone ID: PAT_MRT3847_11725C.1.pep
AFQKNKEGYESAASSSSAAAAAAASTSQQIFQHTLSFLQFPLRKATFSNLNFLLLRLKLARD

SEQ ID NO: 161952 - protein, 882 aa, Glycine max
  Clone ID: PAT_MRT3847_117260C.1.pep
MTSSMVEGGRDEGKHEPSDLITETMNLTAPNLSLPSETETFLSAAISLKDKVVEETWNRRDQVVDPTVYTGLLGTAFTCLRSYQVTGCRNDLILSSEIIDTCVTAARASLRGGVYALGAVVANYMGDLQKRDLFLGLFIEVAKERALPVGPEEGGFGMSYDLLYGRAGFLWGALFVNKHLGEDAVPKDILMLIIDAVLAGGRAGASDIKDCPLMYRWHGTRYLGAANGLAGILHVLLHFPLPSEDAEDVKGTLWYLMSKRFPHSGNYPSSEGNPRDKLVQWGHGATGMAITLSKAAEVFPNDRELRDAAIEAGEVVWKSGLVKKVGLADGVSGNAYAFLSLYRLTKEGIYEERAKSFASFLYDNAKSLAAANGYSLFQGLAGTACLWFDLLAPDNSRFPVRLQHDGERKRRERAFPAEQRECVDMETSRESLSIKHVMSRNGYIDCLTHGKVEHDSYFWSLGGNNAFIAYDYELNYLNFLVSSERVLKESCVCDKGKWFVSCKDVPMSLRNVVFPSMFPNGGNYQDVVDTENPVMHEFTEEVSDFPLERFMRLLPHDQNTGAFFIAVLQKVSPLPAIQVNPLESTPEEISEANINDNGPNTDLKVSSATFEEVDFKAAQDPCNVENITKNTPGKRKLQIQGKWRGIDPVVFFKDEVVINSIKEFYAIDEQFPFNGHLVTRNSDTSHMKRIYYISKSVKDVLELNFSVGQQLKITSVGLKIFERQTSCEGRSAPCAFRITSEGLPLILPHISKQILSSSAIDFKHLLQYRAVKFADFVDAKFGERAANLMPGCCVVVLGRRGAAWPLQVDESTIAIGCWKGRASLTVMVGALECQELLERLIMRLEKVTEKDSSMHKNRPSDNKGDEAQESNGKNEDVEITGC

SEQ ID NO: 161953 - protein, 159 aa, Glycine max
  Clone ID: PAT_MRT3847_117261C.1.pep
DAEDVKGTLRYLMSKRFPHSGNYPSSEGNPRDKLVQWGHGATGMAITLSKAAQVFPNDRELRDAAIEAGEVVWKSGLVKKVGLADGVSGNAYAFLSLYRLTKESIYEERAKSFASFMYDNAKSLASANGYSLSQGLAGTVCLWFDLLAPDSSRFPGYEL

SEQ ID NO: 161954 - protein, 535 aa, Glycine max
  unsure (1)..(535): unsure at all Xaa locations
  Clone ID: PAT_MRT3847_117262C.1.pep
MGYHLDCTRAVRLQHDGERKRRERAFPAEQRECVDMETSRESLSIKHVMSRNGYIDCLTHGKVEHDSYFWSLGGNNAFIAYDYELNYLNFLVSSERVLKESCVSGAVYVSSLPHPLGFKVVVQQYAFASEGVSLDVQVCDKGKWFVSCKDVPMSLRNVVFPSMFPNGGNYQDVVDTENPVMHEFTEEVSDFPLERFMRLLPHDQNTGAFFIAVLQKVSPLPDNEDAQELQVNPLESTPEEISEANINDNGPNTDLKVSSATFEEVDFKAAQDPCNVENITKNTPGKRKLQIQGKWRGIDPVVFFKDEVVINSIKEFYAIDEQFPFNGHLVTRNSDTSHMKRIYYISKSVKDVLELNFSVGQQLKITSVGLKIFERQTSCEGRSAPCAFRITSEGLPLILPHISKQILSSSAIDFKHLLQYRAVKFADFVDAKFGERAANLMXGCCVVVLGGEEVLHXPLQVDESTIAIGCWKGRASLTVMVGALECQELLERLIMRLEKVTEKDSSMHKNRPSDNKGDEAQESNGKNEDVEITGC

SEQ ID NO: 161955 - protein, 60 aa, Glycine max
  Clone ID: PAT_MRT3847_117263C.1.pep
KIRKESTLLTSHEQVLSYNIQLTNKKIISSHYKKNDLYLRTKTVTINTKSIGKCMIDFVL

SEQ ID NO: 161956 - protein, 75 aa, Glycine max
  Clone ID: PAT_MRT3847_117264C.1.pep
SSRPRGTLSCLNQVGQSSLTFPLDHQIVEKVVLDFLDPTDPFFFMVMSSIRQRSMIHSSIVIWFSQFFLFNALGI

SEQ ID NO: 161957 - protein, 85 aa, Glycine max
  unsure (1)..(85): unsure at all Xaa locations
  Clone ID: PAT_MRT3847_117265C.1.pep
XHAHDRXPHRXNTGXGDRXPEAKRARRRTAAEAHNSGGGDFFFEEGAEATKEYIFGEHYRSDSKTGNQQAYFYARDLECHPKDTF

SEQ ID NO: 161958 - protein, 109 aa, Glycine max
  unsure (1)..(109): unsure at all Xaa locations
  Clone ID: PAT_MRT3847_117266C.1.pep
MITNLFSIFDPASSINSSSNXLSRLILLSIICPLIXLIPNRLNLIIKNILITLHMEFKTLLGPSSFKGRTLRFLRLFLFIGINNFIGLFPYIFTRSSHLITTLTLAAPL

SEQ ID NO: 161959 - protein, 85 aa, Glycine max
  Clone ID: PAT_MRT3847_117267C.1.pep
AWFVIIACVIATNRSLGSSVSQPMSCGQPLSLGSFSGLAHRSVKPLFLSVTPCCVCGDPIIQLICQVSQMYNLHRLSHGVVSFHL

SEQ ID NO: 161960 - protein, 107 aa, Glycine max
  Clone ID: PAT_MRT3847_117268C.1.pep
VFFFNPLFRCCSEIIQIPFKVFYFIAAEFLALCLRFTSFLGCEKTTDGGASVSLQKDMGSMRMRSAPQNIRKKWWRQVRIVLAIDAAVCILLFIIWLVICHGISCIR

SEQ ID NO: 161961 - protein, 191 aa, Glycine max
  unsure (1)..(191): unsure at all Xaa locations
  Clone ID: PAT_MRT3847_117269C.1.pep
MAAALARARADDEYVIKLLVIGHSGVWKSCLLXLRFSDGSFTTRCITTIGIGCNIRTIELNSKQMPLQLKYPAVQVPFRTVSTAYFPGARSILLIYDITAEASLNNITNWILAIEQHASDNVDTILVDTTADMDDSXRAVPTCNGQALADEYGIKCYETSANTNMNVEEDIFSITXDIKQRLAITDFRAEP

SEQ ID NO: 161962 - protein, 54 aa, Glycine max
  Clone ID: PAT_MRT3847_11726C.1.pep
DDIGKNVQAGYTIPLGTLMQETSLIHPPSQATTHSTRGRKITHFQSLNYQGPRA

SEQ ID NO: 161963 - protein, 78 aa, Glycine max
  Clone ID: PAT_MRT3847_117270C.1.pep
IMPFAHHQMLLKSPHHQLQYQQFIIPIDHTSHSKDDTTYSSAHSTHTKSHTHLLQNLRFHLLCFLHHHQTKPHAQQTH

SEQ ID NO: 161964 - protein, 147 aa, Glycine max
  Clone ID: PAT_MRT3847_117271C.1.pep
MASLQLTTTPFTLLRQQRQHPTKKKSTASQLNPPRPRPLRVSVRSYKVVIEHDGESTEVEVEPDETILSKALDSGLSVPHDCKLGVCMTCPARLISGSVDQSDGMLSDDVVERGYALLCAAYPQSDCHIKIIPEDELLSLQLATAND

SEQ ID NO: 161965 - protein, 369 aa, Glycine max
  unsure (1)..(369): unsure at all Xaa locations
  Clone ID: PAT_MRT3847_117272C.1.pep
MASEQHDAVFREEDMDDDDDESQEDEEYEEDDDEENVPSPSTALAVTVAVPGSAVSNGGGGSPISKPTATATTATIVLADSSDPKRRRLELIEEKKPPPPLDDSRRLFQRLWTDEDEIGLLQGFLDYTSQRGSSHHNDTALFYDQIKSKLQLGFNKNQLVEKLRRLKKKYRNVLNKISSGKEVSFKSPHDRATFEISRRIWSNTAPITGPVEDDDEIITNPNFGNSAKMPISRKRSRPQKRELNDGSTLNRDNNCISNSNNNNNNEDCNSRLNLQGLIXETVRSCVSPVLKELACGTGGMGLGRGFALNPLQMPMPMSLMNLGIVGETAMDEKWRKQQILELEVYSKRLELVQNEIKVALEELRSAGGG

SEQ ID NO: 161966 - protein, 151 aa, Glycine max
  unsure (1)..(151): unsure at all Xaa locations
  Clone ID: PAT_MRT3847_117273C.1.pep
KNLALXEEENMEVLRNRGLPADVLAKRAHEFEKHVAHESLKDQIPACDKLYYTQVHKFANIMNLIHSAVGDLKLLTDGKMHEGKHITVSNTIARENHVVQIPLMAQEEILSSSASDFITAMVSDNCKPQATAMHVGAIEIIIDSFACPDCT

SEQ ID NO: 161967 - protein, 51 aa, Glycine max
  Clone ID: PAT_MRT3847_117274C.1.pep
NYFTWSINHKLTLLLNMTFKEIIIKINKFILYEYCDYIIYFLIFLEEKIIK

SEQ ID NO: 161968 - protein, 119 aa, Glycine max
  unsure (1)..(119): unsure at all Xaa locations
  Clone ID: PAT_MRT3847_117275C.1.pep
IQVQVREASQIIVTLLMRLDLNTKFPKTQSDTSHDEAAHLGSHERRRKAAIVEKLAKDTSKCRTVPYLSGSSKYVVIDDVXXXSHXPKYRVARRSSSXSRERLSSATXXDFLXXXXXWX

SEQ ID NO: 161969 - protein, 47 aa, Glycine max
  Clone ID: PAT_MRT3847_117276C.1.pep
PTRPRTRASVPLLIYMLLLSEQPQPMAIVTNQLTYVYISSYHHQINN

SEQ ID NO: 161970 - protein, 122 aa, Glycine max
  unsure (1)..(122): unsure at all Xaa locations
  Clone ID: PAT_MRT3847_117277C.1.pep
XGXFWXXXEXHXQXXXXXCSXXXHGXXIIXXKKXPXFFXXPDXSXNXXFPPTXTXXXSKXXXXXXXXXTSXXXXXXXXXXXXXXXXCXLXXLXPLXRTXXXXLTRXXRXFLEXNSELYCTRX

SEQ ID NO: 161971 - protein, 800 aa, Glycine max
  unsure (1)..(800): unsure at all Xaa locations
  Clone ID: PAT_MRT3847_117278C.1.pep
FRVGGRVGGRVGQDMVEPKDHVIVFDKADYYSHPEHYNPTFHEKIAPYASVIVNCMYWEKRFPQLLSYKQMQDLMSQGCPLVGIADITCDIGGSIEFVNRATSIDSPFFRYDPPTNSYHDDMEGNGVICLAVDILPTEFAKEASQHFGNILSQFVINLASATDITKLPAHLRRACIANKGVLTSLYDYIPRMRSSDSEEVSENAENSLSNKRKYNISVSLSGHLFDQFLINEALDIIEAAGGSFHLVNCHVGQSVEAVSFSELEVGADDRAVLDQIIDSLTAIANPTENDRFSNQDSSKISLKLGKVEENGIEKXSKQTTLHILRILGAGRVCQPAAEMLXSFGRPSSSQWYKTLLEDDFECQIDIEIIVGSLYLKDAEQTVEGIPNVTGIQLDVMDHANLCKYISQVDVVISLLPPSCHIIVANACIELKKHLVTASYVDSSMSMLNDKAKDAGITILGEMGLDPGIDHMMAMKMINQAHVRKGKIKSFTSYCGGLPSPEAANNPLAYKFSWNPAGAIRAGRNPATYKWGGETVHIDGDDLYDSATRLRLPDLPAFALECLPNRNSLLFRDLYGITEASTIFRGTLRYEGFSEIMGTLSRIGLFNNEAHSLLMNEQRQTFRKFLFELLKVVGDNPDELLIGENDIMEQILIQGHCKDQRTAMETAKTIIFLGLLDQTEIPASCKSAFDVACFRMEERLSYTSTEKDMVLLHHELEIEYPDSQITEKHRATLLEFGKTLDEKTTTAMALTVGIPAAVGALLLLTNKIQTRGVLRPIEPEVYNPALDIIEAYGIKLIEKTE

SEQ ID NO: 161972 - protein, 229 aa, Glycine max
  Clone ID: PAT_MRT3847_117279C.1.pep
MDNQKKGKGGDQPKKLAKVLNTSSLQINEKDAFQLVGSIVEKGISDSHNNPTTTPPFHFFPKPTVLPFPVARHRSHGPHWRPLSSRGDDDGEDDDSDNNVKDEEDKNLQEFEKVSAFAKPVQRRRKKGLDFRKWKEITRDDSSSFGKESEKDVSSFSQTTGKKKNEKGSKSTYKKTSSLDDNVISPMKVDTKPLLDNSDGGFINSTTTMEVDTLNKVDHEEKVKHAQNL

SEQ ID NO: 161973 - protein, 110 aa, Glycine max
  Clone ID: PAT_MRT3847_11727C.1.pep
NMAKFVNKESKRNHAPDLPPSFDVVYQPRHPPSTSRTASTSRSDRARPFRLQTHAPLHLKRRRRAACTTSCVFFLFFVHLLCFYVLLFCFDYALCSCCSRVSIVQVHMVF

SEQ ID NO: 161974 - protein, 50 aa, Glycine max
  Clone ID: PAT_MRT3847_117280C.1.pep
ANSLYKPGGSKVSSFIFNWLFTHWSGIPTVFGLPPSLYMSHSDTYFHTNG

SEQ ID NO: 161975 - protein, 47 aa, Glycine max
  Clone ID: PAT_MRT3847_117281C.1.pep
FLHLFAIMHLVYSISSLYLIVVSLISSLVHDLSDKLWLYPKITSMQT

SEQ ID NO: 161976 - protein, 100 aa, Glycine max
  unsure (1)..(100): unsure at all Xaa locations
  Clone ID: PAT_MRT3847_117282C.1.pep
RIPKEQSNGFIYAKXFGGFAKIRSSIPDLVAISRILNATLVIPEFQESTRSKRISLKFKSFSYFYNQEQFITFFKNYVIIAKSLPENFIERRRRNEIPTF

SEQ ID NO: 161977 - protein, 77 aa, Glycine max
  Clone ID: PAT_MRT3847_117283C.1.pep
IGKKTILIDICNRLVARDMLWVIQRIPPYPIECQLEIYCICKFWPRQRVHLRSLTGPKDCRGTMSPAGVPTAQTLST

SEQ ID NO: 161978 - protein, 61 aa, Glycine max
  Clone ID: PAT_MRT3847_117284C.1.pep
NLVKRPKKKKTTKILLSNTKVHIQPLTTKKQKKKRGAPPNSAPLPREKIPARFFTGVKFSP

SEQ ID NO: 161979 - protein, 53 aa, Glycine max
  Clone ID: PAT_MRT3847_117285C.1.pep
KGFYVREIVGKKDCVVWILARTQRREHECLFMVQCCVNGGDASAIRKRMLYVQ

SEQ ID NO: 161980 - protein, 223 aa, Glycine max
  Clone ID: PAT_MRT3847_117286C.1.pep
FRGPGSTTRPLCFPFQLLRWTPTLHPNPLSAFSTAEALSETDHPSPPSPQPQPPPIIPPGENNLELTICKMMCNRAWTTRLQNSIRSLVPEFDPCLVYNVLHGAGWPEHALQLYRWGERAGLFTHTPETTLKIGQMLERYCKLNHAGWMLLDGTGGGRGRATGTRGGLGCLMGRYGQSRDRAGRAGGWGENGGGGGGPGGGVLRRGGEMGGAARAGRGGGGGR

SEQ ID NO: 161981 - protein, 859 aa, Glycine max
  Clone ID: PAT_MRT3847_117287C.1.pep
MTGGMFGRKGQKIKGTVVLMPKNVLDFNAITSVGKGSAKDTATDFLGKGLDALGHAVDALTAFAGHSISLQLISATQTDGSGKGKVGNEAYLEKHLPTLPTLGARQEAFDINFEWDASFGIPGAFYIKNFMTDEFFLVSVKLEDIPNHGTINFVCNSWVYNFKSYKKNRIFFVNDTYLPSATPGPLVKYRQEELEVLRGDGTGKRRDFDRIYDYDIYNDLGNPDGGDPRPIIGGSSNYPYPRRVRTGREKTRKDPNSEKPGEIYVPRDENFGHLKSSDFLTYGIKSLSQNVIPLFKSIIFDLRVTSSEFDSFDEVRGLFEGGIKLPTNILSQISPLPVLKEIFRTDGENTLQFPPPHVIRVSKSGWMTDDEFAREMIAGVNPNVIRRLQEFPPKSTLDPATYGDQTSTITKQQLEINLGGVTVEEAISAHRLFILDYHDAFFPYLTKINSLPIAKAYATRTILFLKDDGSLKPLAIELSKPATVSKVVLPATEGVESTIWLLAKAHVIVNDSGYHQLISHWLNTHAVMEPFAIATNRHLSVLHPIYKLLYPHYKDTININGLARQSLINAGGIIEQTFLPGKYSIEMSSVVYKNWVFTDQALPADLVKRGLAVEDPSAPHGLRLVIEDYPYAVDGLEIWDAIKTWVHEYVSVYYPTNAAIQQDTELQAWWKEVVEKGHGDLKDKPWWPKLQTVEDLIQSCSIIIWTASALHAAVNFGQYPYGGYIVNRPTLARRFIPEEGTKEYDEMVKDPQKAYLRTITPKFETLIDISVIEILSRHASDEVYLGQRDNPNWTTDSKALEAFKKFGNKLAEIEGKITQRNNDPSLKSRHGPVQLPYTLLHRSSEEGMSFKGIPNSISI

SEQ ID NO: 161982 - protein, 164 aa, Glycine max
  Clone ID: PAT_MRT3847_117288C.1.pep
GIPGAFYIKNFMTDEFFLVSVKLEDIPNHGTIEFVCNSWVYNFRSYKKNRIFFVNDTYLPSATPAPLLKYRKEELEVLRGDGTGKRKDFDRIYDYDVYNDLGNPDGGDPRPILGGSSIYPYPRRVRTGRERTRTDPNSEKPGEVYVPRDENFGHLKSSDFLTYG

SEQ ID NO: 161983 - protein, 65 aa, Glycine max
  Clone ID: PAT_MRT3847_117289C.1.pep
TPKTISIAVLKERGTQKNFPNHLTILFACNSWVYNSKLYKKHRIFYANKAYLPNYTPTPLVTYIK

SEQ ID NO: 161984 - protein, 84 aa, Glycine max
  Clone ID: PAT_MRT3847_11728C.1.pep
QPSSTSSQWDLLFVPNLREQGPSSSPKTQQRKGPAHFSSPYFSESKGDLKGVCTQILSKPLPGAPLSQVAFRHPFRYKKHNELF

SEQ ID NO: 161985 - protein, 49 aa, Glycine max
  Clone ID: PAT_MRT3847_117290C.1.pep
MKVLEQKDTDTVVKLCEVFESLKVKIVTANITSFSDRLLKTIFIEVRAP

SEQ ID NO: 161986 - protein, 233 aa, Glycine max
  unsure (1)..(233): unsure at all Xaa locations
  Clone ID: PAT_MRT3847_117291C.1.pep
VIYSEDRYSNAFLXYGPEDFNFTVELTYNYGVDNYDIGSGFGHFGVAVEDIYKRVDLIKAKGGKVTREPGPVKDGSAVIAFIEDPDGYKFELLERRPTSEPLCQVMLRVGDLDRAIAFYEKAVGMKLLRKRDNPEQKYTVAFMGYGPEDKNTVLELTYNYGVTNYDKGNGYAQIAIGTNDVYKTAEAIKLCGGKIILEPGPLPGINTKIVACLDPDGWKLAFVDNVDFLKELE

SEQ ID NO: 161987 - protein, 80 aa, Glycine max
  Clone ID: PAT_MRT3847_117292C.1.pep
PPPFIIIIHSTTPPAKAPSFPHKNPPFSYSQQKNHNLSHPTKPIRKNNSRKHVPRAWSVLRSAYTDNEREPRGRVGGRVG

SEQ ID NO: 161988 - protein, 64 aa, Glycine max
  Clone ID: PAT_MRT3847_117293C.1.pep
KKPKPPGDRTFWNTLDTSRKLKPPNVGLNLLILRGKFKTWGKLLKRWFPGKNFFPQKILKKKNS

SEQ ID NO: 161989 - protein, 77 aa, Glycine max
  Clone ID: PAT_MRT3847_117294C.1.pep
FQESLIFFLLFCDRFLKGKKITLCAGHRLCESFSFPLLVYLLNTLLFDIGLRVRFKLLLALSQFYVKSQVQAGEILD

SEQ ID NO: 161990 - protein, 82 aa, Glycine max
  unsure (1)..(82): unsure at all Xaa locations
  Clone ID: PAT_MRT3847_117295C.1.pep
LTRHLHAHDMIPLQKNTGYGALPPXGELHTPGDLTEKTHNIXSGETNTHTCYXATGEYIHGEQYKSDSRTDNQQAHFYARDL

SEQ ID NO: 161991 - protein, 81 aa, Glycine max
  unsure (1)..(81): unsure at all Xaa locations
  Clone ID: PAT_MRT3847_117296C.1.pep
QGQHMMXXMQXCGVGIKXINPPXXTYXFHASXPXAHGILNVFLCYVNTDIGXGSCVXXXXXXXYGLNIIXXXNYXLKVXIX

SEQ ID NO: 161992 - protein, 51 aa, Glycine max
  Clone ID: PAT_MRT3847_117297C.1.pep
GSYMCGCDSNLDIGTDDHSNHLNLTRCCLLSSPHGGQVGPPTFVFRYNVSM

SEQ ID NO: 161993 - protein, 47 aa, Glycine max
  unsure (1)..(47): unsure at all Xaa locations
  Clone ID: PAT_MRT3847_117298C.1.pep
FXXXFXESTXIHIXKLYTLYNLRLXHXSXIXXERTXXLVSSYKIXMF

SEQ ID NO: 161994 - protein, 225 aa, Glycine max
  Clone ID: PAT_MRT3847_117299C.1.pep
QPPMQTVWQTKVDLSIPPTNDFKNHQAPAVGMNTDIQKVSEFGFDKSKRVNFDPFDLPSDVRALARIVYSPHGGEIAIAFLRGGVHIFSGPNFAPVDNYQISVGSAIAAPAFSSTSCCSASVWHDPSKDQTILKIIRVLPPAIPTSQVKTNSSNWERAIAERFWWSLLVGVNWWDAVGCTQSAAEDGIVSLNSVIAVLDADFHSLPSAQHRQHYCPCFRDIILPV

SEQ ID NO: 161995 - protein, 57 aa, Glycine max
  Clone ID: PAT_MRT3847_11729C.1.pep
QTNFPFTKGVGPPPGFTFSWGSPFGTLRPKESPFFFLGSGLFNQTFNCFKFGLFYSI

SEQ ID NO: 161996 - protein, 127 aa, Glycine max
  unsure (1)..(127): unsure at all Xaa locations
  Clone ID: PAT_MRT3847_1172C.1.pep
DTQRTAATGKRTQKAAQKGNGAGRTNTHGDKEKAXSGQPEKAANNPPETRQTKNPTTSXQPKKXEADKGADAKNKXGTRXTSTPRQEQGNDNPYTQRXRXPDXERAANKPGREXKSQATKXEEARRK

SEQ ID NO: 161997 - protein, 95 aa, Glycine max
  Clone ID: PAT_MRT3847_117300C.1.pep
MLKKNNFPQETTIPKKTPNFKTTPQKEKGDPPRDRARNKSRGEKLPKGGPPFFFFFFFFFPPSFFFFFFFFFFFFFFYKWTPIFFRETTSVHIEV

SEQ ID NO: 161998 - protein, 45 aa, Glycine max
  unsure (1)..(45): unsure at all Xaa locations
  Clone ID: PAT_MRT3847_117301C.1.pep
ARASSRSRAVFXDLYLVLHQELTRVLMFVGKAGMSINKGFNFNHS

SEQ ID NO: 161999 - protein, 70 aa, Glycine max
  Clone ID: PAT_MRT3847_117302C.1.pep
LLKRRFKGYVFSGPSSIISFLKCQNHVYFRKISAFFLCHPNPNLNFPHLQTIYTIKTSRTRNVQKDFCHV

SEQ ID NO: 162000 - protein, 353 aa, Glycine max
  unsure (1)..(353): unsure at all Xaa locations
  Clone ID: PAT_MRT3847_117303C.1.pep
MVLVALLKLSSRFPSCSERIREIIVQCKGNLVLELQQRSIEFNLIIAKHQNIRXRPTLVERMPVLDEVTFIARRAGSFPGAGLTSTGSSVGLSNGVAKPVAPIVDLLDMNSDDAPAPSSSGGDFLQDLLGVDLSLASQQSDASQPSRNGTDVLLDLLSIGSASAPIESPAQSNSSTIDILSPKQSKKAPISPLDDLSSLSLSSRATSNAGAAPMMDLLDGFAPGPPTEENNELVYPSITAFESSSLRLVFNFSKQRGYSQTTNIQASFTNLTINVYTEFTFQAAVPKFLQLNLDPASGNTLPASGKGSVTQNMKVTNSQHGKKSLVMRIKIAYKINGKETQEEGQINNFPRDL

SEQ ID NO: 162001 - protein, 44 aa, Glycine max
  Clone ID: PAT_MRT3847_117304C.1.pep
KAKGVWLVLAFISKTPRPLKLKTPVFPKGVKVYLLKILLNSSLF

SEQ ID NO: 162002 - protein, 73 aa, Glycine max
  Clone ID: PAT_MRT3847_117305C.1.pep
GFRLNWLLDFRVFNMKYVIVLTSARFLVLDDQPARFCVCFFYQRGLCKCTFFYFSIGCWCIGSKVNIKSCFIA

SEQ ID NO: 162003 - protein, 69 aa, Glycine max
  Clone ID: PAT_MRT3847_117306C.1.pep
YIRPHPHGSYVTVASKPFSLGCSTNLFTFATLITLPRCTFLHGPIRTPLYQCESKSLFRLSSIATNYVS

SEQ ID NO: 162004 - protein, 105 aa, Glycine max
  Clone ID: PAT_MRT3847_117307C.1.pep
MKKYHIISSKGAAIIGSKPPSQCSRQLRSASLEFSSKQINPGHCSLSRSTLESSSAHQSLPVHTTRQSERLEVADQQLLPRNGSGKRAAGSTKKSKRLRRNAGIE

SEQ ID NO: 162005 - protein, 222 aa, Glycine max
  unsure (1)..(222): unsure at all Xaa locations
  Clone ID: PAT_MRT3847_117308C.1.pep
NFKNQNRNVNNTSNRNKNPTRVQHARQHPPAKNNPGEPFLCYNCGKPGHMARKCRNPSMTGAPQSNMTQEPYIAVITEINMIGGSDGWWVDTGASRHVCYDRAMFKTYTNVENKKVLLGDSHTTTVAGTRDVELKFTSGKTLILKDVMHTPEMRKNLVSGFLLNKAGFTXTIGVDLFTLTKNGIFVRKGYATDGMFKLNLDINKVSPSAFLLCDFNIWHYRV

SEQ ID NO: 162006 - protein, 67 aa, Glycine max
  unsure (1)..(67): unsure at all Xaa locations
  Clone ID: PAT_MRT3847_117309C.1.pep
TSIWTLKHKPSKIFCWSILYTREPYTREPDDGRNDSGPMLSVHWIGETIFACNNFLIIGNAMCLLGX

SEQ ID NO: 162007 - protein, 61 aa, Glycine max
  Clone ID: PAT_MRT3847_11730C.1.pep
RIVSFEMTTEHPCRLLTTRYKSKMPTIHAYIWSLSLRTLRNMFYYCILDAHSYNTLGKDAL

SEQ ID NO: 162008 - protein, 132 aa, Glycine max
  Clone ID: PAT_MRT3847_117310C.1.pep
EIFRVVDLVFLKEKMGLPLIFLLIELHLVVSTQQVHEYAATKLQHSSDRNHFSIAIPPTKSSSEGHSSIAHPPSESSSGVPASIALSPSKSIHKAPRIIWTHGSVDSPVLHHKHYYSKRKSHNPTPAPTYPV

SEQ ID NO: 162009 - protein, 377 aa, Glycine max
  Clone ID: PAT_MRT3847_117311C.1.pep
MADAEDIQPLVCDNGTGMVKAGFAGDDAPRAVFPSIVGRPRHTGVMVGMGQKDAYVGDEAQSKRGILTLKYPIEHGIVSNWDDMEKIWHHTFYNELRVAPEEHPVLLTEAPLNPKANREKMTQIMFETFNAPAMYVAIQAVLSLYASGRTTGIVLDSGDGVSHTVPIYEGYALPHAILRLDLAGRDLTDFLMKILTERGYSFTTSAEREIVRDMKEKLAYIALDYEQELETSKTSSSVEKSYELPDGQVITIGAERFRCPEVLYQPSMVGMEASGIHETTYNSIMKCDVDIRKDLYGNIVLSGGTTMFPGIADRMSKEISALAPSSMKIKVVAPPERKYSVWIGGSILASLSTFQQMWIAKAEYDESGPSIVHRKCF

SEQ ID NO: 162010 - protein, 152 aa, Glycine max
  Clone ID: PAT_MRT3847_117312C.1.pep
GGKKKIQGSKKKGKKPGKKLGPTKPPLKICPLKKNTGNQKKGGPKKKALPPQFFFKKKRTKGGGHRPHPPLNLTLTNPLHLGMGFFPFQPKLFPKGGEFPWGPQRNFFKNPNPPIFFCPGGPKGAGENPCRKGKKVMENLFPNGPKTPREGP

SEQ ID NO: 162011 - protein, 31 aa, Glycine max
  Clone ID: PAT_MRT3847_117313C.1.pep
RQLSHVNKVFPLTLDNFPALKKGFFFLFYLN

SEQ ID NO: 162012 - protein, 77 aa, Glycine max
  Clone ID: PAT_MRT3847_117314C.1.pep
IFHAYLLLHTLSLSARARAKTVISLRRAGKSECIYLSETALLFVRSVQLQLQLQPTALYRMPTNKAVGSEDLGIILE

SEQ ID NO: 162013 - protein, 42 aa, Glycine max
  Clone ID: PAT_MRT3847_117315C.1.pep
PLMQNAHYDLKTHLDLADLLYQAQNKLQIKRDAMLDGCVGGR

SEQ ID NO: 162014 - protein, 33 aa, Glycine max
  Clone ID: PAT_MRT3847_117316C.1.pep
RRAVTVPVNDSYLGWAVNENDPPNQYHTCLLLL

SEQ ID NO: 162015 - protein, 52 aa, Glycine max
  Clone ID: PAT_MRT3847_117317C.1.pep
SQPHLGTSFRPTCRSTRLRPLTQSPVALTAAKITHTVDIEEEEPIFSVCLTL

SEQ ID NO: 162016 - protein, 96 aa, Glycine max
  Clone ID: PAT_MRT3847_117318C.1.pep
GSRRKRFRLRTHLILPTRKLLLRLLQRVACAQRLWSEGLALIWILHLPHDPVIAYSRLSLVASHVNVASDLDHLRLFQSCASESVNNHLLRDPHDR

SEQ ID NO: 162017 - protein, 54 aa, Glycine max
  Clone ID: PAT_MRT3847_117319C.1.pep
SVKDQSFGPIMFSSCNERQHTIQRIMRINDAFRTAESRFRTSAFAACAFSLVRF

SEQ ID NO: 162018 - protein, 91 aa, Glycine max
  Clone ID: PAT_MRT3847_11731C.1.pep
YLELAIVIPWCICIQNFVVGGNLKVLWNIILCLLLQLICHRDLKLENTLLDGYPSPRLNTCDSGFSKGETSHQNEPLWTSPFIYMFVDYPI

SEQ ID NO: 162019 - protein, 85 aa, Glycine max
  Clone ID: PAT_MRT3847_117320C.1.pep
KFVFTWKTGYSKIFSTPGVVCKCCHGVGGPRTSKWTESSNNLQCFPWKSHCIKQHQIFYANFTYKYKYPPPFNVISIWTRIFSFL

SEQ ID NO: 162020 - protein, 80 aa, Glycine max
  Clone ID: PAT_MRT3847_117321C.1.pep
VYNVNQDPQASNLIQGHNERTAFFPRHGMNSRYTVQSKWAESNNELAQWFCSQSWCPDSRARLGTRLLCASLLLVCGELS

SEQ ID NO: 162021 - protein, 69 aa, Glycine max
  unsure (1)..(69): unsure at all Xaa locations
  Clone ID: PAT_MRT3847_117322C.1.pep
PPDPPHFRKFYXPNTILIFPPXLEKILPIFPYFFFFPPHIIQITKXXFSFYSLNQXNYKPTXKIXXXFY

SEQ ID NO: 162022 - protein, 36 aa, Glycine max
  Clone ID: PAT_MRT3847_117323C.1.pep
LCTYKPREFTYEAQITYSHAFGYVALSPKETYTLTF

SEQ ID NO: 162023 - protein, 52 aa, Glycine max
  Clone ID: PAT_MRT3847_117324C.1.pep
CLALERGRENNHNEGRKFSMLLEVSLSWCIFNVDLNVYSSDLIYEKFFSFSP

SEQ ID NO: 162024 - protein, 96 aa, Glycine max
  Clone ID: PAT_MRT3847_117325C.1.pep
ISSRQAFLRRFFVSAVRIPSLHPLWSYIQPCFRECAVSVPQSSVFCKSRRTNYHLLFSMYSAGQGSMKMVSPFMWGGGRKSSQRLFVIFRVNLVAN

SEQ ID NO: 162025 - protein, 125 aa, Glycine max
  Clone ID: PAT_MRT3847_117326C.1.pep
KHEDTRLHKPFAHPPKNPSGPKKPGPPGPKKPGPPRPGPQPGPPGPGPHPGPPGPPPPGPQPGPPGPGPQLGPPGPGPPGPPGPMLTGYLCNSTLSRENCREMIKRLLMFDMKPWWGFKHIPPAA

SEQ ID NO: 162026 - protein, 186 aa, Glycine max
  Clone ID: PAT_MRT3847_117327C.1.pep
MAKVRDQKLYVTVPSLFRCPISMDVMRSPVSLCTGVTYDRASIQHWLDSGHDTCPATMQVLPSKDFIPNLTLHRLIRLWLLSSPSSSSAAEPPSPSSSADHLRPLLRQIQTSDDNVPGILSKIAEFAKKSGENRRSLAAFPGFDSAVVRALAGGNSLIDVAENAIYLLGSVFRGNGKSTGERNPKL

SEQ ID NO: 162027 - protein, 82 aa, Glycine max
  unsure (1)..(82): unsure at all Xaa locations
  Clone ID: PAT_MRT3847_117328C.1.pep
LLKTLSRCMSNSGTEEKTVGGLSALINLGXSTRDNTIGTCIYPVHMVAREXGNIKEQLWRTFSFIVVSFVSECLVYVSLIGD

SEQ ID NO: 162028 - protein, 43 aa, Glycine max
  Clone ID: PAT_MRT3847_117329C.1.pep
ITSLSFYLTNSNINFLFCYVPNFSAFKRQGSETRSPNSKKTEA

SEQ ID NO: 162029 - protein, 58 aa, Glycine max
  Clone ID: PAT_MRT3847_11732C.1.pep
TYANEQSKFSNKVVKRPAKTLRIQFVHLLLLIRIRIALEVSTFFLSSVPSCSLHGHLS

SEQ ID NO: 162030 - protein, 105 aa, Glycine max
  Clone ID: PAT_MRT3847_117330C.1.pep
DEEGADDVPNITAVVGVPRLPLSDSKIRTTPLIPPTITIIDFPFSGASKSPTIKIRKIRITDKWFLRDGYISFLYADSVGSVSEAFGNLLMEQDAVLQCRKCVAL

SEQ ID NO: 162031 - protein, 41 aa, Glycine max
  Clone ID: PAT_MRT3847_117331C.1.pep
TTLLYTHICFILFYLVIHEVLISLSKYINLHKFILILIQKI

SEQ ID NO: 162032 - protein, 76 aa, Glycine max
  Clone ID: PAT_MRT3847_117332C.1.pep
ESGRVPIPVERRREDIIAEESDEVPPGRKGTNRRKGASIKRRRVAGSVVIREVSPGRAVSVRKNGRPPDFEDRIRA

SEQ ID NO: 162033 - protein, 28 aa, Glycine max
  Clone ID: PAT_MRT3847_117333C.1.pep
PWSRELTDEEAAPFLSLSFIDGTEWIKV

SEQ ID NO: 162034 - protein, 190 aa, Glycine max
  Clone ID: PAT_MRT3847_117334C.1.pep
VRDPILFPSFIHTQKRNPATHLKDVNMVWDFFTLRPESTHQAMFLFSDRGIPDGYRKMNGYGSHTFKLVNDKNEVVYCKFHMKTAQGIKNLPVDKAEQISAQDPDYSIRDLYNAIANGDYPKWNFFIQVMTVAQAEKNKFNPFDVTKVWSHKEFPLIPVGQLVLDRNPTNYFAEVEQIAFAPSHLVPGIE

SEQ ID NO: 162035 - protein, 39 aa, Glycine max
  Clone ID: PAT_MRT3847_117335C.1.pep
CHYICSYYPLLSRTTTRRCPSLCSLFIFNGATDSSYESS

SEQ ID NO: 162036 - protein, 53 aa, Glycine max
  Clone ID: PAT_MRT3847_117336C.1.pep
FRTCYIFQFMLCLVLYYKSSCCSLITYYSMIMGHPSCQCGFLLSLINLSFYCF

SEQ ID NO: 162037 - protein, 186 aa, Glycine max
  unsure (1)..(186): unsure at all Xaa locations
  Clone ID: PAT_MRT3847_117337C.1.pep
PTRPPTRPVGSLCLKETRFQALIDSGSSFTFLPNEVYQKVVTEFDKQVNASRIVLQSSWEYCYNARNRXYTIFCLPVSPSADDYAAIGQNFLMGYRLVFDRENLRFGWSRWNCQDRASFTSPSNGGSPNPLPANQQQTVPNARGVPPAIAGHTXPKPSAATPELITSRHSLVSLLLICHLWLWLFC

SEQ ID NO: 162038 - protein, 528 aa, Glycine max
  unsure (1)..(528): unsure at all Xaa locations
  Clone ID: PAT_MRT3847_117338C.1.pep
MGIGLLLWLLLAKGLSMEGAVGATFSSRLIHRFSEEAKAHLASRGFKSSVLLQAWPQRNSSECCCLLLRGDIPRRTMMLGTQYESFYPSALMQDSFFGNARHSLHYTWIDIVGPNVSFLVALDAGSDMLXWVPCDCIECASLSAGNYNDRDLNQYRPSLSNTSRHLPCGHKLCDVHSFCKGSKDPCPYEVQYASANTSSSGYVFEDKLHLTSDGKHAEQNSVQASIILGCGRKQTGDYLHGAGPDGVLGLGPGNISVPSLLAKAGLIQNSFSICLDENESGRIIFGDQGHVTQHSTPFLPMDGKFIAYMVGVESFCVGSLCLKETRFQALIDSGSSFTFLPNEVYQKVVTEFDKQVNASRIVLQSSWEYCYNASSQELVNIPPLKLAFSRNQTFLIQNPIFYDPASQEQEYTIFCLPVSPSADDYAAIGQNFLMGYRLVFDRENLRFGWSRWNCQDRASFTSPSNGGSPNPLPANQQQTVPNARGVPPAIAGHTSPKPSAATPGLVTTSRHSLASLLLICHLWLWLSC

SEQ ID NO: 162039 - protein, 78 aa, Glycine max
  Clone ID: PAT_MRT3847_117339C.1.pep
MSCWSAENATKAYLNTLKMGQKAKEPAVAEFISALAAGNTAQLMVVACAGAADSTTLALVTAAHQTGGLLDQKLSCCL

SEQ ID NO: 162040 - protein, 45 aa, Glycine max
  Clone ID: PAT_MRT3847_11733C.1.pep
MRERMSIHIGQSGIQVGNAWWELCCLEHGIGPDVQMPRDTTVGGG

SEQ ID NO: 162041 - protein, 220 aa, Glycine max
  Clone ID: PAT_MRT3847_117340C.1.pep
MACWSAENATKAYLNTLKMGQKAKEPAVAEFISALAAGNNAQLMVVACAGAADSTTLALVTAAHQTGGHVVCIVPRHEDLSASKKVLIGVNASQVQFMVGEAQQELVMLSQADFVLIDCNLVNHGEIVKAIQVGGMQNGTVVVGYNALNCRGSWWSSGSKTQLLPIGKGLLVTRSGASATSPKYGSGVSKIKSSRWIVKVDKCTGEEHVYRIRVPQGKVI

SEQ ID NO: 162042 - protein, 48 aa, Glycine max
  Clone ID: PAT_MRT3847_117341C.1.pep
AGMFSIVYLHYLIHCRHLNVLVSGLSSFNQFSPHTTELKSSLLRPTTR

SEQ ID NO: 162043 - protein, 53 aa, Glycine max
  Clone ID: PAT_MRT3847_117342C.1.pep
DLQSFSISPKWLLLRYVFHILFLNFISFIYYCLNLVKSKFYSKFRFWHQIRRH

SEQ ID NO: 162044 - protein, 105 aa, Glycine max
  unsure (1)..(105): unsure at all Xaa locations
  Clone ID: PAT_MRT3847_117343C.1.pep
RRLGIRLEXXDSXASVIXXXXGDXIXAXYXXHPALXKKXXXVAXIXRXXSXXEXXXTVXGXXAXXPXTQVXARLNXHXKXGAXLXHXIIPESVXTXXGEMDXKXW

SEQ ID NO: 162045 - protein, 222 aa, Glycine max
  unsure (1)..(222): unsure at all Xaa locations
  Clone ID: PAT_MRT3847_117344C.1.pep
MGGGGAMRSAAAKIAGIGISKAALRPSALPTEQAVHNASRPTSVVGVKGAKSTEVASLHAAAPWDDWDLADDGDLVVPRMVFGSVPTFAEAKEATAELKDAIDQVYLSPESSQYSSRGGQVSALSPTGGQVSALSPTLYEPVNRSCVVDAISDSSAPKHAIQAFHLLSTSRDGVSSQXTVFAHVASLACHKNVWNAVMENPAVSSFFQSQQSVADLGAAGNT

SEQ ID NO: 162046 - protein, 137 aa, Glycine max
  unsure (1)..(137): unsure at all Xaa locations
  Clone ID: PAT_MRT3847_117345C.1.pep
MDLDLELQLPVHTSLGPAGRRLLPQGSPTARNPREASDSCCQQKIEIDETHTDRHRTDAKDLAYDISDDQRDFTTGEGVLDVHSQAAQDAGTHYAVMSFYECLSTGLRXYLDIKTYGFYIATALMDDHDDHIDQNFM

SEQ ID NO: 162047 - protein, 35 aa, Glycine max
  Clone ID: PAT_MRT3847_117346C.1.pep
GSSPAAAASLVFSTAEMGKSGLAGRKELRLDELEP

SEQ ID NO: 162048 - protein, 50 aa, Glycine max
  Clone ID: PAT_MRT3847_117347C.1.pep
DISSFAIFYLHILFDLTNNSKLTCFQNGERQSSSTSVGQCKDRPCLALQK

SEQ ID NO: 162049 - protein, 76 aa, Glycine max
  Clone ID: PAT_MRT3847_117348C.1.pep
HYYLLKPRGSLCAMTSVSNESLVHFRDIPSYHSHLTYNSDNSFTLYPQLSYNRFECEYLQIPAIQLGYHIRPPLLY

SEQ ID NO: 162050 - protein, 143 aa, Glycine max
  unsure (1)..(143): unsure at all Xaa locations
  Clone ID: PAT_MRT3847_117349C.1.pep
MGLDLFFWFVLCLPLNFAFLASTFYQVLMLSDLEADFINPYDAASRINYFIVPEFIGQGLLCAFCLLTGHWIMFLITVPVTCYHVMLYMKRKHLIDVTEVFRLLNAEKKFRIAKILXYYLTIIFISIFRLVLMLVYYLDSEDE

SEQ ID NO: 162051 - protein, 42 aa, Glycine max
  Clone ID: PAT_MRT3847_11734C.1.pep
GGIYIGSGYQNKIYDNNPSIPPLELTKKIYTLSQRLSNPKLP

SEQ ID NO: 162052 - protein, 260 aa, Glycine max
  unsure (1)..(260): unsure at all Xaa locations
  Clone ID: PAT_MRT3847_117350C.1.pep
SSSARGGHLSELSGEMEKEEEEQREWRLYEGYNELHALAQDLHTPFDAPAVLVVGHQTDGKSALVEALMGFQFNHVGGGTKTRRPITLHMKYDPQCESPSCHLVSDSDPSLSHHKSLPQIQAYIEAENARLEQDTSQFSAKEIIIKVEYKYCPNLTIIDTPGLIAPAPGRKNRALQAQARAVESLVREKMQHKEFIILCLEDCSDWSNATTRXRVVMQVDPELARTVIVSTKLDTRIPQFARPSDVEVFLSPPPSTLDGC

SEQ ID NO: 162053 - protein, 45 aa, Glycine max
  unsure (1)..(45): unsure at all Xaa locations
  Clone ID: PAT_MRT3847_117351C.1.pep
KLINYLXLCLXKTXLCFXIIAXHXLXLXMEXTNGHXNGXFCLSXY

SEQ ID NO: 162054 - protein, 35 aa, Glycine max
  Clone ID: PAT_MRT3847_117352C.1.pep
NLSVSRFNGSVRVKLLLCLVSSISIRWMMEFNENP

SEQ ID NO: 162055 - protein, 81 aa, Glycine max
  Clone ID: PAT_MRT3847_117353C.1.pep
QDGCEPKKDSNQSDPSSGLRFTDLVVQLKKEQNFRICTPIKSKTESDAKVVSFRPTHLKFSVVERTEQKSEKRASGDQSDD

SEQ ID NO: 162056 - protein, 38 aa, Glycine max
  Clone ID: PAT_MRT3847_117354C.1.pep
NALYGSRGPTYGTNVANYPPCSNPELVKGVCSHSDAGG

SEQ ID NO: 162057 - protein, 56 aa, Glycine max
  Clone ID: PAT_MRT3847_117355C.1.pep
PEYYKGRRTYSQSKEGSKRMAHAIASMTSLHDSSQAVLECSHYFTHFNVLSGNNLS

SEQ ID NO: 162058 - protein, 53 aa, Glycine max
  unsure (1)..(53): unsure at all Xaa locations
  Clone ID: PAT_MRT3847_117356C.1.pep
AVARTLAPXFLDNNLYHIQTLQHERRMTRTCYSTMSFIPSGGDTIWGGVDWAP

SEQ ID NO: 162059 - protein, 56 aa, Glycine max
  Clone ID: PAT_MRT3847_117357C.1.pep
EVLKFQVRGFKLVSLKSAPQCLEHSELLVMILLQFNSFIWVIHTKCDTDFDVSIFH

SEQ ID NO: 162060 - protein, 100 aa, Glycine max
  Clone ID: PAT_MRT3847_117358C.1.pep
PQHEEQPQVLPSSLSLAIAHAPFLFFVCISRFVGKMMLLTMQFHVCFRCHISESERDSSDNINNDFFPHFVVLKFITLLSVSLLAVNFNFWFWKKEKMSH

SEQ ID NO: 162061 - protein, 84 aa, Glycine max
  Clone ID: PAT_MRT3847_117359C.1.pep
APPRNLSSWGGPLLTAGCFPPPQFGGDQRGGAFCKTRVTPWRLERSPFSIFRANTWLPNKAPPLCFFGKSRRGRALPPKNAPFF

SEQ ID NO: 162062 - protein, 44 aa, Glycine max
  Clone ID: PAT_MRT3847_11735C.1.pep
TPTRTSTLADPAEITSGLAPSGDQERGDTVTWLLWKLPMARCTD

SEQ ID NO: 162063 - protein, 281 aa, Glycine max
  Clone ID: PAT_MRT3847_117360C.1.pep
MEPLSSTKHNNNLSKPSSLHTEAPPPEASPLRKIMVVASIAAGVQFGWALQLSLLTPYVQLLGIPHTWAAFIWLCGPISGMLVQPIVGYHSDRCTSRFGRRSVVLGATSLGVEVLARGVGGVKRLWGIVNFLLAVCLAMTVLVTKMAQHSRQYTLLPNAHQEPLPPPAAVKAGALALFSLLGIPLAITYSIPFALASIFSSTSGAGQGLSLGVLNLAIVIPQMVVSVISGPWDALFGGGNLPAFVVGAVAAAASGILSIILLPSPPPDLAKAATAAGGGFH

SEQ ID NO: 162064 - protein, 511 aa, Glycine max
  unsure (1)..(511): unsure at all Xaa locations
  Clone ID: PAT_MRT3847_117361C.1.pep
MEPLSSTKHNNNLSKPSSLHTEAPPPEASPLRKIMVVASIAAGVQFGWALQLSLLTPYVQLLGIPHTWAAFIWLCGPISGMLVQPIVGYHSDRCTSRFGRRRPFIAAGSLAVAIAVFLIGYAADLGHMFGDSLXKKTRPRAIAIFVVGFWILDVANNMLQGPCRALLADLCAGDHRKTRNANAFFSFFMAVGNVLGYAAGSYSGLHNVFPFTKTKACDVYCANLKSCFFLSIALLLTLSTIALTYVKEKTVSSEKTVRSSVEEDGSHGGMPCFGQLFGAFRELKRPMWILLLVTCLNWIAWFPFLLFDTDWMGREVYGGTVGEGKAYDRGVRAGALGLMLNSVVLGATSLGVEVLARGVGGVKRLWGIVNFLLAVCLAMTVLVTKMAQHSRQYTLLPNAHQEPLPPPAAVKAGALALFSLLGIPLAITYSIPFALASIFSSTSGAGQGLSLGVLNLAIVIPQMVVSVISGPWDALFGGGNLPAFVVGAVASHLFNNIQCVHCAMVKMYPAN

SEQ ID NO: 162065 - protein, 166 aa, Glycine max
  Clone ID: PAT_MRT3847_117362C.1.pep
MSFVPKETIEVIAQSIGITNLSSDVALSLAPDLEYRIREIMQESVKCMRHSKRTFLTTEDVDTALALRNLEPIYGFTSNDPPRFKRAAGHKDLFYIDDKDVDIKDIVEAPLPKAPLDTSITSHWLAIEGVQPAIPENAPVEAPSEIRKSEFKEDGLTVDVKLPVNI

SEQ ID NO: 162066 - protein, 41 aa, Glycine max
  Clone ID: PAT_MRT3847_117363C.1.pep
ILLARACNHTTIVNRKPNLFHCRLLRYFFNMINMLISYTKQ

SEQ ID NO: 162067 - protein, 54 aa, Glycine max
  Clone ID: PAT_MRT3847_117364C.1.pep
ANNIYYGRHYLNYLLLLVLPCSPKTKAFFLLLLLLYYLAQIFIVVHLIKVRDLV

SEQ ID NO: 162068 - protein, 52 aa, Glycine max
  Clone ID: PAT_MRT3847_117365C.1.pep
ILKGRKNNLETLTHIQNFSYITIDQGIKYLIFPILKKTTFHNSLTKNTLSLF

SEQ ID NO: 162069 - protein, 41 aa, Glycine max
  Clone ID: PAT_MRT3847_117366C.1.pep
RDAPPSLGCEVGDSLIDAWPIGFGLILLTLQQLFVSCVGLC

SEQ ID NO: 162070 - protein, 129 aa, Glycine max
  Clone ID: PAT_MRT3847_117367C.1.pep
SSHPRATQGRGGGQQNRRRRTPRTNQEPKAAAATETNRTASATAAPKQKRRRGTRTTDTGTDRRPRQNNSHRPDPDTTRRPRGPPTEARKDSPDQPPNRNRRTQTGGPKEHTRKGKDAEGAPKQQPGRG

SEQ ID NO: 162071 - protein, 95 aa, Glycine max
  Clone ID: PAT_MRT3847_117368C.1.pep
MMMKSAMCALVLVALVVVEVGPMAEAAVTCNPTQLTPCLPAINSGSAPSSACCQKLKEQKPCFCGYLKNPSLKQYVNSPNAKKTVSSCGIAYPTC

SEQ ID NO: 162072 - protein, 43 aa, Glycine max
  Clone ID: PAT_MRT3847_117369C.1.pep
TIIEAFFTVILLLYKSFSFISKDHTRSVLSHFILIYRFFFSFI

SEQ ID NO: 162073 - protein, 56 aa, Glycine max
  Clone ID: PAT_MRT3847_11736C.1.pep
PEVNHTVLTLKAFFSSSILQIALQNHSSKGLTLSTQPAFLVKDLDKFVPFKYHQHF

SEQ ID NO: 162074 - protein, 40 aa, Glycine max
  Clone ID: PAT_MRT3847_117370C.1.pep
VKRKLMNLNMLKGLAAMCQKILYINNHARDQASHYLANNR

SEQ ID NO: 162075 - protein, 76 aa, Glycine max
  unsure (1)..(76): unsure at all Xaa locations
  Clone ID: PAT_MRT3847_117371C.1.pep
SCDHAKNGVDIVSGTRVMSHFAKPNWRSVYKRIALNHPDARVGVFYCVLXAVGHELRQLALDKSHNTSTKYDFHTL

SEQ ID NO: 162076 - protein, 241 aa, Glycine max
  Clone ID: PAT_MRT3847_117372C.1.pep
EPTLDSRVWLASQHPLVAVRTRLRAGALNAAGDPPDASTSLRDCSYGAPAQDSREYELVLLLGLRIGATPMISILKDMVNNFKAIDEEEGIGGAKSPTRLSDFKTSRAYFYWVTREQGSFDWFKGVMNEVAEEDRRKVIELHSYCTSVYEEGDARSALIAMLQSLNHAKNGVDIVSGTRVMSHFAKPNWRSVYKRIALNHPDARVGVFYCGPSALTHELRQLALDFSHNTSTKYDFHKENF

SEQ ID NO: 162077 - protein, 82 aa, Glycine max
  unsure (1)..(82): unsure at all Xaa locations
  Clone ID: PAT_MRT3847_117373C.1.pep
KNYCDXRWECEGWSIYGSDLTITYFYQSYHVHNLLYKRNLTVAHAVGSLDYHYFICSRALLDPAGVCTPVNNTMHMMKIADY

SEQ ID NO: 162078 - protein, 91 aa, Glycine max
  Clone ID: PAT_MRT3847_117374C.1.pep
GGPFTPTRSECSWGFLSGYPGHPNYMANPESFRAKVRSQSAPRQRLEFDRYGSTRRPVHFHGSDSDHDSDLRNKVLPAFNQMNRIGSSNLR

SEQ ID NO: 162079 - protein, 122 aa, Glycine max
  Clone ID: PAT_MRT3847_117375C.1.pep
NNGFEMWSSEWANQTSWHLSFLNDNSQQFTVFDNLLGNSPDFEIAGYTFLAAFFCPQGTARFFGKSGTFGKIWQLGFSFVGWLVKSNKGNRAGPSGEVCSAYLKIPTLLLIVVMMCEVCGYF

SEQ ID NO: 162080 - protein, 86 aa, Glycine max
  Clone ID: PAT_MRT3847_117376C.1.pep
NFWCGLKMVRIENLRVVYFLIPSFLRGREGMEMPTFGEGNNCADTRGLIRFLKNRGGGSLFIRVNLGIFFFNKAGGFDLPLPFCRC

SEQ ID NO: 162081 - protein, 96 aa, Glycine max
  unsure (1)..(96): unsure at all Xaa locations
  Clone ID: PAT_MRT3847_117377C.1.pep
VFVYVDDNFNTVTLYSQVGVLNINWFQKQPNCNDQVSMTLNISADLLFLFTLNTQXLFDFLTADFETPNNSLHHISLRYGITPFXEHSKFSIHTSN

SEQ ID NO: 162082 - protein, 122 aa, Glycine max
  unsure (1)..(122): unsure at all Xaa locations
  Clone ID: PAT_MRT3847_117378C.1.pep
FLQLEKSTRNPYLFSFEWDIEAQPDKLRDQISTAVLDACLEQDPDNMAACETCTKTNMVMDFGEITTXASVDYDKSVRDTRHEIGLISDXDVGLDADKCKVMVDIEHQCPVMAHGVLRQFTK

SEQ ID NO: 162083 - protein, 87 aa, Glycine max
  Clone ID: PAT_MRT3847_117379C.1.pep
QSSIRREKRNKFLKKMKEVKIKKTEKVFKFLNKKNVATCSRPSSKQSKFDRHGESSLFSPTFKARCDIHSRRPCSANWLSFSTHNYQ

SEQ ID NO: 162084 - protein, 50 aa, Glycine max
  Clone ID: PAT_MRT3847_11737C.1.pep
PGCACMRFSICFNCNGSCKVFTTNGDNKNECFIRCPECNENGLVKCPICC

SEQ ID NO: 162085 - protein, 88 aa, Glycine max
  Clone ID: PAT_MRT3847_117380C.1.pep
LFSLPTKKKNHLSSNDESPTTISWQVSRVYIFFILDNYQYSFIIIDLHHLEKFFLSFIPNMHVLYHRINGWVDHIWVFNYKSMFYIQS

SEQ ID NO: 162086 - protein, 135 aa, Glycine max
  unsure (1)..(135): unsure at all Xaa locations
  Clone ID: PAT_MRT3847_117381C.1.pep
SDXXXXXXXXXXXXXXXGXXXXXXXXXXXXXXFXXFXFXFFFLGLCFFFFLFFFFFFFFFFCXGXFCFKQKNFSILQKLLLTKKKDLYHPIQQDQLQKKFNFPKPTHSFLDLKNINISFLFLKNTYLFNHNKPYL

SEQ ID NO: 162087 - protein, 39 aa, Glycine max
  Clone ID: PAT_MRT3847_117382C.1.pep
TPHCTPILRTDPAARQNACITVPRRGALVVAPRTVVSTT

SEQ ID NO: 162088 - protein, 48 aa, Glycine max
  Clone ID: PAT_MRT3847_117383C.1.pep
VLVISYRLETVMMAKRVFLLDDGKLKELPQSTMLDGQKDSLLSSGLVI

SEQ ID NO: 162089 - protein, 438 aa, Glycine max
  unsure (1)..(438): unsure at all Xaa locations
  Clone ID: PAT_MRT3847_117384C.1.pep
MKGYKVWTSTFNSSTTTTFIPFNNNLSPNYPLTPPSYTASNCFPSFQSQRPKLIAQNFKPHILLCTSLPSPQASSASTAQAEEHEVEIAKGYTMTQFCDKMIDFFLNEKTKSKEWRKYLIFREEWKKYRDRFYNRCQRRADMENDPVMKEKFISLRRKLKKEXALQIDDEMEGHYVLLMEIQDSPMDINAIVARRRKDFTGEFFHYLSLISDTYDSLEDRDGISRLGSRCLSAVSAYDNTLENIETLDAAQAKFDDILNSPSIDIACQKIKSLAKAKELDSSLILLISSAWAKAKESTTMKNEVKDIMYQLYRATKSSLRSITPKEIKLLKHLLNIIDPEERFSALATAFTPGDEHEAKDPNALYTTTPKELHKWIKIMLDAYHLNKEETDLREARQMTDPVVIQRLFILKDTIEQEYMEKDTTQKSETKDDSKSEEF

SEQ ID NO: 162090 - protein, 194 aa, Glycine max
  Clone ID: PAT_MRT3847_117385C.1.pep
RGEQPAEFSLEITVACKVLNWGLQPQHQGPQASSASTAQAEEQEVEIARGYTMTQFCDKMIDFFLNEKTKSKEWKKYLIFREEWKKYSDRFFSRCQRRADMENDPVMKEKFISLRRKLKKIDDEMEGHYELLKEVQDSPMDINAIVARRRKDFTGEFFHYLTSYFRLYDHFGGRDGISRTGDRCLSAVSAYDNT

SEQ ID NO: 162091 - protein, 140 aa, Glycine max
  unsure (1)..(140): unsure at all Xaa locations
  Clone ID: PAT_MRT3847_117386C.1.pep
LSTATRAGMVAPFTGLKTMAGFPTSKTNNDITPRASNGGRVSFFXERTPDGKNEVDTLRHLPDDDDAQLAKEPATVLXKGWIPWLEFEKEDGFVYREHKRAPGYYXGRYWTMSDTETFGRTDRSPVLKRLSXGNTGYPQA

SEQ ID NO: 162092 - protein, 66 aa, Glycine max
  unsure (1)..(66): unsure at all Xaa locations
  Clone ID: PAT_MRT3847_117387C.1.pep
IGYPXSTXXSRXNSQKXCIXICXSLLLSSXXDFXEPSAQMHGIQXXDRDPTKGTPIKANXSTLIGT

SEQ ID NO: 162093 - protein, 54 aa, Glycine max
  Clone ID: PAT_MRT3847_117388C.1.pep
QPPSCPDLYATQAAVSSGKSSRHSFHLNAMYYSHRLWQVRCVNPQCIHYEFLTF

SEQ ID NO: 162094 - protein, 413 aa, Glycine max
  unsure (1)..(413): unsure at all Xaa locations
  Clone ID: PAT_MRT3847_117389C.1.pep
VLFVSEEVERALAKLGHAKLTERSPPPRLEGPAAKNLQLQFRTRMPPHLFTGGKVEGEQGSAIHVMLMDPNTGSVVQVGPESVAKLNVVVLEGDFNEEVDDDWTKEHFESHEVKEREGKRPLLTGDLQVSLKEGVGTFGDLTFTDNSSWIRSRKFRLGVKVAPGYCEEIRIREGKTDAFXAVKDHRGELYKKHYPPALHDEVWRLDRIAKDGALHKKLIQAKIVTVEDFLRLLVREPQKLRSILGSGMSNRMWENTVEHAKTCVLGGKLFVYYTDETNSAGIVFNNIYELRGLISDGQFFSLESLAPNQKMSVDSLVKKAYENWDQVVEYDGKVLNSLANSKKGSRAVATQIMHHNSFQEQQYASAKNKVSYVSSEPNQHLQITNNYSSGPGLTDYPFRSDNQMVGTSLTDSQ

SEQ ID NO: 162095 - protein, 79 aa, Glycine max
  Clone ID: PAT_MRT3847_11738C.1.pep
YPSFFYPKLAALTKTFLPMMETVYYIHNFKGRNGGTLFRCYPGPWKVLRRVGNRKYVCLHQQNSMPSLKEVALEILPSA

SEQ ID NO: 162096 - protein, 68 aa, Glycine max
  Clone ID: PAT_MRT3847_117390C.1.pep
KKKKQRHQAKTTKGLPLSQAPAYVLDHATQKHFQWRDLNNVHSSISSNAPTRKTLTFPTLFPFRIIPL

SEQ ID NO: 162097 - protein, 86 aa, Glycine max
  unsure (1)..(86): unsure at all Xaa locations
  Clone ID: PAT_MRT3847_117391C.1.pep
ISPNCTRLVRGGATLYSDGFPYLYAMVHDISVSTIPGDFVIFFKFSTINNXCAYWLIPCILGFLLLSTISYSILQLTFLISNCFYF

SEQ ID NO: 162098 - protein, 58 aa, Glycine max
  Clone ID: PAT_MRT3847_117392C.1.pep
DKSYAAHRACINVHELMPGTRSGSLRFPTRAVATRRGECCSFSLFYILLFCFYLLFLF

SEQ ID NO: 162099 - protein, 73 aa, Glycine max
  Clone ID: PAT_MRT3847_117393C.1.pep
IFVNCLYPVSQLPSEAVVVNVTCGSGRGGLPTTACMNSAVISDPIHLKRAFVTVLLKRQSILLLNAVETLPSA

SEQ ID NO: 162100 - protein, 122 aa, Glycine max
  Clone ID: PAT_MRT3847_117394C.1.pep
GWPEMVMAKEVDALAKKTPGKKSLAIEAFSRALLAIPTIIADNAGLDSAELISQLRAEHQKEGCTSGIDVISGSVGDMAERGISEAFKVKQAVLLSSTEAAEMILRVDEIITCAPRRREDRM

SEQ ID NO: 162101 - protein, 571 aa, Glycine max
  unsure (1)..(571): unsure at all Xaa locations
  Clone ID: PAT_MRT3847_117395C.1.pep
MSTRTLAAGLSIWRDFKIVAPSFVTVTSRPLPVDCKILSIPFGPKVVFTKSAIAMAPTKGERARMASFVGAMAIADLVKTTLGPKGMDKILQSTGRGREVTVTNDGATILKSLHIDNPAAKVLVDISKVQDDEVGDGTTSVVVLAGELLREAEKLVATKIHPMTIISGFRMAAECARNALLEKVVDNKADSEKFRSDLLNIAMTTLSSKILSQDKEHFAKLAVDAVMRLKGSTNLESIQIIKKPGGSLMDSFLDEGFILDKKIGIGQPKRIENAKILVANTAMDTDKVKIYGARVRVDSMARVAQIETAEKEKMREKVQKIIGHGINCFVNRQLIYNFPEELFADAGILAIEHADFXGIERLALVTGGEIASTFDNPESVKLGHCDLIEEIMIGEDKLIHFSGVAMGQACTIVLRGASHHVLDEAERSLHDALCVLSQTVNDSRVLLGGGWPEMVMAKEVDALAKKTPGKKSLAIEAFSRALLAIPTIIADNAGLDSAELISQLRAEHQKEGCTAGIDVISGSVGDMAERGICEAFKVKQAVLLSSTEAAEMILRVDEIITCAPRRREDRM

SEQ ID NO: 162102 - protein, 87 aa, Glycine max
  unsure (1)..(87): unsure at all Xaa locations
  Clone ID: PAT_MRT3847_117396C.1.pep
ISKIXKSWAQILRVFFICFPFQFEQLYCDAVKVFVFVPQPSNRKGCVRXSGLEDGDGPGKSNVGGRRRXPXSPPGXDMTEIXXGXXL

SEQ ID NO: 162103 - protein, 339 aa, Glycine max
  Clone ID: PAT_MRT3847_117397C.1.pep
LSLSSPLRRVRKMQHFVDLQENSELGESNSWLSAKEQSGAAPNTNLDRVLFNDLVEIVPLVQSLIDRKASRSFTRRGSMIYTKTPTRESLSKRTTDSKSRNVAQSILAKKKRDHGEKEQGKNGSNDADNYSMFSTRTLASEKDIEELGMLKEQVEELQRKLLEKDELLKSAENSRDQMNAFNAKLDELKHQASEKESLLKYTQQQLSDAKIKLADKQAALEKIQWEAMTSNKKVDKLQDELGSMQADITSFTLLLEGLSKTDTAKYTNDYDVKPYDFSHLPSIDDLDEVELQKMDEARKAYMAAVSISKEKRDEESIAAAANARLHLQSLVFKSKNFNL

SEQ ID NO: 162104 - protein, 60 aa, Glycine max
  Clone ID: PAT_MRT3847_117398C.1.pep
DVYKNFIPPKPGGSLIKGQKGGGAQFLPPQTFEFQTQAKSPLKKFIWTTSFGEKLPVSTP

SEQ ID NO: 162105 - protein, 259 aa, Glycine max
  unsure (1)..(259): unsure at all Xaa locations
  Clone ID: PAT_MRT3847_117399C.1.pep
MENQNRLKLRISRMFRSSFGSCRTRNLTDVMEKAVILFPGAKSRSGHHLLSWVAAAKTKTTTSTLTXVMSCPPTSSNISLNTVHEQDFGYDDKKKVSTKNSRTKKKKKKKKKRRAQNKREFFPFNSCARDTNFGGYWWYSSDEDDETDTLFSSKSLSSDSSRSRAPMPAPRKXDRSSDMGVLPLHGKVKDTFAVVKRSSDPYSDFRTSMLEMIVEKQIFSPADLENLLQCFLTMNSHHHYKIIVHVFTEIWEALFSDWY

SEQ ID NO: 162106 - protein, 65 aa, Glycine max
  Clone ID: PAT_MRT3847_11739C.1.pep
FTHFFFFFFISMSQFPQQSKRHQFLIALHWHKVNVCSNFVLITGFFSEFPYLFVNFFFFYEHDKF

SEQ ID NO: 162107 - protein, 442 aa, Glycine max
  Clone ID: PAT_MRT3847_1173C.1.pep
MPLLRHRLATLTHRLRHSSAAAATPKPPILYTADTTADATATLQVLSWGKGASGQLGGGVEETRLYPSPVANLAVPKSSFALSQTPGRRRLLPSPPKRALEVGLSCGLFHSSLIVDGALWIWGKGDGGRLGFGHENPLFVPTLNPHLDNLLSVALGGLHSVALTSKRQEVCRGYGGFGALGHSVYHRELFPRLVKGSWEGTIKHIATSGTHTAAITESGELYIWGRDEGDGRLGLGPGRGPDHAGGLSIPSKVKELPYPIAAVSCGGFFTMALTVDGQLWNWGANSNYELGRGDKIGGWKPRPVPSLENVKIIQLASGGYHSLALTDDGKVLSWGHGGQGQLGHGSIQNQKIPAVVEALAHENIIYISCGGSSSAAVTDNGKLYMWGNANDSQLGIPGLPPVQSCPVEVNFLMEDDGLGPHKVLSVAIGASHAMCLALRESS

SEQ ID NO: 162108 - protein, 64 aa, Glycine max
  Clone ID: PAT_MRT3847_117400C.1.pep
SARVDEEAYYRLIVITGSVGCLLLLLYVLKSILLKSKNLPPSSPYAVPRIGQLHVIRGSLQLSL

SEQ ID NO: 162109 - protein, 41 aa, Glycine max
  Clone ID: PAT_MRT3847_117401C.1.pep
NPSVEPGWPSPGIGSFFLSRIRFDLGSVFHHLKATTLLSRA

SEQ ID NO: 162110 - protein, 39 aa, Glycine max
  unsure (1)..(39): unsure at all Xaa locations
  Clone ID: PAT_MRT3847_117402C.1.pep
GKMGEGVWYRCATFFTPNQDHSTTSSSXFGLINXPCVXI

SEQ ID NO: 162111 - protein, 100 aa, Glycine max
  unsure (1)..(100): unsure at all Xaa locations
  Clone ID: PAT_MRT3847_117403C.1.pep
SLGPDLSIEYTQGIFEDWPSKFDVDYXAIGQCVRAVQDVKXHGSEVAFTGAVTPPGFRFVVTSKGXSSEGTGASLQTGKVAAIVAPEGPFPFEEGAGAFY

SEQ ID NO: 162112 - protein, 63 aa, Glycine max
  Clone ID: PAT_MRT3847_117404C.1.pep
HTTILDRTLPCPLGGSPRRCLTPYMKQYRLATLFSHPWLEYIILYILLIHTRPRILIGHISRV

SEQ ID NO: 162113 - protein, 48 aa, Glycine max
  Clone ID: PAT_MRT3847_117405C.1.pep
RDKHEPVSPSPNSAAMSLGTINLYVTFSSAQSRMVSGVDVTAHPSTGE

SEQ ID NO: 162114 - protein, 48 aa, Glycine max
  Clone ID: PAT_MRT3847_117406C.1.pep
TILSPPHGSICHLTCVCPSLMWKCVYITRLQQHNKTLLYHNVCVCLYA

SEQ ID NO: 162115 - protein, 84 aa, Glycine max
  Clone ID: PAT_MRT3847_117407C.1.pep
YIGGGGKEERGREGEKKKREKKKSGGKKERRRKKEKRKKKKGKKKKGKGKKKKRKKKGKKRKKKNHTKKRKKRKGGKKIKAGLK

SEQ ID NO: 162116 - protein, 563 aa, Glycine max
  unsure (1)..(563): unsure at all Xaa locations
  Clone ID: PAT_MRT3847_117408C.1.pep
ENRMTPSAIAACMAPLLLRPLLAGECELEDEFDASGDSSAQLLAAANAANNAQAIITTLLEEYENIFDEENIQRCSMSADSQVENSGSEDSTDDDNIDVKENGYHDAENEVDQETDDDADRIQSGKLSESSGYAGSDLYDYKAFGGDDSDVGSSSSNHAKTENANLNAVPDTPVSEDQNKQRKVSENPVDENDASNLLPSSESYRSMGESFXILWTPEIHLPMPVIEFGLWKCKQVKLVVXLSVLRRSTFWGRSKPRKTPSVESVDSSGEEELAIQRLEIAKSDLQLRIAKEARGNAILQASLERRKQALHERRLALEQDVSRLQEQLQAERDLRAALEVGLSMSSGQLSSSRGMDSKTKAELEEIALAEADVARLKQKVAELHHQLNQQRQHHYGSLTDVGDRYQHAQNHPQQRFLQQDFDSTLAFVNHERKQRTEESLLGTDWRNIKGQVLASGRQPSRKQFLESSPSDSKSTEASTSMSVDDLGALDSASVPSTSRAAEVGEYARHPSVASSTLVELTTRLDFFKERRSQLMEQLHNLDLNYGSTTSQDFVYKPSSPSWS

SEQ ID NO: 162117 - protein, 183 aa, Glycine max
  Clone ID: PAT_MRT3847_117409C.1.pep
DTPLTTIIMTSSSLHLLPLTYSDHAPQKPRSVLPIFGFINMTISSVVTIYRAHNNNDTPTVVFVGFVYFGSFLLDYCFRLYHSLPKSSSSNSHNIKRNVKIIIWVLISTIMLGFACEFSTFMSFLESSFFFGLVISGNIFLFYVYFIWEGDKSATTSACSNNDTCCYNDYDYKPILTEAKVDV

SEQ ID NO: 162118 - protein, 71 aa, Glycine max
  Clone ID: PAT_MRT3847_11740C.1.pep
KFEKVETFYPSSSSTSTGHESRINLNRSYLGTTQRTSQNIIVNIHLTSRELLITSLLNLIDLQIPNVKPKE

SEQ ID NO: 162119 - protein, 281 aa, Glycine max
  unsure (1)..(281): unsure at all Xaa locations
  Clone ID: PAT_MRT3847_117410C.1.pep
MGNQKQKWTQDEEDALIAGVEKHGPGKWKNILKDPQFAPFLTSRSNIDLKDKWRNLSVSNGAQGSKEKSRVPKLKALPAPPAPTATPQNAAPALQNAASDVTPPDASQNDQDAKNPPRYNAMIFEALSALKDSNGSDMNAIIKFMEQXNLQVNQNFRRALSTKLRRLVSQGKLEKVQNGYKVKKEASSGTKSPSPKPKDVRPPQPQQQSPASVLMTNDTIKEAADTAAYRVADAESKSYLAAEAVKEAEXISLLVEHSDSMLQLAKDIYEQCSRGEIILLA

SEQ ID NO: 162120 - protein, 69 aa, Glycine max
  Clone ID: PAT_MRT3847_117411C.1.pep
NSSSVPGDPLESTCRSSKGGRKISLLVEHSDSMLQLAKDIYEQCTIDKRSFLPLICEFFNLLLIIFNYH

SEQ ID NO: 162121 - protein, 45 aa, Glycine max
  Clone ID: PAT_MRT3847_117412C.1.pep
ILIKKKSPSFKRGLISNFDKKKKNPLFLNPKTFSVSLVNHYILRP

SEQ ID NO: 162122 - protein, 54 aa, Glycine max
  Clone ID: PAT_MRT3847_117413C.1.pep
ESVSETIRCLKKVLGYLAWRRDTLVLFFERRSFVLMHVVTLYNWSIQSRHWALS

SEQ ID NO: 162123 - protein, 56 aa, Glycine max
  Clone ID: PAT_MRT3847_117414C.1.pep
AGVFSGVTAGFPPVHLFFPFVMRPPWWAFFCPYKRVYPSSEGLPLGAARLQLKNTI

SEQ ID NO: 162124 - protein, 102 aa, Glycine max
  unsure (1)..(102): unsure at all Xaa locations
  Clone ID: PAT_MRT3847_117415C.1.pep
DIMTALQLVLRKSLAYGGLSRGLHESAKVIEKHAAQLCVLAEDCDQPNYIKLVKALYAXHNVSLLTVPSAKTLREWAGLYKINSEGKAKKVTXYSYIVVKDF

SEQ ID NO: 162125 - protein, 72 aa, Glycine max
  Clone ID: PAT_MRT3847_117416C.1.pep
KRGDLAKWGENGFHPIWLLFLQKKWIFFWPPSHFILCPRVKGPLLGPMVWRHVPPHCKLKPRGKTFLALFGV

SEQ ID NO: 162126 - protein, 50 aa, Glycine max
  Clone ID: PAT_MRT3847_117417C.1.pep
SSLIYWINYICYIIAIPSYSLGVETITGCISNNIPQATNSRCQHNAHSYV

SEQ ID NO: 162127 - protein, 61 aa, Glycine max
  Clone ID: PAT_MRT3847_117418C.1.pep
ALSAFLPVLPYLPVSADGSDGLNYDGRDGKRHGRGHSYSSGYGGSSDLAAGDVYAGRMQSS

SEQ ID NO: 162128 - protein, 231 aa, Glycine max
  Clone ID: PAT_MRT3847_117419C.1.pep
FDSSTTEGDECLIAILTKEFFEETFSPTIEAAVRLQPRCSEKVERDSGIISFTTRLLVPTSRIGCLIGKGGSIITEMRRLTKANIRIISKENLPKIASEDDEMVQISGDLDIAKDALVHVLTRLRANLFDREGALSSFLPVLPYLPVSADGSDGLNYDGRDGKRHGRGHSYSSGYGGSSDLAAGDIYGSYGGSQLGSNSAYGAYGSYSLGRSSTAGLSSQSGASRRRNHAY

SEQ ID NO: 162129 - protein, 68 aa, Glycine max
  Clone ID: PAT_MRT3847_11741C.1.pep
LTYKKTNVEVPTMLNFLWCMELMPLHCSVGYKIRNSDFSMHASGRVWFNYLLFSFPCTPFHFVIYKRP

SEQ ID NO: 162130 - protein, 86 aa, Glycine max
  Clone ID: PAT_MRT3847_117420C.1.pep
SLEAEIRARDNAHLTPLDDGYSREPTGLESSYTRELEAVRNGEKKSLEEELSHLSIGAASYSDVCSLQAPDSYASNGAAKSATAAP

SEQ ID NO: 162131 - protein, 102 aa, Glycine max
  Clone ID: PAT_MRT3847_117421C.1.pep
SLDNFGVTTMEPFEILSINRNIDPRVFPFSFKYFNYSAQQENIPSFSCFFPMYITFQSNFQSTLLCTLCFDSHHFPNEHGQRDQLQTQMNVNTLSLLLVFFI

SEQ ID NO: 162132 - protein, 296 aa, Glycine max
  Clone ID: PAT_MRT3847_117422C.1.pep
SSSTSSRTGIILADLSTGVESIPVSLVNEVDNGWGPSFVSVCQSPWAPQPFRCAQSASGCNCNKTCVPGDLSCSCIQRNEGDFPYTANGVLVSRKPLVHECGPLCKCSPNCKNRVSQTGLKHQMEVFKTKDRGWGLRSLDPIRAGTFICEYAGEVIDVAKVNKNRGYDDEYVFDTSRIYDTFKWNYEPSLLEEISSNVSSEDYDIPSPLIISSKKFGNVARYMNHSCSPNVFWQPVLYAENNQSFLHIAFFALRHIPPMTELTYDYGCSGHADGSSAPKGRKKCSCGSSKCRGSFG

SEQ ID NO: 162133 - protein, 34 aa, Glycine max
  Clone ID: PAT_MRT3847_117423C.1.pep
ISNDLKLPNNFSCLCVLFSGQILKSKFQNKMYFG

SEQ ID NO: 162134 - protein, 79 aa, Glycine max
  Clone ID: PAT_MRT3847_117424C.1.pep
SILQKDIQLPMLLLYQYHCQNNIIKQKAQSRSLFSKMSHSKNKPRNTIMKNSKDRRDNKKNMKIKMEKLIGTTHYITQR

SEQ ID NO: 162135 - protein, 86 aa, Glycine max
  Clone ID: PAT_MRT3847_117425C.1.pep
LKLGEKREKGFSGGKFFSAPISPQFTTGSFKGEARGALWGGLPPFNGVAHLAGFWGGNLCGPFYLINWPPPGEGGFFFCPPRGFFF

SEQ ID NO: 162136 - protein, 94 aa, Glycine max
  unsure (1)..(94): unsure at all Xaa locations
  Clone ID: PAT_MRT3847_117426C.1.pep
AXATIIVHSANYPIQHSLPFHLSLSPSFPATQHFFLLSFKISFNSIFRQFIPPTFTSSNHKKSLTKSSRCFLFLTSDFIVASETFPQLGFSXAL

SEQ ID NO: 162137 - protein, 49 aa, Glycine max
  Clone ID: PAT_MRT3847_117427C.1.pep
TLLIISLCLTILSIIFNEIFSFNHLFICKTQMNLREFEILLRRSEPNFT

SEQ ID NO: 162138 - protein, 61 aa, Glycine max
  Clone ID: PAT_MRT3847_117428C.1.pep
PNMENEEAKEHKRICQDKMRHPILLAWSEIDLIYTHLSVSNQLSRPKSQYSESSFKALGPG

SEQ ID NO: 162139 - protein, 117 aa, Glycine max
  unsure (1)..(117): unsure at all Xaa locations
  Clone ID: PAT_MRT3847_117429C.1.pep
FLIGGFGGGLKKKSPLQGRSFFFSXREICFFTNLLEKKAKFFFLWGGVRPGLVIPPPFSSMGSPIIFVTFRKGKGVDTRAGVKSQFGQGGVGVHFQSSGSLNVGPRLTRVFFIPPGG

SEQ ID NO: 162140 - protein, 94 aa, Glycine max
  Clone ID: PAT_MRT3847_11742C.1.pep
LTMVTFFRNLAFSYAFLAIFLSAGIGVFLGVESFGINYGQVANAVPQPALALPLLCPLRPAISSLYGTIPEFLSPSPYSINCATNHRYWSFSRC

SEQ ID NO: 162141 - protein, 33 aa, Glycine max
  Clone ID: PAT_MRT3847_117430C.1.pep
FDFMKEASFILLSSSISTYEDIYPNSKTIENSN

SEQ ID NO: 162142 - protein, 207 aa, Glycine max
  Clone ID: PAT_MRT3847_117431C.1.pep
MAVSSLSVTPLSLSNSSPSLSSKPKFPSLCFLSGNNTTLRVTCPKPLHSSTVVHVATEALDSSPDPLDPPPETLDDDSDATTFEVGDLGTPSTSAISIGGDADTMAPKQKIRIKLRSYWVPLIEDSCKQILDAARTTNAKTMGPVPLPTKKRIYCVLKSPHVHKDARFHFEIRTHQRLIDILYPTAQTIDSLMQLDLPAGVDVEVKL

SEQ ID NO: 162143 - protein, 162 aa, Glycine max
  Clone ID: PAT_MRT3847_117432C.1.pep
MSSSSIPTHGKGYGISDTKNYTNFTVKEFPLKTAGPDDVTIHIECCGVCGSDVHTVTGGWGELSTDWVCPGHEIVGKVTHVGENVKEFKVGDRAGVGAQVFACKKCERCKSDNENYCPEQVDTYNAKFPDGVIAQGGYSTTIRTDQQFVFAIPEALKSEDAA

SEQ ID NO: 162144 - protein, 95 aa, Glycine max
  Clone ID: PAT_MRT3847_117433C.1.pep
YSFIDITGGAGAFLLFFFPFTIRISNESLFSQKKGSLSGAEDPQKEGLLGLKRENYRLGGQKKPPIIPSPKGGVPPHPPGLCVIETSSTAPPKIP

SEQ ID NO: 162145 - protein, 177 aa, Glycine max
  Clone ID: PAT_MRT3847_117434C.1.pep
MAESDNESGGHTGNASGSNELSGCREQDRFLPIANVSRIMKKALPANAKISKEAKETVQECVSEFISFITGEASDKCQKEKRKTINGDDLLWAMTTLGFEDYVDPLKIYLHKYREMEGEKTAMMGRPHERDEGYGHGHGHATPMMTMMMGHQPQHQHQHQHQGHVYGSGSASSARTR

SEQ ID NO: 162146 - protein, 24 aa, Glycine max
  Clone ID: PAT_MRT3847_117435C.1.pep
KCFTKTLGNLVPTYSVSVDDENGR

SEQ ID NO: 162147 - protein, 171 aa, Glycine max
  Clone ID: PAT_MRT3847_117436C.1.pep
MAESDNESGGHTGNASGSNEFSGCREQDRFLPIANVSRIMKKALPANAKISKEAKETVQECVSEFISFITGEASDKCQKEKRKTINGDDLLWAMTTLGFEEYVEPLKVYLHKYRELEGEKTAMMGRPHERDEGYGHATPMMIMMGHQQQQHQGHVYGSGTTTGSAFFARTR

SEQ ID NO: 162148 - protein, 38 aa, Glycine max
  Clone ID: PAT_MRT3847_117437C.1.pep
HHRQPDERLFQGLGVDPAHRRHRSRRYRNRAARCLGRA

SEQ ID NO: 162149 - protein, 81 aa, Glycine max
  Clone ID: PAT_MRT3847_117438C.1.pep
LIVLFRSLSEQAEHYAILSGTKGQMETCSVYLSEVCSITRSYLGTCALVTTLSYVKSELRPNTILLLYILILSSSHRSRMP

SEQ ID NO: 162150 - protein, 76 aa, Glycine max
  unsure (1)..(76): unsure at all Xaa locations
  Clone ID: PAT_MRT3847_117439C.1.pep
SRVRGSVQDAXLGAEKVIQISIXHEMSFSQSRSKGYKRQPRSNLISRQILLYKCRFKGRKNXSVTWTHCHPPSQRV

SEQ ID NO: 162151 - protein, 79 aa, Glycine max
  Clone ID: PAT_MRT3847_11743C.1.pep
FFFFFFFFFFFFFFFFFFFFFFFFFFFFFFWGTKKCLGKTKKSPLKSQVSKTKKCLGKINILGTEYKKLIFTYLPLQGK

SEQ ID NO: 162152 - protein, 44 aa, Glycine max
  Clone ID: PAT_MRT3847_117440C.1.pep
CTRGLHLFMLDCCSHIAIVLLLFMYIIIGGDWIQRSIAWACFQS

SEQ ID NO: 162153 - protein, 135 aa, Glycine max
  unsure (1)..(135): unsure at all Xaa locations
  Clone ID: PAT_MRT3847_117441C.1.pep
RSTNGDCSAELQQAAALFNPHFVQIIRQLXSEIGSNVFVGVNTQQMHIDFISNPQRYGFVTSKVACCGQGPYNGLGLCTPASNLCPNRDSYAFWDPFHPTERANRIIVQQILSGTSEYMYPMNLSTIMALDSSKN

SEQ ID NO: 162154 - protein, 363 aa, Glycine max
  Clone ID: PAT_MRT3847_117442C.1.pep
MARYINIVLLGIVLVVVRLKGAEAQRAFFVFGDSLVDNGNNNFLATTARADAPPYGIDYPTGRPTGRFSNGYNIPDFISQSLGAESTLPYLDPELDGERLLVGANFASAGIGILNDTGIQFVNIIRIYRQLEYWEEYQQRVSGLIGPEQTERLINGALVLITLGGNDFVNNYYLVPYSARSRQYNLPDYVKYIISEYKKVLRRLYEIGARRVLVTGTGPLGCVPAELAQRSTNGDCSAELQRAAALFNPQLVQIIQQLNSEIGSNVFVGVNTQQMHIDFISNPQRYGFVTSKVACCGQGPYNGLGLCTPASNLCPNRDIYAFWDPFHPSERANRLIVQQILSGTSEYMYPMNLSTIMALDSKN

SEQ ID NO: 162155 - protein, 117 aa, Glycine max
  Clone ID: PAT_MRT3847_117443C.1.pep
NPKKKKKLKRKKQNRRRKKKFPKRGGPYRKKPKTNPGGSNINGRGGPKKGTRPGTRWGGGFSFQALFHPWGQKTPSLLKSRKSLFWGPQSLKRRELGRIIKRNPQKRQPGTKKVNRG

SEQ ID NO: 162156 - protein, 139 aa, Glycine max
  Clone ID: PAT_MRT3847_117444C.1.pep
MARFVGGLGLLVCIIIILFIVLKIVFLSIGQKLGKGDHISVQGRENLKVQMSLTGKEDHISVQGRKNLKVQISLTDLLTGLIENTNSVKCCFDNHIGSCVPGSSDDETCDDICKINCIKGGHCKVIGNEPPNHFCHCLC

SEQ ID NO: 162157 - protein, 44 aa, Glycine max
  Clone ID: PAT_MRT3847_117445C.1.pep
GKYGDSGLYYIVKKDNGKIYYGGKNTVNVFPGEIIQIFYLGGGG

SEQ ID NO: 162158 - protein, 57 aa, Glycine max
  Clone ID: PAT_MRT3847_117446C.1.pep
IFRGGGMKLIAPKDIKGLPPMGGSGKFFPSITFGFKGGFSLFFFNYSQSTPGAKYPW

SEQ ID NO: 162159 - protein, 255 aa, Glycine max
  unsure (1)..(255): unsure at all Xaa locations
  Clone ID: PAT_MRT3847_117447C.1.pep
CQVEAEPESQTCTCKVPNFFXSSPLSSFNKEVKSRMEQLIGSLEFLSSQKGDLGLNNASGVGSGFGSEVSQKSPSTSLVVESVIYGRDNDKEMIINWLTSDSGNHNKLSILSIVGMGGMGKTTLAQHAYNDPRIDDVFDIKAWVCVSDDFTVFKVTRTILEAITKSTDDSRNLQMVHERLQVELKDKKFLLVLDDVWNEKLDEWVAVQTPLYFGAQGSRIIVTTRNKKVASSMRSKEHYLQVDSRGSPGTELEFV

SEQ ID NO: 162160 - protein, 74 aa, Glycine max
  Clone ID: PAT_MRT3847_117448C.1.pep
FPLKRTYLVIYTPINTHTCHTGTINKIPLFKHKYKLNFTSLKQINLLKYLKHPNHFEFIYSFTHKLNFHLLSKF

SEQ ID NO: 162161 - protein, 170 aa, Glycine max
  unsure (1)..(170): unsure at all Xaa locations
  Clone ID: PAT_MRT3847_117449C.1.pep
QNFXERTYKSMLIPLLQEDKRAGETTRKGFYLYDDKCKPSPDPELKNYIEKARSFTGVSVDPKLVKLQEKDIIEMTFFPVVNEACRVLDEGIAVKGSDLDISAVMGMGFPPYRGGILFWADSLGSKYIYSKLEKWSELYGEFFKPCAYLAARAAKGIPLSASVEQANSPL

SEQ ID NO: 162162 - protein, 201 aa, Glycine max
  unsure (1)..(201): unsure at all Xaa locations
  Clone ID: PAT_MRT3847_11744C.1.pep
AEGFKAAGMYGGLRAKGEKPDLALVTCDVDAVSAGSFTTNVVAAAPVLYCKRTLDISNTARAVLTNAGQANAATGKEGYQDVVECVESLAKLLKVKPEEVLIESTGVIGQRIKKGALLNSLPTLVNSLSSSVEGADSAAVAITTTDLVSKSVAIESLVGGTRVRVGGMAKGSGMIHPNMATMLGVITTDAWVTSDXWRKMV

SEQ ID NO: 162163 - protein, 336 aa, Glycine max
  Clone ID: PAT_MRT3847_117450C.1.pep
MGRQPCCDKVGLKKGPWTAEEDKKLINFILTNGQCCWRAVPKLAGLLRCGKSCRLRWTNYLRPDLKRGLLSEYEEKMVIDLHAQLGNRWSKIASHLPGRTDNEIKNHWNTHIKKKLKKMGIDPVTHKPLSNKTEQTQAQPDEQQTHQPLQEQQEEPIPVEKDTKFEPEKEQNKEPEKPESSIESLTITEEAKEEDQIMTPLFDSWELMNEFCTDEVPIIESNEILVPSAPSSTSPTTTTTTSSSTSTSASSNSNSSNFLEDLLLPDFEWSDDYNDTNFDNNNNSSMALWDDDFIRSWNLLINDDDGDGDRKQVFEAPINQYPRVIMDSDSWAYGLF

SEQ ID NO: 162164 - protein, 334 aa, Glycine max
  unsure (1)..(334): unsure at all Xaa locations
  Clone ID: PAT_MRT3847_117451C.1.pep
MATIKASHTVVPNQPTPKGRLWLSNSDNSTRKAHSPVIYIYKAKHNIEYNIERMKESLSKTLVYFYXVRAGRLSVTESGRMEVDCNAKGVTLIEAETAKTFDDFGDFTPSDSIKEELVPVIDYHSQPIEEIPLVLVQVTRFKGDRKQQGLAVAVAVSHPVADGYAWIHFINTWAKVNRGGMLDLNDMPCLDRTIRRSSSLSSPPPRFDHPELKPLPFKLGKSDSTEEQNKKTTAAVLKLTSEQVEMLRKKANENENLSTKQGSRSRPCSRFEAVAAHIWRCACKARELDRNQPTLVRFNADFRNRLTPPLPRNYFGNALAATVTPECYARNTSK

SEQ ID NO: 162165 - protein, 66 aa, Glycine max
  Clone ID: PAT_MRT3847_117452C.1.pep
KRIHAFTQGVSDFTWMPLANAIHMLAGSLVVHHKKLVMISHKVSQCMNGRESRPVGTAPVPAGVPA

SEQ ID NO: 162166 - protein, 76 aa, Glycine max
  Clone ID: PAT_MRT3847_117453C.1.pep
FSSAKLLRKKAQTGNDQHLTRDVPIKRTMHTYSPLNLTYLCTLLFQPLVTNPHPNSCSMTLLHRTAVLNYRSRAGE

SEQ ID NO: 162167 - protein, 188 aa, Glycine max
  Clone ID: PAT_MRT3847_117454C.1.pep
ESDQAAISKKEPALHICGFSDTKQNFDGISNDLDGHIYNGEMKKLPMDMTPKLCGSMDKLNITELPKEIKDSDISNQDDESHFKTAPPLSCVVTNDNDNVSLKLPEYLPLTRRVKPFTHKKMVVLLRDSQMRLWPVFYHEQPRLLTHGWLDFSRANNIQPEDECIFEVEPDPESRYQRILAVSIVHKS

SEQ ID NO: 162168 - protein, 47 aa, Glycine max
  Clone ID: PAT_MRT3847_117455C.1.pep
GLVRPRVLLRFRKKKKKKNGKVKKTNMKMNILKNQIIFKLINFIHYN

SEQ ID NO: 162169 - protein, 53 aa, Glycine max
  unsure (1)..(53): unsure at all Xaa locations
  Clone ID: PAT_MRT3847_117456C.1.pep
MVVLXQPXLNQFFLLEXMXAXXPCYAGIPXVDXTXPDXKXHXVNACRDXAXTS

SEQ ID NO: 162170 - protein, 46 aa, Glycine max
  Clone ID: PAT_MRT3847_117457C.1.pep
YTFLFHRTPALIERVSLCVTNDLCRNSLQNEIAIIHVPQLLRCWND

SEQ ID NO: 162171 - protein, 91 aa, Glycine max
  Clone ID: PAT_MRT3847_117458C.1.pep
ISSGDTDGRVPIPGTKYSVKKMTLPIKYVCHPWFPYGEVGGYVAVAKGAPTLAPVREPGHQVPSSQPARALPLLKYLLAGTPFPGPPKTKA

SEQ ID NO: 162172 - protein, 49 aa, Glycine max
  Clone ID: PAT_MRT3847_117459C.1.pep
LSGYFVNFELCYFQTFMYVRKSLSASVCMLLNNWSANRSSLEILLSYFL

SEQ ID NO: 162173 - protein, 62 aa, Glycine max
  Clone ID: PAT_MRT3847_11745C.1.pep
EIILLDRYFFISKIYKYIQGSPCQFIIIFYTLRYFILKFIYFYIQKKFIILLCIKCIMYNMK

SEQ ID NO: 162174 - protein, 71 aa, Glycine max
  unsure (1)..(71): unsure at all Xaa locations
  Clone ID: PAT_MRT3847_117460C.1.pep
QIPTAFNPFAYSNANDSYSVSKDYFHILLQHLNVIKILTTFHVFKKXFNYNKILKYVNKDFCYNSTFFQDP

SEQ ID NO: 162175 - protein, 107 aa, Glycine max
  Clone ID: PAT_MRT3847_117461C.1.pep
RKNSSPSFVLLSLISGGTEEKSSPQGPTRNKQQKKIPPPQLTSIWEKTIDFKKTNPGTALMFAKNHPIPQKNPPFKTGLLKGKNPACSSSRAWELGTKTPPRTRGEL

SEQ ID NO: 162176 - protein, 52 aa, Glycine max
  Clone ID: PAT_MRT3847_117462C.1.pep
RPHPHIRTYEHHLLYSLPLKRSDPEGSQPVLCSHLYCLSLGWINSNRLTVAS

SEQ ID NO: 162177 - protein, 98 aa, Glycine max
  Clone ID: PAT_MRT3847_117463C.1.pep
YVHFLKENDKLVRQAAVKNMAVGHGQRFNSNSETSISKSKRYCSSQRLPDLLLYVEETVKLCASLGFLWNITYVIAENIELMRKFGSSSQQCWMLCGK

SEQ ID NO: 162178 - protein, 70 aa, Glycine max
  Clone ID: PAT_MRT3847_117464C.1.pep
ILYEYIHKKFENTYAHIILYAPDYAINDDFLRFFKQNIKYYSNNPNADILNRLKYEMTHEITVMINNINK

SEQ ID NO: 162179 - protein, 63 aa, Glycine max
  Clone ID: PAT_MRT3847_117465C.1.pep
LGKPQHTLPVLLYTGSHLTWVPCTSSYECSNCSSPTASAVPVFHPKNSSSSPLVGCRNPSCLL

SEQ ID NO: 162180 - protein, 48 aa, Glycine max
  Clone ID: PAT_MRT3847_117466C.1.pep
FRLEFELITNSFLISRSLLGPTSNSLHNVNIYLRVGVLMLFVFSFYGP

SEQ ID NO: 162181 - protein, 81 aa, Glycine max
  Clone ID: PAT_MRT3847_117467C.1.pep
KGGYLLFSPKGYPPPPFQRAEKFCSQYLWVFLKKKFFPFSLRGGTGPQRLKKDFIYGFSFFICPPLCLNGKRNNLWGFPPT

SEQ ID NO: 162182 - protein, 166 aa, Glycine max
  unsure (1)..(166): unsure at all Xaa locations
  Clone ID: PAT_MRT3847_117468C.1.pep
EKXXYXXXAXXXXXQXDQQXNVADXXVSKTQLLESKIQEAKSKKDTLKARAQSAKTSTIVSEMVGNINTSSALAAFDKMEEKVLTMEAQADALNQLSTDNLEGKFALLENSSVDDDLAELKKELSGSSKRGELPPGRSVPTSKEIPFLDLELEKELNELRKKAKGY

SEQ ID NO: 162183 - protein, 184 aa, Glycine max
  Clone ID: PAT_MRT3847_117469C.1.pep
MGEEVDTAFVQAPEHRPKSSVIVAEGIPLIDLSPINYQNEDTLLDSSIENLVKEIGSACKKWGFFQVINHKVPLDKRERIEEAAKKFFALGLEEKLKVRRDAVNVLGYFEAEHTKNVRDWKEIYDFNVQEPTFIPPSDEPDDEENVQFQWDNRWPQNPPEFKEACQEYAQEVEKLAYKLMELGA

SEQ ID NO: 162184 - protein, 285 aa, Glycine max
  Clone ID: PAT_MRT3847_11746C.1.pep
MGLSSKQVSNRGLDWNQTLLQAQNLELPNPPPMRKQQQTQPSEPLKCPRCDSINTKFCYYNNYNKSQPRHYCRACKRHWTKGGTLRNVPVGGGRKNKRVKKSTTPAIATTSISTSTSNANMDGELNNPITIPSLAVDDHKTTPSSLYQYVCLPQQMMMSTKDSEEGKDFGIGNGIFLSSTVPFPQSQSLLFPFTTSNSFDPNLCAISSSFRSSSVYNYGEEFKIMEEPTLNSIMPNTSGSTNTQPWEIAATSSGMEMSNYWTWEDIDSFVSTDPNVPWDDSDIKP

SEQ ID NO: 162185 - protein, 97 aa, Glycine max
  Clone ID: PAT_MRT3847_117470C.1.pep
EVHQTQYQVSTEEQKVQLGKERERERERENYHVIIYLKILLSLSTHVTGATTSPLKRKSRKRNLAFSLSSLQISCCLFLIPCLSHQGYAIFSPSHDS

SEQ ID NO: 162186 - protein, 93 aa, Glycine max
  Clone ID: PAT_MRT3847_117471C.1.pep
QVHFLLHNDTQHIKNYNKDHISKRSTLVYDPMLSTSVCYVVPKYSDCSSIYMAVIVKPLDWPNFVVSQLIRLSAHAPLASWPVSNELRTNCPS

SEQ ID NO: 162187 - protein, 60 aa, Glycine max
  Clone ID: PAT_MRT3847_117472C.1.pep
AGSADCFSQMMSSMPGFCFHPTDEELVMYYLKRKICGKRLKLDVIHETDVYKWDPEDLPG

SEQ ID NO: 162188 - protein, 114 aa, Glycine max
  unsure (1)..(114): unsure at all Xaa locations
  Clone ID: PAT_MRT3847_117473C.1.pep
GNRGPFSISGFGFVGVFWGWGLGLTKDTFFFFPPFSPLKQGFSPVGPTRGGALVAFFLGPGGKGNXLLPVFFVKKKTPLGANKQTPFPRGLGVFFIQLAPQVFPFEKGPWGPPH

SEQ ID NO: 162189 - protein, 225 aa, Glycine max
  Clone ID: PAT_MRT3847_117474C.1.pep
MCPSASHFRPAFHVLDADHDGKISHDDLRAFYAGVGGEGDDVIGAMMTLADTNKDGLARANTLFLQSFQMCPSGRTLLPSSVSDFRPAFDVLDADRDGKISRDDLRAFYAGVGGGGDDVIGAMMTVADTNKDGFVEYEEFERVVSAERKPVGYCGAMEDVFRVMDKDGDGKLSHHDLKTYMACAGFPATDNDINAMIRFGGGDQNGGVTFDGLLRILALDCSPAN

SEQ ID NO: 162190 - protein, 38 aa, Glycine max
  Clone ID: PAT_MRT3847_117475C.1.pep
QTQKHYSMIVNNWIAVILKLLSTLYKVNIYYTNISSQK

SEQ ID NO: 162191 - protein, 47 aa, Glycine max
  Clone ID: PAT_MRT3847_117476C.1.pep
PPARAGPRGGLERPGPLPVVEAPIYLRKSGGWGKRYVKCLHGTNEQL

SEQ ID NO: 162192 - protein, 111 aa, Glycine max
  unsure (1)..(111): unsure at all Xaa locations
  Clone ID: PAT_MRT3847_117477C.1.pep
MSRARSRSRSPSPSPCCGDSHLVLLLPVMLAVFFNSLLLLPRSSLAIRPTESDRIELANATESSSNVSLSRPREGTFADMIDRALEHEFTENDQNXEATADPGSFNNSVAE

SEQ ID NO: 162193 - protein, 55 aa, Glycine max
  Clone ID: PAT_MRT3847_117478C.1.pep
HTHTHAMISQISMLSLVIFLFSSLLIVLCFRRTSEIQMRTQWHISLRTVSHFSSA

SEQ ID NO: 162194 - protein, 98 aa, Glycine max
  unsure (1)..(98): unsure at all Xaa locations
  Clone ID: PAT_MRT3847_117479C.1.pep
TGVSGNYGRGARPLFCDCDCLKFGGALKVDLXNHARGIEHNACLSVEAAGWHGMTPAXRHLSXHHDVFGGKCKPRDADAXFRRVPGLAATINLLYGYQ

SEQ ID NO: 162195 - protein, 58 aa, Glycine max
  Clone ID: PAT_MRT3847_11747C.1.pep
GDAEGVSKVWGGFSDLFALPARRSVKRALGQKSDAKKTNVVDSVKHGSGSVNDEYAIM

SEQ ID NO: 162196 - protein, 152 aa, Glycine max
  Clone ID: PAT_MRT3847_117480C.1.pep
MWRRLFSSSNLKSLHTALSPSRPRLAAPLLTRPVTAHSGASSVKRRVEDVVPIATGHEREEIQADLEGRDILEINHPVGPFGTKEAPAVVKSYFDRRIVGCPGDEGEDEHDVVWFWLEKGKPKECPVCSQYFKLEVVGPGGDPYGHGDHDHH

SEQ ID NO: 162197 - protein, 84 aa, Glycine max
  Clone ID: PAT_MRT3847_117481C.1.pep
FFLFFFFFFFFFFFLFFFVCVFFFSSNSCFLLMKFFTRTGPYTERKGPRTDHLLKKKKTPLSFPECRQNPKKGCFMTKKMLNSP

SEQ ID NO: 162198 - protein, 44 aa, Glycine max
  Clone ID: PAT_MRT3847_117482C.1.pep
RKKIWVSALTFAGLLPLPMTYARRNWGLAPMPDSLFLKPLALSP

SEQ ID NO: 162199 - protein, 122 aa, Glycine max
  Clone ID: PAT_MRT3847_117483C.1.pep
MLVKEERERENGSMKSELGGPIDIFFRNLGPHISLYKKPFGAPFVSLLHGFPVSTHTLSLYTTKCKLLTKKGRSIDSKMSKDSMRGSKKKLLCRRLGGYLKEQKGRLYIIRRCVVMLLCWHD

SEQ ID NO: 162200 - protein, 68 aa, Glycine max
  Clone ID: PAT_MRT3847_117484C.1.pep
CYEQNIDLNSEFKYITHHVNPCLLNPFYLLTYVVKFIKHNIYINIICYKILVNRFHTHHFFLTHIHFI

SEQ ID NO: 162201 - protein, 63 aa, Glycine max
  Clone ID: PAT_MRT3847_117485C.1.pep
TSSIRTFFASSFRIAKNSAENKDGACQLIQRMRAVLFTQDISPSLQSKMTLPMQDRCLRKLKH

SEQ ID NO: 162202 - protein, 53 aa, Glycine max
  Clone ID: PAT_MRT3847_117486C.1.pep
FVAFLPSDNVRTLGSAFCLSFLLTQITTATMTAISRANLSDNSINGSMATPRA

SEQ ID NO: 162203 - protein, 58 aa, Glycine max
  Clone ID: PAT_MRT3847_117487C.1.pep
GSARCPTTKLLLDNTNLKSKCTICLRKTLHYSYVNININLYLADHFSNSNHLRNPMKL

SEQ ID NO: 162204 - protein, 703 aa, Glycine max
  Clone ID: PAT_MRT3847_117488C.1.pep
MPTKLFSQLHLLHPLLPMKPRTLPLLSRPFFFPSSKFLRTSPFKVRAFSSREKVPLRPSKSLIDDEADLSNWVDELRSGGPDEMRSGRGNEVRTGRRDRFADSGRFSRDDREREFRPPRNNNRASALGKRRGEDLRKGGQSVGSRRNTPGRLRDHTENTAGFATRLMGVKVLVLDEADHLLDIGVSKGIEKVVIAVPKQRQTLMFSATVPEEVRQVCHIALRRDHEFINTVQEGTEETHSQVRQTHLVAPLDKHFSLLYVLLKDHIADDVDYKVLVFCTTAMVTRLVAELLGELNLNVREINSRKPQSYRTRVSDEFPRSEGVSQAAAEATKLGKYHPTIGVQVVIGGTRLALEHKQMQANTWQILVATPGRLRDHTENTAGFATRLMGVKVLVLDEADHLLDMGFRKDIEKIIAAVPKQRQTLMFSATVPEEVRQVCHIALRRDHEFINTVQEGTEETHSQVCQTHLVAPLDKHFSLLYVLLKDHIADDVDYKVLVFCTTAMVTRLVAELLGELNLNVREIHSRKPQSYRTRVSEEFRKSKGLILVTSDVSARGVDYPDVTLVIQVGLPADREQYIHRLGRTGRRGKEGQGILLLAPWEDFFLSTVKDLPIEKAPVVPSVDPDTKKKVEKALSNVEMKNKEAAYQAWLGYYNSNKKVGRDKYRLVELANEFSRSMGLDNPPAIPKLVLGKMGLRNIPGLRAK

SEQ ID NO: 162205 - protein, 135 aa, Glycine max
  Clone ID: PAT_MRT3847_117489C.1.pep
DPRLLKILTWYEQVVDRTYDFFSDTLQGRSWLGLFIAFGSCVWGSIALVCASGYQGAPAGGPNIVMSLMDHDSLLNGGGFSFLSGSPNGRFSYGYSSFKGKRSSMEDFFETKISEGDGQTVAFFGVFDGHRGSPG

SEQ ID NO: 162206 - protein, 241 aa, Glycine max
  Clone ID: PAT_MRT3847_11748C.1.pep
MAHPSAVVSVRRPITHVVFDMDGLLLDTERFYTQVQEIILARYNKTFDWSLKAKMMGKKAIESARIFVEETGISDSLSAEQFLVEREDMLEKLFPTSEPMPGASRLVNHLHAKGVPVCVATGSHKRHFELKTQRHHEIFSLMHHVVLGDDPEVKQGKPSPDGFLAAAKRFEGGPVDPSNILVFEDAPAGVLAAKNAGMSVVMVPDPRLDKSFLDTADQVLNSLLDFNPSEWGLPPFDDNRD

SEQ ID NO: 162207 - protein, 50 aa, Glycine max
  Clone ID: PAT_MRT3847_117490C.1.pep
LLFGHAKCFCSACTSLLFRSSCASDLRGLVPFGVEFTGFFCYRSAYNVGP

SEQ ID NO: 162208 - protein, 78 aa, Glycine max
  unsure (1)..(78): unsure at all Xaa locations
  Clone ID: PAT_MRT3847_117491C.1.pep
TPIREMFRKVSDQFPAMFSRKAFFHWKPGEAMDKMEFPRVETPMTDLVSEFPQSRNPPADEVEFXEEKNEEGFPHHNM

SEQ ID NO: 162209 - protein, 73 aa, Glycine max
  unsure (1)..(73): unsure at all Xaa locations
  Clone ID: PAT_MRT3847_117492C.1.pep
TYCSCIFPLSYSSITFCMSHCLIMHMHSTYFLFYKLHTFWFPCSLMHDPCIFLCKTKKGXSVENSHYILSCMC

SEQ ID NO: 162210 - protein, 107 aa, Glycine max
  unsure (1)..(107): unsure at all Xaa locations
  Clone ID: PAT_MRT3847_117493C.1.pep
XRMHAYVSSEFGSRXXXXXXXXHXXXVGLGPSXXPXLIXXRXLXXSCGXCCRXIXXHCXCAXFXWXSXTXXXXXXKMWKXKGIXXXSRXLLXXXXXGXVXAKWXXXP

SEQ ID NO: 162211 - protein, 57 aa, Glycine max
  Clone ID: PAT_MRT3847_117494C.1.pep
ASKALIHHPPESPTLDFSKHDYISSLHILTKLKHCMSVKPIHVICFILLLLRNNITA

SEQ ID NO: 162212 - protein, 122 aa, Glycine max
  Clone ID: PAT_MRT3847_117495C.1.pep
PLIGAPGWDYVPLGLVDAEKFPKYGFPVQNGRRLAKRYSRVFIRKHRGSQTPESNFLGMKKKAFVAFPQGFRKAPLVPHLAPFPGNRFMGPLSPPIEGSIYQVRGAPNRIRGKGKIRGFCVL

SEQ ID NO: 162213 - protein, 144 aa, Glycine max
  Clone ID: PAT_MRT3847_117496C.1.pep
MEKSVVSPNIPLNNHEHRAFPQRTTTKSNHIVTNFGSYMRASNTQMVEVVPTIKESFNKHPRDLKMSARTAPMNRRIVEVVSDILRQLRWGPTAEKALYNLNFSMDAYQANQILKQLQDPSVALGFFDWLRRQPGFRHDGHTYT

SEQ ID NO: 162214 - protein, 81 aa, Glycine max
  Clone ID: PAT_MRT3847_117497C.1.pep
RDHTVVAMEDQNYSLQFNRFSRWVEWPRPRGIPFEFSLFGFLNPYKLFISKCCRPMNTSFEEYFIYNAKGMYNTRTIERSF

SEQ ID NO: 162215 - protein, 80 aa, Glycine max
  Clone ID: PAT_MRT3847_117498C.1.pep
IGENKFSCDVFRSISITRCYVVDLFKKQRSLSNYFNNVVSGILCQKSFQFTMHIKIISQTKTFIYLFISCLNNVWLDCIS

SEQ ID NO: 162216 - protein, 42 aa, Glycine max
  Clone ID: PAT_MRT3847_117499C.1.pep
VVEMSLGETDCSYASLILHDDGISVAAEKISTLLETGEGSCR

SEQ ID NO: 162217 - protein, 56 aa, Glycine max
  Clone ID: PAT_MRT3847_11749C.1.pep
IMFFIYYIFGLHKIWPQRWRRRNSLSTCSTLTRAMLTHDMNWSDKSTNELTLDLPY

SEQ ID NO: 162218 - protein, 204 aa, Glycine max
  Clone ID: PAT_MRT3847_1174C.1.pep
MAVPGRRNGINDDEEELDDNALFEEQGVVEDDTDTPPHLRDLSAAAQIGDAHALRLALDNLTGSIDEPVEDGDTALHLTCLYGHLACVQLLIERGANIEAKDEEGAIPLHDACAGGFTEIVQLLLNRANDAEHIKRMLESVDSEGDTPLHHAARGEHIDVIRLLLSNGASPTKANLYGKAPADLPEQEDARRLLEAAALAMACQ

SEQ ID NO: 162219 - protein, 86 aa, Glycine max
  Clone ID: PAT_MRT3847_117500C.1.pep
MLLDMQSRQLMFNFELQMSLMSPFEMQDILLPSGTNGVKDLHISASHSSSSLALFSSLGKKLSVLSLDSGNLVVNYDLQVKFDSIF

SEQ ID NO: 162220 - protein, 60 aa, Glycine max
  Clone ID: PAT_MRT3847_117501C.1.pep
RAGPHRRRCLGGRVRQRDQRAGQLCARWRDRHLRLDQLHRGQPGAGACSDGHAVCRPGRA

SEQ ID NO: 162221 - protein, 108 aa, Glycine max
  Clone ID: PAT_MRT3847_117502C.1.pep
PRVREFSTPLSSPAHFYDAKSKESEGSSSWISWMKGSRGGQSSDSDSHRYKDEVDPFSIPADYKWVDANEKKRRMKAKKARSKKHKKQAAAKGGDGVQHQRTEDVEEQ

SEQ ID NO: 162222 - protein, 527 aa, Glycine max
  Clone ID: PAT_MRT3847_117503C.1.pep
RLREDDRRGIRDFYMEISFHFESSVIPFIGRIAPSDTYRIWKRGSNLRADMTLAGFDGLRIQRSDQTFLFLGEGYVAEEGNLTLPPGSLIALSHKEKEITNALEGAGTQPTESEVAYEVSLMSQTNMYRPGIDVTQAELVPHLNWRRQEKTEMVGNWKAKVYDMLHVMVSVKSRRVPGAMTDEELFAVEDGESMMNGENNDEYDDVLTAEERMQLDSALHMGNSDGTYEDEEHGAFDGQENGSAASRENSEANGVVKEKKSWFGWNKKSLKSSSDDPEDSKAVKKNSRFGSEGSNQRSADQQKLASDFLREDSVDSRKGKDKNIKKKKKKGANNNESKNESEYKKGLRPVLWLTPDFPLKTDELLPLLDILANKVKAIRRLRELLTTKLPHGTFPVKVAIPIVPTIRVLVTFTKFEELQPVEEFSTPLSSPAHFYDAKSKESEGSGSWISWMKGSRGGQSSDSDSHRYKDEVDPFSIPADYKWVDANEKKRRMKAKKAKSKKHKKQTAAKGGDGVQHQRTEDVEEEQ

SEQ ID NO: 162223 - protein, 39 aa, Glycine max
  Clone ID: PAT_MRT3847_117504C.1.pep
LNPNRLQRGRVRCLLRPSDGKGYEWETLPFTLKIMVRTS

SEQ ID NO: 162224 - protein, 40 aa, Glycine max
  Clone ID: PAT_MRT3847_117505C.1.pep
GFLPHQYTPPSTFLNETTLPTSYQPDTESHSYLNNKAAKI

SEQ ID NO: 162225 - protein, 53 aa, Glycine max
  Clone ID: PAT_MRT3847_117506C.1.pep
HYGYSIDSQGKIGSMSASQCEDISRDHYHYQVSWQVEVHKLCQHIRESCQQCR

SEQ ID NO: 162226 - protein, 350 aa, Glycine max
  unsure (1)..(350): unsure at all Xaa locations
  Clone ID: PAT_MRT3847_117507C.1.pep
TNEFELWEAEAATFYFDLQISSISEALXLENKVTELTGVCMRLEDESDAKSLEIKQMTERVCLLESEIGGLKGQLSAYNPVISSLKEDFASLEHTALVRINKMPVECNQEQKDAVIETCLHENGYQSSRDNKSTLIPDGVSDLLSVKARIRAVEKSMVEEIKKLVKEDNLTTKANPGALTKATNVEVSPYVENCNRKEDKVPKDESTHDVNSWRTKTENGSLMKDIPLDHISDNSSYKSCTRENSGTDDQMLELWETAEQDCFASSMISEAMKQSSVPTEDVIAYHQSDHSGKFQNTSSELDVEKELGVDRLQLSRSIKERTQDGKRRKILERLSSDAQKLTILKTAVQD

SEQ ID NO: 162227 - protein, 84 aa, Glycine max
  Clone ID: PAT_MRT3847_117508C.1.pep
GAARTVAEGDHVITREQETSRTLAYQGHHQGGSYAGCAMGTCILTGESGYTQTMLTYCSPTKMMHAYYQRVKKASFAMVTLRAM

SEQ ID NO: 162228 - protein, 80 aa, Glycine max
  Clone ID: PAT_MRT3847_117509C.1.pep
SIFWTNMSLKDNLALKYVEPMGPQHTSEPVSFCVIFPFFLFFWERKLPHSSGPSIKFRLTFFIFTAMWITLHLLLNKWLI

SEQ ID NO: 162229 - protein, 103 aa, Glycine max
  Clone ID: PAT_MRT3847_11750C.1.pep
MSQQETDDSSCSKKMHNKLDDTGVLLHGSNYPYMEAKSKELTVGDVDMLLSDYKDLVAKYTILCKAIGCLSTAEREPLLRHLEMQGPETLLNFTAPSDHHRHK

SEQ ID NO: 162230 - protein, 113 aa, Glycine max
  unsure (1)..(113): unsure at all Xaa locations
  Clone ID: PAT_MRT3847_117510C.1.pep
QLIDDQIAEFKEAFILFDKDGDGCITTKELGTVMRSLGQNPSEAXLQDMINEVDADGNGTINYPXIAHLMACEMIDTDSEEELREAIYVXDKDQNGCFSASDLRPVIDKVRGE

SEQ ID NO: 162231 - protein, 67 aa, Glycine max
  Clone ID: PAT_MRT3847_117511C.1.pep
PNSRHHASGYKVDIKHTDLLYVNLYSISVCLYSPVNKKSNIQKIISNGYRVQVSVSSLIPYRLFNSR

SEQ ID NO: 162232 - protein, 48 aa, Glycine max
  Clone ID: PAT_MRT3847_117512C.1.pep
NLVPLNLANKGLKLLFWEQNGKNHYLADLVFILLGFQNKPKTSETGLL

SEQ ID NO: 162233 - protein, 44 aa, Glycine max
  Clone ID: PAT_MRT3847_117513C.1.pep
IGDDGICYCVCLILCLVIFWAFYVLLLEILPVCFFEFCQALKFC

SEQ ID NO: 162234 - protein, 88 aa, Glycine max
  Clone ID: PAT_MRT3847_117514C.1.pep
PRGSGRFGFPARVPPPYLKCPFFFPAPRMFDDSSSPVQAQCACCLLWIFLARGWGPFFFFFKTLGFWKGISCELTGFVGIVALRIFPC

SEQ ID NO: 162235 - protein, 43 aa, Glycine max
  Clone ID: PAT_MRT3847_117515C.1.pep
CLVSKYDNTALRSFCPQFNYRIECPTWHMACLALGKPNYVISL

SEQ ID NO: 162236 - protein, 42 aa, Glycine max
  Clone ID: PAT_MRT3847_117516C.1.pep
LKDRGNANSFFFTGSSTPCAYFQSLCNPVNIFTILEKPFTNI

SEQ ID NO: 162237 - protein, 80 aa, Glycine max
  Clone ID: PAT_MRT3847_117517C.1.pep
KPSFITPGLFRKKKAPKLSKRHPNIREGERENGWTCLQNLAPKGTLRRRNTLFKGHLGLLDNTLCPGLDYHQYCVTGDIY

SEQ ID NO: 162238 - protein, 73 aa, Glycine max
  unsure (1)..(73): unsure at all Xaa locations
  Clone ID: PAT_MRT3847_117518C.1.pep
MMHCASIVXSAPSYAFPFLSGSASXXXTXXSLTKXSWKPPXSMAKXPVRXTXSIEKXTPXXNXPETFLRXWRP

SEQ ID NO: 162239 - protein, 102 aa, Glycine max
  unsure (1)..(102): unsure at all Xaa locations
  Clone ID: PAT_MRT3847_117519C.1.pep
WNTSYVLLLALSAVIGGLLFGYDTGVISAALFVMKDEFPADDRTTWLEESIVTTAVAAAIIAAAVGGWINHRFGRRXSLLAADVLFIGGSAVMAAAPVPAVL

SEQ ID NO: 162240 - protein, 95 aa, Glycine max
  Clone ID: PAT_MRT3847_11751C.1.pep
KAMIETKKMHKIYNAKENRTIQMEKPHNQRRFSSGINLPKLTQFKKCTPWKISGKNSIYIIYVLNSIQQNHKFLFYHSEGFFLSFRTCKIKLLME

SEQ ID NO: 162241 - protein, 173 aa, Glycine max
  Clone ID: PAT_MRT3847_117520C.1.pep
FVTRCIAIAPSLIVSIIGGSQGAGRLIIIASMILSFELPFALIPLLKFSSSSTKMGPHKNSIIIIVISWILGLGIIGINVYYLSTAFVGWLIHSSLPKVANVFIGIIVFPLMALYVAAVIYLTFRKDTVKTYIETKNEPAMQTHMEKGFMANGQLELSQVPYREDLADIPLPQ

SEQ ID NO: 162242 - protein, 86 aa, Glycine max
  Clone ID: PAT_MRT3847_117521C.1.pep
FKKAFCLSIFKSRGSSTGIKWERDFGGILKFQNLDGTGLHKILNFYGQTKNPFNLVFTHLPFDNLRGREQQICCWLAGCRQWQNPF

SEQ ID NO: 162243 - protein, 564 aa, Glycine max
  unsure (1)..(564): unsure at all Xaa locations
  Clone ID: PAT_MRT3847_117522C.1.pep
MALLCGGMPWSKVIVPPIFHHSHTPRTFFFQRRRFSVSALSEQPPPVRVRFAPSPTGNLHVGGARTALFNYLFARSKGGKFVLRIEDTDLERSSRESEEAMLKDLSWLGLDWDEGPGVGGDYGPYRQSERNSLYKQYAENLHQSGHVYRCFCSNEELEKMKEVAKLKQLPPVYTGKWASATNEEVEEELEKGTPYTYRFRVPKGSLKINDXYDQIRGEVSWNLDTLGDFVIMRSNGQPVYNFCVTVDDATMAISHVIRAEEHLPNTLRQALIYKALGFPMPYFAHVSLILAPDRSKLSKRHGATSVGQFREMGYLPEAMVNYLALLGWGDGTENEFFTLDQLVEKFTIERVNKSGAIFDSTKLRWMNGQHLRARPSEELTKLIGEYWKTSGLLTVSDGSFIDEAEAVHLLKDGIDLINDADKALANLLSYPVHSTLQSDEAESVLLDNLSEFAASLLAAYDSGDLVAALEEGHTGWQKWVKGFGKSLKRKGKSLFMPLRLLLTGKLHGPDMGASVALLYRAGTSNVVAPESGFVTLDERFKMLRQIDWEALSKDQPVKETAAPV

SEQ ID NO: 162244 - protein, 115 aa, Glycine max
  Clone ID: PAT_MRT3847_117523C.1.pep
KKKNPKTFLGTKGRAGPLGISQKTQQSELFPPFWGIYNKGKKNPEPGPSLFLRKDPWAKKKLFFFLRGQKNIPPKLFPPGNKKYRALENPRGAHHPCFYWGAPVPPRAFGTMTRR

SEQ ID NO: 162245 - protein, 49 aa, Glycine max
  Clone ID: PAT_MRT3847_117524C.1.pep
RTVSILHYLLALSLTCSLLIFLSDSFTRTEPNKPCCSTRSKWMGSTGGS

SEQ ID NO: 162246 - protein, 114 aa, Glycine max
  unsure (1)..(114): unsure at all Xaa locations
  Clone ID: PAT_MRT3847_117525C.1.pep
SYLGQPLPFSITTLIWIEVLEIGYIKFHKNADLDPXKKLYPGGSYYDPLGLTSYPXKKATLQLAEIKHTRLSMVGFLSFTIQATTTSKDPLNNXTTHLSNPLHTTIINTFSSSS

SEQ ID NO: 162247 - protein, 47 aa, Glycine max
  Clone ID: PAT_MRT3847_117526C.1.pep
DKLSLSRMVASNRGGKAQVNTCVRPNANRPLFFSHVHIPQYEIGDMF

SEQ ID NO: 162248 - protein, 124 aa, Glycine max
  Clone ID: PAT_MRT3847_117527C.1.pep
MVETRRGASSSKCSLSSPSAPNTKRSKVSKDSFVAAPVNKSGEPELRPSDLPDTASLKAVDVCDAVLPDKSPSEGEALVPPRCAGETAEKSKVAGLPPRSVKKRAAKSCPKTAWGKLLSQCSKE

SEQ ID NO: 162249 - protein, 131 aa, Glycine max
  unsure (1)..(131): unsure at all Xaa locations
  Clone ID: PAT_MRT3847_117528C.1.pep
MDLQLKQWSNRHESEQEHYSPNMPKFLPQHHPPPSPSALPLFVPEXPTTKVCTLSAFSDSTLPSAPRFSRMESCFSFAQWQELELQALIFRYMLAGAPVPPELLLPIKKSFLQLYNPPCKFLTPFFYLLII

SEQ ID NO: 162250 - protein, 92 aa, Glycine max
  Clone ID: PAT_MRT3847_117529C.1.pep
LQKNNISHFLQLIITWENAPFTWDTASLLITQTNFYQSTTPITTSVISTIQMNIFKHTLYQLLQSLLKTSLITTTPNLQYIKKIFPLLTFHK

SEQ ID NO: 162251 - protein, 108 aa, Glycine max
  Clone ID: PAT_MRT3847_11752C.1.pep
VDVFSFGIVMWELLTGEEPYADLHYGAIIGGIVSNTLRPPVPSSCDPEWRLLMERCWSSEPSERPTFTEIANELRSLATKVSYPRGQNSPKGQNQHQQHSPLHTQVHK

SEQ ID NO: 162252 - protein, 72 aa, Glycine max
  Clone ID: PAT_MRT3847_117530C.1.pep
MFLLHGAPIYQIHFGKSGEAFIYLLLVMGTTTFQIPKSLRWILSFPASLLYLNVRLTSSSSFNYEAVYRKPY

SEQ ID NO: 162253 - protein, 66 aa, Glycine max
  Clone ID: PAT_MRT3847_117531C.1.pep
HGGQACKKKLDFKFEFFALNKAAVNFPPVDCLGHSGVKINFVHQLLCKRGVFLAIQLPLGILSHIN

SEQ ID NO: 162254 - protein, 45 aa, Glycine max
  Clone ID: PAT_MRT3847_117532C.1.pep
LSVRYVSAMVCNVMNDEHITEFIWRVINMVISTRMRPSARWHYTL

SEQ ID NO: 162255 - protein, 134 aa, Glycine max
  Clone ID: PAT_MRT3847_117533C.1.pep
RTKQTAHKSTRGKAPKKQLATKAAHKSTPTTGDIKKPHHYRPSTITLHKIIKYQKTTELLIQKLPFHKAIHKITQDFNTNLHFHSHTILTLQKPTKSYLIKLFRNTNLYAIHTKHITIIPKYIQLSIKIHNKRS

SEQ ID NO: 162256 - protein, 128 aa, Glycine max
  unsure (1)..(128): unsure at all Xaa locations
  Clone ID: PAT_MRT3847_117534C.1.pep
PPPPTGFFFPPPPNIKKRGPFGFFFGGAPPPLIGGPPQTLFFGGKQPPPPLKWGPWPPPKKPIGLAGESPKQFPRGKDPPLRKTPPTPGGVGXGPAPKPSPPGENFVGNPPKGGKPKPPLENPPSLPK

SEQ ID NO: 162257 - protein, 322 aa, Glycine max
  Clone ID: PAT_MRT3847_117535C.1.pep
MGATSMVRGGVTRFLPRREYLGCEKLQLGDVEFEFLDDGEIMSLAKSEGSGDEFHQSNEMELDDEDDGERVDGGSVEENRSFWDNQHQLLQTNLYRTTSVESRIRNVTKEAVQDIQNAEIVCSCSRQIISRSCRNCFMIQVSRRLQKSGYDSAICKTKWSSSPSIPSGEHTFLDVIDSRSKKQEIRVIIELNFRAEFEMARASEEYNGLVRKLPEVYVGKIERLSNIIKVLCMGAKRCMKENKMHMGPWRKHKYVHAKWLGPCKRNTSTTSLSNSMMGNSEVMMPKPKPRASLLTMDLMLETNTKTEMLKLPNMHCSAVEVL

SEQ ID NO: 162258 - protein, 50 aa, Glycine max
  Clone ID: PAT_MRT3847_117536C.1.pep
EIYTGFNSQLGLFKAKHLKDFYFFFRITHVMVKWLHSVVWSPEIMELRGP

SEQ ID NO: 162259 - protein, 48 aa, Glycine max
  unsure (1)..(48): unsure at all Xaa locations
  Clone ID: PAT_MRT3847_117537C.1.pep
DATNRLXPGRPLTSRHRNSLDKLQSHQQSPQQQSFQGPQGTSSHPNNS

SEQ ID NO: 162260 - protein, 52 aa, Glycine max
  Clone ID: PAT_MRT3847_117538C.1.pep
EDRKIQHSIFQLPIPRFPNKMSINNESKPPTVIGKSRPYNVVKNPPSKSKAA

SEQ ID NO: 162261 - protein, 268 aa, Glycine max
  Clone ID: PAT_MRT3847_117539C.1.pep
MAIARTGVYVDDYLEYASTLPAELQRLLNTVRELDDRSQSMITQTRQQTKYTMGFSSHGSKKGNHSYNNNYGNEDDDAAIEKMRKEIEVNQDSALSLCTEKVLLARQAYDLIDSHIKRLDEDLNNFAEDLKQEGKIAPDEPAILPPLPIVPKPEKRKPIYVTPQSKRIDYRDRDWDRERDRDFELMPPPGSHKKEYATPMDVDQPIDPNEPTYCVCHQVSFGDMIACDNENCQGGEWFHYSCVGLTQETRFKGKWYCPTCILLPQCQR

SEQ ID NO: 162262 - protein, 420 aa, Glycine max
  unsure (1)..(420): unsure at all Xaa locations
  Clone ID: PAT_MRT3847_11753C.1.pep
NLSIHLKELKDKAEAECVNAHDRRGHEGPPVAMQESLRIAFIKEQYESKLQELRQQLSLSKKHSEEMLWKLQDAVDETENRKKSEASQIKINEELGMKILELEAELQAVLSDKRNLLNAYDLLQAEKECSVISLECCKQEKQELEASLVKCNEEKSKIEVELTLAKELVETSGSHVNSLNEGNVPFAXLVPLAFLLVLLAVMSQRVQASICNPRILLHCGSCLVAYLALPHRAXQLEEVMKHVASTESLKSSIDHLNKELERMKNENMLPSVDGQSHESSFPGLQRELMQLHEANQELGNIFPVFDKFSISGNALERVLALEIELAEALRTKKSSNIQFQSSFLKQHSDEEAVFRSFRDINELIKDMLELKTRHSAVETELKEMHDRYSQLSLQFAEVEGERQKLMMTIKNTRASKKASN

SEQ ID NO: 162263 - protein, 754 aa, Glycine max
  unsure (1)..(754): unsure at all Xaa locations
  Clone ID: PAT_MRT3847_117540C.1.pep
TGSVDFQSKSTLSWSTPAKSLRPGRAWAYSGGAWGKEKVHSIGNLPHPWRMWKLDSVHEILKRDYQLRPVAVEIFSMDGCNDLLVFHKKEREEVFKNLVAINLPRNSMLDTTISGSSKQESNEGSRLFKIMAKSFSKRWQNGEISNFQYLMHLNTLAGRGYSDLTQYPVFPWVLADYESENLDLCVPKTFRRLDKPLGGLTPDEVDEXRXRYESWDDPEVPKFHYGSHYSSAGIVLFYLLRLPPFSTENQKLQGGQFDHADRLFNSIKDTWLSAAGKGNTSDVKELIPEFFYMPEFLENQFNLDLGEKQSGEKVGDVVLPLWAKGSAREFISKHREALESDYVSENLHHWIDLIFGYKQRGKAAEESVNVFYHYTYEGSVDIDSVTDPAMKASILAQINHFGQTPKQLFLKPHVKRRTDRKLPPHPLKHSSHLAAHEIRKSSSPITQIVTLNDKILIAGTNNLLKPRTYTKYVAWGFPDRSLRFISYEQDKLLSTHENLHGGNQIQCASVSHDGHILVTGADDGLVNVWRVSKFGPRALRRLKLEKPLCGHTAKITCLQVSQPYMLIVSGSDDCTVIIWDLSSMAFVRQLPEFPAPVSAIYVNDLTGEIVTAAGILLAVWSINGDCLAMIKASQLPSDSILSVTSSTFSDWLDTKWYATGHQSGAVKVWQMIHCSNPDSSLSKSGFGGSGGLNLGGLEPEYKLVLRKVLKFHKHSVTALHLTTDLKQLLSGDSGGHLLSWTLPEESLRGSLNQG

SEQ ID NO: 162264 - protein, 92 aa, Glycine max
  unsure (1)..(92): unsure at all Xaa locations
  Clone ID: PAT_MRT3847_117541C.1.pep
LLRFGHPNTPSDSLPXKPTAETKHKRXXXNXQXPGEXHDGRXKXGTKHEKXXXXTEEEKTEATRNRGXXXDAXAKRXXEXEKQXAXESXKXQ

SEQ ID NO: 162265 - protein, 59 aa, Glycine max
  unsure (1)..(59): unsure at all Xaa locations
  Clone ID: PAT_MRT3847_117542C.1.pep
VFLVGKDFGARPAHFFSILHPERVLGVVTLGVPYVPPGPSLYHKFFLXGLYILRWKDRE

SEQ ID NO: 162266 - protein, 309 aa, Glycine max
  unsure (1)..(309): unsure at all Xaa locations
  Clone ID: PAT_MRT3847_117543C.1.pep
SWNADEIDKSIPRQSTAESVSSDNEEGERNNFDRENIDREAAQDSGLHSYNALISKGYSSRISNWDEESRNLDFDRKHDMVVEARAGNGIPATNFILIHGNLEDPVGVPPEWAPPNVSVPILDLVDNIFQLNKRGWIRRQVYWISKQILQLVMEDAIDDWLLRQIHWLRREETVSQGIRWVQDVLWPGGTFFLRVGTPQIISDSDKKIFSNNEQXGGSNITKSESGSFEQELEAARRASDIKKLLFDGAPTTLVSLIGHKQYRRCARDIYYFSQSNVCVKQLAYAILELALVSIFPEIRNVVKSIHQPV

SEQ ID NO: 162267 - protein, 82 aa, Glycine max
  Clone ID: PAT_MRT3847_117544C.1.pep
ETLNSKKLKLSNEKKIFVPILCYLYFRNRDFIWSLIHLLYAPYMVVLLLHSHSSEIEALAITCLLYMDLNLLYHCSIFQEVM

SEQ ID NO: 162268 - protein, 175 aa, Glycine max
  Clone ID: PAT_MRT3847_117545C.1.pep
KTMAPKRKPSSPISIGNCEITVEANRFTCNSDSNGVVISLPRSGKIKVSAVAPNRGSASEDLRSGDKEHEFVLVNPKDVDAISKSYLQEVLQMYTTELPGMNYAANTGKQSKFLERCVTNGKYRTLLIKSTFVGNSGKVIAAITYQIIPADTEYAEIPLAAVNQSINGWFWPLMF

SEQ ID NO: 162269 - protein, 72 aa, Glycine max
  Clone ID: PAT_MRT3847_117546C.1.pep
SSELGWRRPVSYQFFYDTLTHIHISRAAPSYLAPHSETPRGVRAAAADVTISVDGYKTQATSLDSTSIPVDA

SEQ ID NO: 162270 - protein, 98 aa, Glycine max
  Clone ID: PAT_MRT3847_117547C.1.pep
SYSSGQCNRECAGTTIDPELNQSTLSGQSVPQRVSQCASISLDQQVLSMPHNINNVGSHLKDLQGVLAMKDSRTGELEASLSSVNVSRESSASTIGLS

SEQ ID NO: 162271 - protein, 70 aa, Glycine max
  Clone ID: PAT_MRT3847_117548C.1.pep
KFFAILFLRTAKALCHFFKTLAQLTSCPQEKGQCCPRHRLVPVNRKNFVCRKQHFFAAEPCLQVQVSRTR

SEQ ID NO: 162272 - protein, 74 aa, Glycine max
  Clone ID: PAT_MRT3847_117549C.1.pep
GHRRGSQHVLLWRHSDSFKNWQRTQRCHTQYFPRFDIMQRVQSLLFRLLTPMIHISIPLVRRDQVVHPVMYVPP

SEQ ID NO: 162273 - protein, 54 aa, Glycine max
  Clone ID: PAT_MRT3847_11754C.1.pep
GIPRSTHASADAWVKIESNVLLVQTMFLFSMEVKKKFTNVETLSSLMYYHEAYR

SEQ ID NO: 162274 - protein, 113 aa, Glycine max
  Clone ID: PAT_MRT3847_117550C.1.pep
LGWVGCLNGRQKMIEGGACCHVSKYFKMSIPPSSLGPIPRRSSRRSMYPPLKPRAASDLQDTQFTSERNPRTTRLAILRRTRKDSHQKDIPLFHLSSTGKHEQRIRLPSPVRS

SEQ ID NO: 162275 - protein, 52 aa, Glycine max
  Clone ID: PAT_MRT3847_117551C.1.pep
SLFHLNLFSGTSNLVLLCCLFNKHVMFWLGTRHKQGLTVGITGNGNYTKYDH

SEQ ID NO: 162276 - protein, 111 aa, Glycine max
  unsure (1)..(111): unsure at all Xaa locations
  Clone ID: PAT_MRT3847_117552C.1.pep
GNLVFGVKLTPLNNMCAYGLNPGISSSRLLGTXIPKSISQQTXRNQMATVRTPLNLDSSTQSFCQFSIDLIGGGILADKTGDRITLIQNSSISNLLRVASWKKRCLMLNIV

SEQ ID NO: 162277 - protein, 63 aa, Glycine max
  Clone ID: PAT_MRT3847_117553C.1.pep
QSPVLRIFCLIYYRQSMHFCSFFIFPFSLLPLACYRAQTQCSDRFQCLIQSDKRNKTKGSLIL

SEQ ID NO: 162278 - protein, 158 aa, Glycine max
  unsure (1)..(158): unsure at all Xaa locations
  Clone ID: PAT_MRT3847_117554C.1.pep
HASGGLKLREGVLDLVYALCSHVCKCGVSLILRVECEVCRGEDSGSCDSPRNLLHCFDEADGIHFHDSDAEVVRFLTISYLNANLFRDSHTMRIQXTVCDKRDVYFFAGTVVELXRLLPHVSPDALINHGEGXDFILMAETSYSIDRLRNLYDLIMKG

SEQ ID NO: 162279 - protein, 76 aa, Glycine max
  Clone ID: PAT_MRT3847_117555C.1.pep
YKTIQLVHITLDMDKKTQDPFFVYGKFCRSLCATLKKKVSVFSSRDLHTYLSLRIWSNSGGELTQIPVPFFLCCHR

SEQ ID NO: 162280 - protein, 244 aa, Glycine max
  Clone ID: PAT_MRT3847_117556C.1.pep
MVSIGSKTLVSRSSMGEHDYEPLKQGKTKRRKHKKGGSTHAFDSNSFTSPPQLSRVRKQLDPETTQYFSEISNLFESDGVELEDRSLICANALEETKGKEFEIATDYILSHTLETILQGCDVHHLCDFLHTSANHFPYIAMDRSGSHVAETSIKSLAVHLQDDDDVVRPLVEEALTMICKVIAANSVDVMCNCYGSHVLRTLLCLCRGVPLDKSGYYLSKSTTVLADRLNSKEFSSKKYDATNF

SEQ ID NO: 162281 - protein, 51 aa, Glycine max
  Clone ID: PAT_MRT3847_117557C.1.pep
ERSVEITAPFLTVIGRNSNLVSCLLNIGPNNDSLLALGYVSILMSHSHEFM

SEQ ID NO: 162282 - protein, 37 aa, Glycine max
  Clone ID: PAT_MRT3847_117558C.1.pep
DEPHFCIQKPCQKRLICPLIVILILQSYLFKLCTDNW

SEQ ID NO: 162283 - protein, 86 aa, Glycine max
  Clone ID: PAT_MRT3847_117559C.1.pep
SSNGFQMWGIPKVGPGGSCVLEGSRVKCKGGISAIPFGVFFPGVTRFKARNPQLWGKTCIKKNRSFWYYLGSRFDPGLGLWFFRGV

SEQ ID NO: 162284 - protein, 48 aa, Glycine max
  Clone ID: PAT_MRT3847_11755C.1.pep
DPRVRALGRGSAAGTSYFASCCFTLTWLELPPTQLGDFRGFGTGTLVA

SEQ ID NO: 162285 - protein, 60 aa, Glycine max
  Clone ID: PAT_MRT3847_117560C.1.pep
ALYPKRLPQGFSMTGFFRFGQQPPLGRQGLSWKDLGQAINQDSKLFSPRPFGIWSKARTP

SEQ ID NO: 162286 - protein, 85 aa, Glycine max
  Clone ID: PAT_MRT3847_117561C.1.pep
KPLQFLGGGKKKKGCPRAPQKRFKWKKYRFFKRGGGVKKNNPPFPPKKGTKKAGIKGVLVWFVKQGGLLLKGVLTWGGEEGAYFF

SEQ ID NO: 162287 - protein, 92 aa, Glycine max
  Clone ID: PAT_MRT3847_117562C.1.pep
MDFPKNIRALLFFPPLFGFSLKKFKWGGKERGPPPPHFNSPRGVLWEPPLPSPGRGLTQPPWKFSETDPPLVKTKKNVLGGLFFPRGLRNPL

SEQ ID NO: 162288 - protein, 91 aa, Glycine max
  unsure (1)..(91): unsure at all Xaa locations
  Clone ID: PAT_MRT3847_117563C.1.pep
GVWREREVMXSATWLSEEVXTXXXXXGXRXXXASXGXXPXWSLXLQLXXXTQXTSXLXSNVXXWXVVXKXTXEXNSWRCRXRXSWXXATXX

SEQ ID NO: 162289 - protein, 66 aa, Glycine max
  Clone ID: PAT_MRT3847_117564C.1.pep
DKPRRKLSSLSLSLFFFSFFVFSLCIRKMAELGYHRSSKKCKEKFENVYKYHKRTKEGRSGKQDGK

SEQ ID NO: 162290 - protein, 83 aa, Glycine max
  Clone ID: PAT_MRT3847_117565C.1.pep
KGGCTVLLVVVIFIAAILLISTEAAPNEYENSNNIHGKHASNGLYDSQWGYSCWGGPCNRRYAGPYYGGGLSGPYYGSRWGLP

SEQ ID NO: 162291 - protein, 667 aa, Glycine max
  unsure (1)..(667): unsure at all Xaa locations
  Clone ID: PAT_MRT3847_117566C.1.pep
MLGDSAVLGAGGGGGGGRGGGVESGASADAVAATVTVTHDVATTTGGGGGGSNNSGDDERGRIEEGERSFGGNRWPRQETLALLRIRSDMDVAFRDASVKGPLWEEVSRKMAELGYHRSSKKCKEKFENVYKYHKRTKEGRSGKQDGKTYRFFDQLQALENHSPTPHSPNPSPKPPQSAPSRVVASSVSLPIATTTTVSLPIPTPTTVPMQPILSNNAILTSSVPNITVPSTTPLPITIPQPILTSPSINLTIPSYPPTNPTNFPPPPNPTLPSSFPTDTFSNSSSSSTSSEETLEGRRKRKRKWKDFFERLMKEVSEGQEELQKKFLEAIEKREDDRIAREEAWRVQEMKRINREREILAQERSIAAAKDAAVMSFLQKIAEQQNLGQVSTNINLVQQPQPQLQPQPPLQQQVTQPSIAAAQPPVQQPPPVVVTQPVVLPVVSQVTNMEIVKADIIVTTXNNGENFLAPSSSRWPKVEVQALIKLRTSMDEKYQENGPKGPLWEEISASMKKLGYNRNAKRCKEKWENINKYFKKVKESNKRRPEDSKTCPYFHQLDALYRQKHRGEESPAAVEAKPESAVAPLMVQPEQQWPPQQQQQDRDITMEDMENEDDEYEEEREGEEELEDDEDEEDEEGGGGGGNYEIVANKTSGGGGASAASVGASTE

SEQ ID NO: 162292 - protein, 70 aa, Glycine max
  unsure (1)..(70): unsure at all Xaa locations
  Clone ID: PAT_MRT3847_117567C.1.pep
PVGRIGQDWKKGRYAQGLRTAAPVYLAAYLEYLSAEVLESAVTAARARXKNKTISRHVLTTKRNDNELRK

SEQ ID NO: 162293 - protein, 72 aa, Glycine max
  Clone ID: PAT_MRT3847_117568C.1.pep
RVGYMALPKRVFLVEPFIFSGSHVVAHAQRCFFFVPAQFEGDYIKVIAATLFYKFPIRKQHLLLYITWFIYR

SEQ ID NO: 162294 - protein, 74 aa, Glycine max
  Clone ID: PAT_MRT3847_117569C.1.pep
RKATVFRQHVIQEDAALVIQCYIRGHLTQNWNLGGTSNLSEVIPAGYISRPFGCRSFQLELFLLSVVKLQRWWK

SEQ ID NO: 162295 - protein, 87 aa, Glycine max
  Clone ID: PAT_MRT3847_11756C.1.pep
IPAPEAGSIVVWDLTVLGWEVNYKEEFVPSDEGSYTIIIQKGKKMGSQEEAVRNSFTNNEPGKIVLSIENKALKKKKVLYRYKTKSC

SEQ ID NO: 162296 - protein, 75 aa, Glycine max
  unsure (1)..(75): unsure at all Xaa locations
  Clone ID: PAT_MRT3847_117570C.1.pep
KXILISNVERIXXDXTYVXXIGKXYTYKLTYMKIRLKKXXIDFYFCNYMEPQYLLPCKVHLSHAKMHLMFINIGV

SEQ ID NO: 162297 - protein, 55 aa, Glycine max
  Clone ID: PAT_MRT3847_117571C.1.pep
KYSLRLLNLLGPLCTYKLLNVKIDPRTDHLYFSVLASTISLGGPNCLLALVGLPP

SEQ ID NO: 162298 - protein, 54 aa, Glycine max
  Clone ID: PAT_MRT3847_117572C.1.pep
SEEELVGCYAMNLRMVNREIMPMSVLSRVATTRYDDFEEAISVQLVVIYQQFHC

SEQ ID NO: 162299 - protein, 121 aa, Glycine max
  Clone ID: PAT_MRT3847_117573C.1.pep
GVLQGGFFVLPPGLVLFFKQPLREKKGGRGNFPPPPLFTPPKTRGFGFFFQGRAFGPCFFVPPLITPGPRKNRGPKVFLTRDTYFFFFTKNGELCLLVFCFGNTLKWPSILGHKNYTIITQ

SEQ ID NO: 162300 - protein, 107 aa, Glycine max
  unsure (1)..(107): unsure at all Xaa locations
  Clone ID: PAT_MRT3847_117574C.1.pep
SXRSXXIWCWTLVXXCXDRIXSXXXDXFHTXKXXXDXPXXNXLQXSLIPCXQXXPAXXYXLHICXSGRSLXXLXYVDXXXXXSXXXXPPSVVFSLEPNSELTYACXR

SEQ ID NO: 162301 - protein, 102 aa, Glycine max
  Clone ID: PAT_MRT3847_117575C.1.pep
PPPPPSLPPRPPPPPPTTAPPPVPPQTPPKFSAQKETPPAVFRGGLTPLFWGAPLVCPPKREGFNIPPPGFPRKGGGVPEKEGFKIFKGFFGTPHPAFSVEN

SEQ ID NO: 162302 - protein, 77 aa, Glycine max
  Clone ID: PAT_MRT3847_117576C.1.pep
IGVIVMASDQPLSICADEMDRRIAARIDGELLYLNGAWFHSSTTMNKTKGQSLQGEIQVYTEENARFIPGHGIAFHL

SEQ ID NO: 162303 - protein, 149 aa, Glycine max
  unsure (1)..(149): unsure at all Xaa locations
  Clone ID: PAT_MRT3847_117577C.1.pep
AFPQQILRLGPPGFSRTGTRRPTNTPDTPVEKPAPGPEGQQXXPILXGGGHECWTPHKKNAEKKTPLGGGGGGKKIIQIGPTGGGPRGKPRNPSDKRTRQRAKERNRADRGQERIADPPGKRGTGDGPPAAGPETPGERGPRGGAPHGR

SEQ ID NO: 162304 - protein, 60 aa, Glycine max
  Clone ID: PAT_MRT3847_117578C.1.pep
FDAYRVNLLNGVMSELFQFHNFFSLTINLYGIAINSLNNKRVYYIMIYIGLAIITRIIIL

SEQ ID NO: 162305 - protein, 115 aa, Glycine max
  unsure (1)..(115): unsure at all Xaa locations
  Clone ID: PAT_MRT3847_117579C.1.pep
QHISHSITIRITCKIKLVHGDNMQININKTLTTPSSSLFAYHETPQLTIFYAGKMLEFDAFSPEKATEVMEMATKLASDNSGTEESPPSAPVATEKLAVXKVPPTTHSQKPLKQE

SEQ ID NO: 162306 - protein, 58 aa, Glycine max
  Clone ID: PAT_MRT3847_11757C.1.pep
CTHNCTTKIDILSILIPPVIHFPMVGIVLLGLSWRAVYLALSLYWVINLFHSYLVFFS

SEQ ID NO: 162307 - protein, 70 aa, Glycine max
  Clone ID: PAT_MRT3847_117580C.1.pep
RESVLWRTQPQSWLGIKTSNSSHIGPESLKKKNKAWAHRLLQHTYPSDHYEFSLFFESLHKPFLASVDSP

SEQ ID NO: 162308 - protein, 80 aa, Glycine max
  unsure (1)..(80): unsure at all Xaa locations
  Clone ID: PAT_MRT3847_117581C.1.pep
XXEKIXPXSMEXXFXAXLRVNPPYXXTKRHVPLGXPRPPYCWSAXGRRPHRXXYPDSDLEAFSHNXTHGXSRHXLFNXAR

SEQ ID NO: 162309 - protein, 46 aa, Glycine max
  Clone ID: PAT_MRT3847_117582C.1.pep
HASAHASETETHRRGTFSTQNPKSRAKVTTNFATVARLGGALAAST

SEQ ID NO: 162310 - protein, 74 aa, Glycine max
  Clone ID: PAT_MRT3847_117583C.1.pep
VRRGVDRAEINSIALSPNVQWLAASSDKGTVHVFSLRVRVFGEDSVTQPNAVQGPALFHQNSSSSLDPLISPNT

SEQ ID NO: 162311 - protein, 84 aa, Glycine max
  Clone ID: PAT_MRT3847_117584C.1.pep
TNNVGTFSVFSLGWGFFFIGLRLCILCLGFFFFGGLSLHLLGLKRVFFFFFIPNEQGDKKVVNKGNRGFLCFGLDDIFLSLGFL

SEQ ID NO: 162312 - protein, 101 aa, Glycine max
  unsure (1)..(101): unsure at all Xaa locations
  Clone ID: PAT_MRT3847_117586C.1.pep
LPPAYCSSSVATDAELNEILDVGFEYSAARRVRTQRTATRFLFRLLRTTXILHASEACKHALDKKIGLHLEEAPLDNLLAPSYSYLNETLYDVDRVERILS

SEQ ID NO: 162313 - protein, 42 aa, Glycine max
  Clone ID: PAT_MRT3847_117587C.1.pep
IFFLINLVKSYSYRCTHTIKQVIFCILVHHNYIFYLIIIYHL

SEQ ID NO: 162314 - protein, 96 aa, Glycine max
  Clone ID: PAT_MRT3847_117588C.1.pep
GSSFQILIPKICCTTEAIFIFQATTIAKQILFPVNHFPLPSKFIQHIIFILFFIIIITLYLTITFLYFSHPNFHLLHHILLLIITLKKPPQPTYYF

SEQ ID NO: 162315 - protein, 83 aa, Glycine max
  Clone ID: PAT_MRT3847_117589C.1.pep
SGIIHKIGETLHVGGHKKEEEHKGEHHAGEYRGEHHGDHSSEVKGNHRCGPQTWKSRGKDRPEHTQGSRDKRRNTMNDEDRKR

SEQ ID NO: 162316 - protein, 37 aa, Glycine max
  Clone ID: PAT_MRT3847_11758C.1.pep
PLFESRGCAPSEGDHKGIMASSALGSVIANSQTGSVR

SEQ ID NO: 162317 - protein, 235 aa, Glycine max
  Clone ID: PAT_MRT3847_117590C.1.pep
MVAEAEVVCQQNVGVLDVKHFPNKGSDVHEIGDADANSPPSFDRVRATESVSAELLTSQEDVKSADRISDAALESAVLQFIPCIRSGSFADIGPRRYMEDEHIRIDDLSSHLGSLYNFPKPSAFYGVFDGHGGPEAAAYIRKHVIKFFFEDVSFPQTSEVDNVFLEEVEDSLRKAFLLADSALADDCSVNSSSGTTALTALIFGKYVHIHTSHSWFSFICTLLAAYNHLSTLRLM

SEQ ID NO: 162318 - protein, 285 aa, Glycine max
  Clone ID: PAT_MRT3847_117591C.1.pep
RLSQMKKTHDDELVADVHALSAGLKAYVTSYTAKSLSICREACGGHGYAAVNRFGILRNDHDIFQTFEGDNTVLLQQVAGDLLKQYKGKFKGGTFAVTWNYLRESMNTYLSQPNPVTARWEGEDHLRDPKFQLDAFRYRTSRLLQSVAVRLRKHSKSLGDFGAWNRCLNHLLTLAESHIESVILAKFIEAVQSCPDPSSQAALKLVCDLYALDRIWNDIGTYRNVDYVAPNKAKAIHKLAEYLSFQVRNIARELVDAFDLPDHVTRAPIAKRSGAYSQYTQYVGF

SEQ ID NO: 162319 - protein, 63 aa, Glycine max
  Clone ID: PAT_MRT3847_117592C.1.pep
GPINSFLQLILAVKRTPCFGKFSPKHQFMSLCSCIWGVDPICTFMVETSSFWTFFNSSSSNDP

SEQ ID NO: 162320 - protein, 39 aa, Glycine max
  Clone ID: PAT_MRT3847_117593C.1.pep
TAKVPIVTYLHMISFHIYVHNSILCFLACKNITIFNMNN

SEQ ID NO: 162321 - protein, 45 aa, Glycine max
  Clone ID: PAT_MRT3847_117594C.1.pep
IHWVEQRGKWWVDTGRVRPHIMQLHALFMLPNPSCLFIRKPLLER

SEQ ID NO: 162322 - protein, 51 aa, Glycine max
  Clone ID: PAT_MRT3847_117595C.1.pep
SFTFKRYQPCEPQVSSDYCQEHVEYDCESRFLRLLNGVFSQCHYRDHIPGS

SEQ ID NO: 162323 - protein, 92 aa, Glycine max
  Clone ID: PAT_MRT3847_117596C.1.pep
VRLALLFFLATKLWGAHSDPLIGTETGFSRKMLWSPSGAYTNILSNHFRIFWVGIRTLMQHWDRLGNVLFRHHPLPTTRFGPDESAPPTSWG

SEQ ID NO: 162324 - protein, 52 aa, Glycine max
  Clone ID: PAT_MRT3847_117597C.1.pep
EDDIVCMDSTGACDLCRDVYAKYARGIDYQSMKAALYVQILSTVDQLFWDLP

SEQ ID NO: 162325 - protein, 48 aa, Glycine max
  Clone ID: PAT_MRT3847_117598C.1.pep
NAPMRTGRDVTLSHRMPYSVNQMLDSRIIQHALRNRETGPSSETFDSE

SEQ ID NO: 162326 - protein, 117 aa, Glycine max
  unsure (1)..(117): unsure at all Xaa locations
  Clone ID: PAT_MRT3847_117599C.1.pep
MARTKQTVRKSTGGKAPKKHLATKAARQTVPTTGGVKKPNSYRPGTVALREIRKYQKSTALLFKKLTFHEVXREIAQDXRTELRQQSHAVLALQEAVEAYLVGLFEDTNLGAINDKR

SEQ ID NO: 162327 - protein, 46 aa, Glycine max
  Clone ID: PAT_MRT3847_11759C.1.pep
IDRSGNYHGLSMSLYPKASRRKDRNCQGCGPDALRQRKGLGVKQPA

SEQ ID NO: 162328 - protein, 52 aa, Glycine max
  Clone ID: PAT_MRT3847_1175C.1.pep
IRRVGDFYVQGIRLKVLLWLWQPIHVILIGVSVFALHRLGRGNQNKVQHQPL

SEQ ID NO: 162329 - protein, 112 aa, Glycine max
  Clone ID: PAT_MRT3847_117600C.1.pep
LSARINPGNKRILLFAGLTIFRPNFWAQFGKKKAPYNGCQQWYYAFFCLFVFPRLKKIGPKSFFFSPFPPGKNSWGGILKDGANVRVIKMFGPQRWGSLLCLQSNERSLTLP

SEQ ID NO: 162330 - protein, 197 aa, Glycine max
  unsure (1)..(197): unsure at all Xaa locations
  Clone ID: PAT_MRT3847_117601C.1.pep
MALQTATPPTTPSAQVVGNAFVEQYYHILHHSPGSVYRFYQDSSVISRPDSSGVMTSVTTMKGINEKILSLNFKEFKAEIKTADAQKSYKEGVTVLVTGCLTGKDNLRRKFAQSFFLAPQDNGYFXNDVFRYVEDHEPSELPPVTGDGDAAAVTVTPEPEPSHFADSSAPDPTNSHVNKGQAVAENAYEPSNHHERQ

SEQ ID NO: 162331 - protein, 72 aa, Glycine max
  Clone ID: PAT_MRT3847_117602C.1.pep
LFEFSLASIFLCIPFCWSVSSFLLVVFFMGFLPCVGSVWLSSFCCPLLALPVPPPCRFGSCSYKKFWLCLVP

SEQ ID NO: 162332 - protein, 54 aa, Glycine max
  Clone ID: PAT_MRT3847_117603C.1.pep
IITRNIIKLCPLSRLCLWSHPLIISHLLRISLELTPICHLFSLQFCTTFHQYLQ

SEQ ID NO: 162333 - protein, 61 aa, Glycine max
  Clone ID: PAT_MRT3847_117604C.1.pep
FIKKKEFFLKIIQIQKNFVTYLLTGIFLWNQVRAKILENIIIMSRLLRSFSRINNHSNSRA

SEQ ID NO: 162334 - protein, 69 aa, Glycine max
  Clone ID: PAT_MRT3847_117605C.1.pep
YVSPARTIFHNVFHCSLFNGHHNIFILYHVSHFFYDEATLYYQYPKYFLYLFYFIIKFYNFFLLFFISY

SEQ ID NO: 162335 - protein, 83 aa, Glycine max
  Clone ID: PAT_MRT3847_117606C.1.pep
CIWFASPPPGRVLTSMLCDIPWKSMSAMSLLGLKMSAGIPMFFLMVRYKAPRIYLSDFSFKKKKKKKKKKKKKKKKKKKKKEE

SEQ ID NO: 162336 - protein, 214 aa, Glycine max
  Clone ID: PAT_MRT3847_117607C.1.pep
TMGDLKLSISDLNMLLSHYIQKGCLFTTPSLPSSALIPHLKNALSQTLSLFPPLAGRLKTDADGYVYITCNDTGVDFIHVTAADISVADLLSPSSSSSSSDVPPIFKQLFPFHHKISYTAHSSPIMAFQVTDLADGIFLGCAVCHAVTDGASFWNFFNTFAGISRGATTSPSTLPDFRRESILNSNVVLRLPEEIKVTFNVEELFRERIFSFSR

SEQ ID NO: 162337 - protein, 75 aa, Glycine max
  Clone ID: PAT_MRT3847_117608C.1.pep
MPTEKPFSSFSNYFFFTFLILTHPNPSLLTFHILSRISYNTHNPLQYTQILFCTLPISNLISTTFYTLFLPHNQS

SEQ ID NO: 162338 - protein, 209 aa, Glycine max
  Clone ID: PAT_MRT3847_117609C.1.pep
ICAGDTVKFNMGLILLPVCRNTITWLRLAKLGYSVPFDDNINFHKTIAGAIVIGIILHAGDHLACDFPRLVSTSEESYEKYLKGVFGDRKPSYVDLVKGVEGVTGVLMVVLMIIAFTLATKWFRRNLIKLPKPFSRLTGFNAFWYSHHLFVIVYVLLIIHGIKLYLVHKWYLKTTWMYVAVPVLLYASERILRLFSTFWHSQIIGLYSS

SEQ ID NO: 162339 - protein, 36 aa, Glycine max
  Clone ID: PAT_MRT3847_11760C.1.pep
ICIVCASRCTVTSHRPSASVSCSGFMIDRVLTVRVA

SEQ ID NO: 162340 - protein, 63 aa, Glycine max
  Clone ID: PAT_MRT3847_117610C.1.pep
LKQNFLTFYTTRKQQIFGDGGNSRQNLVVNPSNKIPSQFNQNFFGKKLGGAPSTCFLFPLLKI

SEQ ID NO: 162341 - protein, 108 aa, Glycine max
  unsure (1)..(108): unsure at all Xaa locations
  Clone ID: PAT_MRT3847_117611C.1.pep
SHMSSAAAYVEGGNQESCDDACSICLEEFDASDPLSVTTCEHEFHLQCILQWCQRSSYSPMCWHPISLKDPTKXEVDEGVQQRRSLTATPSRNAAVLHHPAFGDIEMQ

SEQ ID NO: 162342 - protein, 78 aa, Glycine max
  unsure (1)..(78): unsure at all Xaa locations
  Clone ID: PAT_MRT3847_117612C.1.pep
MAASTMALSSSSLGWXSIKVSPSNPEXLGXGXVSXRXTASKTVSSGSPWYGPDRVKYLGPFSGEPXSYXXXEFXXDYG

SEQ ID NO: 162343 - protein, 100 aa, Glycine max
  unsure (1)..(100): unsure at all Xaa locations
  Clone ID: PAT_MRT3847_117613C.1.pep
ENPWVTQLIPLVKHLPFASCGKSEKNRNDGPSHQFPKLNGKWNAPCNTPFIAALVVVTRKFTPTLYQXLTPAPLGVFFFFFPTFCGFSPQVLKKGLNLGF

SEQ ID NO: 162344 - protein, 44 aa, Glycine max
  Clone ID: PAT_MRT3847_117615C.1.pep
VVTGIVSRPGSCNYEPFPTIGTATVYMVTCSEIIQTPCLTFLEP

SEQ ID NO: 162345 - protein, 81 aa, Glycine max
  Clone ID: PAT_MRT3847_117616C.1.pep
EGQIHFCMHKMYCLTKHYQLVLNSSHSLCWLILLSTLNYHHLDLLEINRHNKMPCSEHTSLHNSKRKRPVTQSNHQSSKCP

SEQ ID NO: 162346 - protein, 129 aa, Glycine max
  Clone ID: PAT_MRT3847_117617C.1.pep
SLLPIARRRPDPRLQQHLRSHTNRNRPTRKLPRLPTGHLVCHNSTGGGNLNRRTRGPNSRSSCCSPRWVRVLHQPVPLPSNAWFYSTTITSWPLFSVGAPRWNGEAKARDEEKRARRRSSCVPEPRGLE

SEQ ID NO: 162347 - protein, 110 aa, Glycine max
  Clone ID: PAT_MRT3847_117618C.1.pep
CCSFFRFLVSVTCKFIEQALIIGKFHRKDQHCFDSLSNEEFAVKREMSFHNQAFWMGKSPGGLNDGDMTNDNSSRIESKRAHQWFMDDPEVDMFPNKKQAVEAPNNLLSG

SEQ ID NO: 162348 - protein, 56 aa, Glycine max
  Clone ID: PAT_MRT3847_117619C.1.pep
PKGPPPPGGGLIQKRKMGFPQFFWDPFFKHRGPPPPLFLWKKAPPKKKIFRKGTPP

SEQ ID NO: 162349 - protein, 97 aa, Glycine max
  unsure (1)..(97): unsure at all Xaa locations
  Clone ID: PAT_MRT3847_11761C.1.pep
RVPGSTHASVRLLVLHHGHGRFYNSVINKVRRGHYSGHTIPVVPHITDEIXYWIERVAMNPVDGKHGPSDVSVIQLGGSIRDIEXMPCIEAFRECSY

SEQ ID NO: 162350 - protein, 110 aa, Glycine max
  Clone ID: PAT_MRT3847_117620C.1.pep
GYSWKASSTLLSFPFHQIHFQTLLFSSHGFLLTSPNTDLKQTKEDIIISLSRQILHQSWLKASRSSISSSSDAPDDQKPPLPPSVQFGRKTFLGRYVSYSRDDLDRELRS

SEQ ID NO: 162351 - protein, 246 aa, Glycine max
  unsure (1)..(246): unsure at all Xaa locations
  Clone ID: PAT_MRT3847_117621C.1.pep
QQILFPTLGRKKMVQQEIRRGPWTEQEDYKLVYFVNMFGDRRWDFIAKVSGLNRTGKSCRLRWVNYLHPDLKRGKLTPQEEHLVMDLXVKMSYWRTHMSKKNANEKKHASAASPVSSXCCQSSLSSNNHSCYDTGGYDDGMMMGLIGGEKGYSMDDIWKDIMSEEENNIYNNNLQPVYEGHSEEGCNFSCPPPPMIMPSPPSWDQYNISSQPLWVMDEEESNKMLFPTLSDQYFPYYEQGNAFLTG

SEQ ID NO: 162352 - protein, 274 aa, Glycine max
  Clone ID: PAT_MRT3847_117622C.1.pep
YSLQLAEKMVQQEIRRGPWTEQEDYKLVYFVGMFGDRRWDFIAKVSGLNRTGKSCRLRWVNYLHPDLKRGKLTPQEQHLLTPQEEHLVMDLHSKWGNRWSRIARRLPGRTDNEIKNYWRTHMRKKKAQEKKHASASASSPVSSSCQSSLSSNNHSCYDTGGYDDGMMMGLIGGEKGYSMDDIWKDIVLSGEENSIYNNNNLQPVYEEGHSEEGFNFSCPPPMMIMPSPPSWDQYNISSQPLWVMDEEESNKMLFPTLSDQYFSHYEQGNEFLTG

SEQ ID NO: 162353 - protein, 86 aa, Glycine max
  Clone ID: PAT_MRT3847_117623C.1.pep
FDRYILHYLITILTNSLGSRLSINIWKGYCMSTADFIIQRAGDRLYIQCLRSWLGTLGSPQPNKIIRLVCEPYKYKGFHANQEAIF

SEQ ID NO: 162354 - protein, 95 aa, Glycine max
  unsure (1)..(95): unsure at all Xaa locations
  Clone ID: PAT_MRT3847_117624C.1.pep
LEGRRAGTKKRGKKKKKNKKKKKKKKKRKKKKKKRXRRNKKRTKKKEPPTQKRSLGGRRKKRNRTQPIKGAPDIKMGGPRGRRGRQREERTRKGR

SEQ ID NO: 162355 - protein, 139 aa, Glycine max
  Clone ID: PAT_MRT3847_117625C.1.pep
FPASSRNFNSWARKWFFGAFFLLKNFFSPPPGRGSWLSQELGAPPPQRFKWGPKKNLFFNYCPAPKGFPQGFPPKRNFFLKKNLPAPPPNFLWPEGHPPPRISFIFGGPGGKFFPLFPRLGPPCEQKRPFFKKKKFFFL

SEQ ID NO: 162356 - protein, 62 aa, Glycine max
  Clone ID: PAT_MRT3847_117626C.1.pep
PVKLNEIHREGYDIITDIVGDSFAASGDFFKAEYAHPMPGSTIGKNQIVDDAESHHTAGWWL

SEQ ID NO: 162357 - protein, 61 aa, Glycine max
  Clone ID: PAT_MRT3847_117627C.1.pep
FSQTVSIIENIEMLLVLIRVRLVIFLINRALRSYEMTWIFSALVNSQALNIITLSLTILEI

SEQ ID NO: 162358 - protein, 326 aa, Glycine max
  Clone ID: PAT_MRT3847_117628C.1.pep
MSAIFLLVGMLSSITVAQSIGVCYGVIGDNLPSRQEVVDLYKTNGIGRMRIYYPDEEALQALRGSGIELIMDVAKETLQSLTDSNAATDWVNKYVTPYSQDVNFKYIAVGNEIHPNTNEAQYILSAMTNIQNAISSANLQIKVSTAIDSTLITNSYPPNDGVFTSDAEPYIKPIINFLVSNGAPLLANVYPYFAYANDQSIPLAYALFTQQGNNDVGYQNLFDAMLDSIYAALEKVGASNLQIVVSESGWPSEGGAGASIDNAGTYYANLIRHASSGNGTPKRPGESIETYLFAMFDENQKQGADTERHFGLFNPDKSPKYQLSFN

SEQ ID NO: 162359 - protein, 434 aa, Glycine max
  Clone ID: PAT_MRT3847_117629C.1.pep
MEDERGSLLLPKNMEEHNPAHDRGTTELRNFRSYLRWVYVDHSNVCKAGLSWSVFFTLAFVVPTLSHFLLDCPTCDRDHSRPYHIPVQISLSVFAALSFISISSWDRRYGFRKFLFLDKLGDESLKIQRGYSEQMQGTMKLIMRWGLPCFIAECGYKIWWYVSGASQIPHYGNIYVSSIILCTLDLCSWLYRTSIFFLVCVLFRLICYLQILRLDEFARVFQRETEVGSILLEYLRMRRNLRIISHRFRGFILASLLLVTASQLIFLLMVTKPYADVDILKAGELALVSITLVSGLLILLRGATKITHKAHSITGLAAKWHICATINSFDNIEGETPTTANAISAQAIAANISWGSDDDEVGDEEDELDNTKLLLPIYTQTISFHKRQALVTYLENNRAGITVFGFMLDRTWLHSIFGIQLALCLWLLNKTVGV

SEQ ID NO: 162360 - protein, 335 aa, Glycine max
  Clone ID: PAT_MRT3847_11762C.1.pep
ENDRIFFGVPIFSYKELQEASNNFDPTRKLGDGGFGTVYYGTLRDGREVAIKHLFEHNYKRVEQFMNEIEILTRLRHRNLVSLYGCTSRHGQELLLVYEYVPNGTVASHLHGDLARVGLLTWPIRMQIAIDTAAALTYLHASNIIHRDVKTNNILLDISFSAKVADFGLSRLLPNDVSHVSTAPQGSPGYLDPEYFQFYRLTDKSDVYSFGVVLIELISSMPAVDAARERDEVNLANLAMKKIQKGKLSELVDPSLGFESDQVVKRMLTSVAGLAFRCVQGDNELRPSMDEVLEALKKFQNGNYESENLEKGDDDGVISSTSSSEVHPPVYTGIW

SEQ ID NO: 162361 - protein, 91 aa, Glycine max
  unsure (1)..(91): unsure at all Xaa locations
  Clone ID: PAT_MRT3847_117630C.1.pep
XXXFEXXXMPLLLLGXXRIRXRPNPSNSNLTXNCHSRXTAKPPHNLKLIGIRVXLTELXTFAXSXIXQSQCCSCXCKCSXHGXGFTVANPA

SEQ ID NO: 162362 - protein, 103 aa, Glycine max
  Clone ID: PAT_MRT3847_117631C.1.pep
KGGGTHPKLPKGVKTPPGNRGKGEGVIPSGGGKKGGALHPQAGGQKKKTLAGPGGSPPWPEIGPSKWKRGQNPPPRGEKCYPEKASQKFGSPPQNPTPRGGGP

SEQ ID NO: 162363 - protein, 49 aa, Glycine max
  unsure (1)..(49): unsure at all Xaa locations
  Clone ID: PAT_MRT3847_117632C.1.pep
KXLGQXKGLLCLXAXGHNXKELAXXVGAXKXAXCXQWWRCRRXIMMXXT

SEQ ID NO: 162364 - protein, 93 aa, Glycine max
  Clone ID: PAT_MRT3847_117633C.1.pep
ILIYFLISFLASAFLKTVASKLCLFKSICKFYIVLCMLFVILIGCIFINFWEVCHACRFWFVRMKIWLHPPNEENMLINHWTILWPDHWLPVK

SEQ ID NO: 162365 - protein, 330 aa, Glycine max
  Clone ID: PAT_MRT3847_117634C.1.pep
MEAVESIAVPEPDEDDPSSTLLDLSSYQLHDLDSVELPPSLTELDLTANRLSTLDPRIGNLSHLKKLSLRQNLITDAAVLPLSSWNAISSLEELVLRDNQLKNIPDVTVFKKLLVFDVAFNEISSLHGLSRVSDTLKELYVSNNEVAKIEEIEHFHQLQILELGSNKLRVMENLQSLENLQELWLGQNRIKVVNLCGLKCIKKISFQSNRLTSMTGFEGCVALEELYLSHNGIAKMEGLSSLVNLRVLDVSSNKITSVDDIVNLTKLEDLWLNDNQIASLEGIAEAVSGSKEKLTTIYLKNNPCGKTPNYTGILRKIFPNIQQIDSDIFS

SEQ ID NO: 162366 - protein, 239 aa, Glycine max
  unsure (1)..(239): unsure at all Xaa locations
  Clone ID: PAT_MRT3847_117635C.1.pep
PPFSSSQEHNRFIQTQKNIIVLRDNVARFKIILYDIFLTAVSXPTPFCEAFNLGDDILRHGFRGISDIITXIPGLVNVDFADVRAIMANAGSSLMGIGTATGKSRARDAALNAIQSPLLDIGIERATGIVWNITGGTDLTLFEVNTAAEVIYDLVDPTANLIFGAVIDPSLSGQVSITLIATGFKRQEESEGRPLQASQLTQADTTFGTNWRSSSFTDGGLFEIPEFLKKRGGSRYPRA

SEQ ID NO: 162367 - protein, 243 aa, Glycine max
  Clone ID: PAT_MRT3847_117636C.1.pep
SRSSNSPKGTLQQEEEYKKSFLPFPSLSLSLSLSVFLFVMASSSRTKSSGPVLRSSSSSSSLSHSNSFCSYSTSNAPFHSPSSSFFRKPHSHVPPRSTSPTRVNLFSAAPLPSHSVRFALDRSISPNRTVSSHVIAKHRHVTAQKKSCMCSPTTHPGSFRCSLHKNSHSAQTGSFPSNRLNMRRSAMKNSLVRIGGVEGEWVKRALTALIRPSSHQQRRRTAFEPRQSRLSIMSKADDEEEEK

SEQ ID NO: 162368 - protein, 65 aa, Glycine max
  Clone ID: PAT_MRT3847_117637C.1.pep
IFWPVSSTCPHVLFQFHVAPCFLASTLVNCQGLSFSDSKLLFYFIIGLPFLYEIPAWQLWINRFD

SEQ ID NO: 162369 - protein, 104 aa, Glycine max
  unsure (1)..(104): unsure at all Xaa locations
  Clone ID: PAT_MRT3847_117638C.1.pep
GQVAYCLALTPNLSSVHPVFHVXMLRKYVHDPSHIIQLQSVQLDENLSYTEQPVDIMDKRVKCLHSKDVVSVKVAWRGPVGEEMTXEPKTIMREKYPHLFETQG

SEQ ID NO: 162370 - protein, 63 aa, Glycine max
  Clone ID: PAT_MRT3847_117639C.1.pep
PPKKGFFFDQKKKYLPSKMQKLLRKKTLFLKGVFKKGPSKLKKTPKNVNLKTIFGPIFILGPL

SEQ ID NO: 162371 - protein, 29 aa, Glycine max
  Clone ID: PAT_MRT3847_11763C.1.pep
MTPSSLRFYIMKLVYFWPYRFQSSPEHDG

SEQ ID NO: 162372 - protein, 166 aa, Glycine max
  unsure (1)..(166): unsure at all Xaa locations
  Clone ID: PAT_MRT3847_117640C.1.pep
HPTTLKKLTICGYIMEASMLERIGHITFVTSLEYLYIYNCLNMNIPMTGCYNFLVSLSIXQWLDSLTTFPLDFFPKLEYLFLRGCRNLHVISQGLAHNHLKDLVISECAQFEALLERMHALLPYLDVIQIDDCPKFESFPNRGLPSNLXKMYIDKCSKLIMSLKEA

SEQ ID NO: 162373 - protein, 152 aa, Glycine max
  unsure (1)..(152): unsure at all Xaa locations
  Clone ID: PAT_MRT3847_117641C.1.pep
LHPSRFCERVLLGGGDGEHTFVYFGDPCSGTSPFVQDLARALVLYVLPCGEHEKNTHTSLFQDSATFGEDLNTLFPREVECARFVYESDLCAFPHDIGVCVSYPVHNFEREDLDTIFLSGERYLSPCEEXDKVLSAVCQGNIIAPLVESLGE

SEQ ID NO: 162374 - protein, 41 aa, Glycine max
  Clone ID: PAT_MRT3847_117642C.1.pep
PRGIEHPAKLDGERFSMPPKNLHVLIKQISVTDRQSYILCS

SEQ ID NO: 162375 - protein, 43 aa, Glycine max
  Clone ID: PAT_MRT3847_117643C.1.pep
DSLKRAATYELGDPGIKSRPVPGRLPTFPYMKRIKSLAGIHGS

SEQ ID NO: 162376 - protein, 74 aa, Glycine max
  Clone ID: PAT_MRT3847_117644C.1.pep
GILKPRAHKVCKTFLPHSKPIPRLDFYRFYNTHNLHIRVLKHNTILSFPQSQHHSKTYHPATILHQCLGHLTIP

SEQ ID NO: 162377 - protein, 189 aa, Glycine max
  Clone ID: PAT_MRT3847_117645C.1.pep
NGVWRTKGPKSWEGCYYVYEVCVYHPSTMRIEKCYTSDPYARGLSSDGRRSFLLNLDSVKLKPDGWDNLANKKPTIHSFFDISIYEMHIRDFSASDLSVQPEFRGGYLAFTLQDFAGVLHLKKLSRAGITHVHLLPTFQFAGVDDQKEDWRFVDTSILESLPPDSDQQQAFIPAIQNFDGYNWEETFIL

SEQ ID NO: 162378 - protein, 158 aa, Glycine max
  unsure (1)..(158): unsure at all Xaa locations
  Clone ID: PAT_MRT3847_117646C.1.pep
MRRNLLLGLRNGLAQLQLLLLCQILSLKKICFSPGFRPLRRACVPAPCATCASDAASAFGHASRXAPRSSSLAISEIYGGVFMNNILGFFAISVLIFVREVTWQFSAELLVVAIVCAITGITASFHSIFPIWSSFIAILLYPLSLVLVFILDHVLNYN

SEQ ID NO: 162379 - protein, 108 aa, Glycine max
  unsure (1)..(108): unsure at all Xaa locations
  Clone ID: PAT_MRT3847_117647C.1.pep
MNPNLLSYGDGLSKTSITVTXNFHDGTNTMRRATFTTVAEHFMAKSVAFENTAGAVRHRSMTLRMQGDRSLFFDCPMRGYEYTLESHAYRQFYRNCEISGTIVFSLGY

SEQ ID NO: 162380 - protein, 51 aa, Glycine max
  Clone ID: PAT_MRT3847_117648C.1.pep
IKEEEVVEVVVVVVEVAATVVVREKSMTNHKPLRNCSMQFLVVHHWASSLS

SEQ ID NO: 162381 - protein, 41 aa, Glycine max
  Clone ID: PAT_MRT3847_117649C.1.pep
VQEVADCYLRYEFRYKKLQIIGHNLVKGSTWKLAYMEAHGS

SEQ ID NO: 162382 - protein, 82 aa, Glycine max
  unsure (1)..(82): unsure at all Xaa locations
  Clone ID: PAT_MRT3847_11764C.1.pep
VDYTSKSTPRWPSSGNCQVLSSGSTRRLVKARATLQATLASPRGXGTSYTVEDWRGPKATHRMITHGDYHAVRRDDTLAWTH

SEQ ID NO: 162383 - protein, 42 aa, Glycine max
  Clone ID: PAT_MRT3847_117650C.1.pep
TPILKGVSILPKTLFLTKVQPNLEARYPNSSISPYHKGKSGG

SEQ ID NO: 162384 - protein, 90 aa, Glycine max
  Clone ID: PAT_MRT3847_117651C.1.pep
IIIFPLKYRMGIYSGPLLNILIERNFLILIYSIQFLAPFHSFFFYYPLIFQPYPNWLGTFQNFFWTSTQSQFENKNGNLLPFHQRFYKMG

SEQ ID NO: 162385 - protein, 348 aa, Glycine max
  unsure (1)..(348): unsure at all Xaa locations
  Clone ID: PAT_MRT3847_117652C.1.pep
MHVLVFLNLYEEYVNAFLLLPITHSDKFKSIFLDAMLLPWVFALLVALFPVTYLLEGQLRIXKNILEDSEIGILGEEEKKLTTLLAIEGARTSLLGLYAAIFMLIALEIKYKLASILREKVIDSGGIRQNHSSQSASASFLPRMRFMQHRRATTAPSFTVKRMAADGAWMPAVGNVATVMCFAICLVLNVNLTGGSNRSIFFLAPILLLLNQDSDFVAGFGDKHRYFPVTVIISAYFVITALYSIWEDVWQGNSGWGLQIGGPDWIFVVKNLALLILTFPSHILFNRYVWSHTKQSDSPPWITLPLNLLPIACTDVLKIKILGILGVIYSLAQYLITRQQYISGLKYI

SEQ ID NO: 162386 - protein, 57 aa, Glycine max
  Clone ID: PAT_MRT3847_117653C.1.pep
GEIFCQSFTMIDITSILVQVQVLLLGPIPHQHFNFFSPKLRLFSYFRTTGHCFNFSV

SEQ ID NO: 162387 - protein, 192 aa, Glycine max
  unsure (1)..(192): unsure at all Xaa locations
  Clone ID: PAT_MRT3847_117654C.1.pep
MSIFDGAFMNTQLSKHTSIFGLRLWVVIGILIGVFIVFTLFLLSLCLVSRRNRRRSGAGTGYKVAGGADAAKDIHTIVHLPGPHMLRPPAPEIHVEMGKKTEHRVVVQCDRVSSEESKVTVGEWVGSVGGPGPGLGPEVSHLGWGRWYTLXRELEDATGGLSPENVVGEXGGYGIVYHGGLNDGTKNAVKTS

SEQ ID NO: 162388 - protein, 143 aa, Glycine max
  Clone ID: PAT_MRT3847_117655C.1.pep
MSIFDGAFMNTQLSKHTSIFGLRLWVVIGILIGVFIVFTLFLLSLCLVSRRNRRRSVAVPGYKVTGDADAAKDIHTIVHLPGPHMLRPVAPEIHVEMGKKTEHRVVVQCDGVSSEESKVTVGSGCETTSVFWEWECWWAWAWV

SEQ ID NO: 162389 - protein, 164 aa, Glycine max
  Clone ID: PAT_MRT3847_117656C.1.pep
YYPSSSNCPPLTCFEAHFSSMERQRSFSFKPTRLLVFSFTIFSSILFLSTFTTWLTNYTPSIHQQIHLYFNTSTSSSSVGDGESDSVALPPLTVHSLTKNLTVNVVKVPTLIDNRLARTQKSLSGSKSEPVRHHVGASNVNFTSMEEYGTSPERVPSKEEKKVV

SEQ ID NO: 162390 - protein, 119 aa, Glycine max
  Clone ID: PAT_MRT3847_117657C.1.pep
GTAQRAATPPPSHKKATAEECPGTDTNGSRARVASPNSENTWGGGPGGVERGSRLTKRLGEEGRLPRAAGGRSRHGVGSIDEAGIESAGIGGYASRLRRPLLRRPKCCDGGQQRRVLNA

SEQ ID NO: 162391 - protein, 82 aa, Glycine max
  unsure (1)..(82): unsure at all Xaa locations
  Clone ID: PAT_MRT3847_117658C.1.pep
MGGSEGVGASSKQFGVTKPISMAGPTVTDLQRTRELEKFLAVSXLYESKEEAXQREEVLHRLGEIVKKWVKQLTRLRGYTDQ

SEQ ID NO: 162392 - protein, 112 aa, Glycine max
  Clone ID: PAT_MRT3847_117659C.1.pep
MQLVLLCLLILKLTPAFATTPNDAYGGDSSGCPLGTDIYQYTCPEAEAIIFSWVEQAVSQDSRMAASLLRLHFHDCFVNGCDASVLLDDTQDFVGEKTAGPNLNSLRGFEVI

SEQ ID NO: 162393 - protein, 86 aa, Glycine max
  Clone ID: PAT_MRT3847_11765C.1.pep
LTVVVQLPPDANNGGAVPLRNLATPPTIFTALPFALRRTTKPLTFGLALSGIIQPVTTITFTPLGIPLNTSVSLRCIVPVACVVRR

SEQ ID NO: 162394 - protein, 53 aa, Glycine max
  unsure (1)..(53): unsure at all Xaa locations
  Clone ID: PAT_MRT3847_117660C.1.pep
MFXFGYKGXKIKXLWWLCXKNVLDXNSIXSXDGIVXXXLDFXGSAXDTVXFLX

SEQ ID NO: 162395 - protein, 140 aa, Glycine max
  Clone ID: PAT_MRT3847_117661C.1.pep
NEVHEDHHHFIFPLPPKIPKIHKFFKITARGPPFLKFNFFPWVSLFPIGGATPCPYPLIVNTRVPPPNILKMGESITRPHDHRIGLDPRRPLINQPHFVHFDNDPVQGNPKNKVEIFSLLLRSSISLQQLPCFYPIVYIL

SEQ ID NO: 162396 - protein, 59 aa, Glycine max
  Clone ID: PAT_MRT3847_117662C.1.pep
PLKFLARESPRTPPEEKEERAIAEKGFSLPPSPRASQPLELLPLFPLHSPTHNNNTTNS

SEQ ID NO: 162397 - protein, 288 aa, Glycine max
  Clone ID: PAT_MRT3847_117663C.1.pep
AREYSLRQLLLDVPGHVDMVIFPNYESSIERDDIKEPFSEVSMFKKNYDHLPKDTYFGMYKDSVRGNPNYFLTYGNGKSAARIQDHLRPNGAHRWHNYMKTPNEIKLEEAAVLHYTYAKFSDLTSRRDRCGCKPTKEDVKRCFMLEFDRTAFIIASTATEEEMMKWYNEHVVWGDKDLKMKLLRKGVLTRIYSPMVIIQSLRESGVFSSVIASAPSLFKENFLLSIDSSNSSRVSASVTLPSRKVGRTKESQAATRKALSVESAAFHEVAVPPLSPPVVDDNDLISHN

SEQ ID NO: 162398 - protein, 370 aa, Glycine max
  unsure (1)..(370): unsure at all Xaa locations
  Clone ID: PAT_MRT3847_117664C.1.pep
MSSAAFKVGVLGSGISGAVRASTLARNGVSVTLFESARGPGGRMSQRRERTEDGTELHFDHGAPFFSVSKSEVLHLVQEWESRGLVAEWKEKFASFDFHTLKFNNIEQEGSSKRYVGVPGMNSICKALCNESGVESKFGVGIGRIEWLHDEKLWSLIGVDGQNLGQFKGLVASDKNIVSPRVAEVTGRTPPLDIKLVPELSEKLLDLPVKPCFIVMLAFAEPLSTVPVKAFSFENSEVLSQAYCDSSKPNRSTTSERWVLHSTAEYAEDIIAQTGLKKPSDITLNKVAEQLLQEFQSTGLITSQPFFKKAHRWGXSAFSAASIAQEEKCLWDRNKRLAICGDFCVSPNVEGAIDSAFAAALRLKDSVSSL

SEQ ID NO: 162399 - protein, 318 aa, Glycine max
  unsure (1)..(318): unsure at all Xaa locations
  Clone ID: PAT_MRT3847_117665C.1.pep
MSRFSESFYHKTGMYNLXFVACEPKLKGIVMSGKTVWKNPDGYLPGRMAPLKKFYVFMTLAYVCLSIIWFFQYVRFWDDVLQLQHCITAVIALGLFEMILWYFEYVNFNNTGMRPIVLTTWVVTVGAIRKSISRLLILSVSMGYGVVRPTLGGLTSKVLLLGITYFLASELLNITEYVGTINDVSGRARLLLVLPDAFLDAFLILWIFTSLSRTLEQLQAKRSSVKLDIYRKFSNALAVTVISSVAWIGYEVYLKATDPFNERSQSAWINTAFWDTLAFTLLKHICYLWAPLVRQYKNGGTDVSFDQKDESEEEDKRE

SEQ ID NO: 162400 - protein, 603 aa, Glycine max
  Clone ID: PAT_MRT3847_117666C.1.pep
MGNNMATYNKYKSFLFFIRKFKVTEPVSPQDLEEAFSKFTGGGSHMSADELHRFLVEHQGEEDYTLLNSEKVVEKVLKERKRCQESVKVDQNREHEITLDELFRFLLHDDSNGPLKAEVHHDMGAPLSHYFIYTGHNSYLTGNQLSSDCSEEPIIKALKRGVRVIELDLWPTYNKHDIKVDHGWTLTNPASVIKCLESIKEYGFVASQYPVIITIEDHLTTDLRAKFAEMATQIFGEMLFYPGTDCSCLTEFPSPESLKNRVIISTKPPKERFKSNRIKDNPMLNESDSSEEETWGNESPDSNKNEVETEDTNGSDRDEGNVSACECDHKPYQECSPDYKHIITIHNTKLKGCMKDKLKTDGEVRRLSWSEKTLEKASESHGTDILRFTQKNILRVYPSAMRVKSSNFKPHIGWMYGAQMVACNMQGLGKSLWLMQGMFRANGGCGYVKKPQFLMQKHQCDNEFDPTRIQSVKKKTLKVKVYMGHGWSSDFSPTHFDKCSPPDFYTKVRIVGMPADVAKKKTKVMMDDWFPVWDEEFEFSLTVPELALLLIQVKDKDPGKDDFAGQTCLPVSELKHGFRSVPLYNKKGEKFKSVKLLMRFQFE

SEQ ID NO: 162401 - protein, 170 aa, Glycine max
  Clone ID: PAT_MRT3847_117667C.1.pep
LCLALWLPFSCCRNFLTLFNYKLLRNVGFSSRDRQNEVSVKLDIYRKFSNALAVTVISSVAWIGYEVYFKATDPFNERWQSAWIITAFWDILAFALLCVICYLWAPSQSSQRYAYSEEVGEDSDDEEAQSLTKGKQEGQGELSLVRQEKNGGTDGSFDQEDESEEEDKRE

SEQ ID NO: 162402 - protein, 62 aa, Glycine max
  Clone ID: PAT_MRT3847_117668C.1.pep
VCSSMNSWINSDPCLPWFNTRLILCLPDYLLCLYNWWHRAYLIPHVIGGTCLYLPLQPCTCV

SEQ ID NO: 162403 - protein, 116 aa, Glycine max
  unsure (1)..(116): unsure at all Xaa locations
  Clone ID: PAT_MRT3847_117669C.1.pep
MVVRMIEGDKQQQQHERRERREREREREASIREKGAPGRSGGSRGTKXRTREQRKKREEKRGRNTENRDTRTRSARRRESPPREAPTKREAGIESSRKRWKRKGLPYPNAYQILIH

SEQ ID NO: 162404 - protein, 83 aa, Glycine max
  Clone ID: PAT_MRT3847_11766C.1.pep
FIITPPNTLPFFLPHIIQISSLSTFHHNIYSYHIYYKSPIITLPFPIFNLKNFYHIQSNHQTLKLPNPYTYLLITINYNTILI

SEQ ID NO: 162405 - protein, 71 aa, Glycine max
  Clone ID: PAT_MRT3847_117670C.1.pep
HIGLLHTLVPHDLLRLFTIDRAEPFSEVPPIQPAQALLRYRLIGHARLLSLTKHDRHAKPTQHRSVRAQQP

SEQ ID NO: 162406 - protein, 119 aa, Glycine max
  unsure (1)..(119): unsure at all Xaa locations
  Clone ID: PAT_MRT3847_117671C.1.pep
MVFNGSIFFPVLCFLALSLKGFLAKDNGLIINFYKESCPQAEDIIKKQVKVLYKRHKNTAFXSWLTNILHDCAVHSCYASLLLDSTIKSLFYKETHTSFWVRNFRYIETIKESFEKECP

SEQ ID NO: 162407 - protein, 43 aa, Glycine max
  Clone ID: PAT_MRT3847_117672C.1.pep
KVLSKGGKDGWVLKKIKKGGFKKKFWFFSKIRVVNGRYYLESS

SEQ ID NO: 162408 - protein, 75 aa, Glycine max
  unsure (1)..(75): unsure at all Xaa locations
  Clone ID: PAT_MRT3847_117673C.1.pep
PXVDPRVRFLKILNYYVWPWNLNNFLRSFGIFLLHLQISNSTINSDRHFFLLVGSLVFFLLVWTYPIFFVLLVHK

SEQ ID NO: 162409 - protein, 85 aa, Glycine max
  Clone ID: PAT_MRT3847_117674C.1.pep
ELYILNVVFYLSNASHRNKKKKLGAFKKKVIQGRRNFYTWGRKKKKALGAPTTTTLFTGNKDPCLAPRVKQTILDQHRRGGQLWL

SEQ ID NO: 162410 - protein, 77 aa, Glycine max
  Clone ID: PAT_MRT3847_117675C.1.pep
MSAALDNRLYCISLCRTSFWTALKDQKHDLFISEAQTAGYLTGPGAAGHLSAGTFSSAMFNLPPPADLDAGDLGSLT

SEQ ID NO: 162411 - protein, 94 aa, Glycine max
  Clone ID: PAT_MRT3847_117676C.1.pep
LSWRLVLFLGSLSVRRRGAFVSVASVLFLFVGLVFLVFVLCCVCRVCCRVWFSRVPVCFGRGGVWGACSLLVPGAAFVWGVLFGGGSSGFPVGP

SEQ ID NO: 162412 - protein, 31 aa, Glycine max
  Clone ID: PAT_MRT3847_117677C.1.pep
PPKVFYGGGHQPVHPDEASDRGLTTNKRAQQ

SEQ ID NO: 162413 - protein, 123 aa, Glycine max
  Clone ID: PAT_MRT3847_117678C.1.pep
MHAYVSSEFGSRLRQMQECAKRIAKVSAEAKLEIDEETYLSSFKPHLMDVVYTWATGATFAHICKMTDVFEGSIIRCMRRLEELLRQMCQAAKAIGNTELENKFAEGITKIKRDIVFAASLYL

SEQ ID NO: 162414 - protein, 98 aa, Glycine max
  Clone ID: PAT_MRT3847_117679C.1.pep
KNAVPKTIMQLMSVDGLTRENVASHLQKYRLYLKRMQGLSAGGGVGRVASAELTNERLFPSRPWRRLTAAAGSDHYCQFVHSGSHITKRGNSTTFGRA

SEQ ID NO: 162415 - protein, 57 aa, Glycine max
  Clone ID: PAT_MRT3847_11767C.1.pep
GQCTITHLLTTTRRDGEDELKLTPLSRARLDGLHIQPIMMAGDNRMKNGTSGSLSHR

SEQ ID NO: 162416 - protein, 52 aa, Glycine max
  Clone ID: PAT_MRT3847_117680C.1.pep
MFTNDQRQQERTGRYGTSKVEFLHKLGTQVQNTSEDETREKILSNLANFAYD

SEQ ID NO: 162417 - protein, 148 aa, Glycine max
  Clone ID: PAT_MRT3847_117681C.1.pep
RVSSLQVADILRKDFKKWTGQESADSRSVQIGMSCIGISIGQLLSHAENLAQEITRFQLSEKLRALIVVSGYYNDENNFKREVLISTESAKLLESLLFFFDFNASRLPLKSLHFPGLKNGMKAYEIDKITSRKIVEHLIEEFVGIPKA

SEQ ID NO: 162418 - protein, 33 aa, Glycine max
  Clone ID: PAT_MRT3847_117682C.1.pep
RSHSPSLMICSLEGAIESSFCFYNPYKRGIAHA

SEQ ID NO: 162419 - protein, 413 aa, Glycine max
  Clone ID: PAT_MRT3847_117683C.1.pep
MWEQKKKKKSIAGIDQDELVDPKLLADLDSCFCEFKGVHIHHKICDAESKAQSTPQSRTVSHQIKKLGYPMILLHGFGASVFSWKQVMKPLAEVAGSKVLAFDRPAFGLTSRVNLSRHPSSETEDAKPLNAYSMAFSVLATLHFIKLLNAQKVILVGHSAGSLVAVNTYFEAPERVAALILVAPAIFAPLTTRKVVKENQSGHDNQTEEDNSSIRKNPILGLYKMLSKTTKYIAEAISQMMKWTIDILNFWYRKLLSAILRSSLAIMLVRMAIDKFGTTAVRNAWYDPKQVAEHVLSGYIKRLRIKNWDRALVEYTAAMLLDEESKTKPSLSKRLHEISCPVLIVTGDTDRIVPSWNAERLSRVIPGASFEVIKQCGHLPHEEKVEEFISIVENFLRRLVSDSNEQYLQEATA

SEQ ID NO: 162420 - protein, 78 aa, Glycine max
  Clone ID: PAT_MRT3847_117684C.1.pep
GSSSSRICKDLNTRAIMRGGASISACMPAGPDGGAQRVTRNMLWPNKRKRKLKSLLDYRFQGRVTEQLQDDSQIEDVD

SEQ ID NO: 162421 - protein, 84 aa, Glycine max
  unsure (1)..(84): unsure at all Xaa locations
  Clone ID: PAT_MRT3847_117685C.1.pep
NXLALIWXNXXFNNVHTKMEXKRYNLHLYXXSXFXXPCGXXXXXTCGGLSFXTQQFXICXXXHXYIXKVPTQSKYXXKITXSRL

SEQ ID NO: 162422 - protein, 288 aa, Glycine max
  Clone ID: PAT_MRT3847_117686C.1.pep
MLQTLGGVIPRFVSRSWLRNLTVRAMAFSSSSSDYGDQSRGGLPRFYSETLPPSKGSVIRVQGDEFWHMTKVLRLTTNDRVQFFNGKGSLVEGCIQSIDRTGLDFVALNDLISIPPQNTQLHVFAGFGTLKGGRADWLVEKCTEFGANSVTPLLTEHSPSISENRVDRLKRVILAASKQSQRLHEMVLKHPIEIDDLLHLIAQSKLSLVATAKATPVLSALASLEKETSGLIIIGPEGDFTEKEVSMMMEAGATAVSLGPHRLRVETATIALLATVMLWSDSQQISVC

SEQ ID NO: 162423 - protein, 172 aa, Glycine max
  Clone ID: PAT_MRT3847_117687C.1.pep
MVLSDLEICKPTSSSHNKVGISRSGRDLPPAHYLFKIESYSELMNTGVEKYETNVFQAGGYKWRLILYPSGNIKSNGNGYVSLYLAIADTEKLSSGWEVDVNFKLFVFNQKNNNYLTIQDADGTVRKFQEMKTEWGFEQLISLETLLDSSNGYHVEDSCLFGAEVFVISHSG

SEQ ID NO: 162424 - protein, 73 aa, Glycine max
  Clone ID: PAT_MRT3847_117688C.1.pep
LSSHCCPKGIYFLSNCQKWFSALKRYLAASAFLSLSMTCRRRIVQRTLSTFVFQCGFHLLEKRDYAGVNRARV

SEQ ID NO: 162425 - protein, 299 aa, Glycine max
  Clone ID: PAT_MRT3847_117689C.1.pep
KLGIRLEHRVCVRWIRVLYSNFARFCKDQEYLISLHGKAARERFDYVEGFVIVDEGLINNWRSSFFAASNPVKITSLNADGGVLYCLEITKNYDQGNADSVDEEIQALLKKLNFIPTSVFTTDLPYVDFLDRVHKAELKLKSKGLWDVPHPWLNLFVPKSRIEDFDKGVFKGILGNKTSGPILIYPMNKNKWDHRSSVVTPEEDVFYLVAFLRSALDTETLEYLTNQNRQILRFCHDSEIKVKQYLPHYTTQQEWMDHFGDKWTQFNARKMQFDPRRILGTGQQIFQFHPSLTPNKDDM

SEQ ID NO: 162426 - protein, 68 aa, Glycine max
  Clone ID: PAT_MRT3847_11768C.1.pep
CLYSKHTEIYTFFYFSSGRNEVIHFDKKNTVICFSTCLRQNVNQLTLWQSSPNVLPEVFKFIPPNRFH

SEQ ID NO: 162427 - protein, 504 aa, Glycine max
  Clone ID: PAT_MRT3847_117690C.1.pep
MGARCSKFSLCWWPSHLKSNLHNLSDNGDFPFPTSQQQKDDDGKRDENDPRGGFSEYSLDQLRVATSGFSPDNIVSEHGEKAPNVVYRGMLEDDRLVAVKRFNKSAWPDSRQFLDEARAVGQLRSERLANLVGCCCEGEERLLVAEFMPNETLSKHLFHWEAQPMKWAMRLRVALYLAQALEYCSSKERALYHDLNAYRILFDQEANPRLSCFGLMKNSRDGRSYSTNLAFTPPEYLRTGRITPESVVYSFGTLLLGLLSGKHIPPSHALDLIRGKNFLLLMDSCLESHFSNDDGTELVRLASRCLQYEPRERPNVKLLVTALTPLQKETSVPSNVLMGIPDRSLSSKETVSLTPFGDACSRRDLTAIHEILEKIGYKDDEDVANELSFQMWTNQIQETLNSKKQGDSAFHARDFSTAIDCYTQFIDGGTMVSPTVYARRCFCYLMNNMAQEALGDAMQAQSISPTWPIAYYLQAAALFSLGMDHDAEESLKDATTLETRKYRN

SEQ ID NO: 162428 - protein, 68 aa, Glycine max
  Clone ID: PAT_MRT3847_117691C.1.pep
KITKKKKSNKYISINKIKKNKPKIIIHDLKFQKHKEDQGKSTVSPNGKKFSHHKAFTPRLIPRIRNPP

SEQ ID NO: 162429 - protein, 141 aa, Glycine max
  Clone ID: PAT_MRT3847_117692C.1.pep
MNATTHQDNSEYNVENLIDVIMRTLNLLKVEMILPSEANITDCIRYGDPKYQTIDVRMVLDAAIQQGRLAKRVCGPMHLYLARNDTLWNCVNHMGGHPCDFPQETWDRVKQFLTSSSGRSLMLTSRCRYTYVFVSLVVLKG

SEQ ID NO: 162430 - protein, 39 aa, Glycine max
  Clone ID: PAT_MRT3847_117693C.1.pep
LRGRFQFPVEVPLYRAKNDAPQSMLCFSLKLHSRKVFSS

SEQ ID NO: 162431 - protein, 72 aa, Glycine max
  Clone ID: PAT_MRT3847_117694C.1.pep
DWYSLRISFASLGFFDDFLFSSLFSYFACLSELSLSDFVHVCLIPCLCSVLFQCQRDFPFLPFCYECIGFLS

SEQ ID NO: 162432 - protein, 113 aa, Glycine max
  unsure (1)..(113): unsure at all Xaa locations
  Clone ID: PAT_MRT3847_117695C.1.pep
MALPTNLKFFCVFLLVLILYSSSFLASAVDPKAEDEEFTFAEGSIKGPKNWGQINPKWKVCGDGKLQSPIDLSDQMAQELPQLGKXDKVYKPXSCCLINRGHDIMPAWNGMPA

SEQ ID NO: 162433 - protein, 109 aa, Glycine max
  unsure (1)..(109): unsure at all Xaa locations
  Clone ID: PAT_MRT3847_117696C.1.pep
ASADLPSTHSLKGMIEMEGTVGIPXENTLXIGIRHCSVCNRXFRGRAIIDIHTICYQDCXLWYSASTQATTVRFNAIPGYDAWRLELLKRTGAHXDIIWVTGCTATPLP

SEQ ID NO: 162434 - protein, 96 aa, Glycine max
  Clone ID: PAT_MRT3847_117697C.1.pep
MEGLSNGGPFLCWPYFTGPFFNKTYLCDELKVGLGLNSDENGLVSRWEIKKKLGPLLSNGQIRARCLELKETGMNNIEEGGGSSKNISRFVNWLKS

SEQ ID NO: 162435 - protein, 119 aa, Glycine max
  Clone ID: PAT_MRT3847_117698C.1.pep
NVFVCVCMQSSCVFYMYNCIKAYEWYPMFKSKIMLNRSIGPPKISAFSWRLLQDRLHTCLQLHRRRGYFINLCNNLADYENITRRPTFFLSWSSPSIYWNAVINWLILNYCYFQKTSIL

SEQ ID NO: 162436 - protein, 87 aa, Glycine max
  Clone ID: PAT_MRT3847_117699C.1.pep
NNHSYLVFPPPPRPVKKPRAPNQRSTIVITTKPHPPLSVTPATPSVNLKGAILSLSISEFITLVLFGAPFHAIILETLLPPFILSVT

SEQ ID NO: 162437 - protein, 60 aa, Glycine max
  Clone ID: PAT_MRT3847_11769C.1.pep
VLWVAPVDNASLWSQLHYVSRDDLDMLEAPPVNRVNLQRAIDPQIQQKDAHCTWRDVSRM

SEQ ID NO: 162438 - protein, 133 aa, Glycine max
  unsure (1)..(133): unsure at all Xaa locations
  Clone ID: PAT_MRT3847_1176C.1.pep
SAANYALNIRTVTNPNTHTSSPNXMPFLTLYCRHYAHLIGTQPPGTRPSGESYLGNYAVPVTMLASNRDLYFMGIFVKFTVGYLIYTVNPFTNACFDLSSNLFRSLRSFSLGATVSPPPPQRRRTSYSDDGKP

SEQ ID NO: 162439 - protein, 36 aa, Glycine max
  unsure (1)..(36): unsure at all Xaa locations
  Clone ID: PAT_MRT3847_117700C.1.pep
LSPAPSLLRRHLITNRXNXFXFEXAXAXIPSHKFTL

SEQ ID NO: 162440 - protein, 101 aa, Glycine max
  unsure (1)..(101): unsure at all Xaa locations
  Clone ID: PAT_MRT3847_117701C.1.pep
MARPSYPPLVDNSDSDAEGRLPKAEERFLDAIEELQRRQRAAAGHAQKHCRVDSSTCDHGPNXSCVAHAIGNLCQTFLLYYGVRVCIXILHRAFKLVQGQS

SEQ ID NO: 162441 - protein, 90 aa, Glycine max
  Clone ID: PAT_MRT3847_117702C.1.pep
NLEICSQRCLLICSSYHFTMDSLLFDESVRLQGNWKKIWALKVPPKVKHLIRRIQRDCLPSRVRLHAKGVQCPSTCAFCHNNLESLDVNM

SEQ ID NO: 162442 - protein, 34 aa, Glycine max
  Clone ID: PAT_MRT3847_117703C.1.pep
RSPQINQSTMVCFTLQISLVLLLLLYAMTFHTTY

SEQ ID NO: 162443 - protein, 84 aa, Glycine max
  Clone ID: PAT_MRT3847_117704C.1.pep
GPPKRLIKLGNRSKKSLSFCPKLRGLLFFLIMGTVPNLGRVKPPFSSNQESPPFLFISVALLFPASGKFDPFLVVQNLNLRASP

SEQ ID NO: 162444 - protein, 199 aa, Glycine max
  unsure (1)..(199): unsure at all Xaa locations
  Clone ID: PAT_MRT3847_117705C.1.pep
HFLSSIWGKPFTLCLCSLRWLLLXRACFAISSSKLTECQLTNLNALEPDHPXESEGGLIQTWNSQHPELKCAGVPGSKLTPNRNGLLLPSYSPYPRVIIMAQRKGGLGAALPRWPETIEEPQELSNRGGSWLQKRXLPDRHQMMRHLXEGDVLVIPPDGPYWTYNTGDEPLGAIRLLDTFNLPNXPWGQTPRVFYLGSE

SEQ ID NO: 162445 - protein, 81 aa, Glycine max
  unsure (1)..(81): unsure at all Xaa locations
  Clone ID: PAT_MRT3847_117706C.1.pep
VNNLIGLVXWYHKNGVLTPISYQXLNXPIXLLCYRTXLXIXKFSGKXLNHXYMXLXPTTSGPEVSALXXXNWAYRPNIGRX

SEQ ID NO: 162446 - protein, 36 aa, Glycine max
  Clone ID: PAT_MRT3847_117707C.1.pep
MGSAALIPGRVMKQRAEIPVRAWVQDKGVAPKMPKN

SEQ ID NO: 162447 - protein, 75 aa, Glycine max
  unsure (1)..(75): unsure at all Xaa locations
  Clone ID: PAT_MRT3847_117708C.1.pep
TKVSYILNFQDIFKFWTNIYVLHINFFILTKLFIVMLVXEXXXLYCLCIQPMIMNXIMRXFLKKPKLFTNIDSIX

SEQ ID NO: 162448 - protein, 73 aa, Glycine max
  Clone ID: PAT_MRT3847_117709C.1.pep
VGVNNDYSQVAGMTLIMHSPNRSHHRYTWCASWSGSAFIPWVGKHPSRGPPLFFFICTWVKVEVLPWPVFFPL

SEQ ID NO: 162449 - protein, 43 aa, Glycine max
  Clone ID: PAT_MRT3847_11770C.1.pep
FYYGCWPAKKFNGKGRLIEVPDNSNKPLGLGVWGKTQLNCFSN

SEQ ID NO: 162450 - protein, 67 aa, Glycine max
  unsure (1)..(67): unsure at all Xaa locations
  Clone ID: PAT_MRT3847_117710C.1.pep
MTQAFFVRLEIVLVEVVMPGLMSSXTEFGPSXLFKGARITGFLHMTIQTCVLIETLTALCAEVLWCS

SEQ ID NO: 162451 - protein, 79 aa, Glycine max
  Clone ID: PAT_MRT3847_117711C.1.pep
LPPSLHKNSPHSSLQSLKFFILYIHTHTHTQLHKKRQLKLYKKGKGILPTDSCTRENKKNKAKLHKEIKAWLDGAITST

SEQ ID NO: 162452 - protein, 67 aa, Glycine max
  Clone ID: PAT_MRT3847_117712C.1.pep
QYSATLVIPGASPICCQNVSSLYCMYFLVNKVYLSFLLGAFSLFSLSLLQALQSLCCKKYLSLFFSL

SEQ ID NO: 162453 - protein, 99 aa, Glycine max
  Clone ID: PAT_MRT3847_117713C.1.pep
MDLYGRSPARNGPNPVNQPEWSSPGTDTALEESMWHLTLGGGESYPERSGVPNCVYYMRTGVCGYGGRCRYNHPRDRAAVAAAVRATGDYPERVGEPPC

SEQ ID NO: 162454 - protein, 74 aa, Glycine max
  Clone ID: PAT_MRT3847_117714C.1.pep
MKWVSILTLLLLSHSPLTIFAKDGLVANGDFEATPINGVPHYAIVEGPITVPNWKSHCNGELEESWQKQAGMIL

SEQ ID NO: 162455 - protein, 67 aa, Glycine max
  Clone ID: PAT_MRT3847_117715C.1.pep
RLVLDQARSTCDVTWDARAQSYKGTSTAAASSGSKKPTEAAWGSKEAYLLGEGGFGRVDRDLCQRKE

SEQ ID NO: 162456 - protein, 346 aa, Glycine max
  unsure (1)..(346): unsure at all Xaa locations
  Clone ID: PAT_MRT3847_117716C.1.pep
MNNSSSSSSSSSILIQLLFSSPPAWATLIAAAFLLLTLTLSMYLLFEHLSAYKNPEEQKFLIGVILMVPCYSFESFVSLVNPSISVDCEILRDCYESFAMYCFGRYLVACLGGDERTVQFMERQARLSVKAPLLQLSSSDKAIVNHPFPLNYFLKPWKLGRAFYQIVKFGIVQYMLTKAFTAILAVILEAFGVYCEGEFKAGCGYPYMAVVLNFSQSWALYCLVQFYTVTKDELAHIKPLAKFLTFKSIVFLTWWQGVAIALLSTFGLFKSPIAQGLQFKSSVQDFIICIEMGIASIVHLYVFPAKPYERMGDRFSGKRSVLGXYSADCPLDPDEIRDSERPTKLR

SEQ ID NO: 162457 - protein, 101 aa, Glycine max
  Clone ID: PAT_MRT3847_117717C.1.pep
TPKTARVCNGGGGFFARGCFSPPPPLGSSPHGTGTLWFWKRPQPGKWKVREREKRLGFGKFQVWLGQAKAKKEKVEKIKIFKCYKGFFDQGHGGLGKGTIT

SEQ ID NO: 162458 - protein, 128 aa, Glycine max
  Clone ID: PAT_MRT3847_117718C.1.pep
ILISIKKKKGREQNRQQHRRGHNLPWKLKQKTNKEPKRKVYLCPEPTCVHHDPSRALGDLTGIKKHYSRKHGEKKWKCEKCSKKYAVQSDWKAHSKTCGIREYRCEYHPLHVVFDQPVVCSCMDAWVG

SEQ ID NO: 162459 - protein, 284 aa, Glycine max
  Clone ID: PAT_MRT3847_117719C.1.pep
MASPSIFNSESDEDSWVIQINQLVSETNLSILNKMPVCIYQVPKSLSCAKPEAFSPQLIAIGPYTHFHPDLYPMERFKVFAAKGVLDHFKKHDFKQLIEQLRSTGQFIRASYHKYLDFKEDTLLYIIAIDGLFLLDFFHNYLNEEVSGSFMTGLQDQVQLSGVKLTKDAIIRDIIMVENQIPTYILVRILVLESSKPADSVLEFLGSMLLSFCKKHSPLKVTHIPTDSEAVSKHYHILDLMYHLVVSHPEKSETPTTPDQSEGMSTLRRSSKSKFCTAASNHFG

SEQ ID NO: 162460 - protein, 273 aa, Glycine max
  Clone ID: PAT_MRT3847_11771C.1.pep
MEEKYSSLEIVEESPNSGVFFLILNRPSRRNALSREFFSEFPKALHALDHNPEVKVIVLSGAGDHFCSGIDLSLLGSTAASSGSSGSGETLRREIMAMQDAVTALERCRKPVIASVHGACIGGGIDIVTACDIRMCSEEAFFSVKEVDLALAADLGTLQRLPLIVGFGNAMELALTGRTFSGKEAKELGLVSRVFLSKHDLHQAVRDVAQAIATKSPLAVVGTKTVLLKSRDLTVDQGLDYVATLNSARLLSPDLTEAVMAQKQKRKPVFSKL

SEQ ID NO: 162461 - protein, 460 aa, Glycine max
  unsure (1)..(460): unsure at all Xaa locations
  Clone ID: PAT_MRT3847_117720C.1.pep
MEQKGSVLMQRYELGRLLGQGTFAKVYHXRNIITGMSVAIKIIDKEKILKVGMIDQIKREISVMRLIRHPHVVELYEVMASKTKIYFVMEHAKGGELFNKVVKGRLKVDDARKYFQQLISAVDYCHSRGVCHRDLKPENLLLDENENLKVSDFGLSALAESKCQDGLLHTTCGTPAYVAPEVINRKGYDGIKADIWSCGVILYVLLAGHLPFQDTNLMEMYRKIGRGEFKFPKWFAPDVRRFLSRILDPNPKARISMAKIMESSWFKKGLEKPAITVTENEELAPLDADGIFEACENDGPIAEPKQEQAKPCNLNAFDIISYSTGFDLSGLFEDTFLKKETRFMSKKPASIIVLKLEEICKRLCLKVKKKDGGLLKLEGSKEGRKGTLGVDAEIFEITPHFHMVELRKSNGDTMEYQKLFKQDIRPALKDIVWTWQGEKPQQEQEQHEVVQEEHQPSHTA

SEQ ID NO: 162462 - protein, 173 aa, Glycine max
  unsure (1)..(173): unsure at all Xaa locations
  Clone ID: PAT_MRT3847_117721C.1.pep
CQNAMLHPPSCPCFRCYDNKRRGPVPAPAAFGNSRFPHTPNDSMLYRHEIPGAVGPHVHNARTAIPAVSLHEKQLHTRWPRDYNSEMGGFVGSRPRKVVPGSGGRHCLPIAGGSPFITCHICYELLQLPKKTLVMVKNCQQKMRCGALSXKIKFAVIDKKLVFSPHHNRGNYP

SEQ ID NO: 162463 - protein, 105 aa, Glycine max
  Clone ID: PAT_MRT3847_117722C.1.pep
MKTWEAPVVDLDGRCGATFSTGAQALPIRSTLHVAFYQFTQHNLAPCKPVLTPAASIATLLLMGSIVIPDELVTLRASNSGDETVDRNDIDCVPEHFPINKVACI

SEQ ID NO: 162464 - protein, 58 aa, Glycine max
  unsure (1)..(58): unsure at all Xaa locations
  Clone ID: PAT_MRT3847_117723C.1.pep
TSASEYEGHPGLLCDHMMXADLRAGSQHDPRSQGGXETCAKTNEAMCFGETTIKDCVD

SEQ ID NO: 162465 - protein, 47 aa, Glycine max
  unsure (1)..(47): unsure at all Xaa locations
  Clone ID: PAT_MRT3847_117724C.1.pep
EFELKVDRVQSLLYGFTRXSICDCWMMIRGHRFQMCVXRLIYLKTRS

SEQ ID NO: 162466 - protein, 97 aa, Glycine max
  Clone ID: PAT_MRT3847_117725C.1.pep
YVDLLAKWPLWLSPLSEYSFWSIVHIGWLLQPHSISASIFIKLLASPVNSSVYTLIHLSPYVHRSPRTPWPDPPWIAMSTFCSQDVSNLFQFGKTPR

SEQ ID NO: 162467 - protein, 75 aa, Glycine max
  unsure (1)..(75): unsure at all Xaa locations
  Clone ID: PAT_MRT3847_117726C.1.pep
FGLEFPPQVKGGPSEILDPIKTWSNKKAXKETHFMLAGLFKNIFXTFTNYKIGKGNTHLSKKIFASGPIFLNNVI

SEQ ID NO: 162468 - protein, 82 aa, Glycine max
  unsure (1)..(82): unsure at all Xaa locations
  Clone ID: PAT_MRT3847_117727C.1.pep
DWVSSQDYGATAVCEHLVSWELKASADSCSLLGDAHLIERERXSALAAMEDMRAGGSEPSKEMLEEVIQRCTRHLDSERDAR

SEQ ID NO: 162469 - protein, 70 aa, Glycine max
  Clone ID: PAT_MRT3847_117728C.1.pep
GSRDGELLILFCSFPCHGRLIPMFEKRRAFKWMRCPVNRRDHFSALCHYKNGPWGVIQTLCLHCLDSEIS

SEQ ID NO: 162470 - protein, 76 aa, Glycine max
  Clone ID: PAT_MRT3847_117729C.1.pep
MCAAVVVALLLVAEVGPMADAVTCTPTDLSPCFPAFTFGAKPSNACCTKLKLLKPCLCGYLKNASLKQYVNSPNAR

SEQ ID NO: 162471 - protein, 124 aa, Glycine max
  Clone ID: PAT_MRT3847_11772C.1.pep
LCTKTERGFSSSMVFTLHSTYGNSFFSKRNIASTHIPSLVLNNYLDFYATDTASSRPGSLLRGSLKTRSPGGPLTRREAGPPHSGSERRDVNISPSESEPRNTHTGIHPPLPCTTARMPRLRSS

SEQ ID NO: 162472 - protein, 66 aa, Glycine max
  Clone ID: PAT_MRT3847_117730C.1.pep
DKDPNNIYIIQMHQINYILNNVPTHPDNSFLKRMQKIASLLLQGTIDILYLHLAYMAYRFTVTGNN

SEQ ID NO: 162473 - protein, 78 aa, Glycine max
  Clone ID: PAT_MRT3847_117731C.1.pep
FFPFFFFFNLKILPFPLFFVWVLPLKNQPLIFPFVPTFSFRGTILIFFSMFQKKKKKKKKKKKKKKKKKKKKKKKKKT

SEQ ID NO: 162474 - protein, 70 aa, Glycine max
  Clone ID: PAT_MRT3847_117732C.1.pep
EKHHNIFTTDNNFLQAGQKITHSHPLSLANKSEINTFIARGNYAYVLLLVGVDYKVHPSKPHKRKDHMED

SEQ ID NO: 162475 - protein, 63 aa, Glycine max
  Clone ID: PAT_MRT3847_117733C.1.pep
ECLGVSSTDERLHIYIYMYIDMDIYIYISIWVYHRSIVAEQKKFILKGSLFSTHVPCIYYSVG

SEQ ID NO: 162476 - protein, 59 aa, Glycine max
  Clone ID: PAT_MRT3847_117734C.1.pep
KKKKKKKKKKKKKKKKKKKKKKKKKKKKKKKKKKKKKKKKKKKKKNKKKIKKKNKLKKT

SEQ ID NO: 162477 - protein, 51 aa, Glycine max
  Clone ID: PAT_MRT3847_117735C.1.pep
PTRPPTRSPTRPKKKKKKKKKKKKKKKKKKKKKKKKKKKNKKKKKGDLIKG

SEQ ID NO: 162478 - protein, 115 aa, Glycine max
  Clone ID: PAT_MRT3847_117736C.1.pep
MASKSIACIVLLSLNLLFFTMVSPNTIAPSPAIQPPPPPRECPELGLCLDILGLGQGSPSKDCCPILRGLIEVGAIVCICDKLRSATLGINIDVNLALVLMLKFCGHNESNLICN

SEQ ID NO: 162479 - protein, 129 aa, Glycine max
  Clone ID: PAT_MRT3847_117737C.1.pep
MAPKRVQCCISVDIDAVAGWLGSYGGEDSTSDISRGLFAGTIGVRRLLKLFSKYNIKTTWFIPGHSLETFPEECRMIVDAGHEIGLHGYSHENPIAMTFEQQTAIMDKCYKLIKEFTGKPPRGIVAPWW

SEQ ID NO: 162480 - protein, 108 aa, Glycine max
  Clone ID: PAT_MRT3847_117738C.1.pep
IIKKKKLKKKEKKKGKKEKKGKKEKKKKKPKKKKKKRTKKEKKKKKKNQKKRKKGKKKEKKKNFREEGGKKRAKPKTRRGTRNPKTEKKKSGGKGGKKGATGGGRGER

SEQ ID NO: 162481 - protein, 211 aa, Glycine max
  Clone ID: PAT_MRT3847_117739C.1.pep
VEEQQQQMTLQSLRTMVDAERSYHQHVLVILEKLYTEIIEERQPKEATSFPLPKDGYNQPADENANSNGIDYKHNSQTGTYFFAKVIHPFDAQAEGELSLSVDDFDRQPKEATSFTLPKDGYNQPADENANSSGIDYKHNSQTATYFFAKVVHPFDAQAEGELSLSVDDFVVVRQVGPNGWSEGECKGNAGWFPSAYVERQDMIPASKITE

SEQ ID NO: 162482 - protein, 36 aa, Glycine max
  unsure (1)..(36): unsure at all Xaa locations
  Clone ID: PAT_MRT3847_11773C.1.pep
XKXDIHHLVFGGXATLAAGRLVAENXILKVNNFIGC

SEQ ID NO: 162483 - protein, 137 aa, Glycine max
  Clone ID: PAT_MRT3847_117740C.1.pep
RLVDLDLSNTRLSGSIPEALGAMKVLSTLKLDSNRLSGSIPASLLGSGISELNLSHNYLEGNIPDSFGGSSYFTLLDLSYNNLKGPIPKSMSSSSYVGFVDFSHNHLCGPIPSSYSDADASSFDYNDCLCGKPLKAC

SEQ ID NO: 162484 - protein, 129 aa, Glycine max
  Clone ID: PAT_MRT3847_117741C.1.pep
RCPFPITNMPSRVFFLEPNSHAQTCTIGTCRPHSGSVFHASGTLHCLHSLCNLNFRCIVFGCCRFCSCFLWCLLELLKNLNLRPCFQTSHFPGRSWTIPITLHGLPTFSFGLVVKGTKSTSLLLLILYQ

SEQ ID NO: 162485 - protein, 73 aa, Glycine max
  Clone ID: PAT_MRT3847_117742C.1.pep
SGFTRDTPREAAIIDLSPDMVMDNLYEPVFAHDETMWHLVTNMSVWNHPCHQQTLCAPPSSLCYQLSHAVWAT

SEQ ID NO: 162486 - protein, 338 aa, Glycine max
  Clone ID: PAT_MRT3847_117743C.1.pep
MTKENARGTAYSGPTNGEYVKENQSSFSVKGDSQVDGICFNNGAKNSFKDSDEKVEWETFKSSLFESTEEMQSLHQSSDIEHGKSTRNKDFSPCTQYNNNYNFCSDVTGVSRSQEACRRQLSNTGSTLKSKDGNLFDLNYESAYVDEGQVDCDGLASNDQDCGLTASNEKDIINEREKLKETDEYKQAMEEEWASRQRQLQIQAEEVQRLRKRRKAEKRLLDMQRRQKERIEEVRETQKKDEEVMNLKEQLRVEIQKGLNQLEMRCHDMPSLLRGLGIQVGGSFIPLPNEVHAAYKRALLKFHPDRASKTDVRAQVEAEEKFKLISRLKEKFGMTSCH

SEQ ID NO: 162487 - protein, 45 aa, Glycine max
  Clone ID: PAT_MRT3847_117744C.1.pep
AHYPGHVVPTGSLGLVRDTCPLLPLCVLDRLMEAMPAVRSATQRN

SEQ ID NO: 162488 - protein, 176 aa, Glycine max
  Clone ID: PAT_MRT3847_117745C.1.pep
MEQPPKPETVPESHVPNGHSTTTTATTTVTNGSGSELESQVPKERAASSSGSTKKSVHWSPELVTESTFTSSPRESRSNPYFSTSSSFSQPPPTFMETVVTVRNVLGRWGKKAAEATKKAESLAGNTWQHLKTSPSFAEAAMGRIAQGTKVLAEGGYEKIFLNTFETVPEERLLNS

SEQ ID NO: 162489 - protein, 75 aa, Glycine max
  Clone ID: PAT_MRT3847_117746C.1.pep
VSTGHSGVTPCYSGYHLVGTKVIHPLNSTLAVGTISASITFLVRSAPAVHTRASTRCIHHTILHKSKVLALPVHW

SEQ ID NO: 162490 - protein, 178 aa, Glycine max
  Clone ID: PAT_MRT3847_117747C.1.pep
LEAPSNPSNMHVKGSSSDVFRVSVSCAPSTSSHGSAPDDYDALGDVYIWGEVICENVVQVGAEKSASYSSPRTDILLPRPLESNVVLDVLQIACGVKHAALFTRQGELFTWREESGGRLGHGVAKNVDQPRLVEAMASTTADSCACGEFHTCADSMAAELYTWGDGTHNAGRFGHGTD

SEQ ID NO: 162491 - protein, 87 aa, Glycine max
  Clone ID: PAT_MRT3847_117748C.1.pep
SFFFFFFFFFIFFSTFFFPFFFFNNTHRGSNQENPTRTQNWHQLSLWGGRLNFGVRMKIPPPGGKINSADITEEPTGRSPNCKSRGV

SEQ ID NO: 162492 - protein, 42 aa, Glycine max
  Clone ID: PAT_MRT3847_117749C.1.pep
QILTIDLGGITSIDKKNVLEFARSQIKVTNQEVIIYTNIFFL

SEQ ID NO: 162493 - protein, 45 aa, Glycine max
  Clone ID: PAT_MRT3847_11774C.1.pep
RSHAKTGAIIIKWHRCSQDFHVTKSPNPFPIKPNASQVTFVSLLQ

SEQ ID NO: 162494 - protein, 116 aa, Glycine max
  Clone ID: PAT_MRT3847_117750C.1.pep
CSSILLMEGHAIFKGSVPQNALNLVFIGSCFPIVPPFLKLPFAAFILKKGFPFFGCNFFVILFEFFFPMAQLCYPGNKKILNLFFVSHFFCFPLPPRMPFLCPPKIHASTLSWEVF

SEQ ID NO: 162495 - protein, 363 aa, Glycine max
  Clone ID: PAT_MRT3847_117751C.1.pep
MYSMDSSSSGSQFSQHPQLPPGFRFHPTDEELVVQYLKKKADSVPLPVSIIAEVDLYKFDPWELPSKATFGDQEWYFFSPRDRKYPNGTRPNRAATSGYWKATGTDKPILASHGHHNKVGVKKSLVFYGGKPPKGVKTNWIMHEYRLADSSSNSSSKPPSSASDHAHSGKKNSLRLDDWVLCRIYKKSNSTHLPRLPLMEQNKEISREISMLPMMSTLSMANDNNTPQDSKTASSRSTSYGPLGVENDDNFFDGIFGVDHQSMQQDVSDHSQQVSSKGNFPMKRELSSQFWNGTGSSSSSRRFHYDLNYAGNSTTVEEDNSFVSLLSHLPQNTTTFHPNALLGPVGNGVLRQQFQLPSMNWNT

SEQ ID NO: 162496 - protein, 225 aa, Glycine max
  Clone ID: PAT_MRT3847_117752C.1.pep
MEDSAAQKRKQREFALASVSEVSSAPSSASPGVSLFAGDRLQILNESRHVALNAYLSAIQLFRLGPIESVCMVEGSEADKQTLYSRGVTIQFRNDEESEAFHCVFQQWKKEVNAQEGNVPNGTITTSKSKFDEKIESSSAKMYFHYYGQLLHQQNMLQDYVRTGTYHAAVLENRTDFIGRVVVDVGAGSGILSLFAAQAGAKHVYAVEASEMAEYARKLITGNPT

SEQ ID NO: 162497 - protein, 354 aa, Glycine max
  unsure (1)..(354): unsure at all Xaa locations
  Clone ID: PAT_MRT3847_117753C.1.pep
MDSSSSGSQLSQHPQLPPGFRFYPTDEELVVHYLKRKADSVPLPVSIIAEVDLYKFDPWELPSKATFGDQEWYFFSPRDRKYPNGSRPNRAASSGYWKATGTDKPILASHGHHHKVGVKKSLVFYGGKPPKGVKTNWIMHEYRLADSNSNSSSKPPSMASDHAQSCKKNSLRLDDWVLCRIYKKSNSTNLPRLPLVEQNKELSMLPMRSTLSMANNNTSQDSKPTSSISTSYGPLGVENDDNLFDGILGVDHQSMXHDVSDSQQVSSKGNFPMKRELSSQYFWNDTGSSSSSRRFHCDLNYAGSSTVEEDNSFVSLLSHLSQNTTSFHPNALLGPIGNGVLRQQFQLPSMNWNT

SEQ ID NO: 162498 - protein, 107 aa, Glycine max
  Clone ID: PAT_MRT3847_117754C.1.pep
TSHLKMSSLYPCSDSVFLNGLVSKPSLSTGLKHRQPPGTTELRQKGASTSLRLFNLGQTATLVPHPYDKKLKMLENKACVFTYIPPDAIHAFKTGCVCVCVCVCVCV

SEQ ID NO: 162499 - protein, 95 aa, Glycine max
  Clone ID: PAT_MRT3847_117755C.1.pep
RPPARGPTLVQTEGQVRLRAIQEDKGWSGWPVRIRGPGAPESAQFQWMNGYEVELHSDDEDIHILLHRLVLNTNSVHASFVPLEMTSSFIRSHPQ

SEQ ID NO: 162500 - protein, 139 aa, Glycine max
  Clone ID: PAT_MRT3847_117756C.1.pep
MAATTATSAQVSKDYKDSNNGNPEITRHEIQAAIAKAVELRALHAALMRGNSPANARFPSPSPASRPVAHFSAQDYPVFTPSYEDDPLVGYNQNSMKSLTVSESWDGSMLEGGNNIDNIVADYKERSSSRKGICWFCQP

SEQ ID NO: 162501 - protein, 57 aa, Glycine max
  Clone ID: PAT_MRT3847_117757C.1.pep
MRFIKHFNEYDHHTFKETCVHLRFGPACASYLIPFVHLKLIRGLFSWKSLSINQETI

SEQ ID NO: 162502 - protein, 117 aa, Glycine max
  Clone ID: PAT_MRT3847_117758C.1.pep
QSPKMGKRRKATHFFFFFFGRGGKRTKHIPPLSKFPNLGKAHGPWGFPPQGPPQKNIGKAKNFLGRDQPISRPGKFKTKPNRGATFFDRPIKLAFNQVGGNPRAGVQQTGPHFHRKP

SEQ ID NO: 162503 - protein, 208 aa, Glycine max
  unsure (1)..(208): unsure at all Xaa locations
  Clone ID: PAT_MRT3847_117759C.1.pep
GSSICKKGFPFLQMAFHSPQSEMRNKKIPWWMRRTATLFPIYNNSSVLLSWFVGEEALALESXDEEIINGVSSTVSCFLQHSQWQKGSTSSHKLCNGNVNSEERSHHQNEVKFSKVMKSKWGTDPLFLGSYSYVAVGSSGDDLDTMAEPLPKDNSCQPPAASSPLQILFAGEATHRTHYSTTHGAYFSGLREANRLLQHYHCVGIYNN

SEQ ID NO: 162504 - protein, 98 aa, Glycine max
  unsure (1)..(98): unsure at all Xaa locations
  Clone ID: PAT_MRT3847_11775C.1.pep
IIMKKAHANKHQFAQRLXKLLEVPHISITTLLSHNLNPHSSLYQQISHTLDHRKLMPENIIVYLLSNILENVYVENETNVILHRCPRTIIQSEIVNHM

SEQ ID NO: 162505 - protein, 98 aa, Glycine max
  unsure (1)..(98): unsure at all Xaa locations
  Clone ID: PAT_MRT3847_117760C.1.pep
APSKVSTFSDFSPKPRVCGCXKNPTCSVSLNFLNDKLGSRNLSATCLTEPLTGAIPEPLREAKNXELAVATAPHASMTRQNYADKCEFATYHHLTAEY

SEQ ID NO: 162506 - protein, 34 aa, Glycine max
  Clone ID: PAT_MRT3847_117761C.1.pep
EYRHYDNFKQVTDDYTEDNYNTMIYKSTIRIFVG

SEQ ID NO: 162507 - protein, 53 aa, Glycine max
  Clone ID: PAT_MRT3847_117762C.1.pep
KMSNMIFLLDFNFLKSFIYIYIYLFYGLIHTHDIFLLHLFLFIYFFLFIALFF

SEQ ID NO: 162508 - protein, 50 aa, Glycine max
  Clone ID: PAT_MRT3847_117763C.1.pep
EKTTEGSLDKLNCRCHVPSFYQILYFVQCFLYVLVLGSLFFLWVVIKFKV

SEQ ID NO: 162509 - protein, 138 aa, Glycine max
  unsure (1)..(138): unsure at all Xaa locations
  Clone ID: PAT_MRT3847_117764C.1.pep
KRYQVKVKRRREGKTDYRAKIRLLTXDKNRYNTPKYRSVGRFSDKDIAAHIITASIAGDIVPAAAXAHELPRYGLEVRLTNDAAAYCTGLLLARRVLTTLETDEDDEANVEATGEDYSEEPAESRTTFRAILDVGLIR

SEQ ID NO: 162510 - protein, 122 aa, Glycine max
  unsure (1)..(122): unsure at all Xaa locations
  Clone ID: PAT_MRT3847_117765C.1.pep
MVVAIRPAKNPVCVKGHVYCDPCRAGFETSASTYIAGAVIMSQCKITASNDVVYTKNAYTDSTGADTIXVDDDHADQICSAKLENSPHSQCMEVTLCRDEAVVILTRYNGIACNDRFHNAIG

SEQ ID NO: 162511 - protein, 72 aa, Glycine max
  Clone ID: PAT_MRT3847_117766C.1.pep
SGRRIHSDTHKQTMAGATNWLTFSLTHMEMQQFGPYDTTTHSHCFNDSNFYGWTNSKSVMDSQSETNNFAVQ

SEQ ID NO: 162512 - protein, 78 aa, Glycine max
  Clone ID: PAT_MRT3847_117767C.1.pep
RLFALFGHPAESVRDTVAMIMRSIAEEDAIAAESMRDASLRDGALLRHLLHAFFLPSGERREVSRQLVALWADSYQPA

SEQ ID NO: 162513 - protein, 211 aa, Glycine max
  Clone ID: PAT_MRT3847_117768C.1.pep
FDFGAVGFIERKKLEAKMMQSLMSMKAYVGTRLPILTNSETSTRKQRVNCPNRRNVMVSCGSERNGNEGIGSNSGSFMSPSHNYAILKHRMEKAAKSEYYEEASRIRDSLKCFEDEIPVLRLRRLLKEAVADERFQDAARYRDELKEIAPHSLLKCSSDATTLGIRVQVKSAYIEGRSQPSEEVYSFEYRIKITNNTNPACSTSQKALDYI

SEQ ID NO: 162514 - protein, 192 aa, Glycine max
  Clone ID: PAT_MRT3847_117769C.1.pep
YYEEASRIRDSLKCFEDEIPVLRLRRLLKEAVADERFQDAARYRDELKEIAPHSLLKCSSDATTLGIRVQVKSAYIEGRSQPSEEVYSFEYRIKITNNTNRPVQLLRRHWIISDANGKTENIWGIGVVGEQPAIFPRSSFEFSSTCPLSTQNGRMEGDFEMIHVDRVGSRAFNVAIAPFSLSLLGDGDGETT

SEQ ID NO: 162515 - protein, 114 aa, Glycine max
  unsure (1)..(114): unsure at all Xaa locations
  Clone ID: PAT_MRT3847_11776C.1.pep
NKTTQGEGEERTGIPGTTAEEAHNKQRAEPEKSAPTKAGTESPKXEKPTRRQNNDKPKTRRYTTPPTEPNHEARQKPPNNARHTTKKRDKPSRQGGTNPNPMERTGPAKRKLSK

SEQ ID NO: 162516 - protein, 86 aa, Glycine max
  Clone ID: PAT_MRT3847_117770C.1.pep
MATVPVNPKPFLNNLTGKPVIVKLKWGMEYKGYLASADSYMNLQLANTEEYIDGQFSGNLGEILIRCNNVMYLRGVPEDAEIEDAE

SEQ ID NO: 162517 - protein, 52 aa, Glycine max
  Clone ID: PAT_MRT3847_117771C.1.pep
PRVRLAAGVDTHQNGYVPLPMETFNTYVHKEPNGVAALITPCNLLRRTIFIN

SEQ ID NO: 162518 - protein, 63 aa, Glycine max
  Clone ID: PAT_MRT3847_117772C.1.pep
NYQVSASKAQERELPACLDLLDEQTPFLRFPKWPSECGWCRHLQPYILGRERHFRLEVERPEY

SEQ ID NO: 162519 - protein, 92 aa, Glycine max
  unsure (1)..(92): unsure at all Xaa locations
  Clone ID: PAT_MRT3847_117773C.1.pep
KSPNSGTSVQAPELGFLHPREESHKQCNNGYRMAATSSTGDQSDVKLSIFRPRPFDXTQITRGTSXFPRTHVKLKWSKNLYLASLCNARTGR

SEQ ID NO: 162520 - protein, 37 aa, Glycine max
  Clone ID: PAT_MRT3847_117774C.1.pep
HWLCRHNDGYVYMSVKFFLIRCRDCQSVFKVCTWKTA

SEQ ID NO: 162521 - protein, 53 aa, Glycine max
  Clone ID: PAT_MRT3847_117775C.1.pep
IAFTPCVLKLLLTTVETNRKNHSNIFHTLVFFYFFLDYIRYSSSFFSVLLLLC

SEQ ID NO: 162522 - protein, 124 aa, Glycine max
  unsure (1)..(124): unsure at all Xaa locations
  Clone ID: PAT_MRT3847_117776C.1.pep
GSRSQLLALPTPTTLFCALMGIVKFGFYGFGSIGRLVARVALLXDVVELVAVNDPFITTDYMTYMLKYDXVHRHWKHHEVTVKVEKSLLFGDMAVTDVGHXNPVEIPWGSTGADIIAESTGVFT

SEQ ID NO: 162523 - protein, 458 aa, Glycine max
  Clone ID: PAT_MRT3847_117777C.1.pep
MGCASSKQKKCRRCNAPYSPAPRSYSMHVHHPPLAEGDSYHVVALTSTTLGTLKLNSPAPTQNFSGNCNHDFKLSNGKLGNAESFRFDSESFVQRLEEEKEKKSEVLEKDKKEEFSMGLIEAKTWSNMIEQKLPKVFPKTPIRTPPGEPETINTWELMEGLEDTTPFRSPIHFRSFSFDFNGGDDVGDGDLDVDVDPPKMSVVASPKPMWLLMTEEESRLNPGISDFDPEVISAFRKSLQQLSPDSPFHLRPEPGDQDKQGTKKGSSFEENDFVVDDVKVDDPCGKDKLLLYFTSLRGVRKTYEDCYQVRMILKGLGIRVDERDVSMHSGFKEELKELLGDGHGGLGLPRVFLGGNYIGGAEEIQRLHEDGKLEKLLGCCEKIEDSVGGDGVGGVCEACGDIRFVPCETCCGSCKIYYEGDEDENEEEYVDGEVGECGFQRCPDCNENGLIRCPMCCC

SEQ ID NO: 162524 - protein, 103 aa, Glycine max
  Clone ID: PAT_MRT3847_117778C.1.pep
MAQSSGKKLVEWLVAALLFIALLSGSAHAVAICNIDSSQLNLCRAAVTGQNPPPPDEKCCAVIRQANLRCLCSYKSILPSFGINPKNALALPAKCGLQLPPNC

SEQ ID NO: 162525 - protein, 80 aa, Glycine max
  Clone ID: PAT_MRT3847_117779C.1.pep
QIHKVWNCFIDCVCYDNLYPPKIMPILEKYWFTNPMNITPCKPHFVVHMLLMIMMAHLRPNREQEKLNHWRFFFPTIVPV

SEQ ID NO: 162526 - protein, 51 aa, Glycine max
  Clone ID: PAT_MRT3847_11777C.1.pep
LLYHSLYCLLVVALTLMFRAPPPPYPKLEVFLDGCKSYYHRVNESPPSCVD

SEQ ID NO: 162527 - protein, 162 aa, Glycine max
  Clone ID: PAT_MRT3847_117780C.1.pep
DLLTFYHSNCSSLSLLGRVRLSSRGVNVTVGGNLSSLEIHIEALKAYNSLFHDTDFKLANCHQPLNDKVAQECGFTSLSIRIVDELVTLSSHPLLKSPDISNAGKHLSALDFHSSLHNTNRESPENDLVLLDARNLYETRIGKFHVPNIETLDPQVRQYSDL

SEQ ID NO: 162528 - protein, 97 aa, Glycine max
  Clone ID: PAT_MRT3847_117781C.1.pep
RHKSPHFTRYNSLGRLRGGLGSIRPQSWLKWGKHCQQPIELFKTRFSLGHIGQPCPFLFYRFEWGKGEKGNLAIGAPGLFEQINNIGIFGDKSVIPF

SEQ ID NO: 162529 - protein, 50 aa, Glycine max
  Clone ID: PAT_MRT3847_117782C.1.pep
VPKFNLGFLGFYGGRQKATHLYFLLGLHTQADVAVPFLLSKIVLSRGIFN

SEQ ID NO: 162530 - protein, 110 aa, Glycine max
  unsure (1)..(110): unsure at all Xaa locations
  Clone ID: PAT_MRT3847_117783C.1.pep
TPHPYSNIPHSTXFSNITPLFTPNTSNKIHHILFLIHNHXLLTYPFYNKPIFNTHXXXLITXNSKXXSFFSIXILPPNFIFSKTHQFLXXLTIISFSXPYTHIFTKTILX

SEQ ID NO: 162531 - protein, 57 aa, Glycine max
  Clone ID: PAT_MRT3847_117784C.1.pep
FGYISLFFLVFVVVKFWSVYCFFFFYQKIVTNTLSENIYSDYCNAIKCRKCSISREN

SEQ ID NO: 162532 - protein, 90 aa, Glycine max
  unsure (1)..(90): unsure at all Xaa locations
  Clone ID: PAT_MRT3847_117785C.1.pep
WFCLQEEYDTHDPKGPSSMVLQFLRKRSKIIEIVAARDIVFALAQSGVCAAFSRENNQRICFLNVSADEVIRSLFYNKNNDSLITXSVYA

SEQ ID NO: 162533 - protein, 70 aa, Glycine max
  Clone ID: PAT_MRT3847_117786C.1.pep
PLIKSCPLLTSVFSKLVCLAFMNQNSEALFCHLSVQKPWHDYVGLTDTMDVRCSDVLVSKDQENLLGKAS

SEQ ID NO: 162534 - protein, 42 aa, Glycine max
  Clone ID: PAT_MRT3847_117787C.1.pep
RTLVIRLLFTMFFLPLPFSDRHVLQALQILKSNKLVTTVFAE

SEQ ID NO: 162535 - protein, 99 aa, Glycine max
  Clone ID: PAT_MRT3847_117788C.1.pep
TRPKRLQRARNTLSSFLHFHFFHYTIQVPTSTKLLLCSNSLSPSIFLNFKFFLFYTIFSHQSQLYLIPLFSLIYCDFIGSFLTLRNKCGYNITLVYIIT

SEQ ID NO: 162536 - protein, 74 aa, Glycine max
  Clone ID: PAT_MRT3847_117789C.1.pep
KSGFNDLVPGWDSQPSKHPVSPDLPQEALLIKKFARLVAKIKFKNFKPDNKWPPISRKTQLVLDAVKASIQRGF

SEQ ID NO: 162537 - protein, 136 aa, Glycine max
  Clone ID: PAT_MRT3847_11778C.1.pep
MKKVVVKLNLHDDKAKQKAMKSVSSLAGIDSISMDMKEKKLTVVGEIDPVDVVSKLRKTWHPEIVTVGPAKEPEKKQEDKKDEGKKDDKKKDDDKKKDPNQQIEELVKLYKAYNPHMTTYYYVQSAEENPNACAIC

SEQ ID NO: 162538 - protein, 41 aa, Glycine max
  Clone ID: PAT_MRT3847_117790C.1.pep
QFIPKVQVCPHPTAVRDPIQSFLKFTCSGNGWQGQGGLGLN

SEQ ID NO: 162539 - protein, 152 aa, Glycine max
  unsure (1)..(152): unsure at all Xaa locations
  Clone ID: PAT_MRT3847_117791C.1.pep
YGEQTLYTNDLNPLWKLGFVNIQHAESRDRPWVEERYNFNSSGKHDLVGKVPRSLAEMENIHINGQGENLLLTSGDGQNHDYKGLMSPLFEDKLTDNSQYTVSDYLAGGFELNFMXAGDFTASNGNTSLPDNLHYMGPSGRPDAYHRALVEG

SEQ ID NO: 162540 - protein, 410 aa, Glycine max
  Clone ID: PAT_MRT3847_117792C.1.pep
MALSKDQRIPHDSSLSSKVQNCVFSETSVEITSMTVHRVNEYHKSVLEEEDGSQTTNGLSNDSAVTRSPPLCGSRKDYAYKGTNYQLEEAVSLIDFKGYSNILQASGSLLSFQQNKMVPLNCYLKDNGQKEYCVWENNLHQGHNHWNQTSPRSTRDMRLVENLNCFQTSSGYSPIVNNAKEKQHGQSSSGWLYSAPTIPNDISSLHKLGAQESVLQKRPSMGENMKAAKKQCSTESKTPKHKSSPSKDPQSVAAKNRRERISERLKILQELVPNGSKVDLVTMLEKAISYVKFLQLQVKVLATDEFWPVQGGKPPEISQVKEVIDVILSSQRERSSCSKIQEDINHANLSQYQRNYAAAIAGKNKSDKIINCNLTFLQIDNSRMSCYPRSSHDGPCNSLKVRVGYFLARF

SEQ ID NO: 162541 - protein, 125 aa, Glycine max
  unsure (1)..(125): unsure at all Xaa locations
  Clone ID: PAT_MRT3847_117793C.1.pep
EFGSSGKPGRRRLLNNNVLGHDYFDLPEWVDDQVGVRKLLHMTGRKRMAHVVVAKDGSGNFTTINEALNXVPKKNLWPLVIYVMVGVYYVFVEVSKNMTHVVMIGYGSKKAMDHRVNNLVDGVGT

SEQ ID NO: 162542 - protein, 80 aa, Glycine max
  unsure (1)..(80): unsure at all Xaa locations
  Clone ID: PAT_MRT3847_117794C.1.pep
NTTSSNRNASFTSLKSIAGYPTIKTNKHITFIASNGGRMQCMHVWPQFGKKKXENIYYLPDLEDAHXANEVXYLLTKGWI

SEQ ID NO: 162543 - protein, 179 aa, Glycine max
  Clone ID: PAT_MRT3847_117795C.1.pep
MAEVRSQQQQPQHVQVHATTTHTPQHHGGEGGSGILNLIPEMSLTGSQLLALLAGVPLGAMLLLLSGISLIASLLGLAVATPLFIFFSPLLVPAAFAIGMAVTAVLAAGACGLAGLVLFSWVVNYLRQMPRGTTMMTVLPEQAKRHVADMAEYVGQKTKDVGQDIQTRAHHAQGTTGMV

SEQ ID NO: 162544 - protein, 64 aa, Glycine max
  Clone ID: PAT_MRT3847_117796C.1.pep
GFFYLFFFLFLFFFFLFFWATISLFFIYKKIILSLTSPFFPPNKNLMNSFKTDFLPKNHVAPCI

SEQ ID NO: 162545 - protein, 101 aa, Glycine max
  unsure (1)..(101): unsure at all Xaa locations
  Clone ID: PAT_MRT3847_117797C.1.pep
XXXVXFVCXVEGRVXPVILLQXXXXCXLXXXXQXXXRXGXXXXXSAXSCILXXXGLVLPVGHXXXXXXLAXXXXYXXXXXXXXXXXXXLFXXPRXAYXSSX

SEQ ID NO: 162546 - protein, 84 aa, Glycine max
  unsure (1)..(84): unsure at all Xaa locations
  Clone ID: PAT_MRT3847_117798C.1.pep
MLMIDLHLLVPMHRGYTSMLRYRPRCGLLTFFLGXATALGXHAYNMSGEAWKESGMDATGALMGLTLKGISSTXNYNYGTLKED

SEQ ID NO: 162547 - protein, 49 aa, Glycine max
  Clone ID: PAT_MRT3847_117799C.1.pep
NCKVKFPRNDLLPSQQEPKRPNLMCYDTGICPLTLMSNFNMIILYVCLS

SEQ ID NO: 162548 - protein, 111 aa, Glycine max
  unsure (1)..(111): unsure at all Xaa locations
  Clone ID: PAT_MRT3847_11779C.1.pep
SSLAPEMLGKARLINXDTALPXFRTGVFPPAXTYNYWANSYTLVRVEMALMVITXHIKFQDXPNALSMGKQYXLRLDKGLGSSGEPAYPGGPFYNPLGFGKDEKSLKELKL

SEQ ID NO: 162549 - protein, 172 aa, Glycine max
  Clone ID: PAT_MRT3847_1177C.1.pep
AFLDKKLRRPVVAAVDLILENQMNFVKKRRKRTHDETDGNHADKTLFFSDPNSQNDESTDEVFLNEIDLENPSIHDFFVALAAHLDNLLQNRNEKISFQAAQIFDLVSCFSKLFTRVRRPLFQWLLKKNVSIEEVFIISFFIENLADEHKSFTELVERVVAERYKRQSLSQT

SEQ ID NO: 162550 - protein, 86 aa, Glycine max
  Clone ID: PAT_MRT3847_117800C.1.pep
NCTFRAELDQIDNFPQAKIVSLCVLSLLPSHKAASGDRKGLRFPSPSVGFGGEGETKELSTMFSVIISPLNKVPYFYNGSRPKRDF

SEQ ID NO: 162551 - protein, 68 aa, Glycine max
  Clone ID: PAT_MRT3847_117801C.1.pep
SSRFGSSTAARRQQKGYYFQRPYGRLNMTTWGVHTRGHICMLRGKQERLSITLSEWAIKHTYGGYWVQ

SEQ ID NO: 162552 - protein, 70 aa, Glycine max
  Clone ID: PAT_MRT3847_117802C.1.pep
PILKGEKMFSQEGHIIWYEGEVLRDIEVIEIGEDNDDDGGGDEIEKVRDGGRERERERREWVVEGERFCG

SEQ ID NO: 162553 - protein, 59 aa, Glycine max
  unsure (1)..(59): unsure at all Xaa locations
  Clone ID: PAT_MRT3847_117803C.1.pep
TXYXENXDXKVEIXEFXVEPTXKPXKALXXXXMXINXFFSHGSTQLNXVIVCXVLSSLF

SEQ ID NO: 162554 - protein, 164 aa, Glycine max
  Clone ID: PAT_MRT3847_117804C.1.pep
AKSHGASISVKTCPHYLAFTSKEIPNGDTRFKCSPPIRDAYNKDKLWEAVLEGHIDLLSTDHSPTVPELKLMEEGDFLKAWGGISSLQFNLPVTWSYGKKYGLTLEQLSLLWSKKPATLAGLESKGTIAVGNHADIVVWQPELEFDLDDDYPVFIKHSVCLPCY

SEQ ID NO: 162555 - protein, 120 aa, Glycine max
  Clone ID: PAT_MRT3847_117805C.1.pep
SSFFFFFFFFFFFFFFFLCLGFFIVSPKFNPLSVNYNKLDWDNPKKNQNKGPEKKQAITAGEKTKRPKTIAPPNRRTARKGNGTPPVAAQKPPLKRGPHPEGPPKKATPQRAEPKKTPLT

SEQ ID NO: 162556 - protein, 513 aa, Glycine max
  Clone ID: PAT_MRT3847_117806C.1.pep
MDQFLWRVLPLLTILVSFGVFFYLQDSYTAQLFPLIKLPRDKCSLLPHRHFWISSKRIVTPQGIISGSVEINDGKIISVVEGHAIQGKPKQEEVIDYGDAVIMPGLIDVHVHLNEPGRTEWEGFDTGTRAAAAGGVTTVVDMPLNCYPTTVSKEKLKLKLDAAEDKIYVDVGFWGGLIPENALNTSILDGLLSAGVLGVKSFMCPSGIDDFPMATIDHIKAGLSVLAKYRRPIVVHAEIQQDFENHLELNEDNLDPRAYLTYLNTRPPSWEEAAIKQLVSVTKDTRKGGPLEGAHVHIVHLSDSSASLDLIKEAKSHGDSISVETCPHYLAFTSEEIPNGDTRFKCSPPIRDAYNKDKLWEAVLEGHIDLLSTDHSPTVPELKLMEEGDFLKAWGGISSLQFNLPVTWSYGKKYGLTLEQLSLLWSKKPATLAGLESKGTIAVGNHADIVVWQPELEFDLDDDYPVFIKHSELSAYMGRRLSGKVLETFVRGNLVFKDGKHAPAPCGVQILAK

SEQ ID NO: 162557 - protein, 164 aa, Glycine max
  Clone ID: PAT_MRT3847_117807C.1.pep
MDQFLWRVLPLLTILVSFGVFFYLQDSYTAQLFPLIKLPRDKCSLLPHRHFWISSKRIVTPQGIISGSVEINDGKIISVIEGHAKQGKSKQEKIIDYGDAVVMPGLIDVHVHLDEPGRTAWEGFDTGTRAASAGGVTTVVDMPLINHPTTVSKETLKPKLELQR

SEQ ID NO: 162558 - protein, 61 aa, Glycine max
  Clone ID: PAT_MRT3847_117808C.1.pep
KNKKKKKKKKKKKKKKKKKKKKKKKREKGLKYKRLNLIDSDMKILIYCKQKSKIHASGFTI

SEQ ID NO: 162559 - protein, 367 aa, Glycine max
  Clone ID: PAT_MRT3847_117809C.1.pep
MDVGQITRVHPRGPGGGRFMGSVHAATSGIDRDFRTGSSGRVLDKRKNSYADRPSCFYPEDYVCNSRFKMNNDGAQVPPPSQREKFNSDESIRVQGKNGVLKVMVNKKKVGGTSEQYYDHHKPLESRQRLKTEETAKRLKTEETAKRLKTEGTAKRNIPILKKNEKKPVDKPALLKRPEKKRTASRKSLSSKDSKGDEGDSDNSDTSLNPRIRNTEARKSVKKIISEDEQTPVREKTPTTRTKEGKIKRGSGTEKQKLREQIREMLLNSGWTIDYRPRRNRDYLDAVYINPAGTAYWSIIKAYDALQKQSNDDADEVKPKGDSSSFAPIADEVLSQLTRKTRKKMEKELKKKKKCMIVKVIMKKSLK

SEQ ID NO: 162560 - protein, 346 aa, Glycine max
  Clone ID: PAT_MRT3847_11780C.1.pep
MKSCGMEAELGDAPAEVPEKKAKEKYIAPHLRARAGNEPEEHTQIRRRVRGLLNRLSESNVESITGELSLIFQSVARSVATQILTEEVLASCSSGPRGNQQYAAVFAAFVAGMACLVGVDFSAKFMASFAKCFEDEYNKEDNLSLRNLTLLLSYLCIFGVCSSDLIYDFLVMLSKRLTEADVSIILALLQCCGMKIRADDPAAMKDFILSVQNTSNKLKASSEDDNEKKNSKRMEFMLEIICDIKNNKRKPNEDSAHHTRIKKWLRKLRVDDILIRGLKWSKLLDPDKKGQWWLSGDVASSTGNGEEVANRIDKDVLETQRMLQLAAAQKMNTDAIRAIFCIIMRG

SEQ ID NO: 162561 - protein, 102 aa, Glycine max
  Clone ID: PAT_MRT3847_117810C.1.pep
FFHNPHLQLNSPICTPQTCFQASYSHNHHGPSSIYATKFGCGLVQASFVTSSGLLNKVWSVISSRDKGIVSYSGNNGLFWKVSEDSGLTVVAFEVTRVLIFI

SEQ ID NO: 162562 - protein, 43 aa, Glycine max
  unsure (1)..(43): unsure at all Xaa locations
  Clone ID: PAT_MRT3847_117811C.1.pep
QFKDELKIPRGSVINFXKEPGAMFSVXMDGREGGGFQGKLLCR

SEQ ID NO: 162563 - protein, 117 aa, Glycine max
  Clone ID: PAT_MRT3847_117812C.1.pep
TRPYGCEKTTEGGYTFKITPNSGVLEVNCYDPLKIEVPSSGSSKGKDENDNRSSFPTESDCQAAIVHSQGQTEDPMQKARGLDFGRNESSKIDSSPVKLRSREHKKKKKKKKKKAAS

SEQ ID NO: 162564 - protein, 83 aa, Glycine max
  Clone ID: PAT_MRT3847_117813C.1.pep
VDPYGNKFLDAKLSDDDSNTIWKLDLERTGLSSAEFGLQFHVIDRGDIIIAKFTNDGMPSSSSYEEIRGPMYFWKRGSFWCSG

SEQ ID NO: 162565 - protein, 83 aa, Glycine max
  Clone ID: PAT_MRT3847_117814C.1.pep
LLSLLVVGLETTGSVLTWTLYLLGKDFSSLAKAQEELDRVYQGRELTYEDIKILKFLTRCIIESLRLYPHPPVGCNVSQYNDL

SEQ ID NO: 162566 - protein, 145 aa, Glycine max
  unsure (1)..(145): unsure at all Xaa locations
  Clone ID: PAT_MRT3847_117815C.1.pep
PHSARHLFCWDGEKTFPNRWSVKLLCCKSDTGTGQCYPEWAQIYXGVHRQRMHITAGNYXVERTDVTIEYDXACTQTKDWGSLFVTKVGNYMPRGVFQVXGSKGRLGYSSMIPYVEPDVHAQSAEVYFDCLPGEVDSEEGVAHIG

SEQ ID NO: 162567 - protein, 55 aa, Glycine max
  unsure (1)..(55): unsure at all Xaa locations
  Clone ID: PAT_MRT3847_117816C.1.pep
LVIXXXWXGETNLRNFXXFSFDTXPPLKXXDXGPFVVFQLXXLXXFXCFFXVFXX

SEQ ID NO: 162568 - protein, 63 aa, Glycine max
  Clone ID: PAT_MRT3847_117817C.1.pep
FRGTGWVGDREYDGVKRTFREAVEKNFGKSKETVEESAETAAKLVEEAIHKTTEKVKESSDSA

SEQ ID NO: 162569 - protein, 67 aa, Glycine max
  Clone ID: PAT_MRT3847_117818C.1.pep
ERLYYNLSTFITPTLIDHWYHLSSRYCQCCGSTSHRYIIHISITQLHHSIPFHVTHTVSYNTPNHTE

SEQ ID NO: 162570 - protein, 73 aa, Glycine max
  Clone ID: PAT_MRT3847_117819C.1.pep
AVSRPTIAIQYPSIRVMNKGKYIIFDTFHSHELIKINILINRKTNQFILQYDKIKVTKKSESEERWKKQTRFS

SEQ ID NO: 162571 - protein, 54 aa, Glycine max
  Clone ID: PAT_MRT3847_11781C.1.pep
RERERERERERVSLIYCFPYSLFLPVSFSTCSYIFAFVHLFFFFILFENYVLLN

SEQ ID NO: 162572 - protein, 48 aa, Glycine max
  Clone ID: PAT_MRT3847_117820C.1.pep
FSRGIVVPHITHGACIAHLLALLTELLLKTCFKQHFFYHYYVSNGWCP

SEQ ID NO: 162573 - protein, 104 aa, Glycine max
  Clone ID: PAT_MRT3847_117821C.1.pep
PWEGRRVSFKEKFLGDKGGLTFGGLVTPLSWRFVFPPTPQRLFAFEIEIGGGFSRGNLPGGGWFGSLLMPLFGRGLLGLKITFFFPLGVFPGRFKILGGENFGF

SEQ ID NO: 162574 - protein, 44 aa, Glycine max
  Clone ID: PAT_MRT3847_117822C.1.pep
AGSHHSSIMPVGCLLIVHGRRLIMKAVRCLIIAYTTFIRDRLGL

SEQ ID NO: 162575 - protein, 78 aa, Glycine max
  unsure (1)..(78): unsure at all Xaa locations
  Clone ID: PAT_MRT3847_117823C.1.pep
VVXRVXLLLXAPXLALPGPLRXLXLRFXPXRMLXXPXFCSXPFIPCPALLGSXAXXAALHAVXAFXPXLPXAPCLXFF

SEQ ID NO: 162576 - protein, 43 aa, Glycine max
  unsure (1)..(43): unsure at all Xaa locations
  Clone ID: PAT_MRT3847_117824C.1.pep
XXHKXQXTNFATQYSMXXXLXXXXQXVEFAERTQCFRXIGFIS

SEQ ID NO: 162577 - protein, 127 aa, Glycine max
  unsure (1)..(127): unsure at all Xaa locations
  Clone ID: PAT_MRT3847_117825C.1.pep
MIGWEEVYKVVVAVVPLYFALLLGYGSLKWWNIFTREQCEAINKLVCYFTLPLFIFEFTAHIDPFKMNYSFIAADTISKFIIMVVLALWAKCTPKGTFSWSITSFSLCNLTNALXXXVPMVKPMYGA

SEQ ID NO: 162578 - protein, 55 aa, Glycine max
  unsure (1)..(55): unsure at all Xaa locations
  Clone ID: PAT_MRT3847_117826C.1.pep
LPSTPNPHFTTPPLTLXXTXSXXSLSYIVCNKHTESNNRGVVTYVHNNNYITTLR

SEQ ID NO: 162579 - protein, 145 aa, Glycine max
  unsure (1)..(145): unsure at all Xaa locations
  Clone ID: PAT_MRT3847_117827C.1.pep
ISCWIWSGERQSTXMRIKYLEAVLNQDIQFFDTEVRTSDIVFVINTDAIMVQDAISEKLGNFIHYMATFVSGFVVGFTAVWQLALVTLAVVPMIAVIGGIHTVTLAKLSGKSQEALSQAGNIVEQGRLQSILKLRNFVNCNFRVY

SEQ ID NO: 162580 - protein, 52 aa, Glycine max
  unsure (1)..(52): unsure at all Xaa locations
  Clone ID: PAT_MRT3847_117828C.1.pep
ETDVKLPLEKLEHFXCFGFIVWSEFWQIILSLHKSPGGFKDSSGLMGLLWYI

SEQ ID NO: 162581 - protein, 135 aa, Glycine max
  Clone ID: PAT_MRT3847_117829C.1.pep
GGRRFSHFTKAAVSETGTTHLKKCQISAGYAPVLDCHTAHIACKFAELKEKIDRRSGKKLEDGPKFLKSGDAAIVDMVPGKPMCVESFSDYPPLGRFAVRDMRQTVAVGVIKAVDKKAAGAGKVTKSAQKAQKAK

SEQ ID NO: 162582 - protein, 107 aa, Glycine max
  Clone ID: PAT_MRT3847_11782C.1.pep
NGQPVHLRWTRSGTSRSTIFQTLREQLLLQWALTNRLRKHKAGVRVVLCTLRPETTGFFPLGPRELSAIEVNGINAKKTDPDPLWGWAQAHQPRSFGIMGWTTRGRR

SEQ ID NO: 162583 - protein, 215 aa, Glycine max
  unsure (1)..(215): unsure at all Xaa locations
  Clone ID: PAT_MRT3847_117830C.1.pep
GAIVQAKPLVYECGPTCKCPSTCHNRVSQLGIKFQLEIFKTDTRGWGVRSLNSIPSGSFICEYIGELLEDKEAEQRTGNDEYLFDIGNNYXVEARGNSTLWDDLXTLTTLMPDAHTASCEVVKDGGFTIDAAQFGNLGRFINHSCSPNLIAQNVLYDHHDTRMPHIMFFAADNIPPLQELTYDYNYEIDQVRDSDGNIKKKYCYCGSVDCTGRMY

SEQ ID NO: 162584 - protein, 100 aa, Glycine max
  Clone ID: PAT_MRT3847_117831C.1.pep
TSGNMSVKYFVLAYFNKQPWKFESIKHQTIGTIMYMCTINPIQLLFYPTPWDGKNNHKFRVIGVISALPPTKYNSQASRRLPVIKILIYLDNLPHKKILR

SEQ ID NO: 162585 - protein, 56 aa, Glycine max
  Clone ID: PAT_MRT3847_117832C.1.pep
TYYSTNLSGYLKTHDWFYITISNITCPTHKSSLFLKHGQYMRTLVLKFNILLKNEG

SEQ ID NO: 162586 - protein, 124 aa, Glycine max
  Clone ID: PAT_MRT3847_117833C.1.pep
HYPYHSFVTDYVAVLDFLVNTSRDVDVLVRKGVLVNWLGDSDSVADMFNGLWKNVTHINFSSHYSELCQKLNAFCRNPCHKLKSTLRRDYCKTPWQIAVSIAGIVLLVLSLVQSVCSVLQVIQQ

SEQ ID NO: 162587 - protein, 159 aa, Glycine max
  Clone ID: PAT_MRT3847_117834C.1.pep
RVGERRAQLNHTTPHTPTTFVSLSLSLAVASATVSAANATVSGHCSPASSLSRSQSDVARIMSPTLGDQIEDKLIVSDSMRATNKKINGTPIKMLIDQEMSKEVVSKHNPPPNVVAKLMGLEALPQGELSVEKSHRGDYSQHMCGHSGTHHWNLEDRFM

SEQ ID NO: 162588 - protein, 166 aa, Glycine max
  Clone ID: PAT_MRT3847_117835C.1.pep
MNGVQNRRVHNVEKPFPGCLGRVVNLFDLTGGVNGNKLLTDRPHRDASSLSRSQSDVARIMSPTLGDQIEDKLIVSDSMRATNKKINGTPIKMLIDQEMSKEVVSKHNPPPNVVAKLMELEALPQGELSVERSHRGDYSQHMCGHSGTSFNHWNLEDRSMDKEMLH

SEQ ID NO: 162589 - protein, 82 aa, Glycine max
  Clone ID: PAT_MRT3847_117836C.1.pep
MADDFEFADKVPPSFDRAGSKGFNPALIVLLLVGGLLLTFLIGNYVLYTYAQKTLPPRKKKPVSKKKMKKERLKQGVSAPGE

SEQ ID NO: 162590 - protein, 104 aa, Glycine max
  unsure (1)..(104): unsure at all Xaa locations
  Clone ID: PAT_MRT3847_117837C.1.pep
MGREPARCYRPIKNKPYPKSRFCRGVTDPKIKIDDVGMKKKGVGELSFCVHLDSGEKENVWREALDAAEDAGRTYMVDVRGXDALHLRVKVHSLHVPTINMTLT

SEQ ID NO: 162591 - protein, 71 aa, Glycine max
  Clone ID: PAT_MRT3847_117838C.1.pep
LFCFNNVAYLHGHAINCLLSYPLLRSNIDCRRCYQIHHPQLTLYQPLSCHSTKCFMHLQWCQATFTSLFDH

SEQ ID NO: 162592 - protein, 61 aa, Glycine max
  Clone ID: PAT_MRT3847_117839C.1.pep
VKIAMKLHYHYNRQFLLLNYELKHKVKVTYVIIASIPLTIFNIMKHSTNEPCSDEAYLSVV

SEQ ID NO: 162593 - protein, 137 aa, Glycine max
  Clone ID: PAT_MRT3847_11783C.1.pep
PYLVSSMCASNSVRKVEDLEMLVSQSKHLKVSLEERGTLELVLKNCRIWEYEACSVLDDARCLLDNSLPEINSGLTCKVEDLIERIQSAIASGVSLGFDFNEISKLQASCSTLQWCKRALSFCNCSPSLEDVLEVAE

SEQ ID NO: 162594 - protein, 56 aa, Glycine max
  Clone ID: PAT_MRT3847_117840C.1.pep
SDDTNCPLCNEGEETISHLLFVCRVAASIWYLSAHWCAIQSLIHPMVEDFFWQFSN

SEQ ID NO: 162595 - protein, 39 aa, Glycine max
  Clone ID: PAT_MRT3847_117841C.1.pep
RYVYDFYITVLTRALAFEVRMILRSILPCTEIQFFIRRI

SEQ ID NO: 162596 - protein, 165 aa, Glycine max
  unsure (1)..(165): unsure at all Xaa locations
  Clone ID: PAT_MRT3847_117842C.1.pep
STRPINHLFRFQHAFWNRKKHIVDLPYEKDFREXTNSHKARSIQMNEELLQYCQKKIKDLLDKGLIRKRKSSWSCAAFYVNKQSELERGTPCLVINYKPLNQALQWIRYPIPNKKDLLNRLNSAKIFSKFDMKSGFRQIQIQESDRCKTAFTVPFEQYEWNVMSF

SEQ ID NO: 162597 - protein, 35 aa, Glycine max
  unsure (1)..(35): unsure at all Xaa locations
  Clone ID: PAT_MRT3847_117843C.1.pep
TIAWASPRVHLVNGGFXCIGVSHPTHKRRQFXCER

SEQ ID NO: 162598 - protein, 45 aa, Glycine max
  Clone ID: PAT_MRT3847_117844C.1.pep
KLERTTYRPLTDLHWNKEQSFHLKVLPKHALVPPKLRSFLLNFSA

SEQ ID NO: 162599 - protein, 256 aa, Glycine max
  unsure (1)..(256): unsure at all Xaa locations
  Clone ID: PAT_MRT3847_117845C.1.pep
SNYSSRSQQLDGPQKAGSNKEWKPKPTNTINQGSGPASASEVLVSVDSTGQLQSASSALNSEEATSKLQRKLEDFHLPQRQHVILPNHIIVPDSEKNKFSFGSLGVALGVNTSYVSGPESEKSSTPVSETSQTVEETVEEQDSSQNAAVISEVGDYPDHPQSPTNGAENLSSSEVDGSSSAIQEYNESKQDTALPSGGHQYSGVLTSPNYSXGFVPXVLGTQLTQFDNSESKHVMLPASNFIVHQQLDPASYYAQF

SEQ ID NO: 162600 - protein, 104 aa, Glycine max
  Clone ID: PAT_MRT3847_117846C.1.pep
LHIYNFKYHPFKFFWLLTLFSPHSVSLVPHTYIYTNIVFIHRNNQLIYSPTDTRSVGPKNPILLLMPNLITSSVCYYLLPPIYHPPPPPPQLHLFNQLVSVFTY

SEQ ID NO: 162601 - protein, 218 aa, Glycine max
  Clone ID: PAT_MRT3847_117847C.1.pep
MAKKRSASDATDDAQNDTVSLLPSQRKKPKHSAPNPDACFVGKPIPSAEARAKWPHRYPSEVKKKAPARSSEEVTSENSEVMLARCHYRQAKVDGVVYNLYDDAYVKAEDGKPDYIARIVEMFETVDKEQCFMAQWFYRAEDTVIKNHGDLVDKKRVFISDVKDVNPLDCIVSKVKIFKKNPSVDLASKKAKLPFCDYYYDMKYTVPYLTFSNLVNET

SEQ ID NO: 162602 - protein, 58 aa, Glycine max
  Clone ID: PAT_MRT3847_117848C.1.pep
WRKPQFCDDRSRRADNVVEEPDQRRKWTMYTLKKMRRAINFFWSLEIDQIRELETNTE

SEQ ID NO: 162603 - protein, 66 aa, Glycine max
  Clone ID: PAT_MRT3847_117849C.1.pep
NSLYCRQSCVTPKPILHEQVASFQKAIWSSYDSSTECVEFPTLKLERTVIRCINLLELDTVTVIKF

SEQ ID NO: 162604 - protein, 67 aa, Glycine max
  unsure (1)..(67): unsure at all Xaa locations
  Clone ID: PAT_MRT3847_11784C.1.pep
KKYHDPIVQERIKLWNDGLKVDEXEWLDVLVSLKDSNNNPSLTLEEINAQIIVIYFTPLLVCFSYLY

SEQ ID NO: 162605 - protein, 71 aa, Glycine max
  Clone ID: PAT_MRT3847_117850C.1.pep
LFYSKILRLFNYYFAPFGFKRGYGVKDRLDFILAGINRYSNSNDRWKFILLFIRRETSSNKWLKHVKRGFG

SEQ ID NO: 162606 - protein, 45 aa, Glycine max
  Clone ID: PAT_MRT3847_117851C.1.pep
TRPEVARVKKWHMYLALDLEELRRLHSIAGRPLTLSLLSSEIRNL

SEQ ID NO: 162607 - protein, 91 aa, Glycine max
  Clone ID: PAT_MRT3847_117852C.1.pep
MIENSLKLLQQLSSCLEILLRGAPHLNINLQINYWPSLACNLHECQEPLFDFISSLSVIGKKTAKVFCSFPSFFDIILGILSKKEIHPLCL

SEQ ID NO: 162608 - protein, 227 aa, Glycine max
  Clone ID: PAT_MRT3847_117853C.1.pep
MAKTMTMWFLLVTLSFVYAAATANTQIKVTNNPADKLVVAINENRTAHKVSALTDNPGLACIALQYIKAYQGECDAVGGSDGKKPPESRFAEVFAPNCGVEASTLAPITGRFLACQTKYVHAPEAFSDILIRNQQSLDILYNNNHTQVGAAVTGTDGGSPYFWCVLFSSGKPNKTFTFESGVAKITKPGCFSGANDECSGASDWSPLNEMWVFATSLLIAMGFALTL

SEQ ID NO: 162609 - protein, 22 aa, Glycine max
  Clone ID: PAT_MRT3847_117854C.1.pep
PHPIALIIKRKVGNFKIQNWFF

SEQ ID NO: 162610 - protein, 42 aa, Glycine max
  Clone ID: PAT_MRT3847_117855C.1.pep
NTTTLPLVVFKRVHPPLLISLSNKTLICLLIITSFDLQFLII

SEQ ID NO: 162611 - protein, 37 aa, Glycine max
  Clone ID: PAT_MRT3847_117856C.1.pep
TGEKTHRGRQHSMLRLTIGFRAQNRFNTYSRDMGTWL

SEQ ID NO: 162612 - protein, 129 aa, Glycine max
  unsure (1)..(129): unsure at all Xaa locations
  Clone ID: PAT_MRT3847_117857C.1.pep
SXXXCHSYXTXFXPXSXXFPSFXSXXTXIXXXXXXSXYXXLXXXXFXAXSXXXXXFXXXXXXXLXXXXXPXXLSXPLSXFFXXXLLMXSXXAXXXLFLXXXXXXXXXXLYXXRXLFFXXXPXLXFXFSL

SEQ ID NO: 162613 - protein, 39 aa, Glycine max
  unsure (1)..(39): unsure at all Xaa locations
  Clone ID: PAT_MRT3847_117858C.1.pep
DSVKFWFPAHVYNXEHGHVGFMMLCYDAXLSYDXHRDTF

SEQ ID NO: 162614 - protein, 65 aa, Glycine max
  Clone ID: PAT_MRT3847_117859C.1.pep
AYERLRFYDIRVSWLRVIHDKLHSTTTAVLVNTITCRCLATCLTEYAKAGANTAIYLKALERTTT

SEQ ID NO: 162615 - protein, 154 aa, Glycine max
  Clone ID: PAT_MRT3847_11785C.1.pep
TRPTIHCCFRGEDTRNSFTGFLFQALSRKGTIDAFKDGKDLKKGESIAPELIQAIQGSRLFFIVVFSNNYAFSTIRKKLQYAEIEDLEKITNILGHKFSSLPNDDLVGMESCVKELAKLLRLGSVNDIQVVGMSGIGGIGKTTLGHGFYVEISH

SEQ ID NO: 162616 - protein, 84 aa, Glycine max
  unsure (1)..(84): unsure at all Xaa locations
  Clone ID: PAT_MRT3847_117860C.1.pep
RGRSPRREEGTPGAXPGGGXSPQRPERGXXPAGPPPPEENHQTSPENPXHGPRQERPPRRPEPGRPRRPPPTRGTGGAPPEPKT

SEQ ID NO: 162617 - protein, 224 aa, Glycine max
  Clone ID: PAT_MRT3847_117861C.1.pep
MGSMKVHQFTRGLIWEHEPFLTLGCKRLRPLAPKLPNTKTITTPFDLKSFIRPESGPRKPVSSDDTKKDPPSPQGQIETHPGGTRWNPTQEQIGILEMLYKGGMRTPNAQQIEQITVQLGKYGKIEGKNVFYWFQNHKARERQKQKRSSLASSHSPRTPTIHSVVTLETTRGEVVERDHEEDSPYKKKCRRWVFDCLEEQNMSSPCEQEEHRTLELFPLHPEGR

SEQ ID NO: 162618 - protein, 189 aa, Glycine max
  Clone ID: PAT_MRT3847_117862C.1.pep
MGSMKVHQFTRGFCWEHEPFLTLGCKRLRPLAPKLPNTQTNTIPTTPSVPFDLKSFIRPESGPRKPVSSDDSKKDPPSPQGQVETHPGGTRWNPTQEQIGILEMLYKGGIRTPNAQQIEQITVQLGKYGKIEGKNVFYWFQNHKARERQKQKRNSLAFSHSPRTHTIHSIVTLETTRGEVVERDHEEDS

SEQ ID NO: 162619 - protein, 538 aa, Glycine max
  Clone ID: PAT_MRT3847_117863C.1.pep
YTSFLNIEWDQISNVLENLKDRDTYHGVGLLNFNDSEIDHWKKLIPEAEHVVLHLNYASSNITWNVLYPEWIDEEEEYEFPTCPTLPRIQVPGKPRLDLIAVKLPCNKSGCWLRDVARLHLQIEAARLAASSKGNHPVHVLLVTDCFPIPNLFTCKELIQREGNTWLYEPNLNTLREKLQLPIGSCELTVPLKAKENFYSERPHREAYATILHSAQMYVCGAITAAQSIRMSGSTRDLVILVDETISEYHRGGLKAAGWKIHTIQRIRNPKAEPEAYNEWNYSKFRLWQLTDYDKIIFIDADLLILRNIDFLFEMPEISAIGNNATLFNSGVRVVEPSNCTFQLLMDHINEIVSYNGGDQGYLNELFTWWHRIPKHMNFLKHFWEGDEEEKKAMKTRLFRADPPILYVIHYLGNKPWLCFRDYDCNWNVDILQEFASNVAHARWWKVHDAMPENLQKFCLLRSKQKAALEWDRRQAEKGNYSDGHWKIKIKDPRLNTCFEDFCFWESMLWHWGEKNWTDNSTVNNSPLIVQTQSLSSL

SEQ ID NO: 162620 - protein, 161 aa, Glycine max
  Clone ID: PAT_MRT3847_117864C.1.pep
ARGYSKEKPNDADVFRLLGEVEYELQDYEGSVAAYKSSARVSKDIQLEVLRGLSNSLLAAKKQEEAVQLLLAYREHLSSENLSKNSDGNPTDSQKLDPVQVELLLGKAYSYWGHVSDAVTGYEQLICTHPYDFRGFLAKGIMLRENKHNGDAQRMFIQAWF

SEQ ID NO: 162621 - protein, 98 aa, Glycine max
  Clone ID: PAT_MRT3847_117865C.1.pep
MGDLEGDVAVADAKGGGRPPKKRTFQKFIFRGGDLDAPLDIFTGELVKMVSARAPRMFQRGVTKKPMGSIKKLRKAKRETPGGEKTEPSLTPLPRHDY

SEQ ID NO: 162622 - protein, 86 aa, Glycine max
  Clone ID: PAT_MRT3847_117867C.1.pep
SKRRFRHILALVTMLGFALGRSSKAKGNSLESRHPLSPQYKLVQWSTICLSLCQTVVLTHYNGIHVGTCMMRRRYYLQRGMSCVFP

SEQ ID NO: 162623 - protein, 71 aa, Glycine max
  Clone ID: PAT_MRT3847_117868C.1.pep
CDRVYPHPVASHFIIPISFFSLMSRMLEQDNTLCRTRMLSYNSYFKQISSAILKEFVKGRYLPKKKTRELR

SEQ ID NO: 162624 - protein, 57 aa, Glycine max
  unsure (1)..(57): unsure at all Xaa locations
  Clone ID: PAT_MRT3847_117869C.1.pep
KRLLNTTGEVVVPGSGFGQVLGTWLFRCTIIASEXKIPAIVTRLPEFHEKFMNKFRN

SEQ ID NO: 162625 - protein, 65 aa, Glycine max
  Clone ID: PAT_MRT3847_11786C.1.pep
VITLSAFSERSELIDLDLFMKKKRCSCSEALHCSPTLNQQISQANRTTLILCSPSVVFSQPYGRV

SEQ ID NO: 162626 - protein, 36 aa, Glycine max
  Clone ID: PAT_MRT3847_117870C.1.pep
RGQCASHVALGWNYRAMTIPSSSMFLNGTAKITWLA

SEQ ID NO: 162627 - protein, 71 aa, Glycine max
  Clone ID: PAT_MRT3847_117871C.1.pep
KNSIVSFGGGGAFFNFFEPTILIPCTNKMGPKETKPFFSYKANAIPFFEARPKRANSKSYFLKKLLAQPPP

SEQ ID NO: 162628 - protein, 47 aa, Glycine max
  Clone ID: PAT_MRT3847_117872C.1.pep
NMNHPHYLKTLLFQDQPYKLHYNLYIQKLERFLKILSFEIIIIIISL

SEQ ID NO: 162629 - protein, 112 aa, Glycine max
  Clone ID: PAT_MRT3847_117873C.1.pep
QGGPPPFLWKALKGPGEFGPPFFKAKGTPVRGRAWTSPLGPNLPKPKKFPNPWKPKAKTKIPTNIFPPWTFKPPLGGLKNSPPLYFMAPKGCFFFSSPGFSKLEGKLVFPIF

SEQ ID NO: 162630 - protein, 72 aa, Glycine max
  unsure (1)..(72): unsure at all Xaa locations
  Clone ID: PAT_MRT3847_117874C.1.pep
VVAWSLFGTPLWCQTCCCFLALVLLSSYPLSGNPLTSDGXCSSPHACCWLEFPLLLVVVLGEAEEFWYHLLW

SEQ ID NO: 162631 - protein, 134 aa, Glycine max
  Clone ID: PAT_MRT3847_117875C.1.pep
MTLNLCVLTPNRIVWDSEVKEIILSTNSGQIGVLPNHAPIATAVDIGILRIRLLKDQWLTMALMGGFARITNNEIPVLVNDAEKGSAIDPQEAQQTLEIAEANLNKAEGKSQPIEANLAFRRARTRVEAINVIS

SEQ ID NO: 162632 - protein, 60 aa, Glycine max
  Clone ID: PAT_MRT3847_117876C.1.pep
VAQHLGEGVYQTIAMDATEGVVRGCRVINTGSPITVPLVMATLGRIINVIGEPIDSTGEI

SEQ ID NO: 162633 - protein, 100 aa, Glycine max
  Clone ID: PAT_MRT3847_117877C.1.pep
MYSVLCGIQPRRQREDIPKEIFEWCEYTVVHARQHAATIDRTILFIQRLDEKTKRGRFFDPYYGIDWMLSPTKEDEGENALWRGETARCIKYFPTQDVHC

SEQ ID NO: 162634 - protein, 62 aa, Glycine max
  Clone ID: PAT_MRT3847_117878C.1.pep
IQQDIKVVYSKLSVLFTVHLSIKSCGLLSAPSETIYIAIRIMLEEYSELSPQCICEYHFTPR

SEQ ID NO: 162635 - protein, 66 aa, Glycine max
  Clone ID: PAT_MRT3847_117879C.1.pep
AVNGRALDVTTGIYFYSPGGPYAMFFCKYAFRALARMNKTDYDFYPCLNGLSDKDITVLNYCENKF

SEQ ID NO: 162636 - protein, 49 aa, Glycine max
  Clone ID: PAT_MRT3847_11787C.1.pep
TAARRRQKGSLSQSLVFSLCCRLAIVKSSRVRTNHMGSLSWWIILFTYD

SEQ ID NO: 162637 - protein, 53 aa, Glycine max
  Clone ID: PAT_MRT3847_117880C.1.pep
PFCFPVSHPRQDSTRSCHVKNHPNDLVNNIPGNCFFPRWLPPDPPLVIPYTPV

SEQ ID NO: 162638 - protein, 43 aa, Glycine max
  Clone ID: PAT_MRT3847_117881C.1.pep
VNFAVFFFSFFRRQTGGVFSIKLRKFPNCPSPCWLKAQGDRDH

SEQ ID NO: 162639 - protein, 211 aa, Glycine max
  Clone ID: PAT_MRT3847_117882C.1.pep
MYKCRNKEFVRKDTGSRKCGCPFRLHGKPVHGREGWMVKLICGIHNHELAKSLVGHPYAGRLTNDKKKIIADMTKSMVKPKNILLTLKEHNADSYTTIKQIYNARSAYRSSIRGADTEMQHLMKLLERDQYIHWHRLKDEVVVRDLFWCHPDAVKLCNACHLVFFIDSTYKTNRYPSSSRIFAGVTPARMTFSVGFAYLEGERVNNVDGLW

SEQ ID NO: 162640 - protein, 455 aa, Glycine max
  unsure (1)..(455): unsure at all Xaa locations
  Clone ID: PAT_MRT3847_117883C.1.pep
MAAWSSRKLLRDVLLKRVVSNQLPGVRCFSSAPKSAPKIGHYSKKGRLLTGATIGLLIAGGAYVSTVDEATFCGWLFSATKLVNPFFALLDPEFAHNLGVSAAARGWVPREKRPDPSILGLEVWGRKFSNPVGLAAGFDKNAEAVDGLLALGFGFVEVGSVTPVPQDGNPKPRIFRLQKEGAVINRCGFNSEGIVXLAKRLGAQHGKRKLDETSSASPSSNNEVKHGGKAGPGILGVNLGKNKTSEDAAXDYVQGVHTLSQYADYLVINVSSPNTPGLRMLQGRKQLKDLVKKVQAARDEMQWGEEGPPPLLVKIAPDLSKEDLEDIAAVALTLHLDGLIISNTTISRPDPASKNPLASETGGLSGKPLFNLSTNILKEMYILTRGRIPLIGCGGISSGEDAYKKIRAGATLVQLYTAFAYGGPALIPQIKAELASCLERDGFKSIVDAVGADCR

SEQ ID NO: 162641 - protein, 65 aa, Glycine max
  Clone ID: PAT_MRT3847_117884C.1.pep
YMVCIFENPKSWKLFYSPMIYVSFCTYKYNVKRGGLCTDYFIHLDADNVNRGKTDAWFGLRKYSL

SEQ ID NO: 162642 - protein, 163 aa, Glycine max
  unsure (1)..(163): unsure at all Xaa locations
  Clone ID: PAT_MRT3847_117885C.1.pep
MSKGDKVEVLDFWASPFCARVKVALEEKGVNYVASEEDLFGGKSELLLKSNPIHQRVPVLLHNDKPLAESSIIVSYIDEVWSSNPLLPTLAYDRAQARFWTDYIDKKVFETGRSIWGSNGEEREVGTRDFIEVXKHLEEALGEKNYXGGDAFGYVDIIAIGHS

SEQ ID NO: 162643 - protein, 41 aa, Glycine max
  Clone ID: PAT_MRT3847_117886C.1.pep
HTIDMVQNLKLPSTIVILTPTVNSSQLLAKSPLSITKLHNF

SEQ ID NO: 162644 - protein, 56 aa, Glycine max
  Clone ID: PAT_MRT3847_117887C.1.pep
LAKSSSAVSYRIPSRASRILNVMPRGLPSIVYQSHTRTPIMDIPVEGGVKYYNQGS

SEQ ID NO: 162645 - protein, 642 aa, Glycine max
  unsure (1)..(642): unsure at all Xaa locations
  Clone ID: PAT_MRT3847_117888C.1.pep
MRIPVKKRIIIIIIKENYKRVVESCNCIGTQHLYSYMQLGDSSVLEISSHTQPEMAVVLPPEEVPHEGSDNSGGGGGSEMIGMDLDANSGEGNEGNKMSFGGNRWPRQETLALLKIRSDMDAVFRDSSLKGPLWEEVSRKLAELGYQRSAKKCKEKFENVYKYNKRTKENKSGKSHGKTYKFFDQLQALENQFTSLLPAKTTTXSTLATTNPLTLPTRPSDHGNKVISYVTTFPSTNPTLISPSPQTNTTTTTTTTTSTTNPRDSSRPQTNNNNNSVTHSLPNMNTSFSTTTASTSSSTASDEDLEERYRRKRKWKDYFRRLTRKVLLKQEEMQKKFLEAMDQRERERVAQQDNWRMQEMARINREHEILVQERSTAAAKDATVIALLQKMYGQQNPTQQVEVEPPPQQKQTIPQSLPPILMPNNNFEVKKINNGHSVTSTTTGTVATATTTTSPVNSSSSRWPKAEVHALIRIRTSLETKYQENGPKAPLWEDISIAMQRLGYNRSAKRCKEKWENINKYFKRVRESSKERREDSKTCPYFHELEALYKEKSKSSKNPFGIFQNMKPNEMMLMMTEPLMVQPEQQWRPPPQSLEEGVGMENASEEYHENEENGGDDDDNIEEDGDSVEDEGANPCEIATNN

SEQ ID NO: 162646 - protein, 499 aa, Glycine max
  Clone ID: PAT_MRT3847_117889C.1.pep
EVSRKLAELGYQRSAKKCKEKFENVYKYNKRTKENKSGKSHGKAYKFFDQLQALENQFTVSYPPKPQPTSTLTTTNTLTSDHGNKVISYVTPFPSTNPTLIPPSPQTNTNTTTTTTTTSTTDPRDSSPPQTNNNNNSVPHSLPNMNAPFLTTTTSTSSSTASDEDLEERYRRKRKWKDYFRRLTRKVLLKQEEMQKKFLEAMDQRERERVAQQDNWRMQEMARINREHEILVQERSTASAKDAAVIALLQKMYGQQNPTQHVEVEPPQQQKQTMPQSQPPILMPNNNFEVKKMNNGHSATSTTTTTTSPVSSSSSSRWPKAEVHDLIRLRTSLEIKYQENGPKAPLWEDISIAMQRLGYNRSAKRCKEKWENINKYFKKVRESSKERREDSKTCPYFHELEALYKEKGKSQNPFGMFQNMTPNETMMMEPLMVQPEQQWRPPPQSLEEGIGKDNASEEYNQEKEEEVEENGGDDDDNIEEDGDSVEDAGPNPCEIATNN

SEQ ID NO: 162647 - protein, 108 aa, Glycine max
  Clone ID: PAT_MRT3847_11788C.1.pep
KPYRATLSKSQLLAHNDRHGQHQSAGRRARTNHKRRRPSCGLCSAYTKMLSPPFTGLLMCESGYSARVSFCITTSAASLLHPGTEPSRDSHQHQIIPEPSLPLLPCLA

SEQ ID NO: 162648 - protein, 67 aa, Glycine max
  Clone ID: PAT_MRT3847_117890C.1.pep
QFRRSQIRLIAYNLLNLHILRAQSCVIIRPIYTVTKRIEDLVFSEYPLEVFSNLVAMNNGPRSKERF

SEQ ID NO: 162649 - protein, 52 aa, Glycine max
  Clone ID: PAT_MRT3847_117891C.1.pep
LNASTINCPSRSNSPWWISCHMGCEDQSLMNPVPSACHLIMQLVPTEILPNC

SEQ ID NO: 162650 - protein, 58 aa, Glycine max
  Clone ID: PAT_MRT3847_117892C.1.pep
VVTRSCVKSRLNRVVLQNEHPTRVVKACQFHHVPKTTIKSSFQSSNLSTIKILNVTSY

SEQ ID NO: 162651 - protein, 41 aa, Glycine max
  Clone ID: PAT_MRT3847_117893C.1.pep
MMHIVNLKNDETQVQSKVLKKWMRYRINCKSTTSDPNVDLS

SEQ ID NO: 162652 - protein, 43 aa, Glycine max
  Clone ID: PAT_MRT3847_117894C.1.pep
PTRPAEERDGYHHHQGRSQRGTIICLENLYFLPPLEFNVTFPF

SEQ ID NO: 162653 - protein, 137 aa, Glycine max
  Clone ID: PAT_MRT3847_117895C.1.pep
MKKVVLKVEIHDDKIKKKAMKAVSGILGVELVSADTKDKKLTIIGDIDPVKVVAKLRKQLCHADIVFVGPTKEEKKEEPKKDSAKEIVVTITYGKPRKLLAESRTMFFLRRFVALPKIVQVDYLPRSPQDKTAQITV

SEQ ID NO: 162654 - protein, 43 aa, Glycine max
  Clone ID: PAT_MRT3847_117896C.1.pep
MWKQTLSFSDYVTTKFYIECPHGYVLRLVLHEFLIVITYDSWK

SEQ ID NO: 162655 - protein, 55 aa, Glycine max
  Clone ID: PAT_MRT3847_117897C.1.pep
QKERVGAFEKLLIPIIKSFKANKIPANFKDDNAKEWQADNQHLEQNDCSYRSSIN

SEQ ID NO: 162656 - protein, 403 aa, Glycine max
  Clone ID: PAT_MRT3847_117898C.1.pep
IYALSYFVCRFVYVELLEIRKDVQCPICLGIIKKTRTVMECLHRFCRECIDKSMRLGNNECPACRTHCASRRSLRDDPNYDALIAALYPDIEKYSQEELEFREEEKNRNKQIQASIAKVVQRQSEALVKRRKDTPGEFVTRPQRNQRNIHSRRQTQAIEGSEDNEEENDNNEKDSSSADERSTEHRQRRRKRWARVRPSQPSSSMTSPDGGCNDSDMDISKENRGISRQVSKHGKLTWGRGGFRSNTRHGSGGGSNSKSSRSSRLSKFVDHLRNLDENTDEFDVHLMLVSLDQLSTPSLQQPYLCCRPTLSVKHLYEHVARQTPLPVEGIEIVAVKGCCSTNCDKSADENSALAYDELSKLVIDPHKDELEILQGHETLAGLRSKCISKMGHLIIAYKQKEVS

SEQ ID NO: 162657 - protein, 44 aa, Glycine max
  unsure (1)..(44): unsure at all Xaa locations
  Clone ID: PAT_MRT3847_117899C.1.pep
GLFYILESATCMLPHQACPNHVMDYVGHKKNLXSSSSFLIKKKA

SEQ ID NO: 162658 - protein, 96 aa, Glycine max
  Clone ID: PAT_MRT3847_11789C.1.pep
DIHVLFNASSQRFKRQPFLKLKVFTEPWGCCAYQYHLVFFKHCSSFALHSLFLKLLGPESHNHISLFRSFGLCLKINLLCYALLFVEQMACSLKKK

SEQ ID NO: 162659 - protein, 156 aa, Glycine max
  unsure (1)..(156): unsure at all Xaa locations
  Clone ID: PAT_MRT3847_1178C.1.pep
MDRRKSNETTKSSTTSTVELPPPISASEALIVNALCALGLAFAFWIANTVYSIELVTHPSLTLFFIWITELPIVTLLYSRYRQNRKQCTYLRAVGRGVLGVPVGXLPKTVNWALMMSVFTTIPASCVLGSSWADWRRIFAKEYDQTKPKGSIEYLI

SEQ ID NO: 162660 - protein, 210 aa, Glycine max
  Clone ID: PAT_MRT3847_117900C.1.pep
MESLELVPLLLLHPRASPPLQSIRQPRFPSLLNRKTRNANLRSFSANLQGGGGGATSQGGPFSFEDQTSHHKDDRALVIARETDDFGYLVGFRLLPNSGLEELMSVSHTITEEDSSSDEVEKPKVEDTEEEEAKTRVSHNIVVVTSEAAPYSKTGGLADVCGSLPIALASRGHRVMVVTPRYIHGTSEDLKFAGAVDLDQSTKVFCFGGA

SEQ ID NO: 162661 - protein, 40 aa, Glycine max
  Clone ID: PAT_MRT3847_117901C.1.pep
FSASPSAQGACDSKETPFSSSEWISIAAICYLLSIRCTII

SEQ ID NO: 162662 - protein, 124 aa, Glycine max
  Clone ID: PAT_MRT3847_117902C.1.pep
MSAGTEEDSRSQGSPRRVYSMALHLRSIASILESNLEEKSKLYKEVSLQHLFLMNNLHYMAEKVKGSELRLIHGDEWIRKCNWKFQQHAMKYERASWSPILNLLKDDGIHVPGTNSVSKSLLKE

SEQ ID NO: 162663 - protein, 41 aa, Glycine max
  Clone ID: PAT_MRT3847_117903C.1.pep
IHNNYPIKINSLTFNINSNIIIFNSINNSIPTIISITLPSL

SEQ ID NO: 162664 - protein, 47 aa, Glycine max
  Clone ID: PAT_MRT3847_117904C.1.pep
MNVDMYGVTIFVGCVRFLWLSIKEIERCVIAALYRVSSYTTRRQQTG

SEQ ID NO: 162665 - protein, 56 aa, Glycine max
  Clone ID: PAT_MRT3847_117905C.1.pep
AVKHINSLYFKRAGDINSCWKFKYKTFILYLIFTFKKKWHDNVTGITCRNTHYHFK

SEQ ID NO: 162666 - protein, 66 aa, Glycine max
  Clone ID: PAT_MRT3847_117906C.1.pep
RVLLPVQVPHQFCVAYNIVYPVVNDRSCCSSHVQYHLPTSANTFVSPTYSLFFSVRRAITRNVVDP

SEQ ID NO: 162667 - protein, 59 aa, Glycine max
  Clone ID: PAT_MRT3847_117907C.1.pep
CVLGHSNFPAENYRNHESRNNALKAAFPKSRVSPFCKYLPLSTHSNFIIYQRIGSWGAY

SEQ ID NO: 162668 - protein, 69 aa, Glycine max
  Clone ID: PAT_MRT3847_117908C.1.pep
VLEPLRWRLFRSSLWQLQARHYCVNNLSPRVPNGLFLARPVFSRLMNMFFNCICVIVFNFIFFSSIIIY

SEQ ID NO: 162669 - protein, 65 aa, Glycine max
  Clone ID: PAT_MRT3847_117909C.1.pep
TFVYANITKHSTETNTHKTILEAVLCETSGGKKDPGWPHISIRIYRRPGWSETRFTSKCTKDSDS

SEQ ID NO: 162670 - protein, 79 aa, Glycine max
  unsure (1)..(79): unsure at all Xaa locations
  Clone ID: PAT_MRT3847_11790C.1.pep
TFLFEADDSRHEWNGLVLVAPKVHGTRLEQTSIMRFESYTGAADCTLMRIDXQPRKQPPQNDYVADDVCDIHHASSSML

SEQ ID NO: 162671 - protein, 112 aa, Glycine max
  unsure (1)..(112): unsure at all Xaa locations
  Clone ID: PAT_MRT3847_117910C.1.pep
MIKTIMRAVKIMHSGENQNAAHLPGFTEQIHVSVWTNFKDAFTVLDMRDVNSAEAXNSVLRSKIIKRGLCGDGIKCDFYKCLVAKDGTVGYLYSPTSSSVSIAKDSLKLVDA

SEQ ID NO: 162672 - protein, 80 aa, Glycine max
  unsure (1)..(80): unsure at all Xaa locations
  Clone ID: PAT_MRT3847_117911C.1.pep
VGLMDTATFLARVSMFTEEKVHVSSYLVPDRVSFARQQTKGWXRLSIHHHAASSSPSLCIGRXWVXXPGIXRTRIPAGRT

SEQ ID NO: 162673 - protein, 70 aa, Glycine max
  Clone ID: PAT_MRT3847_117912C.1.pep
EGCLQSPTFGPWSAHLIVGLGPPQRLVILSYQGQLGPRPPPQIWLNSPPGESRKNVEHLKAFSPVRGVAS

SEQ ID NO: 162674 - protein, 90 aa, Glycine max
  unsure (1)..(90): unsure at all Xaa locations
  Clone ID: PAT_MRT3847_117913C.1.pep
GGGGAFSFSSKDIPPLSASDRIEHQRRKVKLLTMLYXVDRIYSHYCELMHMVVNLLDMXMGVRAAVPYSVLAQKXMAVLFMCLMDALTIQ

SEQ ID NO: 162675 - protein, 144 aa, Glycine max
  Clone ID: PAT_MRT3847_117914C.1.pep
MGTPEFPDLGKHCSVSYCKQLDFLPFTCDRCNQIYCLEHRGYIKHKCTKANKHDVTVAICPLCAKGVRLIPDQDPNITWDNHVNVDCDPSNYEKITKKRKCPAPGCKEVLVFSNTIKCRDCLKDHCLKHRFGPDHKCSGPKKLE

SEQ ID NO: 162676 - protein, 92 aa, Glycine max
  Clone ID: PAT_MRT3847_117915C.1.pep
MKVLGAFLALDVDARQRGGSYHAHHPGHTYRILPLQAKTGTEVHYIDDDSCLCRRLDDQEINGIDYKTVAHKCEVYIVNYVLGEPFRSNSET

SEQ ID NO: 162677 - protein, 78 aa, Glycine max
  Clone ID: PAT_MRT3847_117916C.1.pep
GFFSLRSSEISSRKKKQRKMIMVVVMTEILGEYTAVLTRVTERLLPRHGISFGGLRRNLRFASSTTYSSDSTSFLVYF

SEQ ID NO: 162678 - protein, 75 aa, Glycine max
  Clone ID: PAT_MRT3847_117917C.1.pep
TASLSDNDCRYSVFDYYIFTCENCLKTTIFFFVWSAPSSAICPTILYAATKYTVIPELDRVHYDISSPDPSEVHL

SEQ ID NO: 162679 - protein, 69 aa, Glycine max
  Clone ID: PAT_MRT3847_117918C.1.pep
FLCVSCYCAGITCVFFESDFVTITKSKEAAWDFLKLEIFVTDMACYVSLFYNTVCGGFGCESIIMDSYY

SEQ ID NO: 162680 - protein, 41 aa, Glycine max
  unsure (1)..(41): unsure at all Xaa locations
  Clone ID: PAT_MRT3847_117919C.1.pep
PPLRRFPGRNMRRPVAVAVIQNVERKDPNXAKVTKAVQKKK

SEQ ID NO: 162681 - protein, 133 aa, Glycine max
  Clone ID: PAT_MRT3847_11791C.1.pep
TTMEVIVSSTIVVEVAAISLAMVVVVVATMVMVVDSLTLSVKSIINMVMWLPIAITGMMITMSLLNQWPIQIRISTQIKITIKRTNTQTNTKISIPLTNIQTNIPLNLPIHILISLHIGMLHLNAKIHHHKLI

SEQ ID NO: 162682 - protein, 68 aa, Glycine max
  Clone ID: PAT_MRT3847_117920C.1.pep
FYFCHAFSYGFGAVYPLMRVFSPRRRRVLRLSAIGSFPPPEVPHLEHVSSSSRMCVFLSLRLYNLVLF

SEQ ID NO: 162683 - protein, 233 aa, Glycine max
  Clone ID: PAT_MRT3847_117921C.1.pep
MSSSSDLDRQIEQLKRCEPLKESEVKALCLKAMEILVEESNVQRVDAPVTICGDIHGQFYDMKELFKVGGDCPKTNYLFLGDFVDRGFYSVETFLLLLALKVRYPDRITLIRGNHESRQITQVYGFYDECLRKYGSVNVWRYCTDIFDYLSLSALIENKIFSVHGGLSPAISTLDLERTIDRKQEVPHDGAMCDLLWSDPEDIVDNCGLSPRGAGYLFGGRVVTFFTTRKGRE

SEQ ID NO: 162684 - protein, 248 aa, Glycine max
  Clone ID: PAT_MRT3847_117922C.1.pep
MADAEDIQPLVVDNGTGMVKAGFAGDDAPRAVFPSIIGRPRHTGVMVGMGQKDAYVGDEAQSKRGILTLKYPIEHGIVSNWDDMEKIWHHTFYNELRVAPEEHPVLLTEAPLNPKANREKMTQIMFETFNVPAMYVAIQAVLSLYASGRTTGIVLDSGDGVSHTVPIYEGYALPHAILRLDLADRMSKEISALAPSSMKIKVVAPPERKYSVWIGGSILALLGTFQQMWICKGEYDESGPAIVHRKCF

SEQ ID NO: 162685 - protein, 377 aa, Glycine max
  Clone ID: PAT_MRT3847_117923C.1.pep
MADAEDIQPLVVDNGTGMVKAGFAGDDAPRAVFPSIIGRPRHTGVMVGMGQKDAYVGDEAQSKRGILTLKYPIEHGIVSNWDDMEKIWHHTFYNELRVAPEEHPVLLTEAPLNPKANREKMTQIMFETFNVPAMYVAIQAVLSLYASGRTTGIVLDSGDGVSHTVPIYEGYALPHAILRLDLAGRDLTEYLVKILTERGYSFSTSAEKEIVRDVKEKLAYVALDFEQEMETTKSSSAVEKSYELPDGQVITIGSERFRCPEVLFQPSLIGMEATGIHETTYNSIMKCDVDIRKDLYGNIVLSGGSTMFPGIADRMSKEISALAPSSMKIKVVAPPERKYSVWIGGSILASLSTFQQMWISKGEYDESGPAIVHRKCF

SEQ ID NO: 162686 - protein, 377 aa, Glycine max
  Clone ID: PAT_MRT3847_117924C.1.pep
MADAEDIQPLVVDNGTGMVKAGFAGDDAPRAVFPSIIGRPRHTGVMVGMGQKDAYVGDEAQSKRGILTLKYPIEHGIVSNWDDMEKIWHHTFYNELRVAPEEHPVLLTEAPLNPKANREKMTQIMFETFNVPAMYVAIQAVLSLYASGRTTGIVLDSGDGVSHTVPIYEGYALPHAILRLDLAGRDLTEYLVKILTERGYSFSTSAEKEIVRDVKEKLAYVALDFEQEMETTKSSSAVEKSYELPDGQVITIGSERFRCPEVLFQPSLIGMEATGIHETTYNSIMKCDVDIRKDLYGNIVLSGGSTMFPGIADRMSKEIGALAPSSMKIKVVAPPERKYSVWIGGSILASLSTIQQMWISKGEYDESGPAIVHRKCF

SEQ ID NO: 162687 - protein, 107 aa, Glycine max
  Clone ID: PAT_MRT3847_117925C.1.pep
PPPPPPPPHPHPPSPSHTNHPPPLPPHPPPPAPPHTPAKLAPLTQALGPAPPRLDMPFHLNPGNNKAPTPYRPPIQLLQSTLLVCKPHAPETPSRPAKKFQLKISSL

SEQ ID NO: 162688 - protein, 69 aa, Glycine max
  unsure (1)..(69): unsure at all Xaa locations
  Clone ID: PAT_MRT3847_117926C.1.pep
PMVGPKRHFLPLILISLAAFIFYSFHNXYXIVESXNXTLXPXFPNXXXXQXXPNFXFVXKVLGLXXXEX

SEQ ID NO: 162689 - protein, 54 aa, Glycine max
  unsure (1)..(54): unsure at all Xaa locations
  Clone ID: PAT_MRT3847_117927C.1.pep
ACISLQNLILAXTDPTMVTLTWALSLLLNHQMELKRARHELDTLIGKDRKVEES

SEQ ID NO: 162690 - protein, 95 aa, Glycine max
  unsure (1)..(95): unsure at all Xaa locations
  Clone ID: PAT_MRT3847_117928C.1.pep
XSAHYPKIMEKTRSSDQVVVFLDQHNPKPPSMESENHQDKPKHPLKVRALNRLSFSKPKSRILEYDYNVPRNKVAEESDLIQPPFKFSSNDDDDD

SEQ ID NO: 162691 - protein, 77 aa, Glycine max
  Clone ID: PAT_MRT3847_117929C.1.pep
MQVSVTTLTRYTISVEVESYHSITHVKVKIQDKERIHPDQQRVSCSGKQQEDGGSLPVHHIHKESGLHLVHLGHRGF

SEQ ID NO: 162692 - protein, 77 aa, Glycine max
  Clone ID: PAT_MRT3847_11792C.1.pep
PLVLKPALVAAQFTQILFPIKYPFPGLFGGLVMGHILHFKTNNGWAFGYGHPSLAWIPTYESWGGFFWYRLVKICNI

SEQ ID NO: 162693 - protein, 51 aa, Glycine max
  Clone ID: PAT_MRT3847_117930C.1.pep
NNGLESEEGITPLTRKKLLKLMNGDAHYLTEAAPTSFILSADLAPPHILNS

SEQ ID NO: 162694 - protein, 93 aa, Glycine max
  Clone ID: PAT_MRT3847_117931C.1.pep
INPFYSPSLSPFKNHFYMHRNSFTPLQPSFPSCLLHSSLQHYFPPLALIYFLPHSSYQIILSYLPLLQYIDSFSHYFTLSIISSFININISTY

SEQ ID NO: 162695 - protein, 27 aa, Glycine max
  Clone ID: PAT_MRT3847_117932C.1.pep
IKKKKKSNRNLKHSFLILATSETLIKL

SEQ ID NO: 162696 - protein, 47 aa, Glycine max
  Clone ID: PAT_MRT3847_117933C.1.pep
AKRGKKQIALLLFVIHIPKLVLMDFFVHKKLLKSLFRLRIKLIYFRP

SEQ ID NO: 162697 - protein, 70 aa, Glycine max
  Clone ID: PAT_MRT3847_117934C.1.pep
TSHTNGKYWSRTLDNRKTLTGCCEFGDPFKTQLNHVSATLGGRPCAKSLPISALIGDEVLLLYPTNRTLA

SEQ ID NO: 162698 - protein, 82 aa, Glycine max
  unsure (1)..(82): unsure at all Xaa locations
  Clone ID: PAT_MRT3847_117935C.1.pep
HYQTGCIPITPIYICPYLLSYIPYGSKSYISSSLCWIYQMTSXLNPTYKAFNIHSLINTINISILTPSPTTYIFAFLALFKT

SEQ ID NO: 162699 - protein, 51 aa, Glycine max
  Clone ID: PAT_MRT3847_117936C.1.pep
DNAEFRPLVDDSASQLVSCVINVSLVLPVNRGTIVYIVRSVMSSVRAVFAV

SEQ ID NO: 162700 - protein, 55 aa, Glycine max
  Clone ID: PAT_MRT3847_117937C.1.pep
NTIRKLNTKYAKFKGSYTDLYIPKKYSVFFYISRNTVLCAPVKSQEPKLIKYLRL

SEQ ID NO: 162701 - protein, 54 aa, Glycine max
  Clone ID: PAT_MRT3847_117938C.1.pep
EPPARDNMVAVVVVVIIITVSAGTRAAGRYSCKIHNTIYQAVLMSHHMGSHSIV

SEQ ID NO: 162702 - protein, 133 aa, Glycine max
  Clone ID: PAT_MRT3847_117939C.1.pep
VANFYKTSASMAGTPEHLGILISEKLRHPSTWLLLLSLWLLSTWFGTFILCGMLSLSTKFPFFHSYPELSLLKQQKVMQSWSLSYLRPLRMLFRTIKLLTLLVFFTQLDEAEDNPSWKAINYCGPDPEFKSQL

SEQ ID NO: 162703 - protein, 313 aa, Glycine max
  unsure (1)..(313): unsure at all Xaa locations
  Clone ID: PAT_MRT3847_11793C.1.pep
LADADGRIAWQTNTANKGVVAFRLLSNGNMVLLDAQGGFVWQSFDHPTDTLLVGQYLRAKGPSKLVSRLSQQENVSGGYHIHFIYNNNGFCASTKNLPSNLILLLVLHXIIAHAIVPQNETFKFENSGELGPYIVEYGADYRMISIFNSPFQVGFYNTTPNAFTLSFSVYGLXDGVWQVTYTLFDRDSDESECQLPERCGKFGLCEDNQCVACPLENGLLGWSNNCTAKAVTSCKASDFHYYKIEGVEHYMSKYTTGDRVSESTCGNKCTKDCKCVGYFYHKENSRCWVAYDLQTLTRGANSSHVGYIKVPNK

SEQ ID NO: 162704 - protein, 126 aa, Glycine max
  Clone ID: PAT_MRT3847_117940C.1.pep
MAMDVEVAERGSFSGKDYQDPPPAPLIDAEELTKWSFDRALIAESIATLLFLYITALTVIGYKHHTDHADACGGVGILGIAWAFGGMIFILVYCTAGISGSHIKPAQTLGLSSSHTVSLIRAIMYM

SEQ ID NO: 162705 - protein, 124 aa, Glycine max
  Clone ID: PAT_MRT3847_117941C.1.pep
MAEASFFGGVMGNIISILMFLSPVPTFWKIKKHGSTEDFSSLPYICTLLNCSLWTYYGIIKAGEYLVATVNGFGILMETIYIILFLIYAPKGIRGRTAILALILDVVILTAIIIITQLALEGET

SEQ ID NO: 162706 - protein, 116 aa, Glycine max
  Clone ID: PAT_MRT3847_117942C.1.pep
TLPRHNPFYEGLRPGSHDHVLDTFHLTVAITRVHLFPSCALQSSFNSPPGLEAVLPISYSLSLVLQRRIGYVACLASMVPMLTSVSVLAFLSVESVIFHLCMEMPVCFGFRSRNHG

SEQ ID NO: 162707 - protein, 347 aa, Glycine max
  Clone ID: PAT_MRT3847_117943C.1.pep
TRFTLWGILQLLRMYPGKVPDLELLFDCDDRPVVSKERFKGPNAPTPPLFRYCSDQWSLDIVFPDWSFWGWAEINIKPWKHVLKEIKEGNEKTKWKDRVPYAYWKGNPLVSPTRKDLMKCNVTEKDDWNTHLYIQDWDQESSQGYKKSNLGDQCTHRYKIYVEGWAWSVSEKYILACDSTTLYVRSRFHDFFVRGMVPLEHYWPIRDNSKCKSLKFAVEWGNNNTDKAQAIGEAGSKFIHEDMDMDYVYDYMFHLLNEYAKLQRFKPTIPQNAVEYCPETMACGVDGRQNSSMEDSMVKSPSDSNPCTLPPPYEPINLQDFLEKKASSIRQVETWEDQYWEKEKGGQ

SEQ ID NO: 162708 - protein, 62 aa, Glycine max
  Clone ID: PAT_MRT3847_117944C.1.pep
NFFFFFFFFFFFFFFFFFFFFFFCLKIKILVYYGVTRKNHAIDCKKKKDMQVLLTNSNQLTK

SEQ ID NO: 162709 - protein, 98 aa, Glycine max
  Clone ID: PAT_MRT3847_117945C.1.pep
MASFPPPGSLTLCEVNRDLITVDALSDDRANQTYGKILGLVFSPVPFHNLENDASDQEGPTATETAAGESVHRKCPVALLQGLVNNYLGRLFYPNDVH

SEQ ID NO: 162710 - protein, 353 aa, Glycine max
  Clone ID: PAT_MRT3847_117946C.1.pep
MDGREGMAFPGGSAPYYMQHRVGIGGSASGFEPAPGFIPLSNTGIQAESNARGGQGQGGGSVGSSSPFSVEPPQGHTNFNHGIGIGAPSSEPVKKKRGRPRKYGPDGAVSLRLSPMSAPANSTPDASETTPSQKKARGRPPGSGRKQQLAALGEWMNSSAGLAFSPHVITIGVGEDIVAKLLSLSQQRPRALCIMSGTGTVSSVTLRQPASTNASVTFEGRFQILCLSGSYLVAEDGGPSNRTGGISVSLSSPDGHVIGGGVAVLIAGGPVQVMLCSFVYGGSKTMSKLATTIKDESSEPPPQHNDKLASPASAPAPPGQNFLPLSATNLWPGSRPAELKSTHMHTGIDLTHG

SEQ ID NO: 162711 - protein, 110 aa, Glycine max
  Clone ID: PAT_MRT3847_117947C.1.pep
GGISVSLSSHNGHVIGGGVAVLIAGGPVQVMLCSFVYGGSKTKSKLGTTIKDESSEPPPQHNDKLASPASAPAPPGQNYLPLSATNLWPGSRPAELKSTHMHTGIDLTRG

SEQ ID NO: 162712 - protein, 234 aa, Glycine max
  Clone ID: PAT_MRT3847_117948C.1.pep
MIRTHKTGQKYLCKNPKVAKVKSGKPVMQHNFCSIDCEKLRKRIKQKTPDELLEVLKGPCFVRQEGWWSYEFCYQKKLRQLHLEDDKVVQEFVLGVYDPEATAAFNENLSDISTLKDPRSKDASQRYHAHQYTNGTVCDLTNKPRETEVRFVCSEPRAMISSITEISTCKYALTVQCPQLCKHPLFQEERPVWHTIDCNVLPKDHVDAKVRRQNENTEIVIVKDFENSDLESEQ

SEQ ID NO: 162713 - protein, 119 aa, Glycine max
  Clone ID: PAT_MRT3847_117949C.1.pep
DPRSKDASQGYHAHQYTNGTVCDLTNKPRETKVRFVCSEPRPMISSITEISTCKYALTVQCPSLCKHPLFQEERPVWHIIDCNVLPKDHVGAKVRQENENPEIVMVPDLENSDLVRTLM

SEQ ID NO: 162714 - protein, 418 aa, Glycine max
  unsure (1)..(418): unsure at all Xaa locations
  Clone ID: PAT_MRT3847_11794C.1.pep
RLQEADTRGQPVHFIYNNNGFCASTKNLPSNLILLLFLHHXAHAIVPQNETFKFENSGELGPYIVEYGADYRMISIFNSPFQVGFYNTTPNAFTLALRVGLQRSEQLFRWVWEANRANPVGENATFSLGTDGNLVLADADGRIAWQTNTANKGVVAFRLLSNGNMVLLDAQGGFVWQSFDHPTDTLLVGQYLRAKGPSKLVSRLSEKENVDGPYSLVLEPKGLALYYKSKNSPKPILYWFSSDWFTIQRGSLENVTFTSDPETFELGFDYHVANSSSGGNRILGRPVNNSTITYLRLGIDGNIRFYTYFLDVRDGVWQVTYTLFDRDSDESECQLPERCGKFGLCEDNQCVACPLENGLLGWSNNCTAKAVTSCKASDFHYYKIEGVEHYMSKYTTGDRVSESTCGDKCCGLFLPGVG

SEQ ID NO: 162715 - protein, 40 aa, Glycine max
  Clone ID: PAT_MRT3847_117950C.1.pep
YLVFRSFGTVSPFSRIARAIQRVPSDVDYQHVEVEHVPSC

SEQ ID NO: 162716 - protein, 120 aa, Glycine max
  unsure (1)..(120): unsure at all Xaa locations
  Clone ID: PAT_MRT3847_117951C.1.pep
HRGTGHGSLCCLAVPAASASAMNMPCHCAEVQGLYLSGTGLTTMMGHXLNPYLTPEADPGSPLAAEPYYPWXGQNRAMYQPLXPQWCQXQMMMMDVQFHTQPLHIMMLLERDAAASSMMY

SEQ ID NO: 162717 - protein, 48 aa, Glycine max
  Clone ID: PAT_MRT3847_117952C.1.pep
NVSRSNVKKKKKKKKKMRICTDTHIYFYVFRRGRSCDLNRIRGKGTLT

SEQ ID NO: 162718 - protein, 98 aa, Glycine max
  Clone ID: PAT_MRT3847_117953C.1.pep
LKTWLIHFNFCAQGQKREKSQAKQKKGGGGQNPKEKNPRGHQGKGKSPHHQTIGYKFGKTYHKGEKKRKTLNSFWGEKRKRNKKVAGGPPAPPQKKGG

SEQ ID NO: 162719 - protein, 76 aa, Glycine max
  Clone ID: PAT_MRT3847_117954C.1.pep
LKMYKNFDGCRAIYHKLMNSKFILFYNYFLNSQTYYKTFHLIESIKFDSKYFIPKGCLNLFTLYPILYVRVNLVII

SEQ ID NO: 162720 - protein, 45 aa, Glycine max
  Clone ID: PAT_MRT3847_117955C.1.pep
RIAKPCFYVHICSTLYCEQTVSFYRIPTPTPWGEKSMSANMACAC

SEQ ID NO: 162721 - protein, 51 aa, Glycine max
  unsure (1)..(51): unsure at all Xaa locations
  Clone ID: PAT_MRT3847_117956C.1.pep
AKDCALLREDYLECFHHFEEYKXLNPLYXDEQRKLWAASHKGQEDGVNEHH

SEQ ID NO: 162722 - protein, 73 aa, Glycine max
  Clone ID: PAT_MRT3847_117957C.1.pep
LEQNFPWKLSFVDARLGLLLQTPFANLSLHTFIQTCTKSIFAFLFGTLGYSKLSLESKLSLTCLVILKSMFAH

SEQ ID NO: 162723 - protein, 107 aa, Glycine max
  Clone ID: PAT_MRT3847_117958C.1.pep
QDNHEEQKAHLVIIRETEPLEFSHVTYDADAQIMKDVSQAAWLRKAVIPALSQTVKMNTVGTYMDAPESYDNMDGPYVEEGWGDQTCRVCMTDTIGEAEQLDMAGTH

SEQ ID NO: 162724 - protein, 86 aa, Glycine max
  Clone ID: PAT_MRT3847_117959C.1.pep
DFLMTDMTVRDHKKILRNSYKKLALHMLLNASFSAFFLRLLNASFIAFLVRFQSIKLTGVLAKFWPHLYPLLYPSVSLANFNKMMV

SEQ ID NO: 162725 - protein, 129 aa, Glycine max
  Clone ID: PAT_MRT3847_11795C.1.pep
YAFADAWVENSGELGPYIVEYGANYRMISIFNSPFQVGFYNTTPNAFTLALRVRLQLSEHPYGLLWTLTSANLTGETFAYCASSRPLPVSWIGLMHFSLLSRMTVSSIVTTTIYVFNESKPYTVSFTMN

SEQ ID NO: 162726 - protein, 53 aa, Glycine max
  Clone ID: PAT_MRT3847_117960C.1.pep
YLLNRLMVQFSMIENEHYIDCVRNFDILQESSSSLNMGSQIMSRLNLSCDSYH

SEQ ID NO: 162727 - protein, 106 aa, Glycine max
  unsure (1)..(106): unsure at all Xaa locations
  Clone ID: PAT_MRT3847_117961C.1.pep
KTGATHASALSEFLSISCFNFNNGYSFCGVSFNHAVVXSTASQPKAKKTASSKKPLSHPPFAVMIAHAIASLKERTVSSQYSNTKYIEGXHNELPATYKNLVLVHL

SEQ ID NO: 162728 - protein, 72 aa, Glycine max
  Clone ID: PAT_MRT3847_117962C.1.pep
KWKRATPFELASLIIDRLNGDIFYLKMGLLVWLKLVDIAGLGALLYIYQLEGDLLIAIGIVDGADRFYACIG

SEQ ID NO: 162729 - protein, 82 aa, Glycine max
  Clone ID: PAT_MRT3847_117963C.1.pep
LVLKKNLDDNRYIGLLCYYPYEKVKVRVLKPGSDPLLNQITAKYGCQTVRIPRSGILGRMGNNREVTTLTFAIIRRDSSPYN

SEQ ID NO: 162730 - protein, 47 aa, Glycine max
  Clone ID: PAT_MRT3847_117964C.1.pep
MPVAFFVTYSLEELESEYLYSSQRRVECSFLFITPSVFLWLITHIYA

SEQ ID NO: 162731 - protein, 48 aa, Glycine max
  Clone ID: PAT_MRT3847_117965C.1.pep
PPILSSKLQIFYLSTTIIYMITYTQSSFPTLTTRSPKLNNIIKKNVNY

SEQ ID NO: 162732 - protein, 60 aa, Glycine max
  Clone ID: PAT_MRT3847_117966C.1.pep
ISGDERLNYIKIIYCCNHYWKKCTINSYYYNYIYSCHHLNNYYSSLFNNPFNLHELILQY

SEQ ID NO: 162733 - protein, 123 aa, Glycine max
  unsure (1)..(123): unsure at all Xaa locations
  Clone ID: PAT_MRT3847_117967C.1.pep
VLFLVSGCGAGASPPRSAFFGTSXNNVIASRVHISKVSGGSFKTVGVEEKKEIEETQHTDXDRCKGVAYDIXDYHQDNTRGKGMVDSLFQALNDAGTYYAFMSFYEYLTTGLLQFLVHKMDGF

SEQ ID NO: 162734 - protein, 69 aa, Glycine max
  unsure (1)..(69): unsure at all Xaa locations
  Clone ID: PAT_MRT3847_117968C.1.pep
MHPYNRLPSSGHSTPSPPPSPLRSPRLRHAGKSKARAVLSEPGEGGRTAAQQLSWDVXFSVLLRRQGVF

SEQ ID NO: 162735 - protein, 142 aa, Glycine max
  Clone ID: PAT_MRT3847_117969C.1.pep
MKLEAVGGGCKYHPNNKQLPGVCPSCLRDKLLKLYDSSNPTYPLPCPPPPPRPYVSRGHRRHSSLVMDSASSTMVSFNYGLKKSNSIAFASRSQAINREVNGNNKGSKKRGIWSKLLKLTKKNTKEAFMHSRSVSEGNNWHF

SEQ ID NO: 162736 - protein, 75 aa, Glycine max
  Clone ID: PAT_MRT3847_11796C.1.pep
QQKTQKQLNRFYIKAPPTPNKIIFFDTLNNHHNNPLHIQNFTYPNNAFKLHHIIHYSLDLIDDQLNNPKKSNPIL

SEQ ID NO: 162737 - protein, 92 aa, Glycine max
  unsure (1)..(92): unsure at all Xaa locations
  Clone ID: PAT_MRT3847_117970C.1.pep
MTMAMATILLRGTVFAVSSALNMSIYFYKNAHPATFGKDQELMSMYKQWLLKNAKGYNALXKKEKRVQIFKDNLGFIDNHNFQKDRTYKLGL

SEQ ID NO: 162738 - protein, 70 aa, Glycine max
  Clone ID: PAT_MRT3847_117971C.1.pep
DSAAAPILMILVINSVSLETIRKINSLSKRMKFSQVPPGTPGEINKIRNKSLAVSNPSPVKPGYPNNFNP

SEQ ID NO: 162739 - protein, 100 aa, Glycine max
  Clone ID: PAT_MRT3847_117972C.1.pep
RRRIILRARLCWLFLLSPSIIFSRPCPSIIFSRPCPSIIFSRPCPSIIFSKPCPSIIFSRPCPSIIFSRPCKPIILPKASPAIIFSRPCKHINQPNGSRA

SEQ ID NO: 162740 - protein, 46 aa, Glycine max
  Clone ID: PAT_MRT3847_117973C.1.pep
QVGDQYRSNDDGEPSGTAGKPIQTAIDSSGIDRVMVVVIRLTLTLF

SEQ ID NO: 162741 - protein, 35 aa, Glycine max
  Clone ID: PAT_MRT3847_117974C.1.pep
IMPLTYNSSNILLTLSKKTQYHIFKQLPNQSNQIH

SEQ ID NO: 162742 - protein, 54 aa, Glycine max
  Clone ID: PAT_MRT3847_117975C.1.pep
MFSSILPACRHQLQHSGSAGAMTRHAAPVRARTMRRRPGRPASRRSRMSLWHAA

SEQ ID NO: 162743 - protein, 46 aa, Glycine max
  unsure (1)..(46): unsure at all Xaa locations
  Clone ID: PAT_MRT3847_117976C.1.pep
KKPIIRIYXVINTFHHFIIKFNLFKYPTIKIISSRGIFVVLIVYLV

SEQ ID NO: 162744 - protein, 61 aa, Glycine max
  Clone ID: PAT_MRT3847_117977C.1.pep
YTITNIPTIYHYTHPIDIDKIHYPIATNCLNHCPTNATCYHIKPSLTAPLKFIFSTTNSTT

SEQ ID NO: 162745 - protein, 41 aa, Glycine max
  Clone ID: PAT_MRT3847_117978C.1.pep
GRTSKFELWAIVSSGAPFALSYLSNFGFLAFSNFLVFLYGS

SEQ ID NO: 162746 - protein, 90 aa, Glycine max
  Clone ID: PAT_MRT3847_117979C.1.pep
MAHAITMRIGTGILGKLDNKRSQLALSLNIGDSASDDDHGNPAMSSLRWRNFYTNTAYCLGLHSYVCKTFMTGCLILFPDAVTLFITWWY

SEQ ID NO: 162747 - protein, 167 aa, Glycine max
  Clone ID: PAT_MRT3847_11797C.1.pep
PIKPDDLSPLFPDELIRQEIASDRFIDIPDEVLDVYKLWRPTPLIRAKRLEKLLDTPARIYYKYEGVSPAGSHKPNSAVPQAWYNLQAGVKNVVTETGAGQWGSALAFACSIFGLGCEVWQVRASYDSKPYRRLMMQTWGAKVHPSPSMITEAGRRMLQEDPSSPGS

SEQ ID NO: 162748 - protein, 145 aa, Glycine max
  unsure (1)..(145): unsure at all Xaa locations
  Clone ID: PAT_MRT3847_117980C.1.pep
EGFAIRSDVGEKKLLLLFVFHILQEPEPIDWDYYRKGIGTRLVDMYKEHYESMFXLCILIFLIEVPKFVDTVTPQYKTKFDALLIELKEAEEKSLKESERLEKEIVEVQELKKKLSTMTADEYFEKHPELRKKFDDEIRNDNWGY

SEQ ID NO: 162749 - protein, 34 aa, Glycine max
  Clone ID: PAT_MRT3847_117981C.1.pep
INEIFYTIFLNHLIGLPININTHDSVQIHPQKKT

SEQ ID NO: 162750 - protein, 168 aa, Glycine max
  Clone ID: PAT_MRT3847_117982C.1.pep
MSGTVKKVTDVAFKVGRNIDWDGMAKLLVSDEARREFSNLRRAFDEVNSQLETKFSQEPEPIDWDYYRKGIGTRLVDMYKEHYESIEVPKFVDTVTPQYKTKFDALLIELKEAEEKSLKESERLEKEIVEVQELKKKLSTMTADEYFEKHPELRKKFDDEIRNDNWGY

SEQ ID NO: 162751 - protein, 211 aa, Glycine max
  Clone ID: PAT_MRT3847_117983C.1.pep
MREAEEEKIAGENERNGEESNRCSIQGGKEHRVWEKKSKIAVKMSGTVKKVSDVAFKVGRNIDWDGMAKLLVSDEARREFSNLRRAFDEVNSQLQTKFSQEPEPIDWDYYRKGIGTRLVDMYKEHYESIEIPKFVDTVTPQYKPKFDALLIELKEAEEKSLKESERLEKEIAEVQELKKKLSTMTADEYFEKHPELRKKFDDEIRNDNWGY

SEQ ID NO: 162752 - protein, 94 aa, Glycine max
  unsure (1)..(94): unsure at all Xaa locations
  Clone ID: PAT_MRT3847_117984C.1.pep
VRXSGSTQRPIPHVVLSSRSNPSKGGSTMAAAASSFGTTCRLRRAAQAFAISHSHILRSNANLSLQRNFCSHLTVSTSSGLHLLHLMCFFLYVF

SEQ ID NO: 162753 - protein, 190 aa, Glycine max
  unsure (1)..(190): unsure at all Xaa locations
  Clone ID: PAT_MRT3847_117985C.1.pep
MDPKFIGKPLAMVDLDRDRMSERGSHHRRSHSDTSFRFPANFDELLLFDPSDLDISGLPSPLPLPSQGAGGVVPMSVVSEESGGRPRPSGASAGGHLRSLSVDSDFFDGLGSGVGGDERGAGNGGGERHSNSMEGXSTTSFEADSATMMDGMKKATAPDKLAELALTDPKRAKRMLANRQSAARSKERKI

SEQ ID NO: 162754 - protein, 75 aa, Glycine max
  Clone ID: PAT_MRT3847_117986C.1.pep
SSSYMSPTSAHDLEVRVAGAHKTSFLLSWALDLDGPWSWSFSGYYLFFQLPSAANTLVLFMAGASSLLLSISDLA

SEQ ID NO: 162755 - protein, 77 aa, Glycine max
  Clone ID: PAT_MRT3847_117987C.1.pep
LFPRLHGCSSMTTAPISIREITKSALKALGTNDVRVDVLSYKSAWIHRILTVPLSIRVRLAGPDTPDEDAIEELSSL

SEQ ID NO: 162756 - protein, 55 aa, Glycine max
  Clone ID: PAT_MRT3847_117988C.1.pep
LKTCTPLSKQSNQVMIYKSTLTENVNNENNRVWTIRIHVETYYFILFDFPVCGSS

SEQ ID NO: 162757 - protein, 72 aa, Glycine max
  Clone ID: PAT_MRT3847_117989C.1.pep
GELMGFPQNDEQKAIVESATEGLKGMAHLLRILSHQHYHLRTNHSYARRFNDKIMIYVFKRRTGHARLRRAP

SEQ ID NO: 162758 - protein, 126 aa, Glycine max
  Clone ID: PAT_MRT3847_11798C.1.pep
MDVLSLRSSSSLSMSKPFESHGLPLSSKQHRRPSSVKFGSVSCRATTLTQENLYKILSVSPGSATMDEIKRAYRSMALQYHPDVCHDPSMKEESTRMFVQLNAAYETLSNPRLREQYDSELGLRSE

SEQ ID NO: 162759 - protein, 58 aa, Glycine max
  Clone ID: PAT_MRT3847_117990C.1.pep
CVSCLHQNRSGKEIPCLGGRVMKKDLTAMEAPFFFTLTIPSDNWAPLGGLFTKSDGTR

SEQ ID NO: 162760 - protein, 79 aa, Glycine max
  Clone ID: PAT_MRT3847_117991C.1.pep
DFRFLHDRVSDYFAECLRKDHEFLKSGLVTKVSLAAKWCPSVDSSFDRHTLLCETIGKRVFPRDEYKEYEGVEEAYYAY

SEQ ID NO: 162761 - protein, 83 aa, Glycine max
  unsure (1)..(83): unsure at all Xaa locations
  Clone ID: PAT_MRT3847_117992C.1.pep
MAGLAAIEIAQKVSXAWRSLHAEWKYSXKGNSKNGRRARRRERINMPSQNRGXAGCSTSSTSVTSSNGTVXDRLSXRTFSWHN

SEQ ID NO: 162762 - protein, 70 aa, Glycine max
  Clone ID: PAT_MRT3847_117993C.1.pep
MKARYRTATRARSLVAIAAGMCLAGVVMAQSTTGSVYGTVPAGTVITITSNTGISRTLTAGSDGRYNAAA

SEQ ID NO: 162763 - protein, 131 aa, Glycine max
  Clone ID: PAT_MRT3847_117994C.1.pep
GDVRHQLQFSAIGAHVGGAFCPGQSEYVLVARNKLNLYKTGVFLLVNDLLLLLEDFDLSCVFSTFLCAPRTCLLLETSNEFFSPLFPIDLSLPDPLKGDVSLEESLKGLSTSNTFPNSLPLLALAIFRPPL

SEQ ID NO: 162764 - protein, 575 aa, Glycine max
  Clone ID: PAT_MRT3847_117995C.1.pep
MNLGTCAAGAPYRWVHLLPHEGKRRCASVRVRANASVGGGKGDGETASYLDMWKKAVERERKSASFNSIADRVAANTDDNNDDDLEKKTSEFQKLLQVSAEERDRVQRMQVIDRAAAAIAAARQLLQERSAADSSHHEATADERRDESGSGMGVQSEGIRVSESETRGNGVPGPDFWSWTPPVESDVPSDDGSGLQLDTKSSVRPTLPSAVVEKEWTPQFLSIPFESLLSQREGRDTLPPFQSFLEVEEAETTSDPESLSESPSLSLSLEEEQIHGESSFDYAAEAAHALSEANKSSPIGVNPDGSRWWKETGIERRPDGVICRWTMTRGVSADKAIEWQEKYWEASDDFGYKELGSEKSGRDANGNIWREFWRESLCLENGLMSFEKTADKWGRNVNGNEWQEKWGERYNAAGQTEKWAHKWCSIDPNTPLEPGHAHVWHERWGGKYDGYGGSIKYTDKWAERFVDGGWDKWGDKWDENFDPNANGVKQGESWWEGRHGDRWNRTWGEQHNGSGWIHKYGQSSSGEHWDTHAREDTWYEKFPHYGFFNCFENSVQLREVPKPSEILEIQQVQEP

SEQ ID NO: 162765 - protein, 84 aa, Glycine max
  unsure (1)..(84): unsure at all Xaa locations
  Clone ID: PAT_MRT3847_117996C.1.pep
REHLRLVYLYALSCTSSLCEESMARSAFCSSKCSNRSSRAAMKALVDEVLXICCGYCHXEPSVTYENHYDGPCYLDMNNCKVNV

SEQ ID NO: 162766 - protein, 67 aa, Glycine max
  unsure (1)..(67): unsure at all Xaa locations
  Clone ID: PAT_MRT3847_117997C.1.pep
GIKGMGEFGGPIKPXSLYKSGEEFKGKRVLVVGCGNSGMEVCLDLCTHNATPSLVVRDPVRTLTLSF

SEQ ID NO: 162767 - protein, 556 aa, Glycine max
  Clone ID: PAT_MRT3847_117998C.1.pep
MSLLRIQPSLSLHNQTLSLSFSSSLSYSSSVLFKHSTITHGHTQSLCFYHPRLSVVTTCSISKIHSYGTVDYERRPIVGWNDVYRRISLNPNPQVGSAEVLNQWENEGRHLTKWELSRVVKELRKYKRFPRALEVYDWMNNRPERFRVSESDAAIQLDLIAKVRGLSSAEAFFLSLEDKLKDKKTYGALLNVYVHSRSKEKAESLFDTMRSKGYVIHALPFNVMMTLYMNLNEYAKVDILASEMMEKNIQLDIYTYNIWLSSCGSQGSVEKMEQVFEQMEKDPSIIPNWSTFSTMASMYIRMDQNEKAEECLRKVEGRIKGRDRIPFHYLLSLYGSVGKKDEVCRVWNTYKSIFPRIPNLGYHAIISSLVKLDDIEGAEKLYEEWISVKSSYDPRIGNLLMGWYVKKDDTDKALSFFEQISNDGCIPNSNTWEILSEGHIADKRISEALSCLKEAFMVAGGSKSWRPKPSYLSAFLELCQEQNDMESAEVLIGLLRQSKFSKIKVYASIIGSPDCTIDNGELQSKIDITDRTDDAVDSENMDDDSQMLLNQLDSRF

SEQ ID NO: 162768 - protein, 121 aa, Glycine max
  Clone ID: PAT_MRT3847_117999C.1.pep
HPTGKYWEILSEGHIADKRISEAMSCLKEAFMAAGGSKSWRPKPSYLSAFLELCQEQDDMESAEVLIGLLRQSKFNKSKVYASLIGSSDELPKIDTADRTDDAVDSENMDNDLLNQLGSSS

SEQ ID NO: 162769 - protein, 106 aa, Glycine max
  Clone ID: PAT_MRT3847_11799C.1.pep
NQCVACPLENGLLGWNNNCTAKTVTSCKASDFLYFIIEGVEHYISKYTTRDKVSESTCGNKCTKDCKCVGYFYHKENSRCWVAYDLQTLTRGANSSHVGYIKVPNK

SEQ ID NO: 162770 - protein, 109 aa, Glycine max
  Clone ID: PAT_MRT3847_1179C.1.pep
SPSPTYTVINTNTQSICLILVLLWRLPWRRIYAQTMPSGSIEYLICLPAHGAVIGAWFGAWPMPLDWERPWQEWPISVSYGTVAGYLVALVASLGFVLACGRSQHIKRE

SEQ ID NO: 162771 - protein, 50 aa, Glycine max
  Clone ID: PAT_MRT3847_117C.1.pep
SKFLTPEALSIAMDHTSDPKLSHSYIISLPLFYLSSIFFFHVSKFLTGFK

SEQ ID NO: 162772 - protein, 139 aa, Glycine max
  Clone ID: PAT_MRT3847_118000C.1.pep
KGAQQKHRFLTMKISQQQKRIASEGTFTGIEAIFQATPWAENCFSPIQQSPTLIEQDDNIVDISTACNDYPNSNEYYSSKRFKSSHDAVHGGICFLPSNLEGNQEKNERSVQDSFWRAETSSCDSTLDKPLEINYIDIS

SEQ ID NO: 162773 - protein, 398 aa, Glycine max
  Clone ID: PAT_MRT3847_118001C.1.pep
MDDIVGYGFRPTDEELVKFYLKHKLLDDDPCVHFILDVDLCEVEPWDLPLLLADSAVRFNDPEWFFFSPVDYKYSNSKRFNRTTKCGFWKPTGKDRGIRTGDTDNTVIGTKKTLVYYQGRVSCGVKSNWVIHEYHAVTFHENQRTFVLCCLMKKPGKTTEGGTDPLICDEGEPSRSMVSDYENQPTAEGIASEGTFTGIEAIFQATPWAENCFSPIQQSPTLIEQEGASFPNYAFNNAYFRNEDNIMQTPFETTKEDEFLNLILADESIVINEENKHDFVNSSTQSESLKRVYCESSDTDAEVISKLDDNIVDISTACNDYPNSDEYYSSKRFKSSHDAVHGGICFLPSNLEANQEKNESMFQDSFWGAETSSCDSTLDKPLEINYIDISSSPFTPWR

SEQ ID NO: 162774 - protein, 343 aa, Glycine max
  Clone ID: PAT_MRT3847_118002C.1.pep
MGKLGKKARKFAKKNLQSVLRNKRKLNSKFKRKASKRDNQDIEENLENDATNPSNERIVVEEFQDTSLDALFSEDDSEVLGDDSDSDGFLSEDSSFSHVIGSDNENENYIGNSNGASSLSVQNKDICADLLKKAKKLNKLKEKDPGFSKFLESYNMKIEQTEDEEISSDDEKSLDRVQPVDNNSACSHVGKLLTSASVDSLCKVIKEQCNVPALTCLINAYREACHNDSEAISVSGCVFTHGIQKSETFCKILMFMLHEADTTFRRLLGISSSSSRKETVLDLKNTTKWLSVRPLIKSYIRSTVFLLNQVTDSEILAFSICRLRASIIFLFAFPSLLRNLLKI

SEQ ID NO: 162775 - protein, 79 aa, Glycine max
  Clone ID: PAT_MRT3847_118003C.1.pep
TKQTLLKGQNGLLNLSYPSFIKKGLPKSSPWGPVEIQKTRLGIVQLKLSVKTLKTALRPLAVFFFPIFSPNFGLNPGTF

SEQ ID NO: 162776 - protein, 154 aa, Glycine max
  Clone ID: PAT_MRT3847_118004C.1.pep
MDDDIVGLGFRPTEQELVNFYLKHKLLGDDPRVHVIPVIDLCDVEPWNVPASSSAIRFGDPDWFFFSPVDFKYLKSKRFNRTTKCGFWKATGKDRDIRTRDTDNTVIGTKKTLVYYQGRVSCGVKSNWVIHEYHAVTFHENQVRFFYSINFNTA

SEQ ID NO: 162777 - protein, 57 aa, Glycine max
  Clone ID: PAT_MRT3847_118005C.1.pep
IITSPTIKKYKVSTTTDNIQKNNNRKAYTSVAIPLPILVLLISISNSSLIRSSPLVL

SEQ ID NO: 162778 - protein, 68 aa, Glycine max
  Clone ID: PAT_MRT3847_118006C.1.pep
NDPHERAPHVLPITLISFLGEINPPKTVIIVGLGFVEPYPLVCGEKFLKRAKLYSCRGICAEIVKDFP

SEQ ID NO: 162779 - protein, 53 aa, Glycine max
  Clone ID: PAT_MRT3847_118007C.1.pep
KQPMLGCRDASQVLKKLQETKFAYPNGLIRIIGLTNVHQVQCIRFIAYKPPEF

SEQ ID NO: 162780 - protein, 44 aa, Glycine max
  Clone ID: PAT_MRT3847_118008C.1.pep
MLLKVIARIFSISTAIFSTYCDPFLDRSPLQKHSKNRFLIDKLL

SEQ ID NO: 162781 - protein, 77 aa, Glycine max
  Clone ID: PAT_MRT3847_118009C.1.pep
PFFKNLGLIFIPKRIKKYISHLPLLLHHHHHHHTTTYTLAPIPHPHHHHHHHLPNPNHVLIHVLIKCQCRNSETQER

SEQ ID NO: 162782 - protein, 52 aa, Glycine max
  Clone ID: PAT_MRT3847_11800C.1.pep
VAAFFCGPLRGVCAVVGTSSGVALCQHLSLVSLLAAADNRRRVGLTRFSGPV

SEQ ID NO: 162783 - protein, 133 aa, Glycine max
  Clone ID: PAT_MRT3847_118010C.1.pep
RAMIVTGGSFKSEITRCRLKEVIKGSLSSVPGSKSDNRLETRKHILSLLTNPQNFRDRCEPLAALRFQSHHAAVENILRGLQKLPCQALIAMRRKLKGVKASVPQLQPRRHGWTRDHLIKVVKKISMEMLSQL

SEQ ID NO: 162784 - protein, 150 aa, Glycine max
  unsure (1)..(150): unsure at all Xaa locations
  Clone ID: PAT_MRT3847_118011C.1.pep
KSLKLNNKDVFVLDVDDTTLSNLQYFANHGFGVEPHNTTAFKNWVLDGEAFALPETLKMYNKLLALGIKIVFLSERPLSLRDVTAKNLKEVGFNTWEKLILRDPSEYSGKXQLRERSYRIIGNVGDQWSDLLGSNKGTRTFKLPNPLYYD

SEQ ID NO: 162785 - protein, 110 aa, Glycine max
  unsure (1)..(110): unsure at all Xaa locations
  Clone ID: PAT_MRT3847_118012C.1.pep
MKMKVLVLFVATVLVAYECHGSDYQKFPLQMKTGFGGQYSNDVACASWRLGVEAYNVIKWQTVPAACGEYIADYVLXDQYRXDSNTVKQQTYFYAKSLILTTQDVLVLDL

SEQ ID NO: 162786 - protein, 116 aa, Glycine max
  unsure (1)..(116): unsure at all Xaa locations
  Clone ID: PAT_MRT3847_118013C.1.pep
MNMKVLVLFVATVLVTYECHGSDHHKFPLQMKTGFGGQYSNXVACASWMLGVEAAXVVTSQTVPAACGEYIADYVPRDQXYTLDSKTVXQHAYFDAKTLKLTNKDVFVLDVYDTTL

SEQ ID NO: 162787 - protein, 87 aa, Glycine max
  Clone ID: PAT_MRT3847_118014C.1.pep
GNIIFHPKFLPNIRLPPSGDAMIPIGANIMIPYRNFLWKGPPPKTFFWNCVPGPPGFEKEKNFYFLFLSPGENCLLGFLAGPPLFFV

SEQ ID NO: 162788 - protein, 109 aa, Glycine max
  Clone ID: PAT_MRT3847_118015C.1.pep
MKMTVLVLSVATVLVTGEGHGSDYHKFPLHMKTGFGGQYSNEVACANWMLGVEANIVVTWQTVPAACGKYIADYVLGDQYTSHSKTVNQHAYFYAKSLKLTNKDVLVLD

SEQ ID NO: 162789 - protein, 107 aa, Glycine max
  unsure (1)..(107): unsure at all Xaa locations
  Clone ID: PAT_MRT3847_118016C.1.pep
MMKINVLVLFVATVLVAYECHGSDYHKFPLQMKTGFGGQYSTEVACANWWHGVEPNNVVKWQTVPAACRXYITDYVLXYQYTSDSKTVNHEAYFYAKFLKLTNTDVF

SEQ ID NO: 162790 - protein, 188 aa, Glycine max
  Clone ID: PAT_MRT3847_118017C.1.pep
MSKRFLCKFFAHGACLKGEHCEFSHDWKDPPNNVCTFYQKGVCAYGSRCRYDHVKASREQSSAPSSSVIEPQTLVSDTVAFGNTRAASNGVATGAEFSLSSSPYLLPSEPAWNRELVWNQEFGYHEPLWEDNVGQSIITSPSELSICSFAGAGNCPRGEKCPHIHGDLCPTCGKHCLHPFRPEEREEH

SEQ ID NO: 162791 - protein, 197 aa, Glycine max
  Clone ID: PAT_MRT3847_118018C.1.pep
MKMKVLVLFVATVLVAYECHGSDYQKFPLQMKTGFGGQYSNEVACASWRLGVEANNVVKWQTVPAACGEYIADYVLGDQYRSDSKTVNQQAYFYAKSLKLTNKDVFVLDVDDTTLSNLQYFANHGFGVEPHNTTAFKNWVLDGEAFALPETLKMYNKLLALGIKIVFLSERPLSLGDVTAKNLKEVGFNTWEKLILR

SEQ ID NO: 162792 - protein, 245 aa, Glycine max
  Clone ID: PAT_MRT3847_118019C.1.pep
MAILILSHAFGEDNVGQTIITSPSELSICSFAAAGNCPRGEKCPHIHGDLCPTCGKHCLHPFRPEEREEHMKSCENKHKHLDALKRSQEIECSVCLELVLSKPTAAECKFGLLSECDHPFCISCIRNWRSSNPTLGMDVNSTLRACPICRKLSYFVIPSVIWYSTTEEKQEIIDNYKAKLKSIDCKHFDFGEGNCPFGTSCFYKHAYRDGRLEQVVLRHLGAADGDTVIAKDIRLSDFLSNMHLR

SEQ ID NO: 162793 - protein, 98 aa, Glycine max
  Clone ID: PAT_MRT3847_11801C.1.pep
PRAEFGTRSARGGSSVNSDDSLVLGNEFDQNSTFQEAIMHMLEENFGEEYHNSLIHSSTTEVYNSQLKSTNQVDGSDFINCIPGNELCSNFSLTNHAM

SEQ ID NO: 162794 - protein, 255 aa, Glycine max
  unsure (1)..(255): unsure at all Xaa locations
  Clone ID: PAT_MRT3847_118020C.1.pep
MKMKVLVLFVATVLVAYECHGSDYQKFPLQMKTGFGGQYSNEVACASWRLGVEANNVVKWQTVPAACGEYIADYVLGDQYRSDSKTVNQQAYFYAKSLKLTNKDVFVLDVDDTTLSNLQYFXNHGFGVEPHNTTAFKNWVLDGEAFALPETLKMYNKLLALGIKIVFLSERPLSLRDVTAKNLKEVGFNTWEKLILRDPSEYSGKLSFEYKSAEREKLEKEGYRIIGNVGDQWSDLLGSNKGTRTFKLPNPLYYD

SEQ ID NO: 162795 - protein, 81 aa, Glycine max
  Clone ID: PAT_MRT3847_118021C.1.pep
LKLFSEKFCSAHLYFNRVYHGTTNRFYMFRVDYADQTGRNEHKKGENSIKKENNNKKKDSRRICRFGCQLYVSVDQRLTWN

SEQ ID NO: 162796 - protein, 267 aa, Glycine max
  Clone ID: PAT_MRT3847_118022C.1.pep
MHKFVEIARSNKMKMKVLVLFVATVLVAYECHGSDYQKFPLQMKTGFGGQYSNEVACASWRLGVEANNVVKWQTVPAACGEYIADYVLGDQYRSDSKTVNQQAYFYAKSLKLTNKDVFVLDVDDTTLSNLQYFANHGFGVEPHNTTAFKNWVLDGEAFALPETLKMYNKLLALGIKIVFLSERPLSLGDVTAKNLKEVGFNTWEKLILRDPSEYSGKLSFEYKSAEREKLEKEGYRIIGNVGDQWSDLLGSNKGTRTFKLPNPLYYD

SEQ ID NO: 162797 - protein, 139 aa, Glycine max
  Clone ID: PAT_MRT3847_118023C.1.pep
MPPALPVMQEAANRALPYPYQNNEIIGGDSVESIQRRLLGRFPSPSAHEIQMARIEAENLFEVKVDICQVMAGLHPSGDWMGRGARALDNLRTATGEESLSKLLRMLEDLQTAGLQSATFRQLADRVAFRADGDQHSAT

SEQ ID NO: 162798 - protein, 66 aa, Glycine max
  Clone ID: PAT_MRT3847_118024C.1.pep
MGNPGPGTPGFHFFFCPEKTKWLPGNHFFFGRVFKGFTVFKAFKKVGSSSGGPSKPVVFPNWGHPF

SEQ ID NO: 162799 - protein, 138 aa, Glycine max
  Clone ID: PAT_MRT3847_118025C.1.pep
SKTKRGKKKKKSSKKKPPLWEKKKGGAQKKPRKKDFGRKHPPPQGQKKKGIGWEKGQPHPRQKNNGDGPPKILNPKSKSGSINRGRNKGLAIKKPKKRRGGLKGPLKGFYPLTKRVGPQFYLTIHTTGSQKKRPKPGQ

SEQ ID NO: 162800 - protein, 39 aa, Glycine max
  Clone ID: PAT_MRT3847_118026C.1.pep
PKGQKGCGYGIPRELAATAKPLKTGLHFFELGNCSSYIV

SEQ ID NO: 162801 - protein, 96 aa, Glycine max
  Clone ID: PAT_MRT3847_118027C.1.pep
STASRLSLFSLTLFVFNFLTCIILGDVHTLTLIFYKNFFFLSLFRTIIHVTNSSQESSMFKGIICTIVYKIPNLFQYSYNHALLISDTFKDASLSL

SEQ ID NO: 162802 - protein, 81 aa, Glycine max
  unsure (1)..(81): unsure at all Xaa locations
  Clone ID: PAT_MRT3847_118028C.1.pep
MADQLTDEQIFEFKEAFILFDKDGDGFITTKGLGTVIRSLGLNPTXAELLDMINXCYAYGNGTIDFPEFLDFMARKMKDTD

SEQ ID NO: 162803 - protein, 35 aa, Glycine max
  Clone ID: PAT_MRT3847_118029C.1.pep
VLSSNYGSAMLLLWMHELKPLVNFCNYYDMNLISV

SEQ ID NO: 162804 - protein, 100 aa, Glycine max
  Clone ID: PAT_MRT3847_11802C.1.pep
PTPPAPPPPSRHPPPPSTRSPPPRSPDHPPRPHTARPVSQRQPPPTNRPRIQSPVPRTGTADNHSTPPEDPVLGPGPPIQGTGKPASLGPTQSEHRKLPP

SEQ ID NO: 162805 - protein, 41 aa, Glycine max
  Clone ID: PAT_MRT3847_118030C.1.pep
TTFHFSFCNILLTKSNDENLSLISWLKNAQNNVCCIFSLIK

SEQ ID NO: 162806 - protein, 53 aa, Glycine max
  Clone ID: PAT_MRT3847_118031C.1.pep
CAGPGSRIGTQFGSGYQGPRGFHYETHRCPGYASGPGDAVLAPGALSEAGVRK

SEQ ID NO: 162807 - protein, 114 aa, Glycine max
  unsure (1)..(114): unsure at all Xaa locations
  Clone ID: PAT_MRT3847_118032C.1.pep
HAILMNMPNARLTMGRYSGGHHAFEVSLMTCAYIKRAESITLXAGHRLGDTINFEALAHKLDALXEIQEQSVEKXLQEDFLTAWSTQERTAATMWTGGRTYLSAIGHDGSTSTI

SEQ ID NO: 162808 - protein, 236 aa, Glycine max
  Clone ID: PAT_MRT3847_118033C.1.pep
MGKASKWFRGLLGLKRPDSPSPKEKRRWTFVKSYREKDPTRIVAATPRRCPATTAGGNTPEEWAAVKIQAAFRGSLARKALRALKGLVKLQALVRGHIERKRTAEWLQRVQALLRVQAQIRAGRAQIRHPPSSSALPRRPAAPDLLVVPRCRSRSSDSRIDEQPWTQRRSWTRGCSMDEERSVRILEIDSVKPHVTSKRRNLFYSPSQAMVASDHYSGCYLTTTSPSSYNSPLKIN

SEQ ID NO: 162809 - protein, 97 aa, Glycine max
  Clone ID: PAT_MRT3847_118034C.1.pep
SSSITKYRLVSNNPRSGPPYSSPLPNSSPSPIFFLHLFTQLSTSSSTNSTIPTSLTLPPIFYTLILNMHNFITNIAYFNLITTLLIISIITIIIYTT

SEQ ID NO: 162810 - protein, 537 aa, Glycine max
  Clone ID: PAT_MRT3847_118035C.1.pep
MAALNLCRMALRSSKLLSRPYHLLSVQLQMQMQPSSPPLTRKMSMDAQSVASQLNSSGLLRTQGLIGGKWSDAYDGKTIKVYNPATGESIVDVACMGGRETNDAISAAYDAYGSWSKTTAAERSKLLRKWYDLLMVHKEELAQLITLEQGKPLKESVGEIVYGAGFIEFAAEEAKRIYGDIVPAPFSDRRLFVLKQPVGVVGAITPWNFPLAMITRKVGPALACGCTVVIKPSELTPLTALAAVELPIQAGIPPGVVNVVMGNAPDIGDALLASPQVRKITFTGSTAVGKKLMAGSAETVKKVSLELGGNAPCIVFDDADLDVAVKGTLAAKFRNSGQTCVCANRIIVQEGIYEKFANALRDAVQNMKVGDGFSEGVSQGPLINEAAVKKVESLIHDATSKGAKVILGGKRHSLGLTFYEPTVISDVNSDMHISREEAFGPVAPLLRFKTEEEAIRIANDTNAGLGSYVFTNSIQRSWRVAEALEYGLVGVNEGVISTEVAPFGGFKQSGLGREGSKYGMDEYLEIKYVCFGNMNKE

SEQ ID NO: 162811 - protein, 237 aa, Glycine max
  Clone ID: PAT_MRT3847_118036C.1.pep
KKVSLELGGNAPCIVFDDADLDVAVKGTLAAKFRNSGQTCVCANRIIVQEGIYEKFANALRDTVQNMKVGDGFSEGVAQGPLINEAAVKKVESLIHDATSKGAKVILGGKRHSLGFTFYEPTVISDVNSDMRISREEAFGPVAPLLRFKTEEDAIRIANDTNAGLGSYIFTNSIQRSWRVAEALEYGLVGVNEGVISTEVAPFGGFKQSGLGREGSKYGMDEYLEIKYVCLGNMHKA

SEQ ID NO: 162812 - protein, 90 aa, Glycine max
  Clone ID: PAT_MRT3847_118037C.1.pep
CFFFFFDLFFFFFENKMQRAHIGYQKQNPWALRGLIKFFDAWGRPKILFGPPPYKAKNKIVLGLVWDGRLLFDKKMFFVAQFDLKGAFSL

SEQ ID NO: 162813 - protein, 66 aa, Glycine max
  Clone ID: PAT_MRT3847_118038C.1.pep
FQESLNYYLLICVRLLKGQKITLWAGHILAESLPFPLLVYSLNTLLFDIGLCDRLKLVLSISQLSV

SEQ ID NO: 162814 - protein, 74 aa, Glycine max
  Clone ID: PAT_MRT3847_118039C.1.pep
PARNPRADSTRPPCGPARDRKREGDVYNTVRGLKTGNKREPTRQKESGTGGHSRAPNWIRDRTQLTVQATDCEE

SEQ ID NO: 162815 - protein, 104 aa, Glycine max
  unsure (1)..(104): unsure at all Xaa locations
  Clone ID: PAT_MRT3847_11803C.1.pep
FVGCFISGLSSKKSGNNHGCGAVQTYQMSLITRWSCYHHINFWKQGIDRILLNLLIENIQDQLSQPLFSLXKQISISKEGLKANYHLVLISYLWYILGWLTIYC

SEQ ID NO: 162816 - protein, 139 aa, Glycine max
  unsure (1)..(139): unsure at all Xaa locations
  Clone ID: PAT_MRT3847_118040C.1.pep
MSEELSAATSYTEDDFYCPVCQEVLKTPVRTAACQHVFCRKCFLTAMRESGIHCPLCRGSVTRRERACPERALDLENIMRRFSGSCRCCSKKIKFYRMRHHYKSCKKYQDEYGXFSSVIPNFKISQDSVRSSNRSETSA

SEQ ID NO: 162817 - protein, 53 aa, Glycine max
  Clone ID: PAT_MRT3847_118041C.1.pep
IIYIGEWKTIYVFFKKMLGMGQSCLQGMFSNTCITCGGYNPHLSKYMLYFLCS

SEQ ID NO: 162818 - protein, 102 aa, Glycine max
  Clone ID: PAT_MRT3847_118042C.1.pep
GGKHKRPPPFKGKLPSKVSFATMGEKIIQKGGLKMGCTPLFNRFYNPFISLFQKNFYCPLFSAPGFLRGAFNPFFLFAKKGFFSLSLRNFFHPCPPHFSKGG

SEQ ID NO: 162819 - protein, 462 aa, Glycine max
  Clone ID: PAT_MRT3847_118043C.1.pep
TRPNFYKALQYTYSVNWTREIDYISPSCFMYLLDRLLLLTSHGKWKGFIFATKSSFVEWLIHQDENSFPNLSVMADVQSGGEHIHRFIFSVLRELLNDQNGTISWIRKSNLNVKNYFPLFLLRLIVSLCLLHLSSGKYLELLHNLLKKNHVLSQLPLEFRNVLQRPRNPLVLKVFAEAFKLIGNPLVVARFHNTSSEILCPDAVFVDLTICQRKFILEVLFPNRVDSVDEETAAVLEASDSTSKEFSSTNCSSFPNKSSPIVTAQTSDREIIGMSTNADSFWATMNNLWFAIDHKVLHNSTITKELLNIWIDGLSHGMHGSLSENPVNLDDKNEVEEVVNLLDEMKQLFSALATSGDGAIENHAQIGELCKRILSRRPKVGHVMNKLYLLSMENSNVGNESSQAKTAVANDEHGQNALEESKDNLSKNSEGAPNSGHGNIKENTKGKKTKKKKGKGGRRGKK

SEQ ID NO: 162820 - protein, 90 aa, Glycine max
  Clone ID: PAT_MRT3847_118044C.1.pep
KMSSKVFLILLMFMATILLISSEVAPDDAYQNFDKTDGKRSANGVDESKYWRGGYGGGRGGYGGWVVALALTNIMRLGLMLALTTKKETC

SEQ ID NO: 162821 - protein, 91 aa, Glycine max
  Clone ID: PAT_MRT3847_118045C.1.pep
MSSKVFLILLVFVATILLISSEVAPDDAYQNFDKTDGKRSANGVDESKYWRGGYGGWRGGYGGGRGGYGSWGGGFGPNEHNEAGIDASPHN

SEQ ID NO: 162822 - protein, 78 aa, Glycine max
  Clone ID: PAT_MRT3847_118046C.1.pep
KMSSKVFLILLMFMATILLISSEVAPDDAYQNFDKTDGKRSANGVDESKYWRGGYGGWGGGFGPNEHNEAGIDASPHN

SEQ ID NO: 162823 - protein, 51 aa, Glycine max
  Clone ID: PAT_MRT3847_118047C.1.pep
SSLKIGPRSSVLRKIWVCIILSCCVWFRGRSAIVYLLGFHVDFSPPPLFLF

SEQ ID NO: 162824 - protein, 79 aa, Glycine max
  Clone ID: PAT_MRT3847_118048C.1.pep
CEKISFCTPKIHTVRIIIFKLTLSVNLFFHLIFLFNLIPLLVMFSHSFSFSFFSLLFSESFTLHLYIHSKFRWTLTFNL

SEQ ID NO: 162825 - protein, 90 aa, Glycine max
  Clone ID: PAT_MRT3847_118049C.1.pep
GQSHHPNLRSHHAHHHSHHASHHSHHAHHHSHHASLHSHHANHHHANHHSRHSHHANICFHLPHLHYASHLFCQNSGMHHRVQPQRRSKV

SEQ ID NO: 162826 - protein, 61 aa, Glycine max
  Clone ID: PAT_MRT3847_11804C.1.pep
LPRLPRSSTMESISVYGCTSYSRTTGSRHDSPQLAESSIWVWSSVSLIGHGESLLKRLACT

SEQ ID NO: 162827 - protein, 287 aa, Glycine max
  Clone ID: PAT_MRT3847_118050C.1.pep
FTRKNDDELRRFYAASNNDFSCFLTSIKKTISDEGGLIRILSEEELKMSSKMVFWHGSDVGQRPCLIIRFGLACSTLTSEDRPRFAQAVISQVEYGVLHLVDADNPQITVLVDCEGLSPVRIPMQIIRSCSSLLKDHFPNRLGCMFVIRLPANVHVIAQTFIQDLKPATRNKLKIEGEMHQKVLSDYMPTLPSYLGGCCTCMKCSNIGQGDMLQTYATGTSRRDGLEDTSDSDNDNEDSPTLHPCDELEGNLYGNYDQLLRTAIVGILIFWVFIALGAVVFDPSNRH

SEQ ID NO: 162828 - protein, 291 aa, Glycine max
  unsure (1)..(291): unsure at all Xaa locations
  Clone ID: PAT_MRT3847_118051C.1.pep
MDAPMEFWGVEVKVGQTVTVDPMDPVDSYIHISQVALGEAKKEKPNESVVLYLKVGEQKIVLGTLSRDGIPHLSLDLVLDSDSELSHTSKSASVFFCGYRVLTGDNNASDFSDSSEEDEELAFFXQDNGEGAKVTKPSKSIPKIGAPAKTADPKKDEDDDSDDESDDDLAGEDEFGSSDEMDDDSNSDEESDEETPAKKVDQGKKRPNESAAKTPISAKKAKTATPEKTNGKKXSVHVATPHPSKKGGKTPNSTKGQSPSSAGQLSCASCKKSFTNEVGLQQHKKAKHGGQ

SEQ ID NO: 162829 - protein, 96 aa, Glycine max
  Clone ID: PAT_MRT3847_118052C.1.pep
DNSICTRNILFLIGVKFLRCTFFSGGVTKCIIEAFRLNDKLREPYKKHYRPFLNDEVWCLKNLKRNRYPYKDLLKNKIKTVKDLFGSNTILSLREK

SEQ ID NO: 162830 - protein, 66 aa, Glycine max
  unsure (1)..(66): unsure at all Xaa locations
  Clone ID: PAT_MRT3847_118053C.1.pep
PGGLIPGNKHPDDVTVVXTGAAIIIGIQDVAMCPGQGNMGVARQDDYLIDHRSELFALVQHSRIFQ

SEQ ID NO: 162831 - protein, 52 aa, Glycine max
  Clone ID: PAT_MRT3847_118054C.1.pep
QNQSYMASLCSRVLIDALRNNNVIMSGVCSPPPKCIICDVSDMSPHCNIYRQ

SEQ ID NO: 162832 - protein, 66 aa, Glycine max
  Clone ID: PAT_MRT3847_118055C.1.pep
STIAGLSKIGQWSEKFCSNWVQHLDNFMNMQISAQAGFKRSLFERLVLLGHEKHRLNGQYRVRPSI

SEQ ID NO: 162833 - protein, 245 aa, Glycine max
  unsure (1)..(245): unsure at all Xaa locations
  Clone ID: PAT_MRT3847_118056C.1.pep
MILTKQYRCVHSASCQCTKGHLSEDVIFLVFQHLNWNPKLIAALSCVCKWFEDLSKQVLWKEFCKTRAPKMMLDLQSSGSHSVDGNWRALGKLLIFCSGCRQGSLFNNVQVHCHFVNKTRFSRTSGKSSLMPQCINDVLYVSDPCEHIGQSEEGDLGFFRGIFKSFASSNVSRIKILMTQVLXFRPYCKVKLWSMLQAKMIPQSASCRLGSYDDCIEYYVCLNGHMLGICTLLPLSDSEEASELE

SEQ ID NO: 162834 - protein, 89 aa, Glycine max
  unsure (1)..(89): unsure at all Xaa locations
  Clone ID: PAT_MRT3847_118057C.1.pep
PEKKTIPPRDLKGATKNQGEKHRNKKNPKGQTSRGGPPNGKGGETGXPEKKKKRGDPPKGGGDPKKSKDPGKKTPNPRKKGSKKKKKCP

SEQ ID NO: 162835 - protein, 33 aa, Glycine max
  Clone ID: PAT_MRT3847_118058C.1.pep
MPNPKVFFDMTIGGQSAGRIVMDLYSDVTLRTA

SEQ ID NO: 162836 - protein, 488 aa, Glycine max
  Clone ID: PAT_MRT3847_118059C.1.pep
RLYYGDGNVEAMFATLDPLHDMLERGPETLREIAFQQSFGRDLQDARESCRRFQQYGELNDLNQAWDLYYQIFKRIARILPSFSILELQQVSPKLLAARDLELAVPGTYHSGKPIIRISKFAESLDVLTSKQRPRKLKVAGSDGKDHAFLLKGHEDLRQDERVMQLFGLVNTLLSKDPETFKRHLMTIPYPIIPLAPNSGLLGWVDNTDTLHVLVKNYRDSRKILLNIEHRIMLQMAPDYDHMMLIQKMEVFEYALDNTTGQDLYRVLWLKSRNSEAWLDRRTQYTRTLAVMSMVGHILGLGDRHPSNLLLERISGSVVHVDFGDCFEVAMVRDKYPERVPFRLTRMLIQAMEVSGIEGTFRITCENSMRVLRDHKESIMAVLEAFVHDPLINWRLINTGRRGGAGANERGTSKRVGVDESNPLDDETNEALNQRALQVVDRVQQKLTGRDFKPTQVLDVSEQVQKLILQSTSVENLCQTFIGWCAFW

SEQ ID NO: 162837 - protein, 77 aa, Glycine max
  unsure (1)..(77): unsure at all Xaa locations
  Clone ID: PAT_MRT3847_11805C.1.pep
MVLKCKGEGSDPVILGNASDVSHSSYFQRSNVKAFIVFVGXRTIASCTPQGHSKSVKHEEYKVHTYNRNSLCALEFL

SEQ ID NO: 162838 - protein, 46 aa, Glycine max
  unsure (1)..(46): unsure at all Xaa locations
  Clone ID: PAT_MRT3847_118060C.1.pep
LSPKNLRPRXSYCSXVCYSSAMFCQXHWTNTPCVLXDQNICHYSTV

SEQ ID NO: 162839 - protein, 205 aa, Glycine max
  Clone ID: PAT_MRT3847_118061C.1.pep
MAVSLSVTPLSLSNSSPSLSSKPKFPSLCFLSGNNTLRVKCPKPSHSTTVVHVAPEALDSSPDPLDPPPETLDDDSDATTFEVGDLGTPSTSAISIGGDADTMGPKQKIRIKLSSYWVPLIEDSCKQILDAARNTNAKPMGPVPFPPKKGISCVLKSPHVHKDARFHFEIRTPQRFIDILYPTAQTIDFLMQLDLPAGVDVEVKL

SEQ ID NO: 162840 - protein, 88 aa, Glycine max
  Clone ID: PAT_MRT3847_118062C.1.pep
KKKLTLKCSNRVFAEIKFVTLVTIVSRLHVYYIVFNYKLGSQYLCLHQVLGKFLGLCILPHPFVLVFMKFCAYCSVKLYPRPRLSGDF

SEQ ID NO: 162841 - protein, 343 aa, Glycine max
  Clone ID: PAT_MRT3847_118063C.1.pep
METLPTTTTKRGGARSKPVQTSKSSLVMAFFSCVAWLYVAGRLWQDAENRNLLASLLKKNSAQRPKVLTVEDKLMVLGCRDLERRIVEAEMELTLAKSQGYLKGQGQRSGSSDRRLLAVIGVYTGFGSKLKRNVFRGSWMPRGDALKKLEERGVVIRFVIGRSANRGDSLDRNIDEENRTTKDFLILEGHEEAQEELPKKVKTFFSTAVQNWDADFYVKVDDGIDIDLEGLIELLDRRRGQDGAYVGCMKSGEVISEEGKPWYEPDWWKFGDEKSYFRHAAGSLVIISKNLAQYININSVSLKTYGYDDTSLGSWMMGIQATYIDDSRLCCSSIRQDKVCSLA

SEQ ID NO: 162842 - protein, 51 aa, Glycine max
  Clone ID: PAT_MRT3847_118064C.1.pep
HKNAPVTRHIYKILILFKSGSCTKCRSEKREKQSLCFWFSLTSCFLTHSLS

SEQ ID NO: 162843 - protein, 77 aa, Glycine max
  Clone ID: PAT_MRT3847_118065C.1.pep
EECAFQLDDAIEKNHFVRKPLVVMLTLVKIKDPKGHSNGVFYFFQICFNLLYECILHVTITLFADKYPFNVQNIKHG

SEQ ID NO: 162844 - protein, 60 aa, Glycine max
  Clone ID: PAT_MRT3847_118066C.1.pep
WFVGGVCSLAWLLGVVPVASVWSVGRGYPFGFCHSGRGCFCLRASLIRFAASFLSAFSGA

SEQ ID NO: 162845 - protein, 102 aa, Glycine max
  Clone ID: PAT_MRT3847_118067C.1.pep
FRLIFCLPRRSFLHLLWNSWIFAISMLTYNFDPCLIFWTLKGYLSGNYNGGTRPSCSDPKAQNDKATSTTALEGVFGIEVGARVHPTPEKTANEGVLALYVE

SEQ ID NO: 162846 - protein, 59 aa, Glycine max
  Clone ID: PAT_MRT3847_118068C.1.pep
DCRLPSLSRPVCAVMVNVRVVSFSCRTTLLIVIIWERIARGWGTVALIGGIWCFLIERY

SEQ ID NO: 162847 - protein, 109 aa, Glycine max
  Clone ID: PAT_MRT3847_118069C.1.pep
VQVRRVLVCLIYGFYLPFVLIPLLEIEPFTYIFFLLSKTSMIIYLCRSSGSLGVSWHLLCCLQSVLPFYVVWIYIYLVYIYICFYVLGLYIHLVINVYFIYVCSLCNID

SEQ ID NO: 162848 - protein, 51 aa, Glycine max
  Clone ID: PAT_MRT3847_11806C.1.pep
GWSACTDPGTECAESDPRGLFMRALIVGLLCYWKSTHLLKYPDDVRSVRYF

SEQ ID NO: 162849 - protein, 72 aa, Glycine max
  Clone ID: PAT_MRT3847_118070C.1.pep
EEYAFQLDDAIEKNHFVRKPLVVMLTLVKIKDPKDKYPFNVQNIKHGSKLYVNIDIAKIQEFHNRCRYVVLF

SEQ ID NO: 162850 - protein, 205 aa, Glycine max
  Clone ID: PAT_MRT3847_118071C.1.pep
MHARSSFQGKGRTPLPPPTPVPTPTPMVKKPLPIPVTKPIPKPIPIVKPIPIPVFKPIPKPIPIVKKPLPIPVTKPIPKPVPIIKPIPIPVFKPVPIIKPIPVPVFKPIPKPFPIVKKPLPIPAIKPIPKPIPSLKKPLPTPTIKPVPEPVPTVKPIPIPTFKPFPKPFPFVKRPLPIPPMMKPIPKPFTSVKKPPPIPISKPIP

SEQ ID NO: 162851 - protein, 84 aa, Glycine max
  Clone ID: PAT_MRT3847_118072C.1.pep
TTFLLPYIHILWRREVEKITDVKPFQHHCVNTYCEAKLWIIFCRRQPKLNELPIQSKCLDSRNPCTISYEADNMLMSCYGGTIR

SEQ ID NO: 162852 - protein, 911 aa, Glycine max
  Clone ID: PAT_MRT3847_118073C.1.pep
MMMSHNLTGQLVGAEIHGFHTLDDLDVSNTMEEAKSRWLRPNEIHAILCNHKYFKINAKPVNLPKSGTIVLFDRKMLRNFRKDGHNWKKKTDGKTVKEAHEHLKVGNEERIPEYYAHGQDNPTFVRRCYWLLDKNLEHIVLVHYRDTQELQLQGSPATPVNSNSSSASDPAASWIPSEDLDSGVNSAYAVELNDNLTAKSHEQRLHEINTLEWDDLVVPNVNTSTTSNGGNVPYSFQENQSLLSGRFGNVSSNPSAEIPSFGNLTQPVSGSNSAPYSFPDSAILLKNSPISSGGVDTLGTLVNEGLQSQDSFGTWMNIISDTPCSIDESALKASISSVHVPYSSLVADNLQSSLPEQVFNLTEVSPTWASSTEKTKVLVTGYFHNNYENLAKSNLLCVCGDVSVPVEIVQVGVYRCCVPPHSPGLVNLYLSFDGHKPISQVVNFEYRTPILHEPTASMEEKYNWNEFRLQMRLAHLLFASDTSLNIFSSKVSTNALKEARRFSFKTSYISKSWQYLMKSIDDNTIPFSKVKDSLFETALKNKLKEWLLERIILGRKSTEYDAQGQGVIHLCAMLGYSWAISLFSWSGLSLDFRDKFGWTALHWAASYGIEKMVATLLSCGARPNLVTDPTPQYPGGCTAADLAYVKGCDGLAAYLSEKSLVEQFNDMSLAGNISGSLETSSTDPVNAANLTEDQLYLKETLEAYRTAAEAAARIQAAFREHSFKLRYQAVEIMSPEEEARQIVAAMRIQHAFRNYESKKKMAAAARIQLRFRTWKYRREFLNMRRQAIKIQAAFRGFQARKQYRKIVWSVGVLEKVILRWLLKRKGFRGLQVNPAEEETQESDTIAEEDFFRTSRKQAEERVERSVIRVQAMFRSKKAQEEYRRMKLTHNQAMLDELEEFLNSEDDMLPKT

SEQ ID NO: 162853 - protein, 54 aa, Glycine max
  Clone ID: PAT_MRT3847_118074C.1.pep
EERIERSVIRVQAMFRSKKAQEEYRRMKLTHNQAKLELELEEFLDSEVDMLPKT

SEQ ID NO: 162854 - protein, 64 aa, Glycine max
  Clone ID: PAT_MRT3847_118075C.1.pep
SLPPEQVFVFIYSTETPVLVLLSAPIFTLTLFTNVWFLFSCILVILTVSQTRIKRKNGVTHAMI

SEQ ID NO: 162855 - protein, 50 aa, Glycine max
  unsure (1)..(50): unsure at all Xaa locations
  Clone ID: PAT_MRT3847_118076C.1.pep
LFVAKTKEALKNEPYPLRREQRYETVXKAATQRFMEYAQLDKIHDKANNG

SEQ ID NO: 162856 - protein, 83 aa, Glycine max
  Clone ID: PAT_MRT3847_118077C.1.pep
ARTVFLFSTPPPVPSAPQKLLMGFERVRLIEKSEALVSFKVDVCQDLSIVHGLGNRKLALVQHVLHVGNMKHPWSVKIVKQAV

SEQ ID NO: 162857 - protein, 51 aa, Glycine max
  Clone ID: PAT_MRT3847_118078C.1.pep
RAPFTMDKTLEPCAYNGNTYYSSIHDAHIVKQLRASNVSNTGCACGHKSVL

SEQ ID NO: 162858 - protein, 107 aa, Glycine max
  unsure (1)..(107): unsure at all Xaa locations
  Clone ID: PAT_MRT3847_118079C.1.pep
NKLCEIGPRLKTFHVIPFTLDLQNTFPESQKIQPFCPLSSLLLSLVIGGSTQFNSFLPLHILKSQHQLLFPSSKVWIFLHQPLSHSXVNCDTYLSINTIHTLFKNQV

SEQ ID NO: 162859 - protein, 43 aa, Glycine max
  Clone ID: PAT_MRT3847_11807C.1.pep
IKLGLKRGDHRFLKTAAYEHFGRDDPGFTGEGVEPLKFEKPQA

SEQ ID NO: 162860 - protein, 182 aa, Glycine max
  Clone ID: PAT_MRT3847_118080C.1.pep
MSCEPLPLMATPLQFQRPAIDDGDAQNQHNPMEFQILTSSHFRLPDGWVVEERPRASNPSHVDRYYYEPGTRRQFRSLLSVKRHLTGETRDCVISKRKNFIESGSGQQWNSLRAVEKFLSRANACTVTVQSAAKASWVLSGPGGFWSPFLDDSIVPEPEKMKWSKAFVLSIHDDGDINGLNS

SEQ ID NO: 162861 - protein, 139 aa, Glycine max
  Clone ID: PAT_MRT3847_118081C.1.pep
FPIPPCCKGLLWPGPQILPPVSHKGVLFLVSLYRYRKGGVFSGPRNFLCPGERILTTWGGGVFRLLPNRGFSVLECPQAATLRVGFFFPAWGMWVLTRALPFFRGIWKFLLRGGEPLFFKKKRVFKKKNLIKKNYKKNK

SEQ ID NO: 162862 - protein, 241 aa, Glycine max
  unsure (1)..(241): unsure at all Xaa locations
  Clone ID: PAT_MRT3847_118082C.1.pep
MVPQPLLTLFLFLSLLSIVNSSPSQHLQIANAERRIDLTSHIIKVYLTLKVENLGTSPTSEVHIAFSPTEVEHLAIVRAAATSGKRKKKTYVPLDVKSAELPDGPNGTKFFSITLLTPLSKGETTTLEVLYILTHSLEPFPVEISQSESQLVYFRDSAILLSPYHVKQQTTFIKTPSTRVESFTVMDPTKRAGTELKYGPYENHPPYSYSPVLIHXENTMPXAVVEELEPGNEISHWGSVQ

SEQ ID NO: 162863 - protein, 443 aa, Glycine max
  Clone ID: PAT_MRT3847_118083C.1.pep
MERIMVGSATKVAFTLLATFAIVIPCLEAGIAEFDDFLKAQADEAHKIALDSYVPEPHDVAHELNFHVHMALENSTRRELRQRKLRGGGKCQASNPIDACWRCNKDWANDRFRLAKCGKGFGRRATGGLGGPIYVVTDNSDDDMVNPKPGTIRHAVTQKGPLWIIFGHSMIISLRQELMISSDKTIDGRGANVQFRGGAGLTIQFVNNVIIHGVRIKDIVPKDGGMIRDSADHYGLRTRSDGDAISIFGSTNIWIDHVSLSNCADGLIDIIQGSTAITISNCHMTKHNDVFLFGASDSYNGDKIMQITVAFNHFGQGLVQRMPRCRWGFVHVLNNDYTHWLMYAIGGSSGPTILSQGNRFIAPNNDNAKEITHRDYAGPDVWKNWQWQSEMDLFMNGAKFVTSGSPIKMTYKKGLIMKPRDGTHVSRLTRHAGALNCFVGKPC

SEQ ID NO: 162864 - protein, 381 aa, Glycine max
  unsure (1)..(381): unsure at all Xaa locations
  Clone ID: PAT_MRT3847_118084C.1.pep
ARGTSPTSEVHIAFSPTEVEHLSIFRAAATSGKRKKKTYVPLDVKSAELPDGPNGTKHCCIPLVTPLSKGETTTLEVLYILTHSLEPFPVQIRQMIFIVFQLLSXETIILHYHGNKPTVTLIDLFLLGKVPENVSICKAPLVLWFHLYLMELTKLIEKKLQFQFALTIARCSTSVGEKAICTSEVGDVPKFSTFNVKYTLIMNHCSWYWYFTETGFTQYTNXRTDSWKSELEIEPRYPLFGGWKSTFVIGYGLPLQDFLFESPDGRRYLNFTFGCPLVETVVDKLIVKVVLPEGSKDPTVEIPFEVKQHLEIKYSYLDVVGRTVVVLEKRNAVPEHNTPFQVYYRFNPIFMLAEPLMLVSAFFLFFVASVAYLHIDLSIRK

SEQ ID NO: 162865 - protein, 112 aa, Glycine max
  Clone ID: PAT_MRT3847_118085C.1.pep
FGQKQGYPYPLKKIQIQPPNWTPHAKGNSIWSLPPNPKGPTATKLPNFEAENPPIQLKFGELNGKSKTLSLNPQTRDRNAIVVSNSPKRTLHPRHQFKPSLVRRILSLRTSN

SEQ ID NO: 162866 - protein, 86 aa, Glycine max
  Clone ID: PAT_MRT3847_118086C.1.pep
QVRLWALSIYGRQQHQRTLSVITLLNHCEEHHNMDVLHGDCRGNKGPYFVQQHHTWSQGEGPLSQLQLPIMGRPLEPGVRGALLNL

SEQ ID NO: 162867 - protein, 67 aa, Glycine max
  Clone ID: PAT_MRT3847_118087C.1.pep
QAVTEQIQGFLILEGHIALWQFCVELRGLIAVIDILVCTIFPRQFDLVPFIQTNFEPFLLFKKHRIC

SEQ ID NO: 162868 - protein, 58 aa, Glycine max
  Clone ID: PAT_MRT3847_118088C.1.pep
RKPYRAQWSWQVLQHAQIPSKIHFQFEIIYPSALGCFHQGILLNQDCHATAGAPGRVG

SEQ ID NO: 162869 - protein, 130 aa, Glycine max
  Clone ID: PAT_MRT3847_118089C.1.pep
MASESTGDDKSWEHILRRMLPAGAPLPDEEHLDYSIAVEYEGPPVPYDVPKVDPLKIGASTGGGAVPIRTASIDSDHNAAASIPVAMPVHPRFSRFSRVRNGGFDRAPLPRSPAESRRSSSVSKTQSQFD

SEQ ID NO: 162870 - protein, 74 aa, Glycine max
  unsure (1)..(74): unsure at all Xaa locations
  Clone ID: PAT_MRT3847_11808C.1.pep
SLLSLCDLLYNLKLKILXTILNSYELQDGAIEQLEIAQARLRKVETEANRYWLNGFSEIXRERLNLNYLIYMTI

SEQ ID NO: 162871 - protein, 86 aa, Glycine max
  unsure (1)..(86): unsure at all Xaa locations
  Clone ID: PAT_MRT3847_118090C.1.pep
HEVLYQIGECSANKPRVEKKMIXXVCGQLREWFSFPSGVVLSGVGXXXXXLXXRXXLLLFPVFRCGGLCSRFXLKSRRRGRSRGRS

SEQ ID NO: 162872 - protein, 36 aa, Glycine max
  unsure (1)..(36): unsure at all Xaa locations
  Clone ID: PAT_MRT3847_118091C.1.pep
GGDLICCDGCPSTIHQSCLXIHMXXPXEWLXLSLKV

SEQ ID NO: 162873 - protein, 51 aa, Glycine max
  unsure (1)..(51): unsure at all Xaa locations
  Clone ID: PAT_MRT3847_118092C.1.pep
NFHQIFSHLKPXSYPTTNNHIYPHSLNTPIFQHYPPPSKHFYNFHPKTISQ

SEQ ID NO: 162874 - protein, 677 aa, Glycine max
  unsure (1)..(677): unsure at all Xaa locations
  Clone ID: PAT_MRT3847_118093C.1.pep
MGTETSSVDISEPLLVDSHGNEEKEEYLREEVPEWKEQITIRGLVVSAVLGTLFCIITHKLNLTVGIIPSLNVAAGLLGFFFVRTWTGFLTKMGFFTKPFTRQEHASXNTVIQTCVVACYGLAFIGGGGSSLIAMDQRTYELIGPDYPGNRAEDVKNPGLGWMMGFMFVVSFLGLFSLVPLRKVMVLDYKLTYPSGTATAMLINSFHTKTGAELAGNQVRQLGKYLSISFCWSCFKWFFSGIGDSCGFDNFPSFGLTLFKNTFYFDFSPTYVGCGLICPHLVNCSVLLGAIISWGFLWPFVSEHAGDWYPADLGSNDFKGLYGYKPPRLIXQVAWDGIYNLIKIRLVXITMRCGGRTSSXSFPVVTEVQDDENSQLQSEEKKREEVFLKDRIPTWFAASGYVGLAAISIATIPIIFPPLKWYLVLCSYILAPACNSYGTGLTDWSLASTYGKIGLFIIAAAVGQNGGVIAGVASCAVMMSIMSIVATAAQDFKTGYLTLSSAKSMFVSQLIGTAMGCVIAPLTFWMFWTAFDIGSPDGPYKAPYAVIFREMAILGVQGFSELPKYCLEMCGGFFLAALVINLLRDVTPKKFSQYIPIPMAMAVPFYIGAYFAVDMFVGTVILFVWERLNRKDAEDYAGAVASGLICGDGIWTIPSAILSILRIDPPICMYFGPSTSS

SEQ ID NO: 162875 - protein, 83 aa, Glycine max
  Clone ID: PAT_MRT3847_118094C.1.pep
CLLKLAGLLIKIDHLVGILDRLTSLLLVELVPRMILPALALCKIPPLVESWWSSLVVALESVVILSSHVVHLPGRIFLGYALS

SEQ ID NO: 162876 - protein, 158 aa, Glycine max
  Clone ID: PAT_MRT3847_118095C.1.pep
AHASADAWGESAEYKERIWQCHQRGADRLLSLARRNGGVFIKVGQHIASLQYLLPEPYTSTLSILHSKAPESSLDDMKTVFYRSLHKNFDDVFDEFDPRPCGAASFAQVHRAKLKSSDEYVAVKIQHLHVKDRSFVDMATMEFFVNVASFVFPNSNEM

SEQ ID NO: 162877 - protein, 82 aa, Glycine max
  Clone ID: PAT_MRT3847_118096C.1.pep
IWDISASLAADTHVSSPEAIASSGISIFFTLFTLTLSPTSPSPHPPNGVSVTHPIKPQRPSSCTHQILTIPSHTHQTAIAQN

SEQ ID NO: 162878 - protein, 75 aa, Glycine max
  unsure (1)..(75): unsure at all Xaa locations
  Clone ID: PAT_MRT3847_118097C.1.pep
PRGPPQGSAHGPGRAGRSPHQGSGWENTPEGSGWENPPEGPGWENTPEGSGWENTPEGPGWENXPKKKKPPKPPN

SEQ ID NO: 162879 - protein, 87 aa, Glycine max
  unsure (1)..(87): unsure at all Xaa locations
  Clone ID: PAT_MRT3847_118098C.1.pep
WMASAMLSRPRLPLRWDSLSLQPGPLRQLPFPFPSGRPFSSTNXVVPPPPFSCXRSPAVCSPFWPFCLLPPAFGGPVPCAPXCVGAC

SEQ ID NO: 162880 - protein, 86 aa, Glycine max
  Clone ID: PAT_MRT3847_118099C.1.pep
KTRGGKIWDPSFNPFPKCRARGNKGPLNLVWKMLKGGPFPRDLNLKKKKILEPLPPPILGKKGKIGPFWPFGQKKKKFFHSNNKGP

SEQ ID NO: 162881 - protein, 90 aa, Glycine max
  unsure (1)..(90): unsure at all Xaa locations
  Clone ID: PAT_MRT3847_11809C.1.pep
MCHYSWVVFACSLLGQASASVSYDHKAIIINGQRRILLSGSIHYPRSTPXCGPDLIQKAKEGRVGMSFKTYVFWNGHEPSPGKYYXWRKL

SEQ ID NO: 162882 - protein, 45 aa, Glycine max
  unsure (1)..(45): unsure at all Xaa locations
  Clone ID: PAT_MRT3847_1180C.1.pep
FNKSSINFRPLLLHHQIXIVDKMQAMNNQSSFPNAFPCDSIKNER

SEQ ID NO: 162883 - protein, 198 aa, Glycine max
  Clone ID: PAT_MRT3847_118100C.1.pep
MAMAEDTEEKSAAVSGGKRRRGAGKNAKATGRVASRKKMEEDVCFICFDGGDLVLCDRRGCPKAYHPSCVNRDEAFFRAKGKWNCGWHLCSNCERNASYMCYTCTFSLCKGCIKDAVILRVRGNKGFCETCMRTVMLIEQNEQGNNVGQIDFDDRNSWEYLFKDYYIDIKKKLSLTFDELTQAKNPWKGSDMLLSKEE

SEQ ID NO: 162884 - protein, 35 aa, Glycine max
  Clone ID: PAT_MRT3847_118101C.1.pep
FITQESNERMPAQSLSWRSHVVVYNAYMKRQLKNK

SEQ ID NO: 162885 - protein, 46 aa, Glycine max
  Clone ID: PAT_MRT3847_118102C.1.pep
GFLGSSGSRSTDKLVGLFAPIKVYHVTSGAWFVGEAMSITACMFLL

SEQ ID NO: 162886 - protein, 115 aa, Glycine max
  Clone ID: PAT_MRT3847_118103C.1.pep
LRPFFFLIPQCKSWKRGRDLTRTDIEVGDDTMPFFVVSLWQKQMGSMVSAGDVVLLQNLKIAKYGNAVEARTVPWSSLLCLVHPYQSILSNAVEELVTGCRVGTTTKDKLRRVIK

SEQ ID NO: 162887 - protein, 58 aa, Glycine max
  Clone ID: PAT_MRT3847_118104C.1.pep
SDLRVKCYWPVYIFRELELFNSGIVAPLLCCLLVDLLVKSDDHLKFSNASAAQFQASR

SEQ ID NO: 162888 - protein, 90 aa, Glycine max
  Clone ID: PAT_MRT3847_118105C.1.pep
SSPLTKFGNPRFLKKKIFFLFSPGTKKKGKRGGKTKKRAGGPLTLLKNQTGGGQPFIKLHFPRGQKKKKIFANPPHLKKKPVFYPPHNHF

SEQ ID NO: 162889 - protein, 109 aa, Glycine max
  unsure (1)..(109): unsure at all Xaa locations
  Clone ID: PAT_MRT3847_118106C.1.pep
MECNKDEAARAKEIAERKFTEREYAGAKKFALKALNLFPALEGLSQLLTTLDVYICAENKIHGEMDWYGILGVYPYADEETVRKQYRKLALNLXPDKNKSPGAEGHSSL

SEQ ID NO: 162890 - protein, 323 aa, Glycine max
  unsure (1)..(323): unsure at all Xaa locations
  Clone ID: PAT_MRT3847_118107C.1.pep
LRPENLADIACLKNLDSTLHAMPNINQVHALINEYGPTVYFHPDEIYLPSSVQWFFKNGALVYSRDSEKGKAIDYQGSNLPSGGTNDGAYWIDLPTNDDARNNVKKGDIESAELYVHVKPALGGTFTDIAMWVFCPFNGPGILQVGLVNVEMNKIGEHVGDWEHFTLRVSNFTGEXMEWVDAFGLEFIEGNKPVVYSSRHGHASFPHPGSYLQGSSTLGIGAKNEAAKSKLTVDSSTRYKVVAAEYLGEGAIAEPCWLQYMREWGPTVVYDSRXIDKLIDLLPVFVRFSLVNLFELFPTELYGEEGPIGPKGKANWVGDEKCY

SEQ ID NO: 162891 - protein, 72 aa, Glycine max
  Clone ID: PAT_MRT3847_118108C.1.pep
VCKITSNIGFVSPMVKHLSGLGNRMQRSSLLNIVVIAHFEFTPMRYKYLALQPRYPKIFCQSQQNHRHKISS

SEQ ID NO: 162892 - protein, 174 aa, Glycine max
  Clone ID: PAT_MRT3847_118109C.1.pep
MQSRLAEATRRTSCALSSTTRFTLKRQLCSGTRIRTADPEIHSGELEAGPKVHRGQPQGISTQDKAKEARYSETERNASKAHEMLKSPKSPCEPSRKLKSAGVNQRLDPSIQQKREKGSKVGIEEVSCAGLDGTPWPEDTNKGKEKEDNREYFKRHKASPFVEIEFLDYESRYS

SEQ ID NO: 162893 - protein, 228 aa, Glycine max
  Clone ID: PAT_MRT3847_11810C.1.pep
MRMEEALAELERVQTQLLQRISKLERSHLPSPSSQNDTVEDTATDTVARLSSILRSNGVPDFSFKRVPSDYYDWPLEARRDALSAASIHHLCKSIVLVNTQAPANVVDCSDRKNSKYYVVVVQYTARFNAEAVKNFLYSLNNGSIAKKKFNMRLAPEETSMELTGYGHNAVTCIGMKTDIPVILDEAIVKLTPDFFWLGGGEVDLKLGIRTSQLIKFINPFIVNCSSN

SEQ ID NO: 162894 - protein, 405 aa, Glycine max
  Clone ID: PAT_MRT3847_118110C.1.pep
MVNYEFDTSTGSLKILNGYELCLINPCEFDDIGSHGTKVIIYNLWCNDDANLELDFDTDPTDIRIAGDVKQIDTLKAWKSVNEEHIANRLRYSLHVYMSILYLKIPESFQMILRGQVVKPHNIADDLKFPQFVKYAPVIGGSVKGTALTVTTIGFLKEAPQVNIHGFNVYHKNRLILPFWQVVSYLDSRGRGVVGILQADFIEPTHNKQDFERTSLFQKLEGRLKEMTWEYWDTHCTLFGYKDKDKKKLPPRVTSMQKPLAIEKPVMLNRSCSPVVNTKIEYGNSEQCSTKLQIRSEQGSHNKRKTHELVDLQNTEKHARTENVTCVGFSQNKQIIATPADQVFDRKTMHLVQQNKKLHAKCLEFEKTGEELNLKVTMLKSEIQEAQDEYKRLLAEVKSLDLKEE

SEQ ID NO: 162895 - protein, 289 aa, Glycine max
  unsure (1)..(289): unsure at all Xaa locations
  Clone ID: PAT_MRT3847_118111C.1.pep
QFAIGRYGNGFKTSSMRLGADVIVFSCHLNNRILTQSIGLLSYTYLIKTQLDRIVVPMVNYEFDTSTGSLKILNGNEHFVSNLSLLLRWSPYSSEADLLKQFDDIGSHGTKVIIYNLWCNDDANLELDFDTDPTDIRIAGDVKQIDTLKAWKSVNEEHIANRLRYSLHVYMSILYLKIPESFQMILRGQVVKPHNIADDLKFPQFVKYAPVIGGSVKGTALTVTTIGFLKEAPQVNIHGFNVYHKNRLILPFWQVVSYLDSRGRGVVGILQADFIEPTHNXQDFERTSL

SEQ ID NO: 162896 - protein, 288 aa, Glycine max
  unsure (1)..(288): unsure at all Xaa locations
  Clone ID: PAT_MRT3847_118112C.1.pep
RGETMALLDEACQKWGFFLIENHEIDKNLMEKVKELINIHYEENLKEGFYQSEIAKTLEKKQNTSDIDWESAFFIWHRPTSNIKKITNISQELCQTMDQYIDQLVKLAEKLSELMSENPRPSCFTSFLGSQGEKYSQHSLTKYVRGKQPQIMPSVNNFFSXIKLKQMPNFLFLRFDFWWVEIPPSKNNAIFVNTGDQVAKQNRAQEXRRVHRGKTNKHKIPCPTAPFYNPVREANPSTTHSLFHPTNAYAIPSLLPFLSLGLIDFFAFQYWELRSRTTGFDFSDKNVL

SEQ ID NO: 162897 - protein, 52 aa, Glycine max
  unsure (1)..(52): unsure at all Xaa locations
  Clone ID: PAT_MRT3847_118113C.1.pep
MTMNVLVLLVATILVAWQCHAYXMFPLRMNTGYGTRSPEVKSSSSRLPVPAH

SEQ ID NO: 162898 - protein, 107 aa, Glycine max
  unsure (1)..(107): unsure at all Xaa locations
  Clone ID: PAT_MRT3847_118114C.1.pep
AXTXTXARNSARGPLNFRSLCFTFSLLHFLVKKKKNPQXKNRSSXXXXYQSFKXPXXXFVLXXWSVMXPPTLXTEXXGXSTXASDSXXXLDXFXQNGAGLKEXXXLG

SEQ ID NO: 162899 - protein, 44 aa, Glycine max
  Clone ID: PAT_MRT3847_118115C.1.pep
SQMGSIFFFSFSLQIFINKETKKKTMCERTIENKSAQIKGKKPF

SEQ ID NO: 162900 - protein, 585 aa, Glycine max
  Clone ID: PAT_MRT3847_118116C.1.pep
MTQQESTMSLIFLQLLLLLSCLTLNNSIAESTTIINVWPKPRNLTWSPPYQTTLLSSTFTITTTTNHHNKHLSIAIRRYQNLIKSEHHHPLVPQAVNISNKYLPPLQTLKVTVVDTAAELVHAVDESYTLSILPSSCATLTAKTVWGAMRGLETFSQLAWGHPTQVPVGVHVCDSPLYAHRGVMVDTARNYYPVKDLMRTVKALSMNKLNVLHLHLTDAESFPLVLPSEPALAEKGAYAPHMVYSPKDVKKLVEFGLDHGVRIIPEIDTPGHTASWALAHPDIVTCANMFWWPAGRDWPHRFASQPGTGHLNPLNPKTYQVLKNVIHDITTLFPEPFFHSGTDEIVPGCWKTDPAIQKYLSNGGTLNQLLEKYINNTLPFIVSLNHTVVFWEDVLLDNIVHVPSAILPKEHVILQTWHNGHNHTKKIVSAGYRTIVSSAEFYYLDCGHGSYVGNNSAYDNQDGDMGNGGSWCAPFKTWQTIYNYDIAYGLSEGEAKLVLGGEVALWSEQSDPTVLDARIWPRASALAESMWSGNRDEKGVKRYAEATDRLNEWRSRMVSRGIGAEPIQPFYCVKNPGMCNTVHPV

SEQ ID NO: 162901 - protein, 264 aa, Glycine max
  Clone ID: PAT_MRT3847_118117C.1.pep
EKKEHAADVAEETEKEAAEVTVTETEVVEEKVAVSASADEDGAKTVEAIEETVVSVTVTVSEEPKVEAVSLSASPEEVCIWGVPLLADDRSDVILLKFLRARDFKVKEALAMIKSTIRWRKEFKMEELLEEDLGGDGLEKAVYMHGFDKEGHPVCYNIYGEFQNKELYKKSFSDEEKRYRFLRWRIQFLEKSIRKLDFNPGGICTIVQVNDLRNSPGPSKWELRQATKQALQLLQDNYPEFVAKQVFINVPWWYLAVNRMISPF

SEQ ID NO: 162902 - protein, 43 aa, Glycine max
  Clone ID: PAT_MRT3847_118118C.1.pep
SLDRHEVHQDIHKAPTVNIICTLKPMQPKSKSVLIEKSLWTIS

SEQ ID NO: 162903 - protein, 92 aa, Glycine max
  Clone ID: PAT_MRT3847_118119C.1.pep
MSIHKCQGMTLERVHTDLSRAFGCGMVYVALSRVRSLEGLHLSAFNRSKIKVDQRVSRFYRSLASEKSKEVMVVDRRREKVATEVAVVSQEK

SEQ ID NO: 162904 - protein, 92 aa, Glycine max
  Clone ID: PAT_MRT3847_11811C.1.pep
SMRTSKTLLSSMARDQSPRDSLTFLYWRSRRCICIHTFTSPLSSRHVLLPPPTHSGSKQLLPTFHFGLPQRLWYILELIRRHADGHHYIRKT

SEQ ID NO: 162905 - protein, 191 aa, Glycine max
  unsure (1)..(191): unsure at all Xaa locations
  Clone ID: PAT_MRT3847_118120C.1.pep
HASEVSLLVAGAQWRSLIEPTFLDFECPLDPPTTMRPGDQLFSDGELLPLHPLTSTITTSKGGLFLRRERHRLXAVPPRTTADPCLFSPKGPRCASRGEDLLGLKKFYQGTNNAKGRPPSSAKSLKNLLHRKTTAPSLSSENAPLRASNSSEAESLSITWWGLSLSSSCSGHDHDDLPRLXXESEKPNPNP

SEQ ID NO: 162906 - protein, 63 aa, Glycine max
  unsure (1)..(63): unsure at all Xaa locations
  Clone ID: PAT_MRT3847_118121C.1.pep
MAAFFISSCDSMAITAALFGTMARTTFNRRPXLSRVRLKTFANGGKTLFGLKREQRGHVTCIA

SEQ ID NO: 162907 - protein, 60 aa, Glycine max
  unsure (1)..(60): unsure at all Xaa locations
  Clone ID: PAT_MRT3847_118122C.1.pep
GXXVSDFLQINMCNXLHLXKLHTNLGNHIFDCIRQSLIXXYPIXPMXFIFPTXQSMKAAI

SEQ ID NO: 162908 - protein, 140 aa, Glycine max
  unsure (1)..(140): unsure at all Xaa locations
  Clone ID: PAT_MRT3847_118123C.1.pep
DSVGRLFYFCPFFHSLLVTDPHCRSKRSYLKNTRALVQRFAPTIFSGDNRLTEKTILTCRDWDIVAAHDTIATQFRKFLPHYIRWHLYTLLIXILPSLLTAEIKYKRNLSNSYISGXLYDGRYKLWTNHENKFALTEEEK

SEQ ID NO: 162909 - protein, 72 aa, Glycine max
  unsure (1)..(72): unsure at all Xaa locations
  Clone ID: PAT_MRT3847_118124C.1.pep
DVRWRVGYESFIDGRELDLLGRKFHHMCHDVLTVIDGYLRKHAVDHGGDDSEGLVMHAGDSEHXXYGNYVHH

SEQ ID NO: 162910 - protein, 61 aa, Glycine max
  Clone ID: PAT_MRT3847_118125C.1.pep
GVFEKGSHPGNPGRVPVDKAPGASPNAHGPNERRSLVPPMWDPQNLTSKTLVLNHPRGEVV

SEQ ID NO: 162911 - protein, 133 aa, Glycine max
  unsure (1)..(133): unsure at all Xaa locations
  Clone ID: PAT_MRT3847_118126C.1.pep
MHILVNTLTGLTEALXDNSANTLNPAYDRTQCRDGILPGYHKTVVSGQQLEYGRTLSVSNTPHESTPXLDLRLXGGITEPTLMVLVRLYWLHRTICLLRYAPPAARTATYRLKKSILASMYWLPKTLREGCVM

SEQ ID NO: 162912 - protein, 87 aa, Glycine max
  Clone ID: PAT_MRT3847_118127C.1.pep
LIEGAKISKSIGGSPPSYIIILNLLEVILKLGLGAPPSWEGAVTFTYANVWPGPLFLTQLFLGPFLASQEEPHWPPLLRLQIKLTKG

SEQ ID NO: 162913 - protein, 178 aa, Glycine max
  unsure (1)..(178): unsure at all Xaa locations
  Clone ID: PAT_MRT3847_118128C.1.pep
HASGGLSLKPANPTGRSDLPGIDVFVSTADPEKEPPLVTANTILSILAIDYPVEKVACYLSDDGGALLTFEALAETASFARIWVPFCRKHHIEPRNPEAYFGQKRDFLKNKVRLDFVRERRRVKREYDEFKVRINSLPEXIRRRSDAYNAHEELRAKKKQMEAGSNVSEPLKFLKLMG

SEQ ID NO: 162914 - protein, 61 aa, Glycine max
  Clone ID: PAT_MRT3847_118129C.1.pep
WWEGGFFKGLEKRRPKIFGSKKWVAFYPSLPKNALKAGKWAPFIIGQICSGIKKWGCWLWI

SEQ ID NO: 162915 - protein, 149 aa, Glycine max
  unsure (1)..(149): unsure at all Xaa locations
  Clone ID: PAT_MRT3847_11812C.1.pep
PPEPGPTPPPQTPQAPPARARPPNXRARGPAPNKRKRPEETTLLRGPAPTEKKPKRPPXTRGAGPXTPTQRRGXXTXXAAKNTAPPPPPRNARDNQQKPPPENKNEATPRKPAPPKPAPTAHAKTKQKRAPKKKKKPPEKQGRPPPNAK

SEQ ID NO: 162916 - protein, 50 aa, Glycine max
  Clone ID: PAT_MRT3847_118130C.1.pep
YATSRSVSDWEDTKGHATRCETGTVQVWHRINCSDPDNCFSTSSVGGPGG

SEQ ID NO: 162917 - protein, 79 aa, Glycine max
  Clone ID: PAT_MRT3847_118131C.1.pep
MTNPHPIKSVPGVIPKKPVPLLLHEVDIFFSFSQIMNLADISCDKLVVRIWAFRTKLILTYTEQICFLASFFLKINIHF

SEQ ID NO: 162918 - protein, 76 aa, Glycine max
  Clone ID: PAT_MRT3847_118132C.1.pep
PKKLFGVAHVPCSTSLAVKRQRWRSCAFLFLVRFVFYAVYQIKTFVGGFGSLIILIVFFTMVRLWILVLNQLFLVR

SEQ ID NO: 162919 - protein, 109 aa, Glycine max
  Clone ID: PAT_MRT3847_118133C.1.pep
MPSLSEAYRSHPVHVQHKHPDLNSLQELPESYTWTHHGHDDHTNSPASNESVPVIDLNDPNASKLIHHACTTWGAYQVLNHGIPMSLLQDIQWVGETLFSLPSHQKHKA

SEQ ID NO: 162920 - protein, 74 aa, Glycine max
  Clone ID: PAT_MRT3847_118134C.1.pep
MKNRTQRTHRLRCKSKSKTRSRPPPLPSPPLKPPNRGRGWWWRARPSAAAGYTSLPGATKAAPPCGVHNHRTRG

SEQ ID NO: 162921 - protein, 52 aa, Glycine max
  Clone ID: PAT_MRT3847_118135C.1.pep
KKRSNFGDRCKELRIHRGCFIGLEPDQLPSSKVLAVAQMNLMQLIIKLPCEL

SEQ ID NO: 162922 - protein, 56 aa, Glycine max
  Clone ID: PAT_MRT3847_118136C.1.pep
VFSYQNRLEALMVKKIHSFGSVKAIVRIFVNSPCLRDHCKLINIVSHLGLGLPPSW

SEQ ID NO: 162923 - protein, 106 aa, Glycine max
  Clone ID: PAT_MRT3847_118137C.1.pep
NHKSHVNIGESLPTRISQELGSSTPLELSPAPKLHLADSVVEKIAIFVGLSGKHSNGFALNPMANQTGVDSANVGAMNRLVRRKQVDYGHFIKNDGPHQLDKKLSA

SEQ ID NO: 162924 - protein, 122 aa, Glycine max
  unsure (1)..(122): unsure at all Xaa locations
  Clone ID: PAT_MRT3847_118138C.1.pep
EPYIXGGLYWFXCVMGPAEQKXKRANDLSGGXXXXLIXQDNYXQXWGLLRQPKEIETXDKDREXXDTLYKIEXDIXKWGWGQALHXXXYIPXKGHREDTRLHEEMEXKIIKDKXGNKNKDGG

SEQ ID NO: 162925 - protein, 51 aa, Glycine max
  Clone ID: PAT_MRT3847_118139C.1.pep
LLQIWLVMWFLGGALYGDFPELLFPLGLIIRGLAMAILVQSQGIISFSKAS

SEQ ID NO: 162926 - protein, 50 aa, Glycine max
  unsure (1)..(50): unsure at all Xaa locations
  Clone ID: PAT_MRT3847_11813C.1.pep
EXTFERNFNPNLNILKYVLGDITLSKFXIIXELNICKPILELXXGRYGYQ

SEQ ID NO: 162927 - protein, 81 aa, Glycine max
  Clone ID: PAT_MRT3847_118140C.1.pep
PSVTTTLTATVESTPVPGVLRLLSFARWNFSSVRRLALPALPVTNGPEAKSRAHFYAEITQRVSKIIVTTRVITVFFDDCK

SEQ ID NO: 162928 - protein, 148 aa, Glycine max
  Clone ID: PAT_MRT3847_118141C.1.pep
MASKRIVKELKDLQKDPPTSCSAGPVAEDMFHWQATIMGPPDSPYTGGVFLVSIHFPPDYPFKPPKVAFRTKVFHPNINSNGSICLDILKEQWSPALTISKVLLSICSLLTDPNPDDPLVPEIAHMYKTDRAKYEATARSWTQKYAMG

SEQ ID NO: 162929 - protein, 148 aa, Glycine max
  Clone ID: PAT_MRT3847_118142C.1.pep
MASKRIVKELKDLQKDPPTSCSAGPVAEDMFHWQATIMGPPDSPYTGGVFLVSIHFPPDYPFKPPKVAFRTKVFHPNINSNGSICLDILKEQWSPALTISKVLLSICSLLTDPNPDDPLVPEIAHMYKADKAKYEATARSWTQKYAMG

SEQ ID NO: 162930 - protein, 50 aa, Glycine max
  Clone ID: PAT_MRT3847_118143C.1.pep
SKTSRCFFLEETAVYDFTALRNFKWHPQTGKIFTNCNTLIWAKGSYCGSQ

SEQ ID NO: 162931 - protein, 53 aa, Glycine max
  unsure (1)..(53): unsure at all Xaa locations
  Clone ID: PAT_MRT3847_118144C.1.pep
IMYLISLALFKSRVHTHLYFLYAFHLLELNPPTWYILRCVISKIXGYSASMLW

SEQ ID NO: 162932 - protein, 98 aa, Glycine max
  unsure (1)..(98): unsure at all Xaa locations
  Clone ID: PAT_MRT3847_118145C.1.pep
TREPGGSRNKEGKTXXQSEEXGEEEKGKRQRXGXGQEXEXPERRXXXTTHKRGKEGEEKKDRAEQGEXGEDESQTRXGEGREAEKARQKQNPTRKRRR

SEQ ID NO: 162933 - protein, 24 aa, Glycine max
  Clone ID: PAT_MRT3847_118146C.1.pep
QYQYQLVKYSIKHWEKNPVIDNSA

SEQ ID NO: 162934 - protein, 56 aa, Glycine max
  Clone ID: PAT_MRT3847_118147C.1.pep
VGSSKTPAPLNFWVFCFLHDKERVIQISTFEKGSLCYFFEWNKGAYFIKASKEKTT

SEQ ID NO: 162935 - protein, 76 aa, Glycine max
  Clone ID: PAT_MRT3847_118148C.1.pep
IRPSISASSGAMIMARSFLRGSLLPLTIVSLVRLSVIAIVLEIPTTLGLFIMIDLATTYFRGTFLQLSAIWISYPV

SEQ ID NO: 162936 - protein, 121 aa, Glycine max
  unsure (1)..(121): unsure at all Xaa locations
  Clone ID: PAT_MRT3847_118149C.1.pep
MAKFGEGDKRWIVADXPDGTNVHNWHWAETNCLEWSRTFFKNNFSNVAVGDGDATVTIKKVEKLDGEAYVNVRKGKVIPGYEISVRLAWEGEARDANGKVLQRVDGAVEIPYISDENGRED

SEQ ID NO: 162937 - protein, 56 aa, Glycine max
  Clone ID: PAT_MRT3847_11814C.1.pep
QIFESYTSLFVTYTSHYISKLQWEVIDSTVRMLETNADLMDLTNMSILSTLDAGEC

SEQ ID NO: 162938 - protein, 129 aa, Glycine max
  Clone ID: PAT_MRT3847_118150C.1.pep
HITNYDLLFTGERSTGLELVRLTTRTCSNQNHLPNEPLISLFVHRNVTEHICMHACMFIILREMNNTGDNTNVRYNFLHQYRHRLLLPGPPNAAIPPGGPTMPTPFAPSSPHQVQDLRQNHDLLGHQLL

SEQ ID NO: 162939 - protein, 49 aa, Glycine max
  Clone ID: PAT_MRT3847_118151C.1.pep
PRVSPREDAVKPNYNLLEQNLLKDTPKHAPYHAKGSSRENYSRERNTPT

SEQ ID NO: 162940 - protein, 91 aa, Glycine max
  Clone ID: PAT_MRT3847_118152C.1.pep
RHLGLFHKTSVEVASQAMYVLTLQSYRCCKAGVLHFCQMEASLLGWFLNRKSRVVSGGKVTCPESGGSRKRLGVEDGVTNGIMLTGAKKEL

SEQ ID NO: 162941 - protein, 187 aa, Glycine max
  unsure (1)..(187): unsure at all Xaa locations
  Clone ID: PAT_MRT3847_118153C.1.pep
MFLKFMFRSFFLVHNPINVHRDEDTESDDDLLENQNEQQISSDTFKRKPSDIVTVTSDVVEINDVLSLHSSVKVTTRAAGRNGQYRNMLNSRGIQKRRSSLRKRKARSPSMVSIRRNGAVASDLTGGRKNNSQLPVVTSSRKLRSMANGSTKGNLKEARSAIVDSKDRLXSSSCFANLLVSEIDQCC

SEQ ID NO: 162942 - protein, 62 aa, Glycine max
  unsure (1)..(62): unsure at all Xaa locations
  Clone ID: PAT_MRT3847_118154C.1.pep
PLLXXVVGXVAVAXLGSLSXGETLSGLXXAVGSXHXTLCDRXXELXNXVSXIXLXTMVXXIF

SEQ ID NO: 162943 - protein, 101 aa, Glycine max
  unsure (1)..(101): unsure at all Xaa locations
  Clone ID: PAT_MRT3847_118155C.1.pep
NFSFGRTCDMRDCAQPXGGEHNSKSAAKALQGPEGXSSSGPYVGSNTPSSIYLXVPADGSSXGNGASXPPYEVPFSGGAXYHYNYXXRLSGGRPYKPLGLS

SEQ ID NO: 162944 - protein, 36 aa, Glycine max
  Clone ID: PAT_MRT3847_118156C.1.pep
WLFVRTYRKRLIKILIFGLNFSLYLLGRKVQCFQLL

SEQ ID NO: 162945 - protein, 131 aa, Glycine max
  unsure (1)..(131): unsure at all Xaa locations
  Clone ID: PAT_MRT3847_118157C.1.pep
TPQVVKIAENPSRVTSTREVDTXCTMQICSIVSRILKTASVXKYDEDVPTSSSQNVYVLDVKKECCKHLSAPNVGALPSPSEEGXTEEDDQAAEETLEPRAPERAPGNLIDLXEVESDEEPLAPRLAPGSE

SEQ ID NO: 162946 - protein, 99 aa, Glycine max
  unsure (1)..(99): unsure at all Xaa locations
  Clone ID: PAT_MRT3847_118158C.1.pep
YGVNNLSSKLSRELAYIITDKIKVCGGYTIPRKDRPGITQYXLFVIIKTNEAPAIGPHXAVMHPDDLRIKDGGPHVFAQVDYKIGVKGIAFLVLQRMEI

SEQ ID NO: 162947 - protein, 98 aa, Glycine max
  Clone ID: PAT_MRT3847_118159C.1.pep
EKTIRFLLVPSPLDWGEINSGSQGVPDQNLILLGQNPFLVSWCPLIQPILVHTFSNSRFQTFYFLDYHTWFNPKITFWKKPKAQSPKIVVFIKASKKP

SEQ ID NO: 162948 - protein, 132 aa, Glycine max
  unsure (1)..(132): unsure at all Xaa locations
  Clone ID: PAT_MRT3847_11815C.1.pep
GTSLQITITCFKLCLHAGSCWAFSAVASVEGINKIKSGKLVSLSEQEFRDCDVEDGNQGCEGGLMDTAFAFIXKKNGGLTTSKDYPYEGVDGTCNKEKALHHAANISGHVKVPANDEAMLKAKAAAANQRLV

SEQ ID NO: 162949 - protein, 552 aa, Glycine max
  Clone ID: PAT_MRT3847_118160C.1.pep
MSRIRRLVYVHLIPPVTERGFSSLSVVTAPFDFTEIQISRLPTVVILGRPNVGKSALFNRLIRRREALVYNTPDDHVTRDIREGLAKLADLRFRVLDSAGLEAEATSASILHRTASITAHVLAKSHFALFLTDARAGLHPLDLQVGKWLRKHAPQIKPIVAMNKSESLFDATGSLASAANEMCRLGFGDPIAISAETGLGMHDLYMSLKPLLEDYMLRVFTEEGARENSHNEVEDSSDLDVDKSKLPLQLAIVGRPNVGKSTLLNALLQEDRVLVGPEAGLTRDSIRTQFEFQGRTIYLVDTAGWLQRTKQEKGAASLSIMQSRKSLLRAHIIALVLDAEEIINARRSMKHAEVVIARRAVEEGRGLVVIVNKMDLPRGKHQSSSYEKVMEIVPQEIQTIIPQVKGIPVVFISALEGRGRTTVLNQVIDTYEKWCSRLPTARLNRWLQKVMSRHSWKDQAAQPKVKYFTQVKARPPTFVAFVRGKTQLSDTDIRFLTKSLKEDFDLGGIPIRIMQRSVTKKDASGSGNSKNSHSVCRVVERTVSDKRSIVDE

SEQ ID NO: 162950 - protein, 75 aa, Glycine max
  Clone ID: PAT_MRT3847_118161C.1.pep
LVWLVHKGMELNVRSGLYGTGNVFGFSDSHLLCWALWNPPRQCASHSPFMLCICLVFRSVRFLYRSQPLLSRKFA

SEQ ID NO: 162951 - protein, 135 aa, Glycine max
  unsure (1)..(135): unsure at all Xaa locations
  Clone ID: PAT_MRT3847_118162C.1.pep
CPLIGDTSVMALASMLVDEAKHGSSLRLLDLFNCGGITRXAXRWLKKPYFPRLKWLGVTGSVNRDMVDALARSRPFLHVACHGEELGADPYGTSDGLYTHDYDDVDEFEQWLLEADIDSDYEEMGDAENNDEMVM

SEQ ID NO: 162952 - protein, 69 aa, Glycine max
  Clone ID: PAT_MRT3847_118163C.1.pep
HGLLPYLIPQFESNPTSSSYIVATTWACGQCYIGDELRLICTLRNEIRIPSRERITQCHAMRRHCTTIA

SEQ ID NO: 162953 - protein, 94 aa, Glycine max
  Clone ID: PAT_MRT3847_118164C.1.pep
WEGPSSLSAGEATPCSIYRCGRFDLGRLCFVLLILPESEEAFFLMGSNFPNGLVSKAFSLGFFSVYVVFITCFWFKVWFRPPMIHVFLCCRALT

SEQ ID NO: 162954 - protein, 85 aa, Glycine max
  Clone ID: PAT_MRT3847_118165C.1.pep
RGYYKIMAQKPSAFLDILFMGLLKMSSEFFFYCMRIGSSYLAFSFVLSLETSSSAICRSRLLFASFHFVFILLPLLRYLLTKICG

SEQ ID NO: 162955 - protein, 41 aa, Glycine max
  Clone ID: PAT_MRT3847_118166C.1.pep
LTINNGHNYHNPHVASTDKERSTKPIIYAKKTLNILQISSI

SEQ ID NO: 162956 - protein, 86 aa, Glycine max
  Clone ID: PAT_MRT3847_118167C.1.pep
HTMPLSFSHLTLSGGFTLSDPLTHHSQSTITNCFLQLTKLLREVLCFLNGIPTGYCYPEAAASVQLRPPFLVMGGETGEQHHHHRR

SEQ ID NO: 162957 - protein, 125 aa, Glycine max
  Clone ID: PAT_MRT3847_118168C.1.pep
GGPQGQLGSLRKQGLGVRAIVQQNQEFSIQNEDFPALPGFKGGNADYAMDMHQKEQLHDNTVPMMQSQHFSMGRSAGFSLGGTYSSHRAQQQQHAPSVSSGNVSFSSVNNQDILHLHGSDIFPSS

SEQ ID NO: 162958 - protein, 60 aa, Glycine max
  Clone ID: PAT_MRT3847_118169C.1.pep
LRIQTRPSLFRIDLSLQLSSLKHTINFLPSYTSLYIIYSNILQHIIFNLTATKYPIILHL

SEQ ID NO: 162959 - protein, 247 aa, Glycine max
  Clone ID: PAT_MRT3847_11816C.1.pep
GPFPFLVFPSIQWGGGEERRGNPRSFPSFPQKKGFSSLFLPIPPFLTSTSRLLQQVHCFCLSMVCSPGSGRMEVMARLLAAGTFSHTVADDFAREKLAAEYICRELREADEANLLHEEDMHVYGESPMTDALQLVCCNTCKKPIKDSQFAAHAELCRSLKLTEQTMVELDTGNRKPPRKEKKKLGASSANQASAVGEQRRSESIDNIDSALSQSHLNSQIRVVPFSNEVTGYSSCVGAALIMGWYWH

SEQ ID NO: 162960 - protein, 175 aa, Glycine max
  Clone ID: PAT_MRT3847_118170C.1.pep
MDTANAAPLHIAIFPWFAMGHLTPSLHLSNKLAQRGHRISFIGPKKTQTKLQHLNLHPHLITFVPIKVPHVNGLPHDAETTSDVPFSLFPLIAEAMDRTEKDIEILLRELKPQIVFFDFQHWLPNLTRRLGIKSVMYVIINPLSTAYFANGPRKSKGRELTELDLMVPPQGFPES

SEQ ID NO: 162961 - protein, 527 aa, Glycine max
  unsure (1)..(527): unsure at all Xaa locations
  Clone ID: PAT_MRT3847_118171C.1.pep
MQLFTNIPFGSTLCLSLAIIIITLVILTTFSSSLFLRWPKIITFFCSCETCQAYXTSGWSKTFDNLCDWYAHLLRNSPTKTIHIHVLRNTITANPDNVEYMLKTRFHNFPKGKTFSTILGDFLGRGIFNVDGESWSFQKKMASLELSKNSIRSFAFEVVKFEIKDRLIPLLVLSKQNDCVLDLQDVFKRFSFDSICRFSFGLDPMCLELSLPISEFAMSFDLASKLSAERAMSVSPLIWKIKRFLNVGSEKKLRKAIKMIDILAREVIRQRRKVGFSSISPDKDDLVSRFMRTIADDTYLKDIIASFLLAGRDTXASALTSFFWLLSXHPVVESQILLXAEQVIGSDYHKDLTSYEELQQLHYLQAAANESMRLYPPIQFDSKFCLEDDVLPDGTFVKRGTRVTYHPYAMGRLEEIWGSDCFEFRPERWLKEGLFCPQNPFKYPVFQAGIRVCLGKEMALLELKSVALSLLRRFHIELAAPPPHHHHHSTPRFSPGLTATFSCGLRVKVREQGTQQRQHTTQPLHHS

SEQ ID NO: 162962 - protein, 109 aa, Glycine max
  unsure (1)..(109): unsure at all Xaa locations
  Clone ID: PAT_MRT3847_118172C.1.pep
MATSAIQQSAFAGQTALKQLNELGRMIGGAGKGRTTMRRTRKSAPHIIWYGPDRPKYLGACSNQIPPYLTGEFPGDFXWDTVGLXSDPETFVRNRELEVIHNRWAPLGA

SEQ ID NO: 162963 - protein, 97 aa, Glycine max
  Clone ID: PAT_MRT3847_118173C.1.pep
CCPMMADDDPSHSEEDDAHDVCHDKDTERTHGIPLLHTRTYGCFKDMEECRYYRHTCLNLSSYQNKQGSHPLDRTRQLHCYAPEASGYVQRWAITRT

SEQ ID NO: 162964 - protein, 144 aa, Glycine max
  unsure (1)..(144): unsure at all Xaa locations
  Clone ID: PAT_MRT3847_118174C.1.pep
EIIDKTLIGKSITLEAESSDTIDNVKDKIFFFEGIPPDQERLIFVGKQHEEGRTLAEYNIQNETKLPEEKRQRGGMQILGKTLKAKTITAEAESNDTIENEKENTTDKGGIEKGTEQSXIAAGKQHEGGEGTTAEKQNIERNKT

SEQ ID NO: 162965 - protein, 52 aa, Glycine max
  Clone ID: PAT_MRT3847_118175C.1.pep
FRKNTILLGCLERKNTPSFSLISYCPPPYYYQLPSPPLQRDKEKITPLLSFL

SEQ ID NO: 162966 - protein, 56 aa, Glycine max
  unsure (1)..(56): unsure at all Xaa locations
  Clone ID: PAT_MRT3847_118176C.1.pep
XVAGXXAXXIKPGQKXXKXIPVTSERXIXXRXXRGRVCQRVICHFFRXXHXXTKFN

SEQ ID NO: 162967 - protein, 84 aa, Glycine max
  Clone ID: PAT_MRT3847_118177C.1.pep
IHGILSLSECYGFGGNNMTGPPQSWFTTHDGEVYATSDDLGCSNYYPTQVWILQCIFDVSYNMLIFLWLGLSSSSSVNVLRFKA

SEQ ID NO: 162968 - protein, 146 aa, Glycine max
  unsure (1)..(146): unsure at all Xaa locations
  Clone ID: PAT_MRT3847_118178C.1.pep
MSLQNKVFWMVKGSGQINDRETIFDNPTKIEPKRPHQWFVDTAEVDFLPDKKQAVEDADEKSSPGFSNGNIAPWENNPNSHSVPNQFIGRLFGSETRPVNFTEKNTSYVLADDSNVRSKMITNQYGDDASLXXXISHSIEDSEACV

SEQ ID NO: 162969 - protein, 107 aa, Glycine max
  Clone ID: PAT_MRT3847_118179C.1.pep
NRMSYPGECSPSTVVDSLLTSMSVDRHTDARERLLVEPYGLCKESGIWLGRSSEMTYVADRDSPGIAHVGVKRILQETNGIRIIELRATSVDTGITSNPPSPCKLPP

SEQ ID NO: 162970 - protein, 193 aa, Glycine max
  unsure (1)..(193): unsure at all Xaa locations
  Clone ID: PAT_MRT3847_11817C.1.pep
HASARFFKPLYSIFAFSLFCFSLHSTGEKRREERETQILSFPSTKKRFFIALLPIPPFLISDSRLLQVHCFCLSMVCSPGSGRMEVMARLLAAETFSHTVADDFAREKLAAEYICRELREADETNLLQEEVFLSGYNLHFLLGIXKMLLHISYITDMHVYGESPMTDALQLVCCNTCQEANQGQSICCSCRTL

SEQ ID NO: 162971 - protein, 463 aa, Glycine max
  Clone ID: PAT_MRT3847_118180C.1.pep
MSLQNKGFWMVKGSGHINDRDTVFDNPTKIEPKRPHQWFVDAAEVDFFPNKKQAVEDADEKSSPGFSNVNIPPWENNPNFHSVPNQFIGRLFGSETRPVNFTEKNTYVLADDSNVRSKMVTNQYGDEASFGLSISHSIEDSEACVNFGGIKKVKVNQVKEVDVQALEGHNFGRQSNGDLHQAYNREVETRSASIGQAFDKDRDATLMGLTYSRGDAHVRSFGASFVKGDDSIVSISESYNKEDTNIISFGGFPDERDIISVGRPAAEYDQLYNQSSVHGSTTAHEKELDVSSSDAVASTLQVAKVKSETVSKNKQELKTAKNEAPNSFPSNVRSLISTGILDGVPVKYISVSREELRGIIKGSGYLCGCQSCNYTKVLNAYEFERHAGCKTKHPNNHIYFENGKTIYQIVQELRSTPESLLFDTIQTVFGAPINQKAFRNWKESFQAATRELQRIYGKEELNL

SEQ ID NO: 162972 - protein, 81 aa, Glycine max
  unsure (1)..(81): unsure at all Xaa locations
  Clone ID: PAT_MRT3847_118181C.1.pep
SVSYFRERERERLSDPRKCVLLINHVADAMDLEVVGRVAMLFDYDSMAAFVNSAEALVXWNYLCIDQYNVRHVLFLALPRG

SEQ ID NO: 162973 - protein, 64 aa, Glycine max
  Clone ID: PAT_MRT3847_118182C.1.pep
TGNDYTQPCRSTLYPCRDIIGYHLQRGSFLSAVRLLISGSQNISIAAICMRIDHGSCQVRPCNS

SEQ ID NO: 162974 - protein, 143 aa, Glycine max
  unsure (1)..(143): unsure at all Xaa locations
  Clone ID: PAT_MRT3847_118183C.1.pep
VFDIWCAWSKASKCKMAIKRTRCRLRLLKSKRPAIAGQLRKDLGELIHGGHEXTAFNRVEQFMGYESSLGAYELLEHFXELILXTIYYIHRHXDWTNDINEAAYTVIXADARCGDPAELGDIPQLFGQRSRKRFATATVELSP

SEQ ID NO: 162975 - protein, 64 aa, Glycine max
  Clone ID: PAT_MRT3847_118184C.1.pep
QTIFHGSDILYQDEPDVNYKEDSGDVNKWDFRTTPDNTINPPAFCGHTIMRDNSRLNKERRCRD

SEQ ID NO: 162976 - protein, 65 aa, Glycine max
  Clone ID: PAT_MRT3847_118185C.1.pep
WCRLSTSELQLHLEPAHICMAGMAFTTRCRSFICMKLLSISQFNFDIHHPLRAYVTIGDLKVRLS

SEQ ID NO: 162977 - protein, 70 aa, Glycine max
  Clone ID: PAT_MRT3847_118186C.1.pep
NIQNVQSKTNMFSSTRNVYTSSKYDNIKCVNKLWLICASPTSRSHIHNAVFCDTLDNPEALFDGLMCLCA

SEQ ID NO: 162978 - protein, 112 aa, Glycine max
  Clone ID: PAT_MRT3847_118187C.1.pep
HKSGERKKRMKEREEELVGLFTGVGGELLCCVWQQLLFHFRVSKRTLTELLSDTHFHLFSLHPFCFFFFPFSEWYSCNFSQISDSELMEWSCKGDQNWYDQNLCLDYTIPVN

SEQ ID NO: 162979 - protein, 48 aa, Glycine max
  Clone ID: PAT_MRT3847_118188C.1.pep
KTHVKALYNTKQSELIACLARTVLLAMITIRRSQLTIYANCERIYYDH

SEQ ID NO: 162980 - protein, 69 aa, Glycine max
  Clone ID: PAT_MRT3847_118189C.1.pep
GCLNHEAVQKPVRHGRNDMHPGRHAVPCVVGYQGREACHWWHKARMQKEDGLRTCPSGNLHPLITPQDD

SEQ ID NO: 162981 - protein, 175 aa, Glycine max
  Clone ID: PAT_MRT3847_11818C.1.pep
QTFEALTAFVWRARSEALGMHMDPNQQTKLLFAVDGRSKFVPPIPKGYFGNAIVFSNALCKVEELVNNPLSFSVGLVGKAIDMVTDSYMRSAIDYFEVKRSRPSLTATLLITTWTRIPFRSADFGWGKPFFFGPVTLPGKEVILFLSHNEESKSINVLLGLPASAMKRFERLMEI

SEQ ID NO: 162982 - protein, 40 aa, Glycine max
  Clone ID: PAT_MRT3847_118190C.1.pep
GPFLCSHQGLRSFPLASLAVKSCPPQALKESIVYRKRERE

SEQ ID NO: 162983 - protein, 70 aa, Glycine max
  unsure (1)..(70): unsure at all Xaa locations
  Clone ID: PAT_MRT3847_118191C.1.pep
SPTFNFXLXKNQIMXXRHIPNPXISNFRXFXLFFKXPXCGXXGLXRPEXRXXRXTCXXCVXAGFAXKAEG

SEQ ID NO: 162984 - protein, 40 aa, Glycine max
  Clone ID: PAT_MRT3847_118192C.1.pep
YCLVCIILLSIINILYCDTNINEIFTSYLLIILVQNFYRS

SEQ ID NO: 162985 - protein, 73 aa, Glycine max
  Clone ID: PAT_MRT3847_118193C.1.pep
PPPDPGSKETKFCPPFSKRFFPPRSFFGSQKKKPPLWGSTGRGIQSPFARFRWEGQKLAFRAVSLPRVRGPPN

SEQ ID NO: 162986 - protein, 64 aa, Glycine max
  Clone ID: PAT_MRT3847_118194C.1.pep
PRSSLVSVNKSVAERDRVNFSLWVIAWFLLWGLGYRLEIEEILLHFLCLVFLSMSGEWKYFVRL

SEQ ID NO: 162987 - protein, 85 aa, Glycine max
  unsure (1)..(85): unsure at all Xaa locations
  Clone ID: PAT_MRT3847_118195C.1.pep
MMLKVWKWYQNCLAVHPVKTQAISSAILWGVXNLSVQYITHSAAKKQLLLSVIDSDAKFTINWNRLAVTSMFGFGFVGPVGHFWN

SEQ ID NO: 162988 - protein, 35 aa, Glycine max
  Clone ID: PAT_MRT3847_118196C.1.pep
SFIQLNMKILKTLSALINQSKQLPISGSRYSYQIE

SEQ ID NO: 162989 - protein, 48 aa, Glycine max
  unsure (1)..(48): unsure at all Xaa locations
  Clone ID: PAT_MRT3847_118197C.1.pep
VXSEXXXXXXAXCTXRXXXXXLXXXHXXXXLHXCXXXXXXFAXVXXEX

SEQ ID NO: 162990 - protein, 82 aa, Glycine max
  Clone ID: PAT_MRT3847_118198C.1.pep
FQESLNFFLLLCVRFLKGKKITLCAGHRLRESFSFPLLGYLLNTLLFDIGASVRLKLLLALSSGLLGNFKFKLVKSWIRAPT

SEQ ID NO: 162991 - protein, 62 aa, Glycine max
  Clone ID: PAT_MRT3847_118199C.1.pep
YMHYQERMLFWTRRKEIGVILVSDFVLEMLVNKVRVDDNTRDCEEMILIEKKSDEKKQGALI

SEQ ID NO: 162992 - protein, 112 aa, Glycine max
  unsure (1)..(112): unsure at all Xaa locations
  Clone ID: PAT_MRT3847_11819C.1.pep
SIVTGGTPAGTAPVFQACLLRPFLGQTPARGILRCVRETFDHAPGMTTINLDLKRGGLWVLRTSAYGHSGRDDADFXTCEVVKPLKFREALCLRVMLSLSLPSGDVLLGADE

SEQ ID NO: 162993 - protein, 234 aa, Glycine max
  Clone ID: PAT_MRT3847_1181C.1.pep
MDRRKRNETTKSSTTSTVELPPPISASEALIVNALCALGLAFAFWIANTVYSIELVTHPSLTLFFIWITELPIVTLLYSRYRQNRKQCTYLRAVGRGVLGVPVGALLNFLGAIAVGAPVTFQYLPKTVNWALMMSVFTTIPASCVLGSSWADWRRIFAQTKPKGSIEYLICLPAHGAVIGAWFGAWPMPLDWERPWQEWPISVSYGTVAGYLVALVASLGFVLAYGRSQHIKRE

SEQ ID NO: 162994 - protein, 121 aa, Glycine max
  Clone ID: PAT_MRT3847_118200C.1.pep
YGLALVVKSLFGTEDGVSMVVLNLMTRAKFLMEGWSFLKDASLEGGFPFTKAYGLPAFDSHGPDPGFTRVLTMGLVVYFTISLNKILGPYIGFGGLKSLVDVGGVPVSLFNMYFLKFSLLW

SEQ ID NO: 162995 - protein, 42 aa, Glycine max
  Clone ID: PAT_MRT3847_118201C.1.pep
FIPQQIAGSYTWCDPKIETKERYSVPSYRFPRAAKRRGIKNT

SEQ ID NO: 162996 - protein, 48 aa, Glycine max
  Clone ID: PAT_MRT3847_118202C.1.pep
VSGMNYYACLSIMSLLILTPFAIAVEGPKVWIAGWQTAVSQIGPNFVW

SEQ ID NO: 162997 - protein, 46 aa, Glycine max
  unsure (1)..(46): unsure at all Xaa locations
  Clone ID: PAT_MRT3847_118203C.1.pep
WGDAVGFFSKECYPMYTVGVMIYRCGAVHPRCLSGEPLKKKVTHPX

SEQ ID NO: 162998 - protein, 50 aa, Glycine max
  Clone ID: PAT_MRT3847_118204C.1.pep
KGKKVLIYRDIYYDHRTCLVSCACFFFPCRTHHLYLPSFCHLMLQQSDFP

SEQ ID NO: 162999 - protein, 78 aa, Glycine max
  Clone ID: PAT_MRT3847_118205C.1.pep
YKHVTSLKSFSIYTPKVHFYIWLGMFIHINFMIVPYSISLKFFKYLQLVYNPLFSFYKIPLSLILIQKSNIFLIFKHL

SEQ ID NO: 163000 - protein, 46 aa, Glycine max
  Clone ID: PAT_MRT3847_118206C.1.pep
CMKEHRKMKSKQKKVILFCFCTILLYVTNHRFVPLPAPVVSNFNSI

SEQ ID NO: 163001 - protein, 50 aa, Glycine max
  Clone ID: PAT_MRT3847_118207C.1.pep
SNFFEDKIIVDKKVENGSHKFIDCYQIAFTLSKSKPLISSMVILFLHLTF

SEQ ID NO: 163002 - protein, 95 aa, Glycine max
  Clone ID: PAT_MRT3847_118208C.1.pep
TRILKELTDLHKDPPTFCSAGPVPEDMFHWRATMMGPAGGAYAGGVFLGTNHLPAGYPFEPTKDDFRTEGFKPNINRNGRISLEILQEQWSPALT

SEQ ID NO: 163003 - protein, 102 aa, Glycine max
  Clone ID: PAT_MRT3847_118209C.1.pep
KILFCFSSSSPNYSFPFSPSCSFNSSFPWSLQFCQLCSPSPSSLMGLASSFCIWALTSTPKDLVFSLCPERYVSSPFAFSSSCTFNFSFPLSPSCSFNSTFP

SEQ ID NO: 163004 - protein, 276 aa, Glycine max
  Clone ID: PAT_MRT3847_11820C.1.pep
MESQKQNSKKRKQVFPYGNYKSYYGYRIGQGVDEDPRLKVLRKEWFEGKDCLDIGCNNGIITIQIAQKFCCQRILGVDIDSDRVEDAYWNLRKTVRLKSTGNKPVKASKLQDKDHADDSENSVTTLLNVKTEEISKEHSSSEQIDLLKIVSFKRENFVQTQHPPGKQYDTILCLSVSKWIHLNWGDDGLITLFAEVWKLLRPGGIFVLEPQPWKSYESNRNVSETTAANYRNIMIRPEQFQEILLDKIGFRTVEDITSGLTDSKTGFNRPILVFCK

SEQ ID NO: 163005 - protein, 54 aa, Glycine max
  unsure (1)..(54): unsure at all Xaa locations
  Clone ID: PAT_MRT3847_118210C.1.pep
DSQDSLQIMLFAFIFLITSEXRGTSXYFLYYFLLLIHCITHTKPVCSLRYKEND

SEQ ID NO: 163006 - protein, 118 aa, Glycine max
  Clone ID: PAT_MRT3847_118211C.1.pep
LYPIVYYAGSCSFISGHMSTRVKVMPMYAPVMSPFVTGTIVMSLNHDHTRLGFSIAVDSHFSTYSFMIKAIGFKVTPMCSDLGVQAHNVIDSQLEYMSGCASRSAQLLFGFMNVVFSV

SEQ ID NO: 163007 - protein, 125 aa, Glycine max
  Clone ID: PAT_MRT3847_118212C.1.pep
PIFVGIRGINLDINQPLLISLYILRHCVLWRYNALLVFGMLMTAGLVNVSSDPKIERPILEAQQELPFPHNDPLIMRDANRMLMHDMDCGGSCKTRCIAHLRPNLYTTACGTCLMKYKSVPPATS

SEQ ID NO: 163008 - protein, 106 aa, Glycine max
  Clone ID: PAT_MRT3847_118213C.1.pep
SVEPQPRVEVVSGKGCSRLFSSSIPSFRGLQPLEPMSPASSPLQVPSSTAPFAGLVICVTGLSKEARNQVMEATERLGGQYSPNLHPQCTHLVVQSFGGRKFEHAL

SEQ ID NO: 163009 - protein, 101 aa, Glycine max
  Clone ID: PAT_MRT3847_118214C.1.pep
RFSFFFFPYRRGEKGLNMDYNLMLRPISLYTPIPNNTHTYILVHSSGPNMMQFTAISEPLTRQYLNHRTHFPCFPQLPTLYLICTPDMFLDSRNPGSMQLA

SEQ ID NO: 163010 - protein, 122 aa, Glycine max
  unsure (1)..(122): unsure at all Xaa locations
  Clone ID: PAT_MRT3847_118215C.1.pep
QTXTXPPXQESVVQVEEVVVTDVPQPDKTTSTVPXERDSHPXPYETEKKKPGGETXTLETHLSXPNXXAHXNXIXVYIGESTXLSALPESEXRXLQELKXLXQDALNXXXFSXKYXXQXDTT

SEQ ID NO: 163011 - protein, 63 aa, Glycine max
  Clone ID: PAT_MRT3847_118216C.1.pep
HPIRGVPTAINCLATLLKEPVVRSSFVQADGVKLLVPLISPASTQQSIQVSLLDSTSENPKAK

SEQ ID NO: 163012 - protein, 61 aa, Glycine max
  Clone ID: PAT_MRT3847_118217C.1.pep
IGHGRKNESPKLLRVMNWFSRNQPSPRKKSKEGKKPPREGEVICNFHYDPCLLFTSLYIIL

SEQ ID NO: 163013 - protein, 240 aa, Glycine max
  Clone ID: PAT_MRT3847_118218C.1.pep
LTRPDLQWIRQNWKHSLLYITFLLAILHLTQNHFCHKLFFANQTVRVKKNPDLPLRFRSDGTFKILQVADMHYGTGTSVTRCRDVLASEFEFCSDLNTTRFLKRIILAENPDFLAFTGDNIFGSSSPDAAESLFRAFGPVMESGLPWAAVLGNHDQESTMDREELMSLISLMDYSVSQINPSDDDLTNPSKGGMMTKIDGFGNYNLRVYGAPGSMVANSTGLNLFFLDSGDRAAYHGIRT

SEQ ID NO: 163014 - protein, 127 aa, Glycine max
  Clone ID: PAT_MRT3847_118219C.1.pep
KKWDEWQKGEVLRQEGEVAPPPNSDWIGDPPENLHPVELFGPRCPWPRGFLRRKKEKKRKGGVFLCLFFNKKSFFTFSFLIPPRAKILITSPVRPRHYIHFHLGKGIPLSSCNLYHLRHLRKGGLLK

SEQ ID NO: 163015 - protein, 65 aa, Glycine max
  Clone ID: PAT_MRT3847_11821C.1.pep
SCMLSLIEQGTGLHCGSHIRSLGISIVSRFRRVDGRIRMAFERRVIVVLRSHNIIESSHQSGWSI

SEQ ID NO: 163016 - protein, 251 aa, Glycine max
  Clone ID: PAT_MRT3847_118220C.1.pep
MELNFKYQLSLFCVTLLLPALCTSQDSFTCSRATYYGSPDCYGNPRGACGFGEYGKTVNDGSVAGVSWLWKNGSGCGACYQVRCKIPQFCDENGAYVVVTDYGEGDRTDFIMSPRAYSRLGRNADASAELFKYGVMDVEYRRVPCRYGGYNLLVKVHEHSRNPHYLAIVILYLGGTYDVTAVELWQEDCQEWRRMRRAFGTVFDAENPPRGDIKLRFQLSGNAEKYWVQSENVISSDWEGGAVFDSEIQLG

SEQ ID NO: 163017 - protein, 95 aa, Glycine max
  Clone ID: PAT_MRT3847_118221C.1.pep
SSLCNNHCFAPGHVGQFHFQESQNCPKWIWSPGKIFIIVRVPIQVCRYEFRKTHRHLMSDIQREKGYHRAMQKVVSTSSQPCVVNLTRQRLQSDL

SEQ ID NO: 163018 - protein, 58 aa, Glycine max
  unsure (1)..(58): unsure at all Xaa locations
  Clone ID: PAT_MRT3847_118222C.1.pep
MNGRLYIQFDVYFPDXGFLSSDQYQSLVKVLPQKSSKQVSYMKLDDXKKNTLHDVIFK

SEQ ID NO: 163019 - protein, 151 aa, Glycine max
  Clone ID: PAT_MRT3847_118223C.1.pep
TSFDYNEVPLDTASPENLTLIDLAIDGEEHDECEDWTSKLGINLRNCVHARNNSPSKQVPWILGTLLYDKCLASKSLALNWQSRRSRSKRSSCLAQTKPCDSIERKKEDRFYGRIDDSPAEKKLLQYSRRKFKSKQRCFPVASMVSEFQEK

SEQ ID NO: 163020 - protein, 81 aa, Glycine max
  Clone ID: PAT_MRT3847_118224C.1.pep
QGKPQNKGGGGTPNTPGGGPYPRKKKKSPLPQKTLPPFGPLNPNSSKKKSNTFVTICWLRKDTPPPGVLKPYFFSPPNTPF

SEQ ID NO: 163021 - protein, 78 aa, Glycine max
  Clone ID: PAT_MRT3847_118225C.1.pep
YTQVTENKVYSFLYVQKLVAISRAKLNIGKKACASKRNEFNSLAQKTKKAKQKHGTWAKSPFSWSRTEIEQNLKPPFL

SEQ ID NO: 163022 - protein, 222 aa, Glycine max
  Clone ID: PAT_MRT3847_118226C.1.pep
VRNSRLDPRVRLKEEYVMVKHLPKIQKDDDSRKCCLSDCFSCCNDNWQKVWAVLKPGFLALLADPFDTQPLDIIVFDVRPASDGNGDGRLSLASEMKERNPLRHSFKVTCGIRSIRIRVKSSSKVKDWVAAINDAGLRPPEGWCHPHRYGSFAPPRGLVEDGSQAQWFIDGRAAFEAIAFSIEAAKSEIFICGWWLCPELYLRRPFHTHASSRLDNLLEAKA

SEQ ID NO: 163023 - protein, 99 aa, Glycine max
  Clone ID: PAT_MRT3847_118227C.1.pep
RLLIREERSICIFGICFSVIVFFIFNILNSSPFFTFIAKKTECPKNYTRKKSYLNRQKGVSVPAPDQQFNSSFPQPPFGSNQLLNKHAEPVSATPMYHR

SEQ ID NO: 163024 - protein, 47 aa, Glycine max
  Clone ID: PAT_MRT3847_118228C.1.pep
LIYPPQRRYVCRFYVMISVKPFSSWGVDHPLALINMINGAVTFFFLR

SEQ ID NO: 163025 - protein, 84 aa, Glycine max
  unsure (1)..(84): unsure at all Xaa locations
  Clone ID: PAT_MRT3847_118229C.1.pep
VIPSQEWGFFTYCVRYSQNPPGLNRWMGKLTIPYGNFPQCHKECPLSIGGGAGAQNAFXMRPPPAVHSMWRYSDGDFVFDVSSD

SEQ ID NO: 163026 - protein, 116 aa, Glycine max
  Clone ID: PAT_MRT3847_11822C.1.pep
METRAGSDMKMAIDDALNAFSPVSTPRIFWKSRRRSASGRNLEVSEVTSNKRTSKQAGSTYRHQKILIVDLQKRTQILQRRLVLLGRLEPLMMIADRRSLAESLLPPVYIILYIPS

SEQ ID NO: 163027 - protein, 206 aa, Glycine max
  unsure (1)..(206): unsure at all Xaa locations
  Clone ID: PAT_MRT3847_118230C.1.pep
CPRPPTGSLPVHPSLRSSRSDGLTFLLPCGSLPRARSCSSYTAPDSLFPAAPRGGVTLTSPLAGVWVIGGLAPGLGLPLLNPFLLVPPRSPLFPLCSLFPGQPRPRPAPHFPARCLPSLPAPKLSGPPPAPFPPPPPPPYPPPPPAPPXXPPGLPPWWPSPPPPTAPTPPRFPPFATPPPPPPPPLPPPLPSPPPPPXSPPPPXPP

SEQ ID NO: 163028 - protein, 50 aa, Glycine max
  Clone ID: PAT_MRT3847_118231C.1.pep
IHAEGNTFLAIWCMNTAKLVYMSDTDMRATELPRYQSMIVLSSNNVILLI

SEQ ID NO: 163029 - protein, 344 aa, Glycine max
  Clone ID: PAT_MRT3847_118232C.1.pep
MLELCRKPLKMCFGGGGNDDDLLWHTDLKPHASGNYSIAVVQANSSLEDQAQVFTSPSATFVGVYDGHGGPEASRFITNHLFSFLRKFATEEGDLSEEVIKKAFEATEEEFLRVVRESWIARPQIASVGSCCLLGAISKGVLYVANLGDSRAVLGRKALEGEVNCGAVVAERLSTDHNVGVEEVRKEVEALHPDDAHIVVCIGGVWRIKGIIQRPVMTAEPSILKRKLKADDLFLIFATDGLWEHLTDEVAVEIISRSPRIGIAKRLARAALEEVAKKREMRYGDLRKTDKGLRRHFHDDITVIVLYLDHSKESQNGRSRRKGVYDCINTPIDIFSVSSDEADL

SEQ ID NO: 163030 - protein, 349 aa, Glycine max
  Clone ID: PAT_MRT3847_118233C.1.pep
ADAWADAWAGNYSIAVVQANSSLEDQAQVFTSPSATFVGVYDGHGGPEASRFITNHLFSFLRKEGGLSEEVIKKAFEATEDEFLRVVRESWIARPQIASVGSCCLLGAISKGVLYVANLGDSRAVLGRKALEGEVNCGAGAVVAERLSTDHNVGVENVRKEVEALHPDDPHIVVCTRGVWRIKGIIQVSRSIGDVYLKKPEFDTNPLFQQFVCPLYLRRPVMTAEPSILARKLKADDLFLIFASDGLWEHLTDEAAVEIISRSPRIGIAKRLARAALEEVAKKREMRYGDLRKTDKGLRRHFHDDITVIVLYLDHSKESQNGRSRRKGVYDCINTPIDIFSVSSDEADL

SEQ ID NO: 163031 - protein, 350 aa, Glycine max
  unsure (1)..(350): unsure at all Xaa locations
  Clone ID: PAT_MRT3847_118234C.1.pep
LRLTFDNICGLAFGRDPQTCVSSLPDNRFATAXFDRATEATLQRFILPEVLWKVKKWLRLGMEVSLSRSLAHVDDHLSNVIEKRKVELLTXQKDGTLHDDLLTRVMRKKESYSDKFLQQVALNFILAGRDTSSVALSWFFWLVIQNPKVEEKILREICTVLMETRGNDDMAKLFDEPLAFEEVDRLVYLKAALSETLRLYPSVPEDSKHVVADDVLPDGTFVPAGSSVTYSIYSAGRLKSTWGEDCMEFRPERWLSLDGTKFIMHDSFKFVAFNAGPRICLGKDLAYLQMKSIAAAVLLRHRLVLVPGHQVEQKMSLTLFMKNGLKVNVHERDLRGIITSLKKRKGGRCC

SEQ ID NO: 163032 - protein, 59 aa, Glycine max
  Clone ID: PAT_MRT3847_118235C.1.pep
FLIHAISLGQFEWVLMILLKILMPYNRMVKEDSLDLYNLAHDGRPHDSLHNISKKRATA

SEQ ID NO: 163033 - protein, 152 aa, Glycine max
  Clone ID: PAT_MRT3847_118236C.1.pep
SAILLDVVAVSALIIYGSRVVLGYKQTWDRYQLLVNKTLYEKTLASGFGSVHFLLDASEQQQYKEAILAYAILLKAEKSQVISRQSVGEKCERFMYEVFKVKVEMQIDKALNTLLRLGLATESSIDGRRGLLAMPCPKAYEALKERWNSLLS

SEQ ID NO: 163034 - protein, 45 aa, Glycine max
  Clone ID: PAT_MRT3847_118237C.1.pep
QLSCDSKSLVLVLINRYHGHTGVQWTPRVYCSITCNQQCFIRCLL

SEQ ID NO: 163035 - protein, 106 aa, Glycine max
  Clone ID: PAT_MRT3847_118238C.1.pep
GLEILAFPCNQFGRQEPESNDKIVDFVCSRFKSEFPIFDKIEVNGDNSAPLYKFLKLGKWGIFGDDIQWNFSKFVVDKNGQVVGRYYPTTSPLSLERDIHQLLGIS

SEQ ID NO: 163036 - protein, 46 aa, Glycine max
  Clone ID: PAT_MRT3847_118239C.1.pep
WIMVLDFNVFTSFKDKLGTLLIFFYLKKSTSVGLSNLVRSGPEYEL

SEQ ID NO: 163037 - protein, 55 aa, Glycine max
  unsure (1)..(55): unsure at all Xaa locations
  Clone ID: PAT_MRT3847_11823C.1.pep
LMEIQGLDGIEWKRLMVNRRFYRGGGFKPKSFKKNKXNKGGPGLERWSTRELIRD

SEQ ID NO: 163038 - protein, 116 aa, Glycine max
  unsure (1)..(116): unsure at all Xaa locations
  Clone ID: PAT_MRT3847_118240C.1.pep
MDLPPEIDGYIKESIDHSVGLPVSSQTLLFKLHASLESQRQLRDQHLFLLAKLKEKDALIERARXCEANMNAQAVKRFVEENQKLAAECESLVEQRVKLEQECALYDHDREALMEF

SEQ ID NO: 163039 - protein, 98 aa, Glycine max
  unsure (1)..(98): unsure at all Xaa locations
  Clone ID: PAT_MRT3847_118241C.1.pep
XXXXWXXXXCXLXXGWXLVWXXXXXVGXXXXCXXXVXVLCVVVXXXXCXGXCCXCXXXXXXXWWCXGXXXCVFXXVXGWXFXVFMVXXVGXXXCVVXV

SEQ ID NO: 163040 - protein, 99 aa, Glycine max
  Clone ID: PAT_MRT3847_118242C.1.pep
SEDASPRWVVHVTEWAAFVESLGDSLKDAVFLVTDTDLVKTHESGSLSVVAYLVYRHSGWPACRSGSMNVTSGNQPLVIKCIVHVHKLGGNSLFTIHSD

SEQ ID NO: 163041 - protein, 221 aa, Glycine max
  unsure (1)..(221): unsure at all Xaa locations
  Clone ID: PAT_MRT3847_118243C.1.pep
MPMATTHFQGLGVVTPSFSSSHSNKFLLSSRSERKDGIFMVRSDAARVLKTEGRKHELLVTNAVATKGGASSAASTSKSGSGHELLLFEALREGLEEEMERDPCVCVMGEDVGHYGGSYKVTKGLAPKFGDLRVLDTPIAENAFTGMGIGAAMTGLRPVVEGMNMGFLLLAFNQISNNCGMLHYTSGGQFXIPIVIRGPGGXGRQLXAEHSQRLESYFQSI

SEQ ID NO: 163042 - protein, 148 aa, Glycine max
  Clone ID: PAT_MRT3847_118244C.1.pep
MKTVSDWIDSCSKEQLKTYQDWFNLADSDGDGRITGNDATKFFALSNLSRSQLKQVWAIADAKRQGYLGFQEFVMAMQLVALAQVGHDINSDILKTEIDKENIKSPVMEGLDALIAKTKSLTVNAQPDVFGTAIPQPLPLNSWAAPKS

SEQ ID NO: 163043 - protein, 53 aa, Glycine max
  Clone ID: PAT_MRT3847_118245C.1.pep
MASSYQQNPSTEQQETSTNTNRSIQPPTSFVTMQREMGFDLILIPRHKEECRK

SEQ ID NO: 163044 - protein, 50 aa, Glycine max
  Clone ID: PAT_MRT3847_118246C.1.pep
AAIALYVTPFQLPILLTGFYLMRHPMLRSKVPPAPVNFFRRLPSLTDSML

SEQ ID NO: 163045 - protein, 109 aa, Glycine max
  Clone ID: PAT_MRT3847_118247C.1.pep
GLGKKFPFDPPLKVSPSFWNIYNWAPKGGLEKTNWSKAPFLAKYKGFPLNGCKISVKANFFSPQGKRWWVQAQNHVFDVFQRKWLRWVPRKYPLFNFCLDKNRYPQFPP

SEQ ID NO: 163046 - protein, 98 aa, Glycine max
  Clone ID: PAT_MRT3847_118248C.1.pep
MEYQSFGRVQRPKGANIMQALKVILVLAVGAWLLYQVKHSRNDTENYSDQTEFDGAILLGRKGMPSRLDEMDFPDSGNVDSAGEANESSNGRDDGSGG

SEQ ID NO: 163047 - protein, 80 aa, Glycine max
  Clone ID: PAT_MRT3847_118249C.1.pep
SDCHSFLLKHHHSCQHHHTHPDLANHYSPSPRTALTFLGLVEVDLVVVMVFGSLMVDFVMAEGGDIATTHSSSGAMVACM

SEQ ID NO: 163048 - protein, 229 aa, Glycine max
  unsure (1)..(229): unsure at all Xaa locations
  Clone ID: PAT_MRT3847_11824C.1.pep
MINGNGTQTEYWGESSGSTSHSSQQDVEDDRMIALVLSEEYAKLDGAVGRRLTNLEPVRHVPRINSFIPTVSDASMDHQRLLQRLNVYGLCEVKVSGDGNCQFRALSDQLYRSPEHHKHVRKEIVKQLKDHRSLYEXVPMKYKKYHKKMAKTAEWGDHVTLQAAADKFSAKICLLTSFRDTCFIEIMPLYQAPQRELWLSFWCEVHYNSLYEIRDAPIQHKPKRKHWLF

SEQ ID NO: 163049 - protein, 46 aa, Glycine max
  Clone ID: PAT_MRT3847_118250C.1.pep
SLYTTLIKKNKVPIILFFITLSFPHIFNFPIQNLLYIFYIFLFTYF

SEQ ID NO: 163050 - protein, 175 aa, Glycine max
  Clone ID: PAT_MRT3847_118251C.1.pep
MSEDADLALQTFRALVESADRKFGRVRDVPAYGGGASQYQQQHHAFQKVFKAYTRLWKHQQENRAKLVECGLKRWELGEIASRIGQLYFGQYMRSSECRFLVEAYVFYEAILSRRYFQGSELNAKDLGVRSKELRFYARFLLVSVILNRTEMVKHLVERFGALVEDCRTTFRVMH

SEQ ID NO: 163051 - protein, 65 aa, Glycine max
  Clone ID: PAT_MRT3847_118252C.1.pep
CRIIGGCMLHTGCELLHLGKITPIVGMVYRDQSLVYCESLFAIWKMPIACFSFVRKSAVFFALLD

SEQ ID NO: 163052 - protein, 68 aa, Glycine max
  Clone ID: PAT_MRT3847_118253C.1.pep
AEFRPHTLLEKLPTRECNLVVLEPLAYPVLQAGPKICLAQDLDLMQIHTLVAGTLRTCIVIPIPSPRA

SEQ ID NO: 163053 - protein, 78 aa, Glycine max
  Clone ID: PAT_MRT3847_118254C.1.pep
FPFWDCKKKSLNLGPLEGLTLIFSFYKLACVSDAHFLLDISLHMQVNVGFCFFCSPLSPPCKFFHVLAQLIRGPNINF

SEQ ID NO: 163054 - protein, 116 aa, Glycine max
  Clone ID: PAT_MRT3847_118255C.1.pep
CSVTQKFFEFFDHFVSELVVQISVPPDSVAHVPPQAASVQDRRMTAVHHILTVPTHGSRLRFPRTLRNLSIRCSYVLTSGSVIDRYTVGLLKAFERKHLVSAIIAPPKIDRGDRFL

SEQ ID NO: 163055 - protein, 86 aa, Glycine max
  Clone ID: PAT_MRT3847_118256C.1.pep
MQLDAPLTTMMRSPPPIVTTSTSVGYVVDLILEKRYPMVIVVNYRNSYATTQYSSRAVGVFTSDQLSRFITPVSQVKGTHLSAYKR

SEQ ID NO: 163056 - protein, 104 aa, Glycine max
  Clone ID: PAT_MRT3847_118257C.1.pep
TTQKRGPKKTKGATTNHHCTKTNTEPTASTKPKKHVQRSQQTTKHNNHRDREQKTYTVLPLKERQQNRRTQQNDSIKKHSFIPSQLGRHSQFQKAEQASTGEEE

SEQ ID NO: 163057 - protein, 30 aa, Glycine max
  Clone ID: PAT_MRT3847_118258C.1.pep
EKHKTITLKLVITNEYRDTLKKNTMIISNH

SEQ ID NO: 163058 - protein, 73 aa, Glycine max
  unsure (1)..(73): unsure at all Xaa locations
  Clone ID: PAT_MRT3847_118259C.1.pep
ISSYGRKNVHFSLQPLLIGLKIDCAAAKPETVETECIITEKLLAMPETDXVTVESKFATLGADSLDTDDSEMA

SEQ ID NO: 163059 - protein, 257 aa, Glycine max
  Clone ID: PAT_MRT3847_11825C.1.pep
MSRFPFFNRSNTIHSTKSESSQKPYLVHHHLHNLDRSGSVNRFYGSVDSMKSSIRGKMVKKLCTLFESSKKPLPEPESESESFSSSKSRSKTDSDSCITILFRLPGTEDRIVVYLTSLRGIRRTFEDCNAVRMILKGFRVWVDERDVSMDLSYREELQHVPGEHHVALPQVFIRGKYIGGADVIKHLFESGDLAKMILEGLPKLKPGFVCDNCGDARFVPCENCSGSRKVFDEDEGELKRCLECNENGLLRCPYCCS

SEQ ID NO: 163060 - protein, 53 aa, Glycine max
  Clone ID: PAT_MRT3847_118260C.1.pep
KIYIVLLQMQITTSSYYQDYVCETVSLNVTNILSNLTRELVQLRCLKMCFSFR

SEQ ID NO: 163061 - protein, 102 aa, Glycine max
  Clone ID: PAT_MRT3847_118261C.1.pep
VGGVRMVNNTIIQDIISNLRQTLTTLSKPDRKTTPGTKLLKRTEILPTCSLNSKLTGYQAEVEPYHSHDLTRPQFSIRHAIEGKVDNWFQGLRRSKSKTFCT

SEQ ID NO: 163062 - protein, 70 aa, Glycine max
  unsure (1)..(70): unsure at all Xaa locations
  Clone ID: PAT_MRT3847_118262C.1.pep
CRATTQHGYRKLQRLSSGSPHPPYQTAYHFQPSKNWINGPHGPLRISXFSNQFYQYNPKGAVWGNIGGAH

SEQ ID NO: 163063 - protein, 64 aa, Glycine max
  unsure (1)..(64): unsure at all Xaa locations
  Clone ID: PAT_MRT3847_118263C.1.pep
SEKSLIPVHLFTEIPTAGHAKLETRRSKLAHVVYCATAYTVHSXIYFFLRCRAPGESFIPQCCN

SEQ ID NO: 163064 - protein, 319 aa, Glycine max
  Clone ID: PAT_MRT3847_118264C.1.pep
MSMTQFAMVEELAFLVKDNLPCKHLVLTMEESLVNFLQDDDTSSDGILELEPMNSYNRLLLHRLAEIFGFAHESVGEGDDRHLILERCPDTSIPPVLVSDILWKYDDEPQSLVTSHQILRRSESSPVLQKNTASLSQSLEERKAAYLIARERIFSMKLEEVKEPGEQKPRSVPVVARRMIAHALGQRIHTKNQNDLASDSMKDGVLTDELNAHDKNMEESTLKKVSEESSHLRGNSNNSIRNTSSSNAASLNKRNDQTTVDKDLPEFSQERKQGLSVSKDYIKKEHLGAAKRMFAHALGVHSGKDGSVPRSRSGEIKKN

SEQ ID NO: 163065 - protein, 252 aa, Glycine max
  Clone ID: PAT_MRT3847_118265C.1.pep
EFIGFAHESVGEGDDRHLILERCPDTSIPPILVSDILWKYDEPQSLVTSHQILRRSVASPVSQKNTASLSQSLQERKAAYLIARERIFSMKLEEVKEPGEQKPRSVPVVARRMIAHALGQRIHTKNQNDLASDSMKDGVLTDELSAQDKNQEESTLKKVSEESSHLRGNSNNRIRNNSSNAATLNKRKDQTTVDKDLPQFSAERKQGLSVSKDYMKKEHLGAAKRMFAHALGVHSGKDGSVPRSRSGEIKKN

SEQ ID NO: 163066 - protein, 42 aa, Glycine max
  Clone ID: PAT_MRT3847_118266C.1.pep
LERKRIIGSGKLNTTLIPMGSNIKQEFNPTSKKMHYCLKDNM

SEQ ID NO: 163067 - protein, 121 aa, Glycine max
  unsure (1)..(121): unsure at all Xaa locations
  Clone ID: PAT_MRT3847_118267C.1.pep
ALAVASMXIQEQAAARPLIGDVVTALSFLAXQAYDHRGGAGDDKRNRVLKNGEGGGGGSGGRWDLEGSEKDDSPRETARMLNSNNRDLDRERAVAEAKMWGENWREKRRQSAQGSFDGSNA

SEQ ID NO: 163068 - protein, 72 aa, Glycine max
  Clone ID: PAT_MRT3847_118268C.1.pep
GPRGSWCYKRWSASQRSPYRSKALLSPLTALCLNYTCVAASHAVLIRMEVEYFHSARNAECAHPINSTRFTV

SEQ ID NO: 163069 - protein, 35 aa, Glycine max
  Clone ID: PAT_MRT3847_118269C.1.pep
GKGHNNIAVIGHVDPGKSTSTGHLIYKLWGIDKRV

SEQ ID NO: 163070 - protein, 89 aa, Glycine max
  Clone ID: PAT_MRT3847_11826C.1.pep
TTGRKQTSLLGTGRKTSSKQLATNTTLNYTPSTVCENNPHRYHHGTDATTKIRKYQISTHLLIKNLTSQTSILKISQHTMTALRAHILT

SEQ ID NO: 163071 - protein, 171 aa, Glycine max
  unsure (1)..(171): unsure at all Xaa locations
  Clone ID: PAT_MRT3847_118270C.1.pep
QAGTDGAKPYDFMDCRVGTLRSTLDAXRFQHVSIMAYSAKYANSFYGPFRKALNSNPRVGDEKTYSINPAYYRKAFTEMPDDESXGTDILLVKPGPPYLDFIRLLKDYFALPIAAYQGSWDIAKIKAGCALQMIHEKNGMMEVLMCLQMAGADISLPYSAVQTAKXLCGEK

SEQ ID NO: 163072 - protein, 185 aa, Glycine max
  Clone ID: PAT_MRT3847_118271C.1.pep
PRVRPRVRGLVGPPNDAVFSSDAEPYVKPIIDFLVRNEAPLLANVYPYFAYANDQQNSIPLAYALFTQQGNNDAGYQNLFDAMLDSIYAAVEKVGASNLQIVVSESGWPSEGGGTGASIDNAGTYNANLISHASGGSGTPKRPGGSIETYLFAMFDENQKQDAETERHFGLFRPDKSPKYQLNFN

SEQ ID NO: 163073 - protein, 344 aa, Glycine max
  Clone ID: PAT_MRT3847_118272C.1.pep
MAQSHSGKTSSMTSILLLFMLLISNTGTTGAQSGVCYGRVGNNLPSPQEVVSLFKQYGFQRMRIYDRNHEVLQALRDSNIELLLDLPNIDLQYVASSQDNANRWVQDNVRNFWNVRFRYITVGNEVKPWDSFARFVVPAIQNIQRAVSAAGLGNQIKVSTAIETGALAESYPPSRGSFRSDYLTSYLDGVIRHLVNNNAPLLVNVYPYFAYIGNPRDIILDYALFRSPSVVVQDGSLGYRNLFNAMVDAVYAALEKAGGGSLNIVVSESGWPSSGGTATSLDNARTYNTNLVRNVKQGTPKRPNRPLETYVFAMFDENQKQPEYEKFWGLFLPNKQPKYSINLN

SEQ ID NO: 163074 - protein, 146 aa, Glycine max
  unsure (1)..(146): unsure at all Xaa locations
  Clone ID: PAT_MRT3847_118273C.1.pep
MEPPTGFCASLLSFIRFLPFFIGLLLLGTIKGILFCPLICLIIATGNTAIILGLWIVHSVWTYYCVVRAKQFGPILKLVIGLCVLPVLLVEYAIAGILGSIAGGAAYGFLSPICATLXAVEEGKDDKFYHCFIGGSWCTVEKSCMV

SEQ ID NO: 163075 - protein, 80 aa, Glycine max
  Clone ID: PAT_MRT3847_118274C.1.pep
GASKRAAKGRLGSVSDYCVHHCVCPVVVVRYPEENDNGNGNGTGAGGLVVQVGEPVELPPVPEEEHEVYHDASDEHRGLV

SEQ ID NO: 163076 - protein, 55 aa, Glycine max
  Clone ID: PAT_MRT3847_118275C.1.pep
PYSQTVLVFNKFLGCARDLSMMLYLLVVPPVFARSVILMPHFLNGKELCKSINPA

SEQ ID NO: 163077 - protein, 344 aa, Glycine max
  Clone ID: PAT_MRT3847_118276C.1.pep
MAQSHSGKTSSMTSILLLFMLLISNTGTTGAQSGVCYGRVGNNLPSPQEVVSLFKQYGFQRMRIYDRNHEVLQALRDSNIELLLDLPNIDLQYVASSQDNANRWVQDNVRNFWNVRFRYITVGNEVKPWDSFAQFVVPAMQNIQRAISNAGLGNQIKVSTAIESGALAESYPPSRGSFRSDYRTSYLDGVIRFLVNNNAPLLVNVYPYLAYIENPRDISLDYALFRSPSVVVQDGSLGYRNLFDAMVDAVYAALEKSGGWSLNIVVSESGWPSSGGTATSLDNARTYNTNLVRNVKQGTPKRPGRPLETYVFAMFEENQKQPEYEKFWGLFLPNKQLKYSINLN

SEQ ID NO: 163078 - protein, 261 aa, Glycine max
  Clone ID: PAT_MRT3847_118277C.1.pep
PVRIPGSTHASVCLRCDLRTLLCCVTVETRNPSPPSSLQRRGRRIESESPLCSAESCPIIAHSQPAPTMQQRAHSLLAAPPMFHHHPPSQSQDQGPFLPKHPNPTKPVKPPIRLKRMWQTSRIPLVPLLITFLRSLSRSWKGLPTVLSFLRGSESQLLQDMLFSKSLFFNLKSTRSITRLSKDIQDDGQIRVRIGFPITGYGQESRNRAARQRIPHRVWTDEEGVEHVEVKFYIPGPHGHGKVFAEMFKGADHEWKYLLDC

SEQ ID NO: 163079 - protein, 262 aa, Glycine max
  Clone ID: PAT_MRT3847_118278C.1.pep
LDLGSLGFLSQDTSDLHEKVDFVACLGGDGVILHASNLFRDAVPPIVSFNLGSLGFLTSHDFEDYKQDLRQVIHGNNTRDGVYITLRMRLRCEIFRKGKAMPGKVFDILNEVVVDRGSNPYLSKIECYEHDRLITKVQGDGVIVATPTGSTAYSTAAGGSMVHPNVPCILFTPICPHSLSFRPVILPDSAQLELKIPEDARSNAWVSFDGKRRQQLSRGDSDRISMSQHPLPTVNKFEHTGDWFSSLIRCLNWNERLDQKAL

SEQ ID NO: 163080 - protein, 45 aa, Glycine max
  Clone ID: PAT_MRT3847_118279C.1.pep
YDIREHWHYEIGLRLKGDIQLPMPFKNSPESQGIEKIQKVKHMRD

SEQ ID NO: 163081 - protein, 63 aa, Glycine max
  Clone ID: PAT_MRT3847_11827C.1.pep
SCSVSVESYSPSSPMSMFSLRVQDGATQEVTNLFLCAHWSLPILNVHHHTHKKGKGKEKGSSS

SEQ ID NO: 163082 - protein, 72 aa, Glycine max
  Clone ID: PAT_MRT3847_118280C.1.pep
GVHGIRKHFHVRKSIFKILYINESILKNLITLLIINMNLCGLNNNLFHVVDGTHFSIRVSSLSFIFSMHGII

SEQ ID NO: 163083 - protein, 291 aa, Glycine max
  Clone ID: PAT_MRT3847_118281C.1.pep
LEGCFGSSVADTGTLLHAIAGHDRFDATSSKQDVPDFQSHFVAVSSLESKPLKGLRVGLIRETIDDGVDAGVISAIRAAALHFEELGCSVNEVSLPSFSLGLPAYYILAVSESSSNLSRYDGIRYGNQVYADELDSLYGGSRAQGFGSEVKMRILMGTYALSAGYYDAYYKRAQQVRTIIRNSFKEALSQNDILISPAAPSAAYKIGEKKNDPLAMYAGDIMTVNVNLAGLPALVLPCGFVEGGPSGLPVGLQMIGAAFNEGELLRVGHIFEQTLENCKFVPPIVVDDIAY

SEQ ID NO: 163084 - protein, 65 aa, Glycine max
  unsure (1)..(65): unsure at all Xaa locations
  Clone ID: PAT_MRT3847_118282C.1.pep
VSRGCKKRGFGFANQGGLLAERDRGKCKLLKVCSGFXLVMLTFTVQYHDLLKGAIRNHFFSGQLI

SEQ ID NO: 163085 - protein, 107 aa, Glycine max
  Clone ID: PAT_MRT3847_118283C.1.pep
HRTKKKEEPCIRTVHSMNRQSPQSFVQAEHNGSANYFQFEDDIHFEPEMCFWSCNNGRQRNQMENGVPSKKLSKEWFLLDSSIVQSEHILSKLPIKKARCIIYNKEI

SEQ ID NO: 163086 - protein, 52 aa, Glycine max
  Clone ID: PAT_MRT3847_118284C.1.pep
DPGPLRAALPLMTSSTGQLITDRNLQAYELVLYGVQLELDIARDIAITRHKV

SEQ ID NO: 163087 - protein, 52 aa, Glycine max
  Clone ID: PAT_MRT3847_118285C.1.pep
MPQWLSLLGTFVFSLSPSYRSASTSMERSLSNQHSNLPTVHGAVENLSHLPF

SEQ ID NO: 163088 - protein, 174 aa, Glycine max
  Clone ID: PAT_MRT3847_118286C.1.pep
NPAKEPLPETQVEGEQIRHPRPPTPIPDVSSTGSVNGAAQSEVQSSSSPVEVHEMQNGYSSEGETMYSAETAESRNYTSPRELKFQQVGRSQSCVSYNRWGAAPRSQVARGMMVENQRSFMHVKRMYSQGATTSQRSNDYFSPTVSSIMKRNSSSSKPPPRQSAVHSPSPRWMF

SEQ ID NO: 163089 - protein, 34 aa, Glycine max
  Clone ID: PAT_MRT3847_118287C.1.pep
HGSSRWVDTKPVQVFDATVRLGMSCQSIWSVLGS

SEQ ID NO: 163090 - protein, 53 aa, Glycine max
  Clone ID: PAT_MRT3847_118288C.1.pep
HTSLIRKSFFITDFPFNMSYQMCPKEQGNVDYFPGIKIHTLQILHFFLPFFFF

SEQ ID NO: 163091 - protein, 112 aa, Glycine max
  Clone ID: PAT_MRT3847_118289C.1.pep
MEKTLLKDFELQHKNPSVEALRRWRSAVTLVKNHRRRFRMVADLDKRVQAEQIKQGIKVFFLTALYFFFLALQFIDAGNRVEYKLSSEARDSGFGIHPDEIASIVRHDNKTL

SEQ ID NO: 163092 - protein, 143 aa, Glycine max
  Clone ID: PAT_MRT3847_11828C.1.pep
IMADDGADPFPKLTSVYRVSGSKNNKLSWNVANSQQSVDSSVNNSRQLQSISDGSASRSWFSQNSRPNAWEVPSVIQKLRLGKRGNDGLTNNSNLQDKSNSPDALALTGSGILNDSKLPPESAISPTSETCLNSSVDVVDTTT

SEQ ID NO: 163093 - protein, 59 aa, Glycine max
  Clone ID: PAT_MRT3847_118290C.1.pep
TGRSRHNFIQSCFSCDKGINGSSSKNTRKWVKKTLISISPTSLTLTTGKSTSLRTLFTT

SEQ ID NO: 163094 - protein, 56 aa, Glycine max
  Clone ID: PAT_MRT3847_118291C.1.pep
RCGLRCTKMNSICMNLRLLNWSPRCVNVYIDPLKIFPTFTSTSLHTLRKIKANFFY

SEQ ID NO: 163095 - protein, 187 aa, Glycine max
  unsure (1)..(187): unsure at all Xaa locations
  Clone ID: PAT_MRT3847_118292C.1.pep
APLSGSRADLPGLLEGAHRGFGLSHEFLRHTERCSALVHVVDGSSQQPDLEFDAVRLELKLFNPELAEKPYVVAFNKMDLPEAYENWESFKEKLQSRGITPFCMSAVKREGTHEVICAAYELLRKRKEDKEEYEDGRDMVNLNHVAAAVKKQRSASISDFEIFHDRXSNIWHVVGSGLQRFIQMTNW

SEQ ID NO: 163096 - protein, 43 aa, Glycine max
  Clone ID: PAT_MRT3847_118293C.1.pep
IIRLYTLLLKASVGGGAVCVCLEHAHQIMERNIYIKMDRERDT

SEQ ID NO: 163097 - protein, 46 aa, Glycine max
  Clone ID: PAT_MRT3847_118294C.1.pep
MSIDTSRDAQAKANSLNSAAVGASVGAGLGLVLAIVMGAASALRKP

SEQ ID NO: 163098 - protein, 74 aa, Glycine max
  Clone ID: PAT_MRT3847_118295C.1.pep
CKKKKKKKKKKKKNKKKKKKKNNKKKKKLKKKKKKKKKNRPPKRFKPYLPLHATSNPFKIVTKFKFTGLLLKTS

SEQ ID NO: 163099 - protein, 106 aa, Glycine max
  unsure (1)..(106): unsure at all Xaa locations
  Clone ID: PAT_MRT3847_118296C.1.pep
XNGAVQLSMVXLXTNXLLQSPSCXXWXXSXXXXXHAQNLVDVGAXTLXXFVEXXGXXXXEXXXESXPXXVANXRXMVPHXXGXRXXAXDITSSXXXXXXXVXXXCX

SEQ ID NO: 163100 - protein, 70 aa, Glycine max
  Clone ID: PAT_MRT3847_118297C.1.pep
KAGPNIKITFWGGINHLLTRGANNHKITNNFYMVESVPLQNKETLKGKSLWRSLNKTYYPLQNFSTIKVS

SEQ ID NO: 163101 - protein, 66 aa, Glycine max
  Clone ID: PAT_MRT3847_118298C.1.pep
DFDLTTCISGPRISATAGVFSQNPLPITPAPTGATPGRDQRGRLPAPKTRNGRRLPRLKGPAPIDD

SEQ ID NO: 163102 - protein, 45 aa, Glycine max
  Clone ID: PAT_MRT3847_118299C.1.pep
KGKKAKEAGDRALQSEPVTLREPTTPAGLNARLKGGSNWQLGLGN

SEQ ID NO: 163103 - protein, 76 aa, Glycine max
  Clone ID: PAT_MRT3847_11829C.1.pep
GDKSTPLILMYSRTIYSHVCGHISKLVYPLLNRKPPTRSNFMGGKFTGDPSYLGKRKEQLRGWEQDCEPLKSIKSK

SEQ ID NO: 163104 - protein, 297 aa, Glycine max
  Clone ID: PAT_MRT3847_1182C.1.pep
MLELPFNMALRFPNLDFKSLPFAENLNTELLGGVVALVAVGFTVAYIYYRTKHPKGGLDPKNFKEFKLIKKTQLSHNVARFRFALPTPSSVLGLPVGKNILARGKDSQGEEVMRSYTPITLDSNIGYFELVVKMYPNGKMSHHFRQMKEGDYLAVRGPKGRFTYKPGQVRAFGMIAGGSGITPMFQLIRAILENPKDKTKVHLVYANVTVDDILLKEELDNFANKFAQRFEVYHVLNKPPEQWNGGIGFISKEIIKSHCPEPAQDIQILRCGPPPMNKAMATHLDALGYTSNMQFEF

SEQ ID NO: 163105 - protein, 76 aa, Glycine max
  unsure (1)..(76): unsure at all Xaa locations
  Clone ID: PAT_MRT3847_118300C.1.pep
KPTDHAXXKENXGXAXPGNXPKHTNXXDXQNDAAXAAXXAAKHDDXKTAXPETGRPPAGDPNETGASPDNAAPHNG

SEQ ID NO: 163106 - protein, 286 aa, Glycine max
  Clone ID: PAT_MRT3847_118301C.1.pep
MAAATTICYGPSSIVLGSNLLKRRHLKNTSFADRFSPSRSLLCSGFVPRKPALGRNSFWVSKIMDESVGTSAFRDAKGDETIQVFEQEAFIDGSSPFRFKFLSPEVEYKLNRLSKWIVTALFGSFILWRHDAEALWFTAGSVLNAMLSVLLKRILNQERPSTLKSDPGMPSSHAQSIFFTGFFGILSGVEWLGLNGFTIAISGLVLTFGSFFSYLRVVQQLHTVSQVVVGAAIGSIFSILWYWLWNGYMLDAFVSSLWVRIIVVLGSAGLCIGFVLFAIRYWLQDD

SEQ ID NO: 163107 - protein, 493 aa, Glycine max
  Clone ID: PAT_MRT3847_118302C.1.pep
MDPNHLFFTHFRDGAIASRIEGQHRGALPSVIVIGAGISGLAAARSLYDASFKVTVLESRDRLGGRIHTDFSFGCPVDMGASWLHGVCNENPLAPLIRGLGLSLYRTSGDNSVLYDHDLESYMLFNIDGKQVPQQMVIEVGDTFKKILEETGKVRDEHTEDISVSQAISIVLDKHPDLRQQGLAHEVLQWFICRMEAWFAADADMISLKTWDQEHVLSGGHGLMVQGYDPVIKVLAKDIDIRLNHRVKKISSGYNKVMVTVEDGRNFVADAAIITVPIGILKANLIEFEPKLPDWKVSAISDLGVGNENKIALRFDKVFWPNVELLGTVAPTSYTCGYFLNLHKATGHPVLVYMVAGRFAYDIEKLSDEAAANFVMQQLKKMFPNASKPVQYLVSRWGTDPNSLGCYSYDLVGKPTDVYDKLRAPLGNLFFGGEAVSLDNQGSVHGAYSAGVMAAENCESYILEKLGHAEKLSLASVRHEMLETLIPLQISRM

SEQ ID NO: 163108 - protein, 290 aa, Glycine max
  Clone ID: PAT_MRT3847_118303C.1.pep
MATATAAATSSFMGTRLLEAHSGAGRVHARFGFGKKKAPAPKKASRGSGRDTDRPLWYPGAKAPEYLDGSLVGDYGFDPFGLGKPAEYLQFELDSLDQNLAKNVAGDIIGTRTELADVKSTPFQPYSEVFGLQRFRECELIHGRWAMLATLGALTVEWLTGVTWQDAGHVELLEGSSYLGQPLAFSITTLIWIEVLAIGYIEFHMNAQLDPQKRLYPGGSYFDPLGLASDPEKKATLQLAEIKHARLAMVGFLGFAVQAAATGKGPLNNWATHLSDPLHTTIIDTFSSSS

SEQ ID NO: 163109 - protein, 76 aa, Glycine max
  Clone ID: PAT_MRT3847_118304C.1.pep
FFKFFCDGDRSLQLLVFTEEFLVSAGLQLALITSLPFVHPARCFYRFNGPVKCLDFGHVSGFLPPPFKKVPLPFSF

SEQ ID NO: 163110 - protein, 293 aa, Glycine max
  Clone ID: PAT_MRT3847_118305C.1.pep
MATATAAATSSFMGTRLLEAHSGAGRVQARFGFGKKKAAAPKKVSRGSGSSSDRPLWYPGAKAPEYLDGSLVGDYGFDPFGLGKPAEYLQFELDSLDQNLAKNVAGDIIGTRTELADVKSTPFQPYSEVFGLQRFRECELIHGRWAMLATLGALTVEWLTGVTWQDAGKVELVEGSSYLGQPLPFSITTLIWIEVLVIGYIEFQRNAELDPEKRLYPGGSYFDPLGLASDPEKKATLQLAEIKHARLAMVGFLGFAVQAAATGKGPLNNWATHLSDPLHTTIIDTFSSSSYSS

SEQ ID NO: 163111 - protein, 42 aa, Glycine max
  Clone ID: PAT_MRT3847_118306C.1.pep
HARNSFLCCGRVRLLIPIPSLIRWEPYALGHPFYSSIRGFLE

SEQ ID NO: 163112 - protein, 72 aa, Glycine max
  Clone ID: PAT_MRT3847_118307C.1.pep
DLSFHTYVGYEGMTRSHLRVQPGAFLSPDRQLISRMKSSTSGCVNRPLSSASLDSRISPHFPLFSKTKVMFK

SEQ ID NO: 163113 - protein, 296 aa, Glycine max
  unsure (1)..(296): unsure at all Xaa locations
  Clone ID: PAT_MRT3847_118308C.1.pep
HKLSWATATAAATSSFMGTRLLEAHSGAGRVHARFGFGKKKAPAPKKASRGSGRDTDRPLWYPGAKAPEYLDGSLVGDYGFDPFGLGKPAEYLQFELDSLDQNLAKNVAGDIIGTRTELADVKSTPFQPYSEVFGLQRFRECELIHGRWAMLATLGALTVEWLTGVTWQDAGKVELVEGSSYLGQPLPFSITTLIWIEVLVIGYIEFQRNAELDPEKRLYPGGXSYFDPLGLASDPEKKATLQLAEIKHARLAMVGFLXGFAVQAAATGKGPLNNWATHLSDPLHTTIIDTFSSSS

SEQ ID NO: 163114 - protein, 66 aa, Glycine max
  Clone ID: PAT_MRT3847_118309C.1.pep
GTYNRSPMMLEHLMIPHTHIVTTHDKQNASWAFYSIKPLRMTRGTPLSYTIHWRRSQRTNLAGATK

SEQ ID NO: 163115 - protein, 107 aa, Glycine max
  Clone ID: PAT_MRT3847_11830C.1.pep
TAKLVFRSQTVLVRRADVRGERFTFLCFASKILEMEDAVDATATLDYVSIQIFPNQNRYEAFVCKGKQSDKVAAGHLEHLLPHLPAINDLYAEGFDTNFDLKLPENL

SEQ ID NO: 163116 - protein, 142 aa, Glycine max
  unsure (1)..(142): unsure at all Xaa locations
  Clone ID: PAT_MRT3847_118310C.1.pep
FLSFGVKLTTINNXCVFGLNPGISGSRLXGKXPHSIPHLTVWKEVGQFRTPLNFLSRRRSLCLFFIDLPRGRILKAQXLGDWVTLFLFSTISDLLGGAARTKGCFLPTIVMSGNAPQKMKNXASLWQVFLTNTTPPELFFAP

SEQ ID NO: 163117 - protein, 76 aa, Glycine max
  unsure (1)..(76): unsure at all Xaa locations
  Clone ID: PAT_MRT3847_118311C.1.pep
DKXRLVGIECPKDEXXXRKIFDKXKTRXNXILXMEFNXLVGSVRSXXFVRXIMKXRDKLSCQVGINPYSMEWTGWA

SEQ ID NO: 163118 - protein, 86 aa, Glycine max
  Clone ID: PAT_MRT3847_118312C.1.pep
KNQTWSPPGEKNKFLFFPLKGGPPPGLNPISRPPQRAPPPPGLPKRPWLIFKNHPPFSPPPGPKTGGVKKNPPPFFGAGPQKFLKG

SEQ ID NO: 163119 - protein, 198 aa, Glycine max
  Clone ID: PAT_MRT3847_118313C.1.pep
MGASQSQEELQSQQQFQQHQHPNELTRRESLLLSPAASNNTKQFSNSTKVVDNVTAANSTNTNCFMLNARALSITWAENPDYWTWVQDKDESGTMIELPNLKMVCWLEVHGKFDTRKLSLGILYQVSFIVMLKDSAQGWEVPINVRLVLPGGKKQQHKENLNEKLVECWIEIPVGKFEASEKNVYILEISKCERECGK

SEQ ID NO: 163120 - protein, 68 aa, Glycine max
  Clone ID: PAT_MRT3847_118314C.1.pep
PVSSTSTLMIKNWLMHVEGSINNFKSWQKVLPRVPGQSRSPQNMLLKCLHHSKFYVLLKLFRRGFLSS

SEQ ID NO: 163121 - protein, 67 aa, Glycine max
  Clone ID: PAT_MRT3847_118315C.1.pep
ILINKSISFKKINKSISTENVGKCFAYTISIMRTLIRPQKYIMVFALVFLKFVCLFWSLIFFFHFNL

SEQ ID NO: 163122 - protein, 59 aa, Glycine max
  Clone ID: PAT_MRT3847_118316C.1.pep
HASAHAYADACVATTITSINNDYSQQQAVNLITKSVPDAISASTADASSYDLGSSAHAY

SEQ ID NO: 163123 - protein, 64 aa, Glycine max
  Clone ID: PAT_MRT3847_118317C.1.pep
KCNAFYLKIRDRQIFFKSDKLNYLSHKIFNPFNLKNYIEILLLILSCGSNTFTCDCIPCIIRDL

SEQ ID NO: 163124 - protein, 114 aa, Glycine max
  Clone ID: PAT_MRT3847_118318C.1.pep
NFGERHKGKPHWPNPKRAPPRGTFLPGLNREKAKGGPSQSPRFYQPVPPGGLSGGNKKPPPGKKTSRKKTPGHPLTGWETPQGPTGPPPSRGAPPTSGFETTTGALPGLKGISP

SEQ ID NO: 163125 - protein, 89 aa, Glycine max
  Clone ID: PAT_MRT3847_118319C.1.pep
MQQEMRTIQFHNHNMEGVYHKVPFGIGWFSFLFGFLCPPLWYYATILYFGNYYRKDPRERAGLGASAIAALICSVALLIVGAILMLRYP

SEQ ID NO: 163126 - protein, 44 aa, Glycine max
  Clone ID: PAT_MRT3847_11831C.1.pep
ELLREVLASSMICSPGGTTVNRARAGIDSPYTGLKSMAGFPTSL

SEQ ID NO: 163127 - protein, 102 aa, Glycine max
  unsure (1)..(102): unsure at all Xaa locations
  Clone ID: PAT_MRT3847_118320C.1.pep
KVVARGKKIKTANPXGIKGGRALGEGPDASGRKGKGKGVSPFVAKTGAKVEGSGPIFAPRGGSPPGDVSPGGTPGLAIWAGPLLGFLAGGALFVSPPRAWVQ

SEQ ID NO: 163128 - protein, 69 aa, Glycine max
  Clone ID: PAT_MRT3847_118321C.1.pep
HGGIEPRIFKSWQCRDWCSLKLMRDGLNPRILLDAAKSCILAYCSAPRRQPLLIRRAGGSTGQRDMQAP

SEQ ID NO: 163129 - protein, 85 aa, Glycine max
  unsure (1)..(85): unsure at all Xaa locations
  Clone ID: PAT_MRT3847_118322C.1.pep
EXQHXVXTXPXXRXQXXCXXXXXXEXXXXXXDSXTRXVXSCDDXXXQXXXXXXVXRXXXWLXXFHRVEIHGXXLXXXXDXSMXFT

SEQ ID NO: 163130 - protein, 57 aa, Glycine max
  Clone ID: PAT_MRT3847_118324C.1.pep
VMYFMRVGFFILIEFFSFLIYWCFPFESRFFVFSPMKPCFCEVCFVTSGIVGILFHG

SEQ ID NO: 163131 - protein, 58 aa, Glycine max
  unsure (1)..(58): unsure at all Xaa locations
  Clone ID: PAT_MRT3847_118325C.1.pep
WYGLQVRLPQCPGGPTRXAHAVLRVREEREGELKRYINYTANNRDIVRLLKIAKQSIT

SEQ ID NO: 163132 - protein, 246 aa, Glycine max
  unsure (1)..(246): unsure at all Xaa locations
  Clone ID: PAT_MRT3847_118326C.1.pep
MDHNLETLDSPNGKKLSAAKPGDMSVVYVCELPEXKGKFDPEKAKALGLRPGPKYRELQLGNSVKSDRQNIMVHPSDVLGPSVPGPIVLLVDCPTESHLEALLLEPLEPSYCDQADNQPEAGKSVTCVIHLTPSSVVSCSNYQKWMKKFGSAQHIMAGHEKKNVEIPILKASARIATRLNYLCPQFFPAPGLWSLPNHNSSKFGCLASSEGSFSELSEVISAENLLKFTLRPYAHLGLDRSCIPTR

SEQ ID NO: 163133 - protein, 170 aa, Glycine max
  Clone ID: PAT_MRT3847_118327C.1.pep
MVLSDLEICKPTSSSHNKVGISRSGRDLPPAHYLFKIESYSELMNTGVEKYETNVFQAGGYKWNLRVYPRGIESERGKGLSVYLQLTDCERFPAKRTVYAKFKLGILDQLNNKYHERTDSHWFRASGNIWGFKKLVALSELYEAAKGYIKDDTVIVEVQILVMSIAKIST

SEQ ID NO: 163134 - protein, 134 aa, Glycine max
  unsure (1)..(134): unsure at all Xaa locations
  Clone ID: PAT_MRT3847_118328C.1.pep
SRALILLEIDNNYARHLRYIQHADRDIINTNYMQMSXVPREAPEDKASXRSLLNYVSGNNLETQLADLVNPANELRESYSHSSEEATQLXMKALSRIDRLQNAAVPTIAHIEQCHAHTMMLMLLIHMSASSYMG

SEQ ID NO: 163135 - protein, 100 aa, Glycine max
  Clone ID: PAT_MRT3847_118329C.1.pep
MGSTGETQITPTHVSDEEANLFAMQLASASVLPMILKSALELDLLEIIAKAGPGVHLSPTDISSQLPTQNPDAPVMLDRILRLLACYNILSFSLRTLPDG

SEQ ID NO: 163136 - protein, 70 aa, Glycine max
  Clone ID: PAT_MRT3847_11832C.1.pep
AVFATWCYVALGNFHNNVLVCLFSMILRFLRLHFHPSQKLTASFLTNHCIFWSPSVVFSQPYGRVGGRVG

SEQ ID NO: 163137 - protein, 233 aa, Glycine max
  Clone ID: PAT_MRT3847_118330C.1.pep
MTRLCSCRYYLKDAVLEGGIPFNKAYGMTAFEYHGTDPRFNKVFNKGMADHSTITMKKILETYTGFEGLKSLVDVGGGTGAVVNMIVSKYPTIKGINFDLPHVIEDAPSYPGVEHVGGDMFVSVPKADAIFMKWICHDWSDEHCLKFLKNCYEALPDNGKVIVAECILPVAPDSSLATKGVVHIDVIMLAHNPGGKERTEKEFEALAKGSGFQGFRVVCCAFNTNIMEFLKKI

SEQ ID NO: 163138 - protein, 116 aa, Glycine max
  Clone ID: PAT_MRT3847_118331C.1.pep
MALRAAVLRHVRVPLQAAPKLQPWRAMSSHGDDHLSKEEVVERVLAVVKDFPKVDPSRVSPDVHFQKDLGLDSLDNVEIVMALEEEFKLEIPDKEADKIDSCHLAIEYISNHPMAG

SEQ ID NO: 163139 - protein, 439 aa, Glycine max
  unsure (1)..(439): unsure at all Xaa locations
  Clone ID: PAT_MRT3847_118332C.1.pep
MQQRLKLQQQQQALMQQALLQQQQMYHPGMLAAAMSQMEPVPSGNLPPGFDTSACRSVYVGNIHVNVTDKLLAEVFQSAGPLAGCKLIRKEKSSYGFVDYHDRASAALAIMTLHGRQLYGQALKVNWAYANSSREDTSGHFNIFVGDLSPEVTDATLFACFSVYPSCSDARVMWDHKTGRSKGYGFVSFRDHQDAQSAINDMTGKWLGNRQIRCNWATQLGNXGAGGSSNEEKINDSQNAVVLTNGSSDGGQDNNNEDAPDNNPSYTTVYVGNLPHDVTQAELHCQFHALGAGVIEEVRVQRDKGFGFVRYNTHDEAALAIQMANGRLVRGKNMKCSWGSKPTPPGTASNPLPPPAQPYQILPTAGMNQGYSPAELLAYQRQLALSQAAVSGLSGQTLLQMTGQHGLAPASMGVNSGASQAMYDGYTGNSSRQQLMYYR

SEQ ID NO: 163140 - protein, 116 aa, Glycine max; identical to SEQ ID NO: 163138
  Clone ID: PAT_MRT3847_118333C.1.pep

SEQ ID NO: 163141 - protein, 365 aa, Glycine max
  Clone ID: PAT_MRT3847_118334C.1.pep
MGSTGETQITPTHVSDEEANLFAMQLASASVLPMVLKSALELDLLEIIAKAGPGVHLSPSDIASRLPTHNPDAPVMLDRILRLLACYNILSFSLRTLPHGKVERLYGLAPVAKYLVRNEDGVSIAALNLMNQDKILMESWYYLKDAVLEGGIPFNKAYGMTAFEYHGTDPRFNKVFNKGMADHSTITMKKILETYTGFEGLKSLVDVGGGTGAVVNMIVSKYPTIKGINFDLPHVIEDAPSYPGVEHVGGDMFVSVPKADAIFMKWICHDWSDEHCLKFLKNCYEALPDNGKVIVAECILPVAPDSSLATKGVVHIDVIMLAHNPGGKERTEKEFEALAKGSGFQGFRVLCCAFNTYVMEFLKKV

SEQ ID NO: 163142 - protein, 121 aa, Glycine max
  Clone ID: PAT_MRT3847_118335C.1.pep
FSSGFLVFFWSVARVASVVRGLRRLTGRGLGRGEMEMLLTWCPRLSSEGHELQTVSPEGGCLGGKQDRCGCEPGWECWTWRAFYSLEGCRLPLFFFWLRFSPSIIFSRPCKHINQPKGSKP

SEQ ID NO: 163143 - protein, 99 aa, Glycine max
  unsure (1)..(99): unsure at all Xaa locations
  Clone ID: PAT_MRT3847_118336C.1.pep
IIEPHSISAGLDYPGVGLEHSFSKDVGRADYXSITDEEALEAFXRLSQLEGITAALETSHALAYLEKFCPTLPNVTKVVVNCSGRGDKDVQTTLKYLNV

SEQ ID NO: 163144 - protein, 112 aa, Glycine max
  Clone ID: PAT_MRT3847_118337C.1.pep
VEPSGSFGNFKAKIQHKEGFPPDHQSLFFFGKQLGDGAPLLDFNIQKGSPLPRGGGFWGGILEPSLCQFAQKYNFVKIFFRNCFVGLPPRAVNFRKKKLGPPKNLGPKKKVK

SEQ ID NO: 163145 - protein, 61 aa, Glycine max
  Clone ID: PAT_MRT3847_118338C.1.pep
PRDYTLDGTKATDRPKTHCFTIRPMELNLEGLKRYSNCGRSIIKNTHRLNHKMRIDPYSMN

SEQ ID NO: 163146 - protein, 91 aa, Glycine max
  Clone ID: PAT_MRT3847_118339C.1.pep
GQLPMWVACQCEEGGSHLRPPPSPFSGRDDPPRSFIRFPMMLNQIEDTANMIIAFNSDFQSEECHLFVFMVRPLLIGKGGRFAVSVFHIFI

SEQ ID NO: 163147 - protein, 62 aa, Glycine max
  unsure (1)..(62): unsure at all Xaa locations
  Clone ID: PAT_MRT3847_11833C.1.pep
VRNSRXRPNASGGYNKKYQAHLKRRLIETLEEEKIRGDELSHTTKTILRYQLMDLFVQLALC

SEQ ID NO: 163148 - protein, 28 aa, Glycine max
  Clone ID: PAT_MRT3847_118340C.1.pep
KLSQDSPFIISYHVANFYQTAFNLLHDN

SEQ ID NO: 163149 - protein, 64 aa, Glycine max
  Clone ID: PAT_MRT3847_118341C.1.pep
FPIMLIPQKGTLPGWGKEKLNPFENLQVFYKKKNFCPWLPWASQPVAFVFPTFPFPIFGRKRFF

SEQ ID NO: 163150 - protein, 54 aa, Glycine max
  Clone ID: PAT_MRT3847_118342C.1.pep
MVYYSLIWQVWDLIKLADYLTHREDVDPFRIGITGISLGGMHACVAAVGDTCYA

SEQ ID NO: 163151 - protein, 138 aa, Glycine max
  unsure (1)..(138): unsure at all Xaa locations
  Clone ID: PAT_MRT3847_118343C.1.pep
RFGPPCCLALGPPGRVCWXSPLFSALVALSCXGPXXXLLPWVVLLGFWGLXVPXRWLGCGSWLPPRAGVXXRVAVCPKKNSFFRSSFPLLFSGFPLCCLLCLFLCXRFGFXXWCXSXFXFFPVFPPPXXXXXXXXGPP

SEQ ID NO: 163152 - protein, 54 aa, Glycine max
  Clone ID: PAT_MRT3847_118344C.1.pep
SVFVNQGVIFWDWDSRRVWLFGMQNPMAFVSVIKKLFVFVMYQAPPLSGINCNA

SEQ ID NO: 163153 - protein, 82 aa, Glycine max
  unsure (1)..(82): unsure at all Xaa locations
  Clone ID: PAT_MRT3847_118345C.1.pep
LPXQGEGRRSAXXLPEXFLXXXWXXLXTASGESFPPWYLPHFFSFFLGYKYIISPLPFFLNWPPSLDFLDYLYTKEFVCSCI

SEQ ID NO: 163154 - protein, 76 aa, Glycine max
  unsure (1)..(76): unsure at all Xaa locations
  Clone ID: PAT_MRT3847_118346C.1.pep
IDRTKECVPTVITDNCPHHTGLGXDLXHIILFIRHSIGRXDTSTDGRWGYIPFWVVENQKMKSSVLKKTLIEVRPT

SEQ ID NO: 163155 - protein, 52 aa, Glycine max
  Clone ID: PAT_MRT3847_118347C.1.pep
ERRSCWVELDWISNLIYTFLFSYAFKAQTLFSSLLFFFLIVIPCLYPLGKEE

SEQ ID NO: 163156 - protein, 109 aa, Glycine max
  unsure (1)..(109): unsure at all Xaa locations
  Clone ID: PAT_MRT3847_118348C.1.pep
LLLWRRGIIPQATLSVNGNGNSGLKEEHFRGVRKRPWGRYDAEIRDPGEKSRVXLGTFEHRGLMQPRVYDAGARELCGHTANDNTSLRPWENVKNSSHIQSRTEQSFSR

SEQ ID NO: 163157 - protein, 46 aa, Glycine max
  Clone ID: PAT_MRT3847_118349C.1.pep
APKKLRGKKISSPGQKKLLRVKAKTRLGERPRLQKPFFAKKRCKGG

SEQ ID NO: 163158 - protein, 98 aa, Glycine max
  Clone ID: PAT_MRT3847_11834C.1.pep
GSSVACGVSAEMNQDSSSRMRQKMKACCLPGHCGFILMCNKLIWNTGLSFCYSGFVFFVLFFFFCKGNELVPERILQLHTICLMKCHGSVHIFVLFFQ

SEQ ID NO: 163159 - protein, 60 aa, Glycine max
  unsure (1)..(60): unsure at all Xaa locations
  Clone ID: PAT_MRT3847_118350C.1.pep
MATERTPLNFDSSKQSFCQFSIDLFGGXILVYKTGDWISLIHNSSISNLYRVVAWMKGCL

SEQ ID NO: 163160 - protein, 69 aa, Glycine max
  Clone ID: PAT_MRT3847_118351C.1.pep
SRSHVKNSLKILFPLRNLKTFNKFMMIVQSYCIALLYQTEQNIRMPSNLFLKELNCSEIRGLINISIFS

SEQ ID NO: 163161 - protein, 64 aa, Glycine max
  Clone ID: PAT_MRT3847_118352C.1.pep
KVHSRIQYRPLAQIRYAPEFRAWAVPLDSQSASLKSMESYSHMQRRSIQYRDNRRRKMWMDVDR

SEQ ID NO: 163162 - protein, 138 aa, Glycine max
  unsure (1)..(138): unsure at all Xaa locations
  Clone ID: PAT_MRT3847_118353C.1.pep
TLLDPPSNSSLQTLHQSNETEVFNVSKPGFNLAPANESDESHPRQKRKRKFSFLDKTEAVLAQARAAIREAENWNQTQDSDYVPVGPMYWNPKEFHRSYLEMEKQFKVFVYEEGELXGFHERPCASIYFTEGSFIHAI

SEQ ID NO: 163163 - protein, 59 aa, Glycine max
  Clone ID: PAT_MRT3847_118354C.1.pep
LFPYPCFLSSSSCARFFCPSSPTSTAHRVSKSFNLCLEPCLINSISKFRPRTLQNFKLG

SEQ ID NO: 163164 - protein, 96 aa, Glycine max
  unsure (1)..(96): unsure at all Xaa locations
  Clone ID: PAT_MRT3847_118355C.1.pep
LNPGIPGTSLXSTISKSISQRTVCNQTATGGTALNFESSKPSFRQXTIDLNCRGMLTDITGDCITLMPRSSISDSTRVADWKKGPLTVKTGMSANA

SEQ ID NO: 163165 - protein, 138 aa, Glycine max
  unsure (1)..(138): unsure at all Xaa locations
  Clone ID: PAT_MRT3847_118356C.1.pep
DACKWSKWEPHSGGLFFPIKAGGPNRVFQRWSYGGAKQTXWNLSFLIDHPKKSPVFDIFWGILRDFKNGGKTFITAFFVPQVSPRFFKNGESLGCFGKGGFISHCSVEFASQDKDTYGEDLSCWSMFRLFNFLPFLRS

SEQ ID NO: 163166 - protein, 46 aa, Glycine max
  Clone ID: PAT_MRT3847_118357C.1.pep
RGHHFIGVISFRATFSFPRKKCHQLSLIAKSTTHVSPTQGQSGVLL

SEQ ID NO: 163167 - protein, 46 aa, Glycine max
  Clone ID: PAT_MRT3847_118358C.1.pep
YIACMKPPRVSVIAILLDWYQNMVNSCILCRNLYASECITYSKPNL

SEQ ID NO: 163168 - protein, 307 aa, Glycine max
  Clone ID: PAT_MRT3847_118359C.1.pep
MDPKVRRIVDKQSHEEGEFSPENGAFVNNRHDTQAEFSKPAKQHANSDDSNHNRGASPGRSPTRDSGELNQGRALLLASPGKKSPGQKASEPPAPKHGQGFSKSPSPNSMPKRIKKGRGFTERYAFARRYRTPSPERSPPHSYRYGDRNIRRNFDRNTSYRSYSGRSPPRRFRSPPGGRNRPRYQSRRSRSRSISGSPVRGRFRERDRSRSPRRSPSPEDRLPLISDRLKSRLGPRSDEGLRDRGRSRSRSKSRSKGSSHSRSPDATPPKRYDKRTSVPRSRSRSSSASGQKGLVSYGDASPDSGSR

SEQ ID NO: 163169 - protein, 151 aa, Glycine max
  Clone ID: PAT_MRT3847_11835C.1.pep
GGANNLQVNALVARLPLLLPRAPRSLIPPIPVSPPILAPRLSSGALKVATLPLSSRAGAPPAAVPIINMILPTVPALPGPGPGPGRAPPGGLTQPRGTENREVGIGGDQGPHDKGVKRTAEVPVSEASGQAPPAKAAKQDIEDTASDAKRK

SEQ ID NO: 163170 - protein, 168 aa, Glycine max
  unsure (1)..(168): unsure at all Xaa locations
  Clone ID: PAT_MRT3847_118360C.1.pep
XXEAFLFFFLFLFFFFFSPGGTFCPPRGKKKFGPIFFKKSTTPPLPEDEFLFFLNPTHTSFGGAPPYFTPHGYPPSGFSNKGGYKQTAFSPPVFSPPGVFPHSSHYSFEYPPGYTPRGGSSPTGGPLPKKKKKFYPGGEGYPPGGPAYTARRESWPGRIVARWCCWWC

SEQ ID NO: 163171 - protein, 224 aa, Glycine max
  unsure (1)..(224): unsure at all Xaa locations
  Clone ID: PAT_MRT3847_118361C.1.pep
MTAASSSTPFLGIREESPQITTHHQPSTVSPTTAPQKKRRNQPGTPYPDAEVIKLSPKTLMATNRFICEVCNKGFQREQNLQLHRRGHNLPWKLKQKSTTKEPKRKVYLCPEPTCVHHDPSRALGDLTGIKKHYYRKHGEKKWKCEKCSKKYAVQSDWKAHSKTCGTREYRCDCGTLFSRRDSFITHRXAFCDALARVTSRERCIYISKGTRSNGVYVHQWWGD

SEQ ID NO: 163172 - protein, 110 aa, Glycine max
  unsure (1)..(110): unsure at all Xaa locations
  Clone ID: PAT_MRT3847_118362C.1.pep
IPXKFTHKTNGNEALVSAHEIATNSGHAQFTPLHLASSLISDKDDIFSHALSNAFKRFEGEIRNRGFVARKGRKWKVPPVIQPLGTSVNESRVIRVALGCKRRKRRASLP

SEQ ID NO: 163173 - protein, 67 aa, Glycine max
  Clone ID: PAT_MRT3847_118363C.1.pep
NPTLSTHSGTCDWACQNYLPQGNHLWGIGKNGKKYFKTVVLVVPPPDHDGKGKGGTNCTCSACTCGH

SEQ ID NO: 163174 - protein, 173 aa, Glycine max
  unsure (1)..(173): unsure at all Xaa locations
  Clone ID: PAT_MRT3847_118364C.1.pep
IDVFTICRKLIGARYFYKGYEANAGTKLNASELSVRDYEXAGSHTLSTAGGNFVPGASVFGFGNGIAIYNMQPKACWPATFGGGCLDADILATFXAAISNGINAIXGVVGFRYCIGMFLXDATSIGSFHAVANDITVVASGGNSGPSPGTVSNNEPWMLTVAASTIDRDFALE

SEQ ID NO: 163175 - protein, 43 aa, Glycine max
  Clone ID: PAT_MRT3847_118365C.1.pep
MVSVKKKKKKKKKKKKKKKKKKKKKKKKKKKKKKKKKKKKKKK

SEQ ID NO: 163176 - protein, 48 aa, Glycine max
  Clone ID: PAT_MRT3847_118366C.1.pep
VTLALARNTLHISRAAYETCRTTLRSSFYCKTLFTLSCSLHQTCSTST

SEQ ID NO: 163177 - protein, 58 aa, Glycine max
  Clone ID: PAT_MRT3847_118367C.1.pep
FLYAKRIATLLTLYGDDKHTCVHTWRGPLLEEFPIELGRTSLIGPQRILGLGCGWHTD

SEQ ID NO: 163178 - protein, 244 aa, Glycine max
  Clone ID: PAT_MRT3847_118368C.1.pep
MAEDWNRTALLVIDMQKDFIEDWSPVALKGGKDIVPKSVLAVAGADPLEMAEDWNRTALLVIDMQKDFIEDGGPMLVKGGKDIVPNVIKAVDVARQRGILIVWVVREHDPLGRDVELFRRHLYAAGKVGPTSKGSEGAELVDGLVIKEGDYKLVKTRFSAFFATHLHSVLQGAGINSLVVTGVQTPNCIRQTVYDAVALDYQPVTVIVDATAAATPDIHLANVFDMENIGVATPTLQEWSEPKA

SEQ ID NO: 163179 - protein, 59 aa, Glycine max
  Clone ID: PAT_MRT3847_118369C.1.pep
GVKVFKEKTPKPWVGQKNFPLPPQKSYLPMVRVPGLTPRVPKKPQNHNLPKKSFLVEFG

SEQ ID NO: 163180 - protein, 103 aa, Glycine max
  Clone ID: PAT_MRT3847_11836C.1.pep
RDGKAGPTHAAGYARAQKKKKREGPKQPKARDARQRQRKEPQHNEGQAQRETKEGKTAREDEETPKGPQGEPKRTQTKRAPPKNTAGGTSQRHEPKAKEPTEG

SEQ ID NO: 163181 - protein, 50 aa, Glycine max
  Clone ID: PAT_MRT3847_118370C.1.pep
PVPSLGLVSSSSSFSEPIISNISSIVHVRSSFMCSRSLSHVTEIIRYITV

SEQ ID NO: 163182 - protein, 109 aa, Glycine max
  Clone ID: PAT_MRT3847_118371C.1.pep
SILRSTLVGKQSYLSQRPSLFVKVYMEGIPIGRKLNLMAHYGYDGLVKTLGHMFRTNILCPNSQPLNSGNFHVLTYEDQEGDWMMVGDVPWEMFLNSVKRLKITRADRC

SEQ ID NO: 163183 - protein, 100 aa, Glycine max
  Clone ID: PAT_MRT3847_118372C.1.pep
FCFSHLKTIIFDSFDIGQTGLPFPLPPFLATLKYFFFSFPRLCFVVPGVELIKGECVVPIGKVELPPKLKMGLYFIFWASACVSFYIAFPNVKSYPLFPA

SEQ ID NO: 163184 - protein, 65 aa, Glycine max
  Clone ID: PAT_MRT3847_118373C.1.pep
FIDLALVFHHGYIFTHLSFDLRFSTLICVYRVCPKRIPNFTFYFLKPNFVRHMQNLTRISIWLSD

SEQ ID NO: 163185 - protein, 136 aa, Glycine max
  Clone ID: PAT_MRT3847_118374C.1.pep
MGSNPLSALTSTKPTPIPTQDHDDQDSPSSKCLLSFNTDSCSSTPSSSSHKALFITLILITSIALSTSFAFAFLYFSSKPPPSPLLVARALGKLKRPVVLLVSSDGFRFGYQFKTPTPHIFRAPVNATRNQVGSIA

SEQ ID NO: 163186 - protein, 77 aa, Glycine max
  Clone ID: PAT_MRT3847_118375C.1.pep
LIRSGTMEKKIELSYCCYEAFKVLAKNYLDVDHHDLFHDVEGLLEKTNMTPADVAENMMPKSKGDNVETCLKKLIES

SEQ ID NO: 163187 - protein, 108 aa, Glycine max
  Clone ID: PAT_MRT3847_118376C.1.pep
LPPILKLTHAMKVLEFILALILVLAVVHVQPNLAVRVLNMKEQLNLMSLDKGPVTPSGPSTCTYIPGTGGKNCPPLEEMNVAGNYVQHHSDETYPRLVVPFGVATNQH

SEQ ID NO: 163188 - protein, 42 aa, Glycine max
  Clone ID: PAT_MRT3847_118377C.1.pep
PLSHTHIYRRETEKTHIFRADIPQVKKKDFKGQVEENKILQI

SEQ ID NO: 163189 - protein, 80 aa, Glycine max
  Clone ID: PAT_MRT3847_118378C.1.pep
EKRNLRRLAEKKKKEEIIKKKKKKKKKKKKKKKKKKKKKKKKKKKKKKKKKKKKKKKKKKRGRPPLFDLSPPKFIFAPSP

SEQ ID NO: 163190 - protein, 72 aa, Glycine max
  unsure (1)..(72): unsure at all Xaa locations
  Clone ID: PAT_MRT3847_118379C.1.pep
SFFANNSLCYFAKKASPPKRIAGGRRVTVVASPPTKDXLKLHSDLLTKQDFFDYLDSGCKPKDKWRTGPVHD

SEQ ID NO: 163191 - protein, 45 aa, Glycine max
  Clone ID: PAT_MRT3847_11837C.1.pep
GSSSMLGSRPRRSLIMHKSTPTLEQHSSSGQSEDFSLAYHVAYSQ

SEQ ID NO: 163192 - protein, 221 aa, Glycine max
  unsure (1)..(221): unsure at all Xaa locations
  Clone ID: PAT_MRT3847_118380C.1.pep
MDAIRKQASKLREQVARQQQAILRQLGQISNEPLMTDESEIECHQQLQKLYTSTKTAKHFQRHIVRAIEGFISVSSKQMEIDVRRMARDCCKYGTENLGSSYLLARASLQFGNTYDTMENERETLLGILGDQVCIDXEPLRAQITGAPLEDARHLTRRYDKLHQEVEAQAAEVLRRRSKLKNSSVSAESSARLQNAXTRLKELKFALAALGRKTNLCYVVC

SEQ ID NO: 163193 - protein, 57 aa, Glycine max
  Clone ID: PAT_MRT3847_118381C.1.pep
SLFCMPSAISDSLRRLFPSQNGMIFVVSCPCRVLGIYLSFCYSEFLASCFGVVGVET

SEQ ID NO: 163194 - protein, 77 aa, Glycine max
  Clone ID: PAT_MRT3847_118382C.1.pep
IKTCEGNTILLEGIDKNGHIRYITSSEGAQRACLYRRTCSTHYLRYLVLYPNTDQAFAPSFKVSMLLFLCVLKSFES

SEQ ID NO: 163195 - protein, 520 aa, Glycine max
  Clone ID: PAT_MRT3847_118383C.1.pep
HPFGFNAIVVLTHAASAPPEGPNGTASSYDWFVTQRSHVVQQAIRQAAGDMRLMNPVSLVENHSACRTNRAGQRVLPNGQVWKPHLLLLSFASKILAEANALLKLQDSPPGKPYVARTRAPPLPFLLSTLLQSRPQLKLPEEQFGDEDSLDDDLGESSESDDENEHDDLPPFKPLTKAQVEELSKAHKKAYFDELEYREKLLMKKQLKEEKKQRKMLKKMAESAKDLPSDHSENVEEESGGAASVPVPMPDLALPASFDSDNPTHRYRYLDSSSNQWLVRPVLETHGWDHDVGYEGLNVERLFVLKEKIPLSFSGQVTKDKKDANVQMEISSSVKHGKGKATSLGFDLQTVGKDLAYTLRSETRFTNFRRNNATAGLSFTLLGDALSSGLKIEDKLVASKRFKLVVSGGAMTGRGDIAYGGSLEAQLRDKDYPLGRFLTTLGLSVMDWHGDLAVGCNVQSQIPVGRHTNLVARANLNNRGAGQISIRLNSSEQLQIALIGLIPLLKKLVGYHQQTQFGQY

SEQ ID NO: 163196 - protein, 69 aa, Glycine max
  Clone ID: PAT_MRT3847_118384C.1.pep
QSYQRKQIYILYLTGVKTKGIIGFLSYHSQWRIDNFALIHLLAAPILRLRSNCPVYRPYTQTSITIIVL

SEQ ID NO: 163197 - protein, 60 aa, Glycine max
  Clone ID: PAT_MRT3847_118385C.1.pep
VILKIRSDRIMRLMAVAANLADLFIAIAEIEPNPFCNHTVTLGISGLVSAWAGWYRNWPS

SEQ ID NO: 163198 - protein, 50 aa, Glycine max
  Clone ID: PAT_MRT3847_118386C.1.pep
TGSPQSSNTSSGSDSHHDNKKVGDEVLKRRKITFSRQDSDSQASGDEFFT

SEQ ID NO: 163199 - protein, 90 aa, Glycine max
  Clone ID: PAT_MRT3847_118388C.1.pep
GVCMCVGEGWDLIRVIATCCMSKGFFITQLRQIDRENTKVQKQVHLSSFFFLVFLDFLFFFNKYYIYIYIYILVNRITNIFLLKIMVGLC

SEQ ID NO: 163200 - protein, 42 aa, Glycine max
  Clone ID: PAT_MRT3847_118389C.1.pep
LPRKHEDTDDNDIRDFESDFEDTHDTNEEIDDLYNGRNVELE

SEQ ID NO: 163201 - protein, 36 aa, Glycine max
  Clone ID: PAT_MRT3847_11838C.1.pep
FIHHKKLIRAISKQTKGLKIKPFLVLGNPIQGPLKN

SEQ ID NO: 163202 - protein, 56 aa, Glycine max
  Clone ID: PAT_MRT3847_118390C.1.pep
LLYISSIVTSTGCSSFHRLEFFKSILERSPTSDPVSGSQRVRVQLTYINMTGCQAR

SEQ ID NO: 163203 - protein, 106 aa, Glycine max
  unsure (1)..(106): unsure at all Xaa locations
  Clone ID: PAT_MRT3847_118391C.1.pep
MEGKTEDEVVDIESASSGSSNDDSDDEESLVPEIDDGMRLGESLTEEEIQDLISELLEVESKAAEAQEALEEEXXSKGESEVRQEIEQNLXGDDLETAVADEMATF

SEQ ID NO: 163204 - protein, 74 aa, Glycine max
  Clone ID: PAT_MRT3847_118392C.1.pep
IAEEQKDPNLIPTKKNILESLNWLVKDCRSEDSLVFYFAGHGLQQTEYHEIGFLIYNKILQKKKERIKSVLITG

SEQ ID NO: 163205 - protein, 53 aa, Glycine max
  Clone ID: PAT_MRT3847_118393C.1.pep
KTKKSIYKKKNIEEFNKDQDQEGLEISFSYSNSSSLQSYLPSIIQYISLKESI

SEQ ID NO: 163206 - protein, 43 aa, Glycine max
  Clone ID: PAT_MRT3847_118394C.1.pep
GMLNSYKIVIIHNLKCIDVYGTMVVDYTPFVPNIRLFQLIHAP

SEQ ID NO: 163207 - protein, 77 aa, Glycine max
  unsure (1)..(77): unsure at all Xaa locations
  Clone ID: PAT_MRT3847_118395C.1.pep
DSXALVEXKKTRQXVWHLIQXDSIHARGLDRQLGYCAQGDRMRNVGVVDSEYIDHLGLPTLGGSKENEASDFHLYMQ

SEQ ID NO: 163208 - protein, 140 aa, Glycine max
  unsure (1)..(140): unsure at all Xaa locations
  Clone ID: PAT_MRT3847_118396C.1.pep
XHXYVLLTSXNTQQXXXXXTXMMVSXTQLXXTXXXXVILQTXLXEXLISKHXTATVXCTSRHXXXXTXXXGXXTXHLQVYYNXFAXLXXXHXXXEIXQXXXAYYIXHXSXXLHRXXCXXXXXXXTWXLDXNXEXAXDAXT

SEQ ID NO: 163209 - protein, 89 aa, Glycine max
  Clone ID: PAT_MRT3847_118397C.1.pep
TCWLCSNLSFCKLALKKIWFGSSPIVCPNEGASPGMHLYKSTSPIVCTTALTVIFMLICNKLKFIEGVLPLYPLCILNILEDLQNILWN

SEQ ID NO: 163210 - protein, 57 aa, Glycine max
  Clone ID: PAT_MRT3847_118398C.1.pep
VTMSSFINLKCIMNFIYLNLRVCTSLFVHLETNFRGGFYCNEAAEISKIGKAFFIFR

SEQ ID NO: 163211 - protein, 153 aa, Glycine max
  Clone ID: PAT_MRT3847_118399C.1.pep
PREKKKFFFGGKKTHFKTKGPKGLVFKTGEKKAPGKKNILKPPSEQAYGGPLWLKERAFKNIGFGGTKGTPLGGGGSAPRGTKKAGGERIGKKKGVLAKKKTIGAMGGLARGIFGNHKKTKGGRGKTSFGIKDPLKRGAHRAKGGPPLQRGQT

SEQ ID NO: 163212 - protein, 59 aa, Glycine max
  Clone ID: PAT_MRT3847_11839C.1.pep
VLKVYIDFAYTRDIYIFLDALVRKELASSCLESTLYQCGRMNEFHTSKIGILYQSLYDL

SEQ ID NO: 163213 - protein, 123 aa, Glycine max
  Clone ID: PAT_MRT3847_1183C.1.pep
LPVSSSPPSIKHLDLRAVPKNETLYLPLVNSVLSSCCPATISLSLNSFFCSRAFIEFFYEMLTGRKEDECFCSSGHIKCWWHGLKDVKVSSTRKADENIDFKTMLDALPTFSHHDNIIFRLEL

SEQ ID NO: 163214 - protein, 78 aa, Glycine max
  Clone ID: PAT_MRT3847_118400C.1.pep
MAAATSGAALNGLGSSFLSGGNRSQTLMATAIGGKVGAAAGTASPRRLIVDATAAPKKSWLPGVRCGRNLVDPEWLDG

SEQ ID NO: 163215 - protein, 52 aa, Glycine max
  Clone ID: PAT_MRT3847_118401C.1.pep
PQGIFVQGGPLPRVSNAKGKPREEDSRFKNCGRDLAPLGKVISPFVPQLFLN

SEQ ID NO: 163216 - protein, 46 aa, Glycine max
  unsure (1)..(46): unsure at all Xaa locations
  Clone ID: PAT_MRT3847_118402C.1.pep
XFXXPLLPCKLFGILGLSPLPCWAPLFLLQNPTIGHGFPPFQFLPT

SEQ ID NO: 163217 - protein, 86 aa, Glycine max
  unsure (1)..(86): unsure at all Xaa locations
  Clone ID: PAT_MRT3847_118403C.1.pep
WIPRLEFXLEHSFVYRVHNRSTGYYDGRYWTMRKLTMIGXTDASHVLTELKEAKTGYTNGLIRLIGSDNIRQEQCIILIAYKPGAF

SEQ ID NO: 163218 - protein, 39 aa, Glycine max
  Clone ID: PAT_MRT3847_118404C.1.pep
AIYSAERALILCGPRAMIPTIRLVRFTYGGYILRAGGLY

SEQ ID NO: 163219 - protein, 47 aa, Glycine max
  Clone ID: PAT_MRT3847_118405C.1.pep
MAEKVLVIGGAGYIGSHTVLELLEAGYLPVVIDNFHNAFRGGGSLPE

SEQ ID NO: 163220 - protein, 273 aa, Glycine max
  Clone ID: PAT_MRT3847_118406C.1.pep
SHSRRDSASAAEVLATANARDMIGEIENRSTHLLAIKTDVETQGDFIRYLIKEVESAAFTDIEDVVPFVKWLDDELSYLVDERAVLKHFDWPEQKADALREAAFGYCDLKKLESEASSFGDDPRQLCGPALKKMQTLLEKLEHGIFNISRMRESATKRYKVFQIPVDWMLDSGYVSQIKLASVKLAMKYMKRVSAELETGGGGPEEEELIVQGVRFAFRVHQFAGGFDVETMRAFQELRDKARSCHVQCHSQQQKLFCRSATCNAGANSASEN

SEQ ID NO: 163221 - protein, 96 aa, Glycine max
  Clone ID: PAT_MRT3847_118407C.1.pep
QIKLASVKLAMKYMKRVSAELETGGGGPEEEELIVQGVRFAFRVHQFAGGFDVETMRAFQELRDKARSCHVQCHSQQQKFFCRSATYDGANSASEN

SEQ ID NO: 163222 - protein, 53 aa, Glycine max
  Clone ID: PAT_MRT3847_118408C.1.pep
GKTPKLMVLSTQFPNAIKKKTGPLMEGGVILKTSKAARTQIRRFSVQGHVIAL

SEQ ID NO: 163223 - protein, 324 aa, Glycine max
  Clone ID: PAT_MRT3847_118409C.1.pep
PPHFQFKFPPFRDPSMALLAASGGDTVKLFDACAVKPGVYTPAGDPCALSFTPVRGSQVNSVKWNHTNLVVASAGDDKKISLWRKNGNSMGTIPVAGTDSGDSIEESILAISFSNKASRYVCSGGTGQVVRIWDLQRKRCIKWLKGHTNTVTGVMYNCKDEHLASISLSGDLMLHNLASGQKAAELKDPNQQMLRVLDYSRVSRHLLVTAGDDGTVHLWDTTGRSPKVSWIKPHSAPTAGISFSPSNDKIIASVGLDKKMYIYDSGSRRPSSYISYEAPFSSLAFRDDGWMLAAGTSNGRVAFYDVRGKPQPVAVLHAYGSSEA

SEQ ID NO: 163224 - protein, 128 aa, Glycine max
  Clone ID: PAT_MRT3847_11840C.1.pep
MTGETVNPKAYPLADAQLAITILDLVQQAANYKQLKKGANEATKTLNRGISEFVVMAADTEPLEILLHLPLLAEDKNVPYVFVPSKQALGRACGVTRPVIACSVTTNEGSQLKSQIQQLKDAIEKLLI

SEQ ID NO: 163225 - protein, 105 aa, Glycine max
  unsure (1)..(105): unsure at all Xaa locations
  Clone ID: PAT_MRT3847_118410C.1.pep
EXFLPYVHRITISDRFFKEFRRGFLEFRXAAGTVKTEHXRMTASLFYATRSVSAMTDPLHWAQIQKGTIDTPFIVLNQSLRGNEXXAKGRERCRIEISREXGPRR

SEQ ID NO: 163226 - protein, 88 aa, Glycine max
  Clone ID: PAT_MRT3847_118411C.1.pep
LTRLEAPLCPVPLYWWVMATLLIPLGKSRWFPMQTAYISNHTRSTLPVTVLHTATSPIKASTDELVVQHVSVSRWYRHHWALQTGQSS

SEQ ID NO: 163227 - protein, 118 aa, Glycine max
  Clone ID: PAT_MRT3847_118412C.1.pep
THTQFKPSFVFSIKGNDENFLHRHIPNSKSDIKTLILKDSCPTQFQRSKLEPNPQFITLQQQSLTVIKESLFNKGEEIQAIKTKKSEMNEGDNTQRLIYNLYKPRNQFKKRKEGGAKD

SEQ ID NO: 163228 - protein, 86 aa, Glycine max
  Clone ID: PAT_MRT3847_118413C.1.pep
LNQYLTLQVRTCKVPLNLCIHVRQWRTVPCHSWKRQTCRDHVNRRNENSAACILSWLKVNAQTLNMTSTKDVFGVARTLGLVESDD

SEQ ID NO: 163229 - protein, 84 aa, Glycine max
  unsure (1)..(84): unsure at all Xaa locations
  Clone ID: PAT_MRT3847_118414C.1.pep
CFTVFFVFSDTYCNAVLVYLVKYFDASYPHDHCHLRQNKTHSIQSFKYKHLVFVTERKYLAXXXHHXXKQDXXXLGTXXXXLQS

SEQ ID NO: 163230 - protein, 201 aa, Glycine max
  Clone ID: PAT_MRT3847_118415C.1.pep
EIAYEIGGENNFHSVLPYLKKAWIDFCKALYVEAKWYNKGYIPSLEEYLSNAWISSSGPVILLLSYFATMNQAMDIDDFLHTYEDLVYNVSLIIRLCNDLGTTAAEREKGDVASSILCYMNQKDASEEKARKHIQDMIHKAWKKINGHYCSNRVASVEPFLTQAINAARVAHTLYQNGDGFGIQDRDIKKHILSLVVEPLR

SEQ ID NO: 163231 - protein, 219 aa, Glycine max
  Clone ID: PAT_MRT3847_118416C.1.pep
KVPKILTHRLFPQAQYSIWIDGKMELIVDPLLILERYLWRGKHTFAIAQHKHHRSIYEEADSNKRRKRYARPLIDLHMKIYYYEGMKPWSSNKKTNSDVPEGAVIIPHASAINNLFSCLWFNEVHLFTPRDQLSFGYVAYRLGDAFKFFMFLNCEYNSLFVLHPHTREHSSPIEWVKQLDELKKGNLKESRGGLGLFTPYPGDLDSVVLPNVTRTSKAG

SEQ ID NO: 163232 - protein, 415 aa, Glycine max
  Clone ID: PAT_MRT3847_118417C.1.pep
MPDVQTLVNDFLNQLKKRKIEGSQATAKLTAELLRSVISQQRVPHTNQATALINAVRAVGEQLIAANPVELAVGNIVRRVLHIIREEDLSLATAAMDGLGVSAASDDEDDAERDENPVLSAAAVAAAARSTLRPPSLQTLLEDTSDSAAPPHTSSSEGESDGRSRSVEKGSRGRKLKHDVIEAVNELIQDISTCYEQIAEQAVEHIHHNEVILTLGSSKTVWQFLYAAKEKQRSFKVFVAEGAPRYQGHLLAKELAARGLQTTVITDSAVFAMISRVNMVIVGAHAVMANGGVIAPVGLNMAALAAQRHAVPFVVLAGSHKLCPLYPHNPEVLLNELRSPSELLDFGEFSDCMDSASGAGSLHVVNPTFDYVPPKLVSLFITDTGGHNPSYMYRLIADYYSADDLVVKRRPTTGS

SEQ ID NO: 163233 - protein, 243 aa, Glycine max
  Clone ID: PAT_MRT3847_118418C.1.pep
AEGSRNRTAELKKEVEVTMLALEEAEKNLKVALEEAEAAKAAEKSALDQITILTERTTAARASTSESGAVITISKEEFDSLSHKVEESDKLADMKVAAAKAQVEAVKASENEALKRLETTQKEIEDIKTATQEALKKAEMAEAAKRAVESELRRWREREQKKAAEAASRILAETQVSTESSPQHYRIQKQNPPRTTVEVKRFEKEKVSVSKKALLPNISGIFQRKKNQVEGGSPSYLPGENPV

SEQ ID NO: 163234 - protein, 96 aa, Glycine max
  Clone ID: PAT_MRT3847_118419C.1.pep
GVPVYGVQWCDCLLPSLAFAFVLARFGWPRDLLGVRGFFSCGAVVCSAAAASCPGGSHRGSCVGALFSLSGPAPVFTLFFVVWGCFFSALFVAAVL

SEQ ID NO: 163235 - protein, 93 aa, Glycine max
  Clone ID: PAT_MRT3847_11841C.1.pep
SLHYFRYCDITTGGGDTNYPSHPHHPTYNLHAPNLDACHIIAEFPQGSPLASRKYYGQRPSSISEPFFHSRLDYHRSPHFKSLDWNNTCHRFL

SEQ ID NO: 163236 - protein, 210 aa, Glycine max
  Clone ID: PAT_MRT3847_118420C.1.pep
MMVRASVKVGSAKFVVICVGLLGFALVADFLWASTSSTLPTSTKPSAFVVPSNHNKKKYENATASGRFLAAAYADLDAPQLKWQKMAPAPVPRLDGAAIQIRDLLFVFAGYGTIDFVHSHVDVYNFTDNTWGGRFDMPKEMAHSHLGMVTDGRYIYVVTGQYGPQCRGPTAHNFVLDTQTRKWRDLPPLPVPRYAPATQLWRGRLHVMGG

SEQ ID NO: 163237 - protein, 101 aa, Glycine max
  Clone ID: PAT_MRT3847_118421C.1.pep
MVYYDFINNHSNVYRIVHKDLNSPNAINCPSEVTSIALDHLFKATYDKNPLATTSTTLPRTNINDMTVLREKPTIMDIVNTYDACFTESHIRCALRMHTYL

SEQ ID NO: 163238 - protein, 35 aa, Glycine max
  Clone ID: PAT_MRT3847_118422C.1.pep
HACVHATGNLRETGVTETNPTTARKYPKVSLIPGA

SEQ ID NO: 163239 - protein, 86 aa, Glycine max
  unsure (1)..(86): unsure at all Xaa locations
  Clone ID: PAT_MRT3847_118423C.1.pep
AXSXXNRQKPSQKIEKKTSRXXXKTSHXXXMXXXLNSSHGSXCXTLALQXRXHSNTAAXPPXXXXXXLNSXFTXTXXERXQSSRRR

SEQ ID NO: 163240 - protein, 64 aa, Glycine max
  Clone ID: PAT_MRT3847_118424C.1.pep
SEYSEGSQSKSLYIETHERDRTKHVLVVVISMKLKGEREPRHANDNDIGYLRIGELNTNRLSFS

SEQ ID NO: 163241 - protein, 81 aa, Glycine max
  Clone ID: PAT_MRT3847_118425C.1.pep
GEAALPAQILHPQPVPEDDTARRRYLGDIPRQLAPRIRKSATPLTGIPEASHGKLEEKRSQNSERDLLVQKLNEIPLPGDL

SEQ ID NO: 163242 - protein, 75 aa, Glycine max
  unsure (1)..(75): unsure at all Xaa locations
  Clone ID: PAT_MRT3847_118426C.1.pep
XDEXTXEXRAXXXLFGLSVNKQMQAKKTREXXGGWXXXXXLARARFMXPTSLXXDXPTNXXXXEACVWLXXXLKX

SEQ ID NO: 163243 - protein, 107 aa, Glycine max
  unsure (1)..(107): unsure at all Xaa locations
  Clone ID: PAT_MRT3847_118427C.1.pep
WPLLLVGPRASLVAGXYYQCAARACGYGPGVLCVKPAGIPRRLILLLAFQIGLLFRPCPTTRVFNAYLARAAAHATYWGHCESPHLNPYYSYYHIADIYDDHKRQTD

SEQ ID NO: 163244 - protein, 78 aa, Glycine max
  Clone ID: PAT_MRT3847_118428C.1.pep
GSILITERRQQPPTSHSPNGVNLPRSSLQRPARQLAAPSPKWVPFFSLLAREIAAFRTTVALQHAKTVVGLKPVLASR

SEQ ID NO: 163245 - protein, 82 aa, Glycine max
  Clone ID: PAT_MRT3847_118429C.1.pep
LAKLKEKAKPVTKGPHIGPKTLGPNSWTLNLTSPQLHPPPQRLVPSLTLCETFQGRALVEETGKAQTVPSGNSLIPPWMLHI

SEQ ID NO: 163246 - protein, 222 aa, Glycine max
  Clone ID: PAT_MRT3847_11842C.1.pep
NNSVFGFVCVLFINQGHTQNPKFYKSSIMESENGVAMEDEKHVIGETTKENINKEAENSCNAEIQTKNEVSETDVKAEGPKSAASKISKLAKGHVGKGGVASKNNKSATKDKPNLKSTTSYQTHRPNLSKSFSFPAKSAGGEGVKKSTNGTLAKTETKHANGAKAEASIRRSSRLTNSEVNSKEAETNTGNSNQRTSLTSITSLKTSESGIFTVNAVTKSLT

SEQ ID NO: 163247 - protein, 78 aa, Glycine max
  unsure (1)..(78): unsure at all Xaa locations
  Clone ID: PAT_MRT3847_118430C.1.pep
MISLTILLISHLFCIAHTCSASKWXHQQDCCRXQLQGADLTPYDKHIMEQIQGCGDXDDDDDDDNHILRTLRGRINYI

SEQ ID NO: 163248 - protein, 82 aa, Glycine max
  Clone ID: PAT_MRT3847_118431C.1.pep
LPQSCPPLPPPLYKPVIGIVSHPGDGASGRLSNATGASYIAASYVKFVEAAGARVVPLIYTEPPEKLLKVKCFNFQPSLPHS

SEQ ID NO: 163249 - protein, 342 aa, Glycine max
  Clone ID: PAT_MRT3847_118432C.1.pep
MSSDAVWVLFHLAFFSQCLPSAWAHSAILLPGQLARDSPQSCPAPDPNLYYKPVIGIVSHPGDGASGRLSNATGASYIAASYVKFVEAAGARVVPLIYTEPPEKLLKKLELVNGVLFTGGWAKSGLYFETVTKIFKKILEKNDAGDHFPLFATCLGFELITMIISQDNNILEEFSASNQASTLQFVENANIGESVFQRFPPELLGKMSTDCLVMQNHRYGISPGKLLNNPKLSSFFEILTTCTDEDDKVYVSTVRSQNYPVTGFQWHPEKNAFEWGSPRIPHTEDAIQITQYVANFLVSEARKSLNRPVAQELLDNLIYNYSPTYCGKAGKGYDEVYIFAQA

SEQ ID NO: 163250 - protein, 75 aa, Glycine max
  Clone ID: PAT_MRT3847_118433C.1.pep
GGEKKHAPHKTLHQPPLGLFFTRPPLPQANLAPPMSPPPLMFGGPPPFFNYMPPPPMPFPPNAGPITQPPNNKNF

SEQ ID NO: 163251 - protein, 113 aa, Glycine max
  Clone ID: PAT_MRT3847_118434C.1.pep
LHIENFGIKKTLSRKKAVCQVKTCSRDQKRKNKKHSKLRKEAPWACLPFFCFSNTPLTKMGHTKGTYFWLFLLSILYFATFKHWWEKKTHSRERHPFYGLLLGLSLLTPRGGG

SEQ ID NO: 163252 - protein, 131 aa, Glycine max
  unsure (1)..(131): unsure at all Xaa locations
  Clone ID: PAT_MRT3847_118435C.1.pep
LGTMGFGIPSAIGAQLAEPEKTVVCFVGDGGFQMTNQEMALLPEYGLNVKIVLINNGTLGMVKQWQDKFFNKRFSHSVFNDQLDFMKMAEAYGIKGFLIDSPXKLESSIDEAFAYHGPALIEVRISLIEPS

SEQ ID NO: 163253 - protein, 67 aa, Glycine max
  Clone ID: PAT_MRT3847_118436C.1.pep
GGNFFFGFFPTKGFGPFFLGGAWARVKVFGVLFWPLLGFSMITTKVMAPDFVNNWIGRNIGPGSLRS

SEQ ID NO: 163254 - protein, 62 aa, Glycine max
  unsure (1)..(62): unsure at all Xaa locations
  Clone ID: PAT_MRT3847_118437C.1.pep
MAGRYDRNPFDEEEVNPFSNPGSVPAATNSRLPPLKPEPVDYNYGFGATADIXPLDSSMDLK

SEQ ID NO: 163255 - protein, 67 aa, Glycine max
  Clone ID: PAT_MRT3847_118438C.1.pep
SSRPIPMYFNKFVHLPKVRTYRLHYCLQKEVISTQILNRNINIRKLPSHSHFAISSNYYQNNTHPLQ

SEQ ID NO: 163256 - protein, 94 aa, Glycine max
  Clone ID: PAT_MRT3847_118439C.1.pep
QLPPLIVQKANVHYTKLNGNLSLFVRKQIIKHIHPPLKIISHCPRNKVYILFCYRTKIIFDRPFVPTYKEKGLVTPRKASFNFPHYNKPRTYCP

SEQ ID NO: 163257 - protein, 52 aa, Glycine max
  Clone ID: PAT_MRT3847_11843C.1.pep
TREKLKPLFYTLFFKKGHDPPPDLNKKRPSLGNFLAPGVISGQKKKPASNWG

SEQ ID NO: 163258 - protein, 71 aa, Glycine max
  Clone ID: PAT_MRT3847_118440C.1.pep
SRLHTGCQKTTKEAQGDLMLSIIKFSVMLQYDHVLCSATTLVPVECQTLKMIPRPMNTVYGDPYQVVRCTS

SEQ ID NO: 163259 - protein, 465 aa, Glycine max
  Clone ID: PAT_MRT3847_118441C.1.pep
RQATYAVLNHLIEYVENLEKAGILEEKEMLQLHDAVQTDLKKLLRNPPLVKLPKISSIHPMLGALPSSVRESLASCTKEMMKLRGLTLYKEGAKSNGLEPLEPGVVKWESKMIRTKHSFNPTFTHGSTLGIYEVLTGRSYICDVVTDSVVFCIFLEADKIRSCLKADPLTEKFLWEESAIFLSKLLLPQIFEKLGMQDLRTLIADSERSRMTIFIRGETIEIPHHSVALLLEGYVKTQGRQELVTAPAALLPSHGNLSFQNLASSGSKEASFIHQQGSSYLVETTARVILFDIPAPEADAALVRRSSSLLSHAGDHPHRSFRRKHSGLMSWPEHFYKQDHKQRSEGAGRQTNSLSARAMQLSIYGSMVDIPPRSRSLLTNDGRPPHSLSYPTIVSHQGRPLVSVKSEGAATAKKVHEVTRHVTNPPSQSTERRQHHHGDNSSDDSGAEEEDIIVRIDSPSTLSFR

SEQ ID NO: 163260 - protein, 119 aa, Glycine max
  Clone ID: PAT_MRT3847_118442C.1.pep
MENNTIYCDLSPLESVQHYLLEHENDSNTISNVSNHEICLEGVHDSKGLFSCKSEQHVDAREFHTHPVWKHYRGVRRRPWGKFAAEIWVPKSKGGRVWLGTYETEEEAGLAYDRAAFKM

SEQ ID NO: 163261 - protein, 102 aa, Glycine max
  Clone ID: PAT_MRT3847_118443C.1.pep
DQAEDRLQQIPACGHTFHMSCIDLWLATHTTCPLCRFSLLTTAKSSTQASDMQNNEETQAMEFSESTSPRDLETNVFQNVSGEVAISTHCIDVEGQNVQNNQ

SEQ ID NO: 163262 - protein, 74 aa, Glycine max
  Clone ID: PAT_MRT3847_118444C.1.pep
VSFQTSIFDHHHKDCSRSSIGAHILYGNQSPTRSKIALHKIVAPTQYLSGPASPLHGVWVNFRLRHTIALYRRR

SEQ ID NO: 163263 - protein, 130 aa, Glycine max
  unsure (1)..(130): unsure at all Xaa locations
  Clone ID: PAT_MRT3847_118445C.1.pep
EKKDTSDSNSLNKKNVESILTFDSCFWAHVEEAILSCKVLEDVQSSVTEKEEETGKLLEFEKYVYGLLPKYEVSSEXFLEHSSYMTWWNQYKAIKNKETSYNSALADFMSNPDYYNVQYAKGTYNFLPGA

SEQ ID NO: 163264 - protein, 84 aa, Glycine max
  unsure (1)..(84): unsure at all Xaa locations
  Clone ID: PAT_MRT3847_118446C.1.pep
SHSRTHTELENIIGVLADESFSIIMPYCVQRGLIGEIISRFDGVGVYFERCVTVTLDXVLSYKHYADLSAKPFFSGVVDYMISG

SEQ ID NO: 163265 - protein, 57 aa, Glycine max
  Clone ID: PAT_MRT3847_118447C.1.pep
ILWSDVIMICRFIIIHKSSAYRIPPGYIPVVKYARDIAERKPNTDTEMLTTKPKVIL

SEQ ID NO: 163266 - protein, 168 aa, Glycine max
  Clone ID: PAT_MRT3847_118448C.1.pep
AFSDKSRDYTVPDPSLLAAQGPATAWQNPQAAPMYPGSAPAYHTQVPGGQVPAWDPNLQAVRPSYVSAPGTFHVQSGAAPPMPAYAPAAAMPAASSPHAQSSPMAHNANPMGIAQPRVPPNANLQSSGASLSAPGSSPLMQTSQAAQGLVQPNARPGGASPPGQHYYG

SEQ ID NO: 163267 - protein, 76 aa, Glycine max
  Clone ID: PAT_MRT3847_118449C.1.pep
PPFQTLTSDPLLVRIVSSQVYIVLYTHCFPAVTANLLTNTHTTCKSLLSPFSVHAALCSCRIHACSLQVSDLFIFL

SEQ ID NO: 163268 - protein, 449 aa, Glycine max
  Clone ID: PAT_MRT3847_11844C.1.pep
MESENGVAMEDEKHVIGETTKENINKEAENSCNSEIQTKNEVSEAVVKVEGPKSAASKISKLAKEHGGKGGVASKNNKSATKDKPNLKSTTSSQTHRPNLSKSLSLPAKSAGGDGMKKSTNGTLAKPETKHANGAKAEASIRRLSRLTNSEVNSKEAKTNTGNSNQRTSLASMISLKTSESGISTPVNAVTKSLTSEESLRVDQISIPAKTEKPNKEEDDAHSTTSSHTPRRRSSGSGFSFRLEERAEKRKEFFSKLEEKIQEKEAEKTNQQEKSKENQEAEIKQLRKTMTFKATPMPSFYKEPPPKVELKKIPITRPKSPKLGRHKGSAVNKSADKSCSSPHGKQQQNDSTKAKAKGSNKEVIPKKPIRKSQAKLQSQESAIRKTEKDSVKPTKVDQDAKAGTGNNEECHDPSVNNSEYQNDMEQESKNDHDQNGALVLNSSPPEIVS

SEQ ID NO: 163269 - protein, 136 aa, Glycine max
  unsure (1)..(136): unsure at all Xaa locations
  Clone ID: PAT_MRT3847_118450C.1.pep
SYIQISGLFYDGRYKFWSKHEKYFALTEEEKMDVIRNRGIPADVLAKRAHEFEKTCCLXSYKDQIPAVDKLYSTKDFKFAKIMNLKQSGGVDLKLFYXMGKLYEVKHISVSNISAGENHVIQIPLXMAQEEILFFI

SEQ ID NO: 163270 - protein, 86 aa, Glycine max
  Clone ID: PAT_MRT3847_118451C.1.pep
MVYPTITAPFSKEPLPLTLLWYGSFTPIQRSTLLEFIISLSATAGAPLTSVASWRMTTDKYKVGSTTLIQRKQILEQTYSLRNYLN

SEQ ID NO: 163271 - protein, 53 aa, Glycine max
  Clone ID: PAT_MRT3847_118452C.1.pep
IKKGKVPLFHPGGSLASKKKKCGGLFPLGKKNMGGFQALIGPQVVKFNLGPCG

SEQ ID NO: 163272 - protein, 83 aa, Glycine max
  Clone ID: PAT_MRT3847_118453C.1.pep
LRNMCFNIWFSLSRTLWKSPFFYVGFRLNFVFLLRDTQSFLMWVIIAIYESFDRSCGKCRTNLNLRSFGSKCITNVSQHPPCL

SEQ ID NO: 163273 - protein, 65 aa, Glycine max
  unsure (1)..(65): unsure at all Xaa locations
  Clone ID: PAT_MRT3847_118454C.1.pep
FFFRGGXKTXQGDGQGTKSIAKDKIENYANKKTKNMLAKQNLEGETPIYITPKNGQAKSVKKKLN

SEQ ID NO: 163274 - protein, 128 aa, Glycine max
  Clone ID: PAT_MRT3847_118455C.1.pep
EILNDDIWGPYVEEVINGGELVLNFDDFMDHCWQEASGVWTISDEQRESNINIVVGNEKVDDDMCTNVIMSSGDHDRLHSSSSIASDLDQNLLTWLWEDEDWEKDLQSLGEIHSDKLKAMVDWFLSSS

SEQ ID NO: 163275 - protein, 89 aa, Glycine max
  unsure (1)..(89): unsure at all Xaa locations
  Clone ID: PAT_MRT3847_118456C.1.pep
PLWKGIRQHRGKVLAAFLKAIGFIIPLMEAPYXASYYTXEVMLILIREFQSPDEEMKKIVLKVVKQCVSTEGVEAEYIRXDILPEFFRN

SEQ ID NO: 163276 - protein, 217 aa, Glycine max
  Clone ID: PAT_MRT3847_118457C.1.pep
MPVIAAKRTLRSHPSSPPRKSPRRCTAATPNSTPTMNRFGADENRADPEAAKPKWNPKDGEQLKRVKLALHLSTAPSSVVCREEEQNVVLEFCKGCVEHQKAGSLYICGCPGTGKSLSMEKVKDKLLNWAKEAGLPQPDVLSVNCTTFTNTSDIFTKILGLNQTQGKKVSATPLQQLHNMYSQKSSNKNMTLIVADELDYLITKDRGVLHDLFMLTT

SEQ ID NO: 163277 - protein, 35 aa, Glycine max
  Clone ID: PAT_MRT3847_118458C.1.pep
ATGRKINASNFSVMHDINLDRQAIFIKMFYPSMQF

SEQ ID NO: 163278 - protein, 68 aa, Glycine max
  Clone ID: PAT_MRT3847_118459C.1.pep
IESEFSNFELFTYILSSFSSLVYFYHLTVYIYKTFLNNFSKKLYRFFLFETTYLFNLTLFSFFFQTSM

SEQ ID NO: 163279 - protein, 107 aa, Glycine max
  unsure (1)..(107): unsure at all Xaa locations
  Clone ID: PAT_MRT3847_11845C.1.pep
GEXTTKANXGXEKXXXDTXRNXXXXXXXXXXXXDNXKGXXNXDQXXXXXXQGXHGHXTKRXEEKXXXDQXXXXGXAXDKXPEXXPXSQGPGPKXXAQPTXXRKNGTR

SEQ ID NO: 163280 - protein, 103 aa, Glycine max
  Clone ID: PAT_MRT3847_118460C.1.pep
WYSLLRLNVKSKIRKSWRESSSCIALLCFWKKGRPGGHRLMCGSSSCLTGRSSSTPWAKSMRRWFLSSPFAMIFLPFIMKEFLKPGVYIYFLENTHFSGETLT

SEQ ID NO: 163281 - protein, 87 aa, Glycine max
  Clone ID: PAT_MRT3847_118461C.1.pep
VWVNLSYCKICLNNFFFTKGQTNVWGIMNTNQCFLPNPFFFLPKRKRRDWNKTLNKLKLYMPLHFLLHENLQNFSPVPQGGGNILPF

SEQ ID NO: 163282 - protein, 36 aa, Glycine max
  Clone ID: PAT_MRT3847_118462C.1.pep
NDINVTCYILHICLKVLCFTFNNKIYLMNVLYGYHL

SEQ ID NO: 163283 - protein, 154 aa, Glycine max
  unsure (1)..(154): unsure at all Xaa locations
  Clone ID: PAT_MRT3847_118463C.1.pep
HSPPSPGTPSPFPSLTTPVTPSPXHSPPSLVTPTTPVTPSPSHSPPSPATPSPFPSPTTPVTPSPSHSPPSPGTPSPFPSPTTPVTPSPPSPSTPSPFPSPTTPVTPSPVHSPPSPVYLPPPHSSPTPPAHNYGSPPPHHSPAQPVYPYLSPPP

SEQ ID NO: 163284 - protein, 41 aa, Glycine max
  unsure (1)..(41): unsure at all Xaa locations
  Clone ID: PAT_MRT3847_118464C.1.pep
RXKXXVXXXXAXAXTFNRISIAYXGMADXVTNXRXHGXMSX

SEQ ID NO: 163285 - protein, 56 aa, Glycine max
  Clone ID: PAT_MRT3847_118465C.1.pep
IIATYVDRKHFSIVKGWASLFISSSCSDQKCVFNTLAIAPQTKCGDESLVVWAWLY

SEQ ID NO: 163286 - protein, 77 aa, Glycine max
  Clone ID: PAT_MRT3847_118466C.1.pep
FWIENPHLPSPMIGWTIFYPLIILLVFHFLYFLASSVHSPSFNSFHPSSIFLFTFVTHAFSHLFHRFLFLIFCDFIP

SEQ ID NO: 163287 - protein, 468 aa, Glycine max
  Clone ID: PAT_MRT3847_118467C.1.pep
MPLLDRGDVWKSKARSLQLQLRDRFRVAVDRHWRRRHNHHTFIPSADGYFSSTIQRWLSRFRDFRRDSLPSSTSFYRKRVIKDFSSEEDSTLVRMMQAVAVPVLGNVCHVFMNGLNSVQVYGLEKLHSALLQRPKGKPLLTVSNHVASMDDPLVIASLLPPSVLLDARNLRWTLCATDRCFKNPVTSAFFRSVKVLPVSRGDGIYQEGMDLALSKLNHGGWVHIFPEGSRSRDGGKTMGSSKRGVGRLVLDGDSSCEMTTVGHTGMQEIMPVGANFPRIGKMVTVLIGDPINFDDIIEFDKDKGSNVPRRRLYDAVASRIGDRLHEMKVRVDTIAIDQEMQLQDKSSHSTERTSKILQQVDWELFGMDSFMSVEDDSKQRQETVALSNVSVSQHHQQSHSDQSWRAGFSYRMRGYIDQMELVSFAARGIFLNNDTKNSARPSREMGPLKAWKQFLEANLLRQWNYVHY

SEQ ID NO: 163288 - protein, 104 aa, Glycine max
  Clone ID: PAT_MRT3847_118468C.1.pep
FGMDSFMSVEDDSKQRQETVLLRNVSVSQHHQKSHSDQSWRAGFSYRMRDYIDQMELVSFAARGIFMNNETKNSAGRSREMGPLKAWKQFLEANLLRQWNYVHY

SEQ ID NO: 163289 - protein, 83 aa, Glycine max
  Clone ID: PAT_MRT3847_118469C.1.pep
IIFYKKKFIGCLGNVIKDSGSKGFNPGLIVLLVVGGLLLTFLIGNYVLYSYAQKTLPPRKKKPVSKKKMKKERLKQGVSAPGE

SEQ ID NO: 163290 - protein, 117 aa, Glycine max
  Clone ID: PAT_MRT3847_11846C.1.pep
PFTKGEQCPLRTGNLYFPSLIIQTSFQSKPEIDLYVAFNTNDSMAYMGLPIKRMGGNRNRNLIIFIILPDYESNKPTLKSFLICAYLLNFSLNKFKANHVQSQAGFFKDVTTGFTCK

SEQ ID NO: 163291 - protein, 89 aa, Glycine max
  Clone ID: PAT_MRT3847_118470C.1.pep
MADDFDFADKVPPSFDRVGNVIKDSGSKAFNPGLIVLLVVGGLLLTFLIGNYVLYTYAQKTLPPRKKKPVSKKKMKKERLKQGVSAPGE

SEQ ID NO: 163292 - protein, 68 aa, Glycine max
  Clone ID: PAT_MRT3847_118471C.1.pep
PKVVKSRPHEKSQGFENPTTLFCTQYRTLGQLIAFYSPGLQNRPWVHSWAFLKKRDSLGALAKHPFLG

SEQ ID NO: 163293 - protein, 141 aa, Glycine max
  Clone ID: PAT_MRT3847_118472C.1.pep
NKCIFIVFSDSIFAKFPLIWPLLSAFFCCYTQGNVIKDSGSKAFNPGLIVLLVDGGLLLTFLIGNYVLYTYAQKTLPPRKKKPVSKKKMKKERLKQGVSAPGEYSLYSVFVLWVKLYYLDELSRSEVLCITLIIIVLYTYY

SEQ ID NO: 163294 - protein, 85 aa, Glycine max
  Clone ID: PAT_MRT3847_118473C.1.pep
NLLAPSGYHPPTLLTDTRGIATKIKLYSKFLLACADRVIKTEEDYQKMFKGEKETNKEARYFDMFTTIKVFSTEKNDASIFICYL

SEQ ID NO: 163295 - protein, 70 aa, Glycine max
  Clone ID: PAT_MRT3847_118474C.1.pep
WPVPLGPFGGSAPWGAGGFKCPGGFFFLGGFFLILVAKFRLVWVPYGARWFFHKWVLFSVCPPLSYTKCV

SEQ ID NO: 163296 - protein, 90 aa, Glycine max
  Clone ID: PAT_MRT3847_118475C.1.pep
HEYVNLLLLARAPSIKGKKITIWAGHRLRESFSFPLLVYLLNTLLFDIGLRVRFKLLLVLSQISVHFQVIAGEFLGLCSFFSLWYRTFLL

SEQ ID NO: 163297 - protein, 31 aa, Glycine max
  Clone ID: PAT_MRT3847_118476C.1.pep
GKASTLERVVQEIYRLWGSCLKCPRTSLQSY

SEQ ID NO: 163298 - protein, 78 aa, Glycine max
  Clone ID: PAT_MRT3847_118477C.1.pep
LIIKAKKFELDKKNNHTFTPFFKQIIHLHLISRYSHTTISLIQKVEKKEFIPFHFIFISYNFISELHKKMFLIHVFIS

SEQ ID NO: 163299 - protein, 66 aa, Glycine max
  Clone ID: PAT_MRT3847_118478C.1.pep
VPRINCVMNKVHLTLFKLTLILKYKNKINCILSHSMSHRKGRVREEIKGSINLHRNHLHNPVWCHL

SEQ ID NO: 163300 - protein, 91 aa, Glycine max
  unsure (1)..(91): unsure at all Xaa locations
  Clone ID: PAT_MRT3847_118479C.1.pep
ADATGRATNNTGGRTYQQATYDVNTGKPAYDVWDDMLGTLYDLPGEGETYAFDMALTTEMVLTAARXYEFGLRRAPTLLLIXARDNTAIGK

SEQ ID NO: 163301 - protein, 56 aa, Glycine max
  Clone ID: PAT_MRT3847_11847C.1.pep
ASTWIPIIPPPMRSCKDNIFRIQNLSYHFGYDHPLAIGRYLILTMHLFFLFSKFGS

SEQ ID NO: 163302 - protein, 81 aa, Glycine max
  Clone ID: PAT_MRT3847_118480C.1.pep
ISQVPIRKTCIIFIVGHVNHQSNVVAPHPLHVYYNQNIFVFVPTNHRNMGKENLLRMCVRILLWFARHLKKKKKGRRPASE

SEQ ID NO: 163303 - protein, 60 aa, Glycine max
  Clone ID: PAT_MRT3847_118481C.1.pep
HTRLQLRYYDIRAHPPRLALPMNWVGVPVSLFHSEDLRPEQTLDRSSTFFYCTFTASFIA

SEQ ID NO: 163304 - protein, 92 aa, Glycine max
  Clone ID: PAT_MRT3847_118482C.1.pep
NLPSLPDSSFCSIALGGFLYFRFVLLDVFIKAASPIDYSSVDYSTAGIYTLLWILFAPGPPPKTEGFFFFLWGFQITSYTLLRLLCLFIVFS

SEQ ID NO: 163305 - protein, 99 aa, Glycine max
  Clone ID: PAT_MRT3847_118483C.1.pep
TFNGSPKTPFFFTGPNPPKGGWEIWGNSGSPQDRGRVGFFHLGTGWVGTPPTFFSWPRVSGRGKKPNRGGALFFKTGVKKKPRGLFLLGKPRAYVPLGP

SEQ ID NO: 163306 - protein, 108 aa, Glycine max
  unsure (1)..(108): unsure at all Xaa locations
  Clone ID: PAT_MRT3847_118484C.1.pep
QEGRPREQERTLVPXRXGRRREGPNRAEKNAQPPGXHGHKEEEAEKGRKRARXXDXXRRRNSRENRKSGHERTRKRSREQRHXHEKKSXXQRNKQEENKKRPTQKRKK

SEQ ID NO: 163307 - protein, 127 aa, Glycine max
  unsure (1)..(127): unsure at all Xaa locations
  Clone ID: PAT_MRT3847_118485C.1.pep
PPQTGFFPFWVPPFGPPFRFFPGRGEKGFPPFPPFSGQKNPPRSPIARPPFPRGLPLXFLLGPPFFPALNRSFRPPPLMVFRPPIGPPGPSPFCFRALFFGAPGLALYFSRGSVLSHFSPILISPPL

SEQ ID NO: 163308 - protein, 64 aa, Glycine max
  Clone ID: PAT_MRT3847_118486C.1.pep
TVKVSENMKISSFLQFYSIFNVGATYVKFIAIFFYILLILLHEFNVYVLTVTPSSNNKLSFKSF

SEQ ID NO: 163309 - protein, 82 aa, Glycine max
  Clone ID: PAT_MRT3847_118487C.1.pep
IVPPILLHCLWLLQISLILNLYDYRILYIDVTKKKKNSGARPIPNGNTRYAAFTLTETATTIPQILPLLNEAYTLHIHIAMT

SEQ ID NO: 163310 - protein, 105 aa, Glycine max
  unsure (1)..(105): unsure at all Xaa locations
  Clone ID: PAT_MRT3847_118488C.1.pep
RRAGKNATRRNMPKAAPPTRRQTAGDHATDSPKTTPPDHKRTDTPSKAAGNTAEDTTNHEATPHKPAQPGEIQEKVATNTPQEDTXTARPTQGRTATTTAGRREP

SEQ ID NO: 163311 - protein, 53 aa, Glycine max
  Clone ID: PAT_MRT3847_118489C.1.pep
KKMELREGVLDSQMNSLRMKVLMIQRVNGRLNNEVLRIQVSIIVKALFGWGML

SEQ ID NO: 163312 - protein, 91 aa, Glycine max
  unsure (1)..(91): unsure at all Xaa locations
  Clone ID: PAT_MRT3847_11848C.1.pep
PRASRPPHAHTVCEIVKARWGDFCXHLFLLIFCFLTNIIVTAMLLLGGSAVVNALTGVNLYAASFLIPLGVIVYTLAGGLKATFLAXYIHS

SEQ ID NO: 163313 - protein, 61 aa, Glycine max
  Clone ID: PAT_MRT3847_118490C.1.pep
SFSFLAKDPELLSYIPLLFYESAMVLQFFSDDAPHWKTPFFKAPNCKGKNTIVYIEDFPVK

SEQ ID NO: 163314 - protein, 35 aa, Glycine max
  unsure (1)..(35): unsure at all Xaa locations
  Clone ID: PAT_MRT3847_118491C.1.pep
XRLFLXLGFTYTTYITVKIKSEFLDYLDXIFRFQN

SEQ ID NO: 163315 - protein, 46 aa, Glycine max
  Clone ID: PAT_MRT3847_118492C.1.pep
HAYGDSKPLGLAATSLILRETKEYLNNVSRIMITHCSRRIKSRTVL

SEQ ID NO: 163316 - protein, 68 aa, Glycine max
  unsure (1)..(68): unsure at all Xaa locations
  Clone ID: PAT_MRT3847_118493C.1.pep
THATGACGQGGAKGXAREPGQPGXHPKKAKSXASDAXNEXXQRKQRSGGTGDIEGTATXTTKDPSKAR

SEQ ID NO: 163317 - protein, 90 aa, Glycine max
  Clone ID: PAT_MRT3847_118494C.1.pep
MLRSEDYHAHISKVHRTQSVLTDVPRYPNAHLAFSNQHSHHNTLSNERVEYDETTPETEGGEVVDVEREQCIAKKNKGGFELHKWKTYRP

SEQ ID NO: 163318 - protein, 147 aa, Glycine max
  Clone ID: PAT_MRT3847_118495C.1.pep
MENNSEGFLKLIFSWSLGDILNNDLYKDKVRQIPTAFWSVSHYLKSFIFPLIEETRTDLCSSMKMLSEAPACEITDINLSEDYSPPHDLLYQIEMKTIVASDKKGDVYEPEVGHLIALTDKRPTCIDDLNKHGNSYLIALLGRLERK

SEQ ID NO: 163319 - protein, 34 aa, Glycine max
  Clone ID: PAT_MRT3847_118496C.1.pep
LSQYPVSLFQMCALYKASSVYMGSLTWIDQFRMT

SEQ ID NO: 163320 - protein, 60 aa, Glycine max
  unsure (1)..(60): unsure at all Xaa locations
  Clone ID: PAT_MRT3847_118497C.1.pep
ALIXGGVFLNICPFPTPKKKLALPPNQRLIPKNINHQHGESKTWLGYKFLNWEPVSPEMT

SEQ ID NO: 163321 - protein, 69 aa, Glycine max
  Clone ID: PAT_MRT3847_118498C.1.pep
LLSSAYKSVPIQNLRFTTISRFLRSLNNTTNSSYTDYNKEKNCSIVNQLHFKWSPIGFMMERKELHDIS

SEQ ID NO: 163322 - protein, 62 aa, Glycine max
  Clone ID: PAT_MRT3847_118499C.1.pep
ETVGRGFHTGVLNTDTRMFLYTCAYILYTQINMENLIYVYTASMVATVQQRLSNRTQLIKPF

SEQ ID NO: 163323 - protein, 698 aa, Glycine max
  unsure (1)..(698): unsure at all Xaa locations
  Clone ID: PAT_MRT3847_11849C.1.pep
TRPVPRHAIIKKFAGEEIXCLDELISVLSKLSRGARVPLEYISYMDRHRRKSVLVTVDRHEWYAPPQIYTRDDSTGLWNAKPAFKLDSPFLSLGAKDVDNLSRQSVSLTGEHACGGHVFGDNNQEFVDGVTSMETNCEDPSECVSHHNASDGVVKKRKVDEDLSADGNLVADFSLNDTRETKLEKSSIIQDDMLMDYQGATAATANASVAERVIEPTLVMFEVHVPPSCMLDGVHSQHFFGTGVIIYHSQDMGLVAVDKNTVAISASDVMLSFAAFPVEIPGEVVFLHPVHNYALISYDPSALGPVGGSVVRAAELLPEPALRRGDSVYLVGLSRSLQATSRKSVVTNPCAALNIGSADSPRYRATNMEVIELDTDFGSTFSGVLTDEQGRVQAIWGSFSTQLKFGCSTSEDHQFVRGIPIYAISQVLDKIISGANGSPLLINGVERPMPLVRILEVELYPTLLSKARSFGLSDDWIQALVKKDPVRRQVLRVKGCLAGSKAENLLEQGDMVLAINKEPVTCFRDIENACQALDKSDANDGKLHLTIFRQGQEVELFVGTDVRDGNGTARAINWCGCIVQDPHPAVRALGFLPEEGHGVYVARWCHGSPVHRYGLYALQWIVEINGKPTPNIDSFVKVTKELEHGEFVRVRTIHLNGKPRVLTLKQDLHYWPTWELRFNPNSAMWHRNIIKGLNCSSV

SEQ ID NO: 163324 - protein, 153 aa, Glycine max
  unsure (1)..(153): unsure at all Xaa locations
  Clone ID: PAT_MRT3847_1184C.1.pep
GKVRFPGLGAKDSLRLETGLWLYGNDMEQPLPPIEAGLPWALGKRRRPQGGFLGADVIFKQLEKGPKIRGGGFFFFGPPPKSPSEIQNEGGPPLGEIPSGGFSPCLQKNIAMGYVKFGLPKAGPKVKIFFXGKPNEGVLSKMPFVPPKYYKPS

SEQ ID NO: 163325 - protein, 102 aa, Glycine max
  Clone ID: PAT_MRT3847_118500C.1.pep
IIENLKEKLNAGVHIRSSASSQMNYSQQKRINDNTCSESKFQKKEGKMQVQSNKNGKEWECHRSDNCSLFFKVDTEKFGKPDAWFNSSSHSTAFLFIFFGWI

SEQ ID NO: 163326 - protein, 47 aa, Glycine max
  Clone ID: PAT_MRT3847_118501C.1.pep
KLGLWLEDQLSGAFVLTQSTTIRSKHLSVYAASAYPIEKGFHSQIAF

SEQ ID NO: 163327 - protein, 115 aa, Glycine max
  Clone ID: PAT_MRT3847_118502C.1.pep
TSTSTSSTEAPASTSAPNSTPDDPTPSTSDSKDASPVVSTSESAPQTSTSQNSQNSKASTNEIESCDGDSITRTGTGNDAVKHSSNADEQGQFVSDASTMMASSVLALSCLLALL

SEQ ID NO: 163328 - protein, 40 aa, Glycine max
  Clone ID: PAT_MRT3847_118503C.1.pep
AATLVIYAASNSICNAYIIDDYHQRSKANKELNDNKRLCT

SEQ ID NO: 163329 - protein, 42 aa, Glycine max
  Clone ID: PAT_MRT3847_118504C.1.pep
ETGVKLIMGGGGYKVGGTPPIIFLMVRRLGLSLWFFLLSYWC

SEQ ID NO: 163330 - protein, 81 aa, Glycine max
  unsure (1)..(81): unsure at all Xaa locations
  Clone ID: PAT_MRT3847_118505C.1.pep
MAKLVLSLRFLLFSGCCFAPSFREQAQHNECQIQXLNALKPDNSTESEGGFIETWNPNNKPCQCAGVALSRCTLNRNALRR

SEQ ID NO: 163331 - protein, 57 aa, Glycine max
  Clone ID: PAT_MRT3847_118506C.1.pep
CQGSFTILVIPFMFEGTKMTMSIRMSNILRNTEGRIIVYILMRTAESIIVHTQLVNT

SEQ ID NO: 163332 - protein, 86 aa, Glycine max
  Clone ID: PAT_MRT3847_118507C.1.pep
GFLSMAFSMLMVQLLVGFFLSSLSFIAFSSLALLLVPLCRKWPFFSLFGSPFFLAVVFFFCVVPVRRGHFWLVIASALYLCYTQIV

SEQ ID NO: 163333 - protein, 588 aa, Glycine max
  unsure (1)..(588): unsure at all Xaa locations
  Clone ID: PAT_MRT3847_118508C.1.pep
NNFSGSGFPSTYXNFSSLVKLSLRNCSLQGTIPDFSSIANLTYLDLSWNQFTGHIPSELADNMTTIDLSNNNHLDGSIPRSFIYPHLQKLSLENNLLSGSIPASIWENVALNTKDKLTINLQNNSLLEVLGNLNPPANVTLRLSGNPICNNSNIRSIGQYCGHVGGEDEDEVDQNPTNSTTACPVVLDCQADNFYELHVPSFPIPCYCAAPLTIEYRLKSPSFSYFLPYISGFIAYITESLNLDNYQLSINSWEDGHRITMYLKLFPSYNDPGQLFNASEVYRIKTIFTSWLFPPNHFFGPYELLNFTLIGPYANAKDSERRSSTSAVTLAAALIAAAALLALSAIIISLISTRNGKFQHLISRKSPNVSIKIDSVKEFTFRELALATNNFSSSTKVGQGGYGNVYKGILSGETLVAIKRAAEGSLQGKKEFLTEIELLSRLHHRNLVSLIGYCNEEQEQMLVYEFMPNGTLRDWISGKSEKAKERQNFGMGLKIAMGAAKGILYLHTDADPPIFHRDIKAGNILLDSKFTAKVADFGLSRLASFEEGSNNTKYMSTVVRGTPVRLSENFGIMISISIFKTGVILRNL

SEQ ID NO: 163334 - protein, 127 aa, Glycine max
  Clone ID: PAT_MRT3847_118509C.1.pep
MIRSFVEKIEKGLSLIVPKKPELSYFNENQVETTTNVVPDDVSKGYFAVVAIKDGEIKRFVVELDYLANPAFLGLLDQAGEEYGFKQQGTLAVPCRPQELQKILDGWRVIPDNIKGAGRDIYFPKFL

SEQ ID NO: 163335 - protein, 310 aa, Glycine max
  Clone ID: PAT_MRT3847_11850C.1.pep
NPLLQLKFGCSTSEDHQFVRGIPIYAISQVLDKIISGANGSPLLINGVKRPMPLVRILEVELYPTLLSKARSFGLSDDWIQALVKKDPVRRQVLRVKGCLAGSKAENLLEQGDMVLAINKEPVTCFRDIENACQALDKSDANDGKLHLTIFRQGQEVELFVGTDVRDGNGTARAINWCGCIVQDPHPAVRALGFLPEEGHGVYVARWCHGSPVHRYGLYALQWIVEINGKPTPNIDSFVNVTKVWHLVKLFIELEHGEFVRVKTIHLNGKPRVLTLKQDLHYWPTWELRFDPNSAMWHRNIIKGLNCSTV

SEQ ID NO: 163336 - protein, 284 aa, Glycine max
  unsure (1)..(284): unsure at all Xaa locations
  Clone ID: PAT_MRT3847_118510C.1.pep
EGLETWILEVRGAGLSIQGSNSKDIEQSANAMSEKMKAASESAIATNGAVASNKELNNVSFCAVSEPEISAPNGVETENVAIQGDLTRLGTVWDESKLVARLTETLMFLSERVSGFLSESQSRVMFAKFLDQISKLLVDSPLYEQYNEVREKLSTLFETKQNAGITSQITDLSQKLVNIIEEGQLSVSPQLFDLQARFTSTIEDFQKQLDLMVKYDWDFDHYMEEDVPAAIEYIMKQSMPKDGKLLAIGHSMGGILLYSMLSRFGFEXRSNLAAVVTLASSLDY

SEQ ID NO: 163337 - protein, 241 aa, Glycine max
  unsure (1)..(241): unsure at all Xaa locations
  Clone ID: PAT_MRT3847_118511C.1.pep
MNLYEKSPPNSFTTRTPPPPPTPPPPPPPPPPPPTPHPPPPPXPPHPPHSHHPDPDSPSPTAIPDPPIPKPHPPPPPXPPPLPPPPPPPPPPPPPPPPPPPPPPPPPPPPPPPPPPPPPPPPPPPPPPPPPPPPPPPPPPPPPPPPPPPPPPPPPPPPPPPPPPPPPPPPPPPPPPPPPPPPPPPPPPPPPPPPPPPPPPPPPPPPPPPPPPPPPPPPPPPPPPPPPPPPPPPPPPPPPPP

SEQ ID NO: 163338 - protein, 58 aa, Glycine max
  unsure (1)..(58): unsure at all Xaa locations
  Clone ID: PAT_MRT3847_118512C.1.pep
XRNSARXXGHXXXXSTSILXLXXXXXXTXXQGSLAXSFGQXGXQMTSPLIMKHXQXQR

SEQ ID NO: 163339 - protein, 61 aa, Glycine max
  Clone ID: PAT_MRT3847_118513C.1.pep
KFLYASTCLFGGPSFCYKSVTIYWRVGPPTSTHVGPLLWPSFLWRKPLFVAQKIQSLEREI

SEQ ID NO: 163340 - protein, 137 aa, Glycine max
  Clone ID: PAT_MRT3847_118514C.1.pep
MVSMTEGNIDDSLIGGNASAEGPEGEGTESTVITGVDIVMNHHLQETSFTKEAYKKYIKDYMKSIKGKLEEQRPERVKPFMTGAAEQIKHILANFKNYQFFIGENMNPNGMVALLDYRDDGVTPYMIFIKDGLQMGK

SEQ ID NO: 163341 - protein, 62 aa, Glycine max
  Clone ID: PAT_MRT3847_118515C.1.pep
VWSQAREFLGHWGLSLYLVQRHSIHRPYVIVAVMQHDGHLHTIVNVNRLCPWSFHKHTMNKR

SEQ ID NO: 163342 - protein, 47 aa, Glycine max
  unsure (1)..(47): unsure at all Xaa locations
  Clone ID: PAT_MRT3847_118516C.1.pep
GPLKGMXWLNXFXSSTSXSASFKPSSAIVVGSSPXNGLRSEDDDVLR

SEQ ID NO: 163343 - protein, 52 aa, Glycine max
  Clone ID: PAT_MRT3847_118517C.1.pep
AVDCESDDIVFATQNGCADHLLPPRSLTNHSSTSTHLTLFTTTVMMTLYLLH

SEQ ID NO: 163344 - protein, 268 aa, Glycine max
  Clone ID: PAT_MRT3847_118518C.1.pep
MKKSKTIGSGLNPIWNEHFEFVVEDVSTQHVTVKVYDSEGLQSSELIGCAQLQLSELQPGKVKDVWLKLVKDLEIQRDTKNRGQVHLELLYCPFGMENSFTNPFAPNYSMTSLEKVLKNANGVESNGNENAVTQKKKEVIIRGVLSVTVISAEDLPATDFMGKSDPFVVLTLKKAETKNKTRVVNDSLNPVWNQTFDFVVEDGLHDMLIVEVWDHDTFGKDYMGRCILTLTRVILEGEYKERFVLDGAKSGFLNLHLKWMPQPIFRDS

SEQ ID NO: 163345 - protein, 131 aa, Glycine max
  unsure (1)..(131): unsure at all Xaa locations
  Clone ID: PAT_MRT3847_118519C.1.pep
RTVLSRRGGDCDSLETLCITNHSLXRQMQIKYNLWALTCHLMLNAESDPEAELCVVLKEHVIIGVLILPAPHNDSKSLYXYISDVATDNEFDTMLYTDVIPPNYPGVTLHDISAIKNVHDTLKESGMTCFT

SEQ ID NO: 163346 - protein, 1115 aa, Glycine max
  unsure (1)..(1115): unsure at all Xaa locations
  Clone ID: PAT_MRT3847_11851C.1.pep
MGDPAESFGSEGLDSAAAVKTDDLCMEIDPPYQENVATAEDWRKALNRVVPAVVVLRTTATRSFDTESAAASYATGFIVDKRRGIILTNRHVVKPGPVVAEAMFLNREEVPVHPIYRDPVHDFGFFRYDPGAIQFLNYEEIPLAPEAACVGLEIRVVGNDSGEKVSILAGTLARLDRDAPHYKKDGYNDFNTFYMQAASGTKGGSSGSPVIDWQGRAVALNAGRXSSSASAFFLPLERVVRALRFLQKGSETYVDKWKAVSIPRGTLQMTFLHKGFDETRRLGLRSETEQIVRHASPAGETGMLVVDSVVPGGPGYKHLEPGDVVVRVNGEVITQFLKLETLLDDSVNKNIELQIERGGTSNSLTLLVQDLHSITPDXSLEVNGAVRHSLEYNWDIYFXAILALSACPIENPGEVEFLLPVHKXALILLDNXLSWLDEGITVLSSRRNGAGVPLGYISYIDRNLRKKWIDILKGHGSYXTFSGLNIGNAVSPRYRVTNMEVIELDTDFGIRFLTRLYQVQMGHCGGHVFGDNNQEFVDGVTSMETNCEDPSECVSHHNASDGVVKKRKVEEDLSADGNLVADFSLNDTRETKLEKSSIIQDDMLMDYQGATAATANASVDESLIEPTLVILGAMVGVATVHVPPSCMLDGVHSQHFFGTGVIIYHSQDMGLVAVDKNTVAISASDVMLSFAAFPVEIPGEVVFLHPVHNYALISYDPSALGPVGGSVVRAAELLPEPALRRGDSVYLVGLSRSLQATSRKSVVTNPCAALNIGSADSPRYRATNMEVIELDTDFGSTFSGVLTDEQGRVQAIWGSFSTQLKFGCSTSEDHQFVRGIPIYAISQVLDKIISGANGSPLLINGVKRPMPLVRILEVELYPTLLSKARSFGLSDDWIQALVKKDPVRRQVLRVKGCLAGSKAENLLEQGDMVLAINKEPVTCFRDIENACQALDKSDANDGKLHLTIFRQGQEVELFVGTDVRDGNGTARAINWCGCIVQDPHPAVRALGFLPEEGHGVYVARWCHGSPVHRYGLYALQWIVEINGKPTPNIDSFVKVTKELEHGEFVRVRTIHLNGKPRVLTLKQDLHYWPTWELRFNPNSAMWHRNIIKGLNCSSV

SEQ ID NO: 163347 - protein, 214 aa, Glycine max
  Clone ID: PAT_MRT3847_118520C.1.pep
ACPHVTGAAAFIKSVHKKWSSSMIKSALMTTATNYNNMRKPLTNSSNSIAGPHEMGVGEINPLRALNPGLVFETDVEDYLRFLCYFGYSQKIIRSISETNVNCPKNSSEGLISNVNYPSISISTLKKQQKAKVITRKVTNVGSLNATYTAKVLAPEGLVVKVIPNKLVFSEGVQRMTYKVSFYGKEARSGYNFGSLTWLDGHHYVHTVFAVKVE

SEQ ID NO: 163348 - protein, 116 aa, Glycine max
  unsure (1)..(116): unsure at all Xaa locations
  Clone ID: PAT_MRT3847_118521C.1.pep
PNATVEDMPHSARDLFCWDSEKTFPNNSCAQLLSCKVYTGTGQYYPEWSPVNCRAHRQPDYITVGNHGKQQDVSIGYDACTIPNDXGSLVVANVGNHKQMAGLHVARSKGRMGYAL

SEQ ID NO: 163349 - protein, 375 aa, Glycine max
  Clone ID: PAT_MRT3847_118522C.1.pep
MAPTAKTLTYLAQEKTLESSFVRDEEERPKVAYNEFSDEIPVISLAGIDEVDGRRREICEKIVEACENWGIFQVVDHGVDQQLVAEMTRLAKEFFALPPDEKLRFDMSGAKKGGFIVSSHLQGESVQDWREIVTYFSYPKRERDYSRWPDTPEGWRSVTEEYSDKVMGLACKLMEVLSEAMGLEKEGLSKACVDMDQKVVVNYYPKCPQPDLTLGLKRHTDPGTITLLLQDQVGGLQATRDNGKTWITVQPVEAAFVVNLGDHAHYLSNGRFKNADHQAVVNSNHSRLSIATFQNPAPNATVYPLKIREGEKPVMEEPITFAEMYRRKMSKDIEIARMKKLAKEKHLQDLENEKHLQELDQKAKLEAKPLKEILA

SEQ ID NO: 163350 - protein, 54 aa, Glycine max
  Clone ID: PAT_MRT3847_118523C.1.pep
SVPSYYLNRKSGVKTRVHNPTIIKKTRKIIKVRGGRQQKGVIFSAGENMSRAKN

SEQ ID NO: 163351 - protein, 77 aa, Glycine max
  Clone ID: PAT_MRT3847_118524C.1.pep
TICNNLEKNEKYMNSEDVFKDVQYVWDNCYKYNNKGDYILDLMRRVKKNFMKYWTAAGLYSEQSKGTKGETSMCVCV

SEQ ID NO: 163352 - protein, 130 aa, Glycine max
  unsure (1)..(130): unsure at all Xaa locations
  Clone ID: PAT_MRT3847_118525C.1.pep
KYNNATDXIGRTHLAHLVNEHFYDEKFNNIGTIGTSALHRHIVAHLEKMSLWHKAILSGMGHCLYGKSXKPWYFGMKEKLVQMIKSIYETXVSRCPVPLKNICGTTLATLFGTTLWKLYSFFRDAGNGGA

SEQ ID NO: 163353 - protein, 47 aa, Glycine max
  Clone ID: PAT_MRT3847_118526C.1.pep
LFKSYFRLAIIVTFQVIFSGGFRVTFQVIQEGVILEKFPQCSGNLIQ

SEQ ID NO: 163354 - protein, 85 aa, Glycine max
  unsure (1)..(85): unsure at all Xaa locations
  Clone ID: PAT_MRT3847_118527C.1.pep
RKAKAKPPPKKRMDXLDSVFSCPFCNHGSSVEFPLDIKNFIGEAICGICQKSFSPSLPAFSEPIDLFSEWIDECELVNPPDDYGA

SEQ ID NO: 163355 - protein, 73 aa, Glycine max
  Clone ID: PAT_MRT3847_118528C.1.pep
TETTRHHTRPTLKPKQTRPENHAGTELQNPIVNPKKSLIIQQLAPEQNHNTPNTTHNNPPISRKRTAEATNAA

SEQ ID NO: 163356 - protein, 110 aa, Glycine max
  Clone ID: PAT_MRT3847_118529C.1.pep
LNSISSWPHNFKGYINTLLHYCPEPKDTSNSSKSTLPRKSEKLKLELKFLFLGAEKVKNVRGDSNNNNPCPEHGRVRFQLLQCCSFVWLAHEHSWKHDDAFFSDLISLKP

SEQ ID NO: 163357 - protein, 91 aa, Glycine max
  unsure (1)..(91): unsure at all Xaa locations
  Clone ID: PAT_MRT3847_11852C.1.pep
LVQSNAMPMNLPNAVLSMWRYFVRDAHAEGAKKTYSYIKRTQCLFITFGYXTDDTLNFAAFPHQLVLFGEIPEKGVLECXQEEFVFGWTNY

SEQ ID NO: 163358 - protein, 88 aa, Glycine max
  unsure (1)..(88): unsure at all Xaa locations
  Clone ID: PAT_MRT3847_118530C.1.pep
KKKKKKKQKQQKKTKGAAEEKEPTWLTLLSNKMGGAKEEPKIKPRNPSXRGGXKKXTILKKKNPXQRGAGGKKNVKTTRPAPGRPSQL

SEQ ID NO: 163359 - protein, 46 aa, Glycine max
  Clone ID: PAT_MRT3847_118531C.1.pep
CYSRSYPPSCPYGALMWSFVVRIIDTRHSFMVECRCLRLSHRRYCS

SEQ ID NO: 163360 - protein, 69 aa, Glycine max
  Clone ID: PAT_MRT3847_118532C.1.pep
AEHLMFILNEDVPCAIASDCSSSYTQVNNEMVTPIFELTSMEGGPQTSLNRMPSNISEVHHSTAVTGSC

SEQ ID NO: 163361 - protein, 71 aa, Glycine max
  Clone ID: PAT_MRT3847_118533C.1.pep
MGGTQVEREEKVSLELCEEILQSMEVGMSFKDYNGRISSLDFHRASNYLVTASDDESIRLYDVTSGTCLKT

SEQ ID NO: 163362 - protein, 89 aa, Glycine max
  unsure (1)..(89): unsure at all Xaa locations
  Clone ID: PAT_MRT3847_118534C.1.pep
RIVVVQDTNNFRKALRLPPKNPNHSYYNNYLSRDDQCYPALHPTGLTIVTTNHTRYXLIHYPGTAPLIQASWSESYSMVHLPCVTKYSG

SEQ ID NO: 163363 - protein, 181 aa, Glycine max
  Clone ID: PAT_MRT3847_118535C.1.pep
MANFVAPGHLIIKDENLNLHSKKTTKSKNSKTNGKKDGSGIAGRKALNDITNKSSLHHPEASVKKRNLPKQDINVKEEMFLHDHKKCIEAQNATMRNFNLETVLPQDDSISILELIKVPHSPQCYPEPVELPMPNFSDWFDHSMQWSSPPSSPLSWDSPSSLAWQNEAVEFVLKEEIAVQV

SEQ ID NO: 163364 - protein, 101 aa, Glycine max
  Clone ID: PAT_MRT3847_118536C.1.pep
GLMGRCPRILHWRIGDFQPLVHRAGPVWVGRDERPAEVGQAWQDVMIVDCDKGFPHFATKTTWARAHLAIAASSVAVMPAIVFSARALAYANKPMYIWSEE

SEQ ID NO: 163365 - protein, 71 aa, Glycine max
  Clone ID: PAT_MRT3847_118537C.1.pep
TQMYNNEKEENSNKKAKTKTKINYLWTLQLEGSIIACIMYKHLLFEPFSRAPSNLYPCVSTCTILVSVSRA

SEQ ID NO: 163366 - protein, 62 aa, Glycine max
  Clone ID: PAT_MRT3847_118538C.1.pep
NENQMTGLKSIVLSPQGALTPHPLFCRESTVTPKLYFLSNQKKRKKKKRHSLAFFFYPFGFL

SEQ ID NO: 163367 - protein, 92 aa, Glycine max
  Clone ID: PAT_MRT3847_118539C.1.pep
ESGARLICEREKLMFIVGYGFAYRICIHMPWSRGIRSVKHTLRPYVLCSILNVNMHVRILGYSGFYKLKMHVVVFARNLYRAKIGRLDCHVK

SEQ ID NO: 163368 - protein, 224 aa, Glycine max
  Clone ID: PAT_MRT3847_11853C.1.pep
VPGGPGYKHLEPGDVLVRVNGEVITQFLKLETLLDDSVNKNIELQIERGGTSKSLTLLVQDLHSITPDYFLEVSGAVIHPLSYQQARNFRFHCGLVYVAEPGYMLFRAGVPRHAIIKKFAGEEISCLDELISVLSKLSRGARVPLEYISYMDRHRRKSVLVTVDRHEWYAPPQIYTRDDSTGLWNAKPAFKLDSPFLSLGAKDVENLSRQSVSLTGEHACGGHV

SEQ ID NO: 163369 - protein, 61 aa, Glycine max
  Clone ID: PAT_MRT3847_118540C.1.pep
HLIFGEIFLLGGNQQNPPGPIYPLATEANWVAFFYIKTKLGTINLFLLSLFMFPRGVGLAF

SEQ ID NO: 163370 - protein, 113 aa, Glycine max
  unsure (1)..(113): unsure at all Xaa locations
  Clone ID: PAT_MRT3847_118541C.1.pep
MEVGFLGLGIMGKAMAINLVRHGFKATDWNDTRVQAATNSRQHGASSGRQPSNLXRGYSRRTLAGGPDPRVVRSGECDNDGEFEHISGRGYRDLSLGKAKTCVLMWLDFEAQG

SEQ ID NO: 163371 - protein, 164 aa, Glycine max
  Clone ID: PAT_MRT3847_118542C.1.pep
MIKQILNRLQRKPSKSVENHEGGGAITSPSTTSTSSRSSDLARFHYGNSTASPLSGLNSNSFPGLNHGDKFPHAVNSKLNGSLAASSYEALPSFKDVPNSEKQNLFIRKVQMCCFVFDFTDPTKNLKEKDIERGTLVELGDYVSSADEEVTEMLSGGHWENGVV

SEQ ID NO: 163372 - protein, 76 aa, Glycine max
  Clone ID: PAT_MRT3847_118543C.1.pep
WSFYGMNFGLDYCTAGISGGHVNPAATFGLFLGIEVSIIPPEFYLVTHRLVTIWDVSLWNAFMKNSYNSLGGCANS

SEQ ID NO: 163373 - protein, 166 aa, Glycine max
  unsure (1)..(166): unsure at all Xaa locations
  Clone ID: PAT_MRT3847_118544C.1.pep
XXXDLXKDXQXXXXHXRNXAPXDDSXXSLENXXRXXTXPDXDXXXDSXXXSHXSXTXXLTXHXXXXXXXXXQXXHXTXXHRXAHXTXXCXXSTHTXRQXSXTMRQXQPHSXXXDHXQXNDHXXXTVNTXXITXRXSXEXVGKXTXXXXXPPKXAXPRLXXXVAXXX

SEQ ID NO: 163374 - protein, 36 aa, Glycine max
  Clone ID: PAT_MRT3847_118545C.1.pep
VRYYGQSNCHCLISYMIRNSPDNVQNVALMPVFFMQ

SEQ ID NO: 163375 - protein, 267 aa, Glycine max
  Clone ID: PAT_MRT3847_118546C.1.pep
HWRHLGDIRANKPSAAEWLDQLPKQKWVQCFDEGKRWGLTTNLSESVNSMFKNTRHLSVSSLVEETYFKTAQLFANRGRQTQAMINSGSQYSEVVFDVINSGQHESNTHIVNEFDRHNHTFIITETQSPLETPRPPGRFRVMLQSQKCDCGEFQAKHLPCSHVMAACKSVNVDPMTYVPMIFTLQHILHIYDNSFGLLPHESMWQEYEGDQWGPDPRRKRTVKGRPVSTRIPTEMDEAKNERASRKKCGLCRQHGHSRNNYPNVSSS

SEQ ID NO: 163376 - protein, 51 aa, Glycine max
  Clone ID: PAT_MRT3847_118547C.1.pep
CYYRSDPPECPCLEAFTSLSSLLGTVVPVHRSNAPCSSVAYLHMAWVLTRY

SEQ ID NO: 163377 - protein, 45 aa, Glycine max
  Clone ID: PAT_MRT3847_118548C.1.pep
CGKRCGGCYIYPYLSLTESTTNDNLVMQVIPDKAQFEGTQIHMPT

SEQ ID NO: 163378 - protein, 66 aa, Glycine max
  Clone ID: PAT_MRT3847_11854C.1.pep
LHKCHTHTLKDCFISNNMHIASLTLRRLHSKQVTRLEEAFQHNRRNFSRITLSPFCRLLAAVSSRI

SEQ ID NO: 163379 - protein, 81 aa, Glycine max
  Clone ID: PAT_MRT3847_118550C.1.pep
HASADAWAGTKKYVVSRYLKYQMTNDKSVKSQSHEIQKIAQESYIAVITKINMIGGSDGWWVDTGASRHVYYDRAMIIHEC

SEQ ID NO: 163380 - protein, 132 aa, Glycine max
  Clone ID: PAT_MRT3847_118551C.1.pep
RELNLIWCNGGFGEEAREGNGGRRQREVGGGRGAYILIYTLSEYDKRTGTKLTLVKVGMGETHVNCGTNCRVALKAKDGSATASCESIVWEKPWLHFMNLTGFKPLHYLRPILFFTLSLIIFHAGAISVLSQ

SEQ ID NO: 163381 - protein, 631 aa, Glycine max
  Clone ID: PAT_MRT3847_118552C.1.pep
MGSPVNGVYSSSEVHNSVSVVDHDPPSTSGIPRSSRPPLRAPRNYGASSSQKHSYQEADNVERDRMPNMEKQYYDANGKSDNASLNKAVESCLGKNISSMETKLSIKQPLDASKNCDSGGVLESDNCKLGSSKGVVDPTKSYCQSEITFCPSPQNSFYSEAKESFVNTGASECVSVDKSVESGEVTNSCEFNESRKTSICRGSTGSDVSDESSTSSLSSTLYKPHKANDIRWEAIQAIRVRDGVLEMRHFRLLKKLGCGDIGSVYLAELSGTRTCFAMKVMNKTELASRKKLVRSQTEREILQSLDHPFLPTLYTHFETETFSCLVMEFCPGGDLHALRQRQPGKYFSEIAARFYVAEVLLALEYLHMLGVIYRDLKPENVLVREDGHIMLSDFDLSLRCAVSPTLVKSSNSSLETKSSGYCIQPACIEPTCVIQPACIQPSCFTPRFFSSKSKKEKKSKPKNDLQNQVTPLPELIAEPTNARSMSFVGTHEYLAPEIIKGEGHGSAVDWWTFGIFLYELLFGRTPFKGSANRATLFNVVGQPLKFPESPTVSFAARDLIRGLLVKEPQNRLAYRRGATEIKQHPFFHNVNWALIRCANPPEVPRQAMKALAAEKVPGVKPSGNYLDIDFF

SEQ ID NO: 163382 - protein, 43 aa, Glycine max
  Clone ID: PAT_MRT3847_118553C.1.pep
MTSHPSTLLLAYKCIFFPIPPFLCFFAPLLILDESRMKWWECV

SEQ ID NO: 163383 - protein, 80 aa, Glycine max
  Clone ID: PAT_MRT3847_118554C.1.pep
PMRGRKGAPRSLFWGEFPQGGWGWGSKGGPKGAKKSGGTLTSASGKPRVFSRRGPLTRGPGPPFPHWAGFFNKENPFFHF

SEQ ID NO: 163384 - protein, 29 aa, Glycine max
  Clone ID: PAT_MRT3847_118555C.1.pep
FILSVLNYSYDILYYVRTKHMFFYTFYIY

SEQ ID NO: 163385 - protein, 138 aa, Glycine max
  unsure (1)..(138): unsure at all Xaa locations
  Clone ID: PAT_MRT3847_118556C.1.pep
VDEEDSFEEVSVSAALNGDEGXDYMERIPLATCEGFPHVLSRKNGENGKRRFVSGDGEEMTLIPGTSVEEAHNKLIAELETSEPTLAGIECPNDEKLPRRIILDKPKTRCFTIVPMESNPVARQKSLNLVRFIMKKRD

SEQ ID NO: 163386 - protein, 56 aa, Glycine max
  Clone ID: PAT_MRT3847_118557C.1.pep
MEMSASNCEHSTVFSSLPLAIKWLRDRVQQNQSVRFQVLVTGSLHLVGDVLNLVKK

SEQ ID NO: 163387 - protein, 129 aa, Glycine max
  Clone ID: PAT_MRT3847_118558C.1.pep
AGFKPDDPTYTMVIDCFCKKGDVKMGFKLLKEMQSDGHVPGVVTYNALMNGLCKQGQMKNAKMLLDAMLNVGVAPNDITYNILLDGHSKHGSSVDVDIFNSEKGLVTDYASYTALVNESSKTSKDHLKR

SEQ ID NO: 163388 - protein, 56 aa, Glycine max
  Clone ID: PAT_MRT3847_118559C.1.pep
LDLLLRTIQGGHHRVWRPTEAPSCQPLIISQSVHLKRSATLSCLLADPHRLIGQLY

SEQ ID NO: 163389 - protein, 75 aa, Glycine max
  unsure (1)..(75): unsure at all Xaa locations
  Clone ID: PAT_MRT3847_11855C.1.pep
KKKKHKMKVKLQTDPLKAATRCPCSSCXSVEKKKTPCCGGRSHCLFTNPTCCSSDKSHLSLQPENFVLSRTVMSE

SEQ ID NO: 163390 - protein, 121 aa, Glycine max
  unsure (1)..(121): unsure at all Xaa locations
  Clone ID: PAT_MRT3847_118560C.1.pep
QRTSLRVTYSGGEYVQTHTSRKKIHSDHDAXEPTESGDSAGQALDDLENTNDDLKRDLRQEPINSLVHIDGSGSLKADCIHVPYRLREGFRKIQVKPDTEHDRKVMEKMKLDRHQHTLRPP

SEQ ID NO: 163391 - protein, 62 aa, Glycine max
  Clone ID: PAT_MRT3847_118561C.1.pep
VNVNQQPPFKSFFFFFYKKLTGFCDRSKHILKIIFPHRAPVKNQLRTDSILHLFTLTIPHNC

SEQ ID NO: 163392 - protein, 165 aa, Glycine max
  Clone ID: PAT_MRT3847_118562C.1.pep
MGSKARWRQSWAPQPLTPLMEGPGPEMQEEGTKKESSWEVIREWFRTQKISPGGSFSQSSSFYGTIHAKTQDLRLLLGVLGCPLAPIPSAHDPTLSIHIKDTPFETSTAKYIIQQYLAATGCLKQQKDTKNMYATGRGKVCGGGTQLGKCQCWDKTMIWCFGLES

SEQ ID NO: 163393 - protein, 62 aa, Glycine max
  Clone ID: PAT_MRT3847_118563C.1.pep
KPSFGNNGLEKMGETSNFDRKTSLLKKKTLESLKEPTLYCNQHPLGNQPRQYTFFSGKPRRP

SEQ ID NO: 163394 - protein, 92 aa, Glycine max
  Clone ID: PAT_MRT3847_118564C.1.pep
VVGKRCFPIVNFPSNLEFFEGVCLWDSLLSKEGFGSCWKTILSWGRRGCQLLNTSGRAVCLKSLKESLIFLFVFYICSNFLFFSLYLISSLA

SEQ ID NO: 163395 - protein, 61 aa, Glycine max
  Clone ID: PAT_MRT3847_118565C.1.pep
HCFGHHNTHINFEKKKVLERGEIINYTRRQQVVEAKFKGQQFETNERLPKEFNSFINYYYY

SEQ ID NO: 163396 - protein, 60 aa, Glycine max
  Clone ID: PAT_MRT3847_118566C.1.pep
HFHISEYFGPTNQLSGVYISYTKDPTYLSQIVKVQHMVEPYYFPPPQVRPLIASSDLFCK

SEQ ID NO: 163397 - protein, 105 aa, Glycine max
  Clone ID: PAT_MRT3847_118567C.1.pep
MCIFIYTCGCRCLCVASEPDTSKRKQYQQGEVDSLLHMEIQDTFYICHGSPTLLIDECIHARKILQSWKRDVFPERPSSTCVISGHWKTAAPTVNVCDCINDSIY

SEQ ID NO: 163398 - protein, 46 aa, Glycine max
  Clone ID: PAT_MRT3847_118568C.1.pep
IKETNLMKLNIYGWGCGLISPIIYIRIYSSLQKKKKKKKKKRGPKL

SEQ ID NO: 163399 - protein, 48 aa, Glycine max
  Clone ID: PAT_MRT3847_118569C.1.pep
TFLFFCVSTQITFCSCVLIMIETSQWLSNIVICYQIKTPAFPVPSCHT

SEQ ID NO: 163400 - protein, 87 aa, Glycine max
  Clone ID: PAT_MRT3847_11856C.1.pep
VWNLGTLQWLQTLTEHTSVVMSVLCWDQFLLSCSLDKTVKVWYATESGNLEVTYTHNEENVEMMFSQNCVESILTSAINVPATTLLN

SEQ ID NO: 163401 - protein, 98 aa, Glycine max
  unsure (1)..(98): unsure at all Xaa locations
  Clone ID: PAT_MRT3847_118570C.1.pep
MGGVTSSMAAKMAXFFPPSPPSYEVVEEAATGALVLEAFPRRENVRVVKFGTRRGSEIVGVYIAHPMAKSTILYSHGNAADIGHMLELXVDLSTHLRV

SEQ ID NO: 163402 - protein, 80 aa, Glycine max
  Clone ID: PAT_MRT3847_118571C.1.pep
GTAWSGPKGPKILRGACLIPFPTPKPILMFKTPTLTTLTPVTLIPHPPHNNATVPRCYVMTVYHISTRETPRPYQHLSQF

SEQ ID NO: 163403 - protein, 184 aa, Glycine max
  Clone ID: PAT_MRT3847_118572C.1.pep
MDGREGMAFPGGSVPYYMQHRGGGVSGSGPGTGTQSGGFQPPSGFRALSNVSPGSAFKVESHSYSHSQSQPQHASFSHGINIGSSPDGGGGGPSSGEPVKKKRGRPRKYGPDGSVSLMLSPMSATASSTPGSGTSSEKRPRGRPPGSGRKQQLATLREWMNSSAGLAFSPHVITVGVDEDIVAK

SEQ ID NO: 163404 - protein, 75 aa, Glycine max
  Clone ID: PAT_MRT3847_118573C.1.pep
IPIALDMAAQFREKDSDLWRCICADEYMKCVVIECYESFKNVMNALVVEEAIKSLIGCQVYSKGQIKSAFSKRKY

SEQ ID NO: 163405 - protein, 351 aa, Glycine max
  unsure (1)..(351): unsure at all Xaa locations
  Clone ID: PAT_MRT3847_118574C.1.pep
MDGREGMAFPGGSAPYYMQHRGGGVGGSVPGTGTQSGGFQPPSGFRALSNVSPGSAFKVESQXPQHASFSHGINTGSSPDGGSGVPSSGEPVKKKRGRPRKYGPDGSVSLMLSPMSATASSTPGSGTSSEKRPRGRPPGSGRKQQLATLGEWMNSSAGLAFSPHVITVGVDEDIVAKLLSFARQRPRAVCILTGTGTISSVTLRQPASTSIGVTYEGRFQILCLSGSYLVAEEGGPHNRTGGMSVSLSSPDGHIIGGGVTRLVASSPVQVVACSFVYGGSKPKTKQVTTTTTKDTSSEPQSSDKLASPGSVPPPNQNYTSSPPAPGIWPASSRPVEVKSAHAPPGIDLTRG

SEQ ID NO: 163406 - protein, 281 aa, Glycine max
  Clone ID: PAT_MRT3847_118575C.1.pep
MAVVKSPKPVTYSSRKRSMGDLCLQGCVTHRHTSVRRSRNSSRAQNCVLPCNDSGKSAGNPSTTAAQSVCAQRNRNVRKSPDLSGCDNFESSTFVSNGSIDDNSSEIITTDSDTFSLNEGSTMDSNFKLELSEAIECPEVELNKGNNQKIKPVVNKKKRKPNRKRAANDAFKPISRPEEETGVQNASQSSQNMCGNSKERCFEQDGDEPLPLVKRARVRMGKSSVEAELHSTLQCLEKNCKENTNSVQQMITPSNCENNSPADGDSSVLNGALDDVSPKNF

SEQ ID NO: 163407 - protein, 68 aa, Glycine max
  Clone ID: PAT_MRT3847_118576C.1.pep
SPTSGNPCIKGKDPLLKKEMVFLLYGFYFYPGRGSKNGLGNYLAWSLGFFFFKKKGLFLILHTCCLRK

SEQ ID NO: 163408 - protein, 85 aa, Glycine max
  Clone ID: PAT_MRT3847_118577C.1.pep
TLTYSIQLELTFTLSILKHRSNNTLSQILSLSLSRSLSLSGRVSLTLHNRFYQKEQAEKRTLFTHTINNCLMNNADPTRLMHLSN

SEQ ID NO: 163409 - protein, 83 aa, Glycine max
  Clone ID: PAT_MRT3847_118578C.1.pep
LASSKLPSFTKPLITALKWFGEIAKSEYDPDKNTYSIIVPFLCEKGDFKTAIEMCKEIFNNRCRVDATLLQGVVDKLASEGMI

SEQ ID NO: 163410 - protein, 60 aa, Glycine max
  Clone ID: PAT_MRT3847_118579C.1.pep
GVDRISLGYVLREVTKWVRFAEEERSHGSWSGKRTHQASNRSYGRLSPNGSRTNPSCTNE

SEQ ID NO: 163411 - protein, 78 aa, Glycine max
  Clone ID: PAT_MRT3847_11857C.1.pep
CSCSEYMAAFLFCCIKLFRNLLLLSNSFSASSMSHTLNTHKTNETSPFCSLALWLLSMAPSKSVRHPRERKKVHKEME

SEQ ID NO: 163412 - protein, 56 aa, Glycine max
  Clone ID: PAT_MRT3847_118580C.1.pep
GKCTSNGLAHSSEDLLLKRGLMEGAVTTIHWYTGDQRLLNASHQNLWPPRAATTNI

SEQ ID NO: 163413 - protein, 68 aa, Glycine max
  Clone ID: PAT_MRT3847_118581C.1.pep
CSPSPCSRCLLTPIAPCKFGSNFFFMEKSHVSYKSLFWELEKGKNLLFGFLGLKLVFYPPFQYITPKM

SEQ ID NO: 163414 - protein, 89 aa, Glycine max
  Clone ID: PAT_MRT3847_118582C.1.pep
MATGISHRTPHYQSSIQIQRNQIDRGKTLAPLFKVIAYRARSKNQVLAGVGYIVGDNWGLDSSEYRWHDVEVWWGKIGYGDAHHNSGFE

SEQ ID NO: 163415 - protein, 137 aa, Glycine max
  unsure (1)..(137): unsure at all Xaa locations
  Clone ID: PAT_MRT3847_118583C.1.pep
QPFFFPEGNNDRKQDFSHESDARTNANASGSVGGAKVGDHEQNDRLHVGGHKGRLGYALLIPXVEPVVQAQRAEHYSTCYLTRLIGKREVTHRGEHEXGVYAPVSAKTNTVATPQEWHLERPRDKHPSELTTTDDTP

SEQ ID NO: 163416 - protein, 87 aa, Glycine max
  Clone ID: PAT_MRT3847_118584C.1.pep
SHLSYVSCNHLEMQDAYLGNVVHVLRELYLHSPYEARQLTRTALSHIEWLAKADVPTIAQIEELHSMHRMMNASDSHDYLDLLYNID

SEQ ID NO: 163417 - protein, 111 aa, Glycine max
  Clone ID: PAT_MRT3847_118585C.1.pep
LSFFFFFFFFFFFFFFFFFFFFFFFFFPFSFILKKPKPTISPQQGGTFLKTRFPTHLKTRPTPKSTHNTPPNANQSNHLPYPKRPTVQPPKETPGFSPRPGRTLLKNPTTC

SEQ ID NO: 163418 - protein, 70 aa, Glycine max
  unsure (1)..(70): unsure at all Xaa locations
  Clone ID: PAT_MRT3847_118586C.1.pep
YSCIYIKNYIDLTDKFTFKGDFSNSVTAATXLYRCLASYTNIIIPLAITCFTIVINVMGNVGPRTIKNIT

SEQ ID NO: 163419 - protein, 86 aa, Glycine max
  Clone ID: PAT_MRT3847_118587C.1.pep
TNLIHRNIPVPLHNILAIKKHLSKALTSKSNKKKKTHYSLADKNAAGRNITPFPLFAPPNLKFSRLTSSATHNKNPTINTPVHPTL

SEQ ID NO: 163420 - protein, 50 aa, Glycine max
  Clone ID: PAT_MRT3847_118588C.1.pep
YILSTLRCYNIGFFSMKRVVSITNNWIMSVECLPVILVESSSRSSGSSSS

SEQ ID NO: 163421 - protein, 129 aa, Glycine max
  Clone ID: PAT_MRT3847_118589C.1.pep
EPPPGPLWAKGKFPGPAAFPWLNPFSPMGINPFFLLPKTPRFQKWVFREEKPGRKETFLTFDFQAPPFVSKSSGRKRGRKTFFPLSGVGGPPPWPGTRVPLRPLPLKGEGSFPLFPFFGPLLKPGSPLF

SEQ ID NO: 163422 - protein, 71 aa, Glycine max
  unsure (1)..(71): unsure at all Xaa locations
  Clone ID: PAT_MRT3847_11858C.1.pep
EPLKPLQCLQTXLTEHTSVVMSVLCWDQFLLSCSLDKTVKVWYATESGNLEVTYTHNEENVFVNLITFSPG

SEQ ID NO: 163423 - protein, 57 aa, Glycine max
  unsure (1)..(57): unsure at all Xaa locations
  Clone ID: PAT_MRT3847_118590C.1.pep
PRSLRSWGLETTATPLITTQHSKPKTLYTFFTSNSXFVSLSISPPRATMSVSXPXXL

SEQ ID NO: 163424 - protein, 56 aa, Glycine max
  Clone ID: PAT_MRT3847_118591C.1.pep
LIQTSLSVSLRLVVTIASSAWFGGSIVSIFFVSVLRKKMDLASRFYQCDWEREREK

SEQ ID NO: 163425 - protein, 62 aa, Glycine max
  Clone ID: PAT_MRT3847_118592C.1.pep
NKSPLIPSHHITNTHSCYTPNTTTTTPNTLTLIFLQYSIFNIAFNPQPFRPLIIKKKKKTSK

SEQ ID NO: 163426 - protein, 52 aa, Glycine max
  Clone ID: PAT_MRT3847_118593C.1.pep
CSRSCIDQSNHISIRSKIKETSKIVLPDLAVQYILDNQQPWHDIHQRLVSRK

SEQ ID NO: 163427 - protein, 126 aa, Glycine max
  unsure (1)..(126): unsure at all Xaa locations
  Clone ID: PAT_MRT3847_118594C.1.pep
MSGLIEGLPDAVAIRCLARVPFYLHPVLELVSRSWQAAICSPELFKARQEVGSTEDLLCVCAFDPENLWQLYDPMQDLWITLPVLPSKIRHLSNFGAVSTAGKLFVIGGGSDAIXDPLTGDQDGCF

SEQ ID NO: 163428 - protein, 206 aa, Glycine max
  Clone ID: PAT_MRT3847_118595C.1.pep
MCSAEKDGIMLFGVRLSVVDNHPTSFRKSASMTNLSQYESPPPHDPNAGYASDDVVHPSRHTRERKRGVPWTEEEHRLFLLGLQNIGKGDWRGISRNFVKTRTPTQVASHAQKYFLRRHTQNRRRRRSSLFDITTDSVMEPWPEKEEEQVVLPSARSKPVLPVPPSSKMAELDLSGKSLSLKLPVSKPPISNENFGGIPLSVLLEG

SEQ ID NO: 163429 - protein, 543 aa, Glycine max
  Clone ID: PAT_MRT3847_118596C.1.pep
KTWADAWEKVRFDKLQAESIRFMAREILILRTLDHPNIMKLEGIITSQLSNSIYLVFEYMEHDLAGLVASPDIKFTDSQIKCYMRQLLSGIEHCHLKGIMHRDIKVSNILVNNEGVLKIADFGLANTLSPNSKQPLTSRVVTLWYRPPELLLGSTSYGVSVDLWSVGCVFAELFLGKPILKGRTEVEQLHKIFKLCGSPPEEFWKKNKLPLATMFKPKANYETSLQERCRGFPATAVNLLETLLSIDPSKRRTASSALMSEYFSTKPYACNPSHLPKYPPSKEMDAKNREEVRRKKNGGKVREAVTSKRQRQVHKVSHDHINFNQPALKENVSQNPGTNDGRAYVTKGKVAGAMHKEQPKPSYDAKSEAAQVVNGCNGYSVYSGPAPISGSSGFTWAKRRKPKASSILSDGSRSKVSALDPTFAKGTYDLTEHGIEVSERKHSYNTSHRDETSSYVSKKYQAPLVQQKSFDVADTYNSNYYMDFDFTDKMDALIDTQGHRKHDEPVEQSVPNMIPSNKNEELLHWNENDMRQSLRKSRLGRDQ

SEQ ID NO: 163430 - protein, 88 aa, Glycine max
  unsure (1)..(88): unsure at all Xaa locations
  Clone ID: PAT_MRT3847_118597C.1.pep
PFLHKAKNYDLDKVTNMPNPDASVTHHDFNRVNPHSDDYSIHGCVSNPYSNRIAICXIKYSCNSAVYDIAXCTIPYPQTLSASDTSIL

SEQ ID NO: 163431 - protein, 142 aa, Glycine max
  unsure (1)..(142): unsure at all Xaa locations
  Clone ID: PAT_MRT3847_118598C.1.pep
LTLVDRVLRMKSNYAASGIRTCVEAVLLILXGLKRKLARKLSVNEDGDGSEWEVGECLGMWWRPDFETLMYPFIPPNVKKPKECTKVFLVKLPESRKFIVPKNMRVLAVPLCQVHENHKTYGQIISGVPQLLSKFSFNMIES

SEQ ID NO: 163432 - protein, 142 aa, Glycine max
  unsure (1)..(142): unsure at all Xaa locations
  Clone ID: PAT_MRT3847_118599C.1.pep
MGEEEEEEVSVTALHHPNSGNDDQSLEFDIYPLSSYYFGSKDAVPSKDLTLVDRVLRMKSXVELFKHPHLLLLQIRNSIYKLPGGRLRPGESDTDGLKRKLARKLSVNEDGDGSEWEVGECLGMWWRPDFETLMYPFIPPNV

SEQ ID NO: 163433 - protein, 69 aa, Glycine max
  Clone ID: PAT_MRT3847_11859C.1.pep
KNIYILERKIEARVSFILQQFKYCISLLDERNENYKKTCVELDKPNCVFSVFGNTSQTIKRESPTRFCI

SEQ ID NO: 163434 - protein, 74 aa, Glycine max
  Clone ID: PAT_MRT3847_1185C.1.pep
WASGRRFYWVTWRRRWRWSIAGTSSAYGGFYYSASFPWFESESSEFGSDAVDGDVLGNGSLSLLLIDDATVTIL

SEQ ID NO: 163435 - protein, 166 aa, Glycine max
  Clone ID: PAT_MRT3847_118600C.1.pep
MSLEDQRLLSSYLPLLREFIPNAAAEVETDLIAQLVGHSKEENYVYDLYTVKDEMDINIDDSSCSYPLVQVDEEEDYYDGTQHSDYESDDSNDEVSEEDEEDENSENESEREDGNTSSESSDENIEHGFSEDDADPLYDEDFDEYEGAHSDDVEHMDDENWRWSYR

SEQ ID NO: 163436 - protein, 221 aa, Glycine max
  Clone ID: PAT_MRT3847_118601C.1.pep
MGEEEEEEVSVTALHHPNSGNDDQSLEFDIYPLSSYYFGSKDAVPSKDLTLVDRVLRMKSNYAASGIRTCVEAVLLVELFKHPHLLLLQIRNSIYKLPGGRLRPGESDTDGLKRKLARKLSVNEDGDGSEWEVGECLGMWWRPDFETLMYPFIPPNVKKPKECTKVFLVKLPESRKFIVPKNMRVLAVPLCQVHENHKTYGQIISGVPQLLSKFSFNMIES

SEQ ID NO: 163437 - protein, 104 aa, Glycine max
  Clone ID: PAT_MRT3847_118602C.1.pep
RGEYYYDGTQHSDYESDDSNAENNPLNDYPDEVSEEDEEDENSENESEREDGNTSSESSDENIEHGFSEDDADPLYDEDFDEYEGAHSDDVEHMDDENWRWSYR

SEQ ID NO: 163438 - protein, 48 aa, Glycine max
  Clone ID: PAT_MRT3847_118603C.1.pep
ELAHEGGVLGLVMQEIALINAALVCVNMLNPNDCEHSGAEHFVQWPSI

SEQ ID NO: 163439 - protein, 127 aa, Glycine max
  unsure (1)..(127): unsure at all Xaa locations
  Clone ID: PAT_MRT3847_118604C.1.pep
RLRPDRSGMNTIWSQDCELWNAACTKAMTMXFNPHSCSEAGGXECVHRTGFXXDIISVTAWTDTPMQDAHDTMDWHILFXERGIRTYCVLKTQDSVVLNKCMGKLTVPESTDASGKRMRFYMGRGAD

SEQ ID NO: 163440 - protein, 48 aa, Glycine max
  Clone ID: PAT_MRT3847_118605C.1.pep
LRNNTNADLLNQLTDLKAELALPRIANVTGGTPHKLSNTQVVRLSIAH

SEQ ID NO: 163441 - protein, 144 aa, Glycine max
  Clone ID: PAT_MRT3847_118606C.1.pep
ARNSARVIKSHTILLYLVLVLEQFLVAPSGVKGGSISFSGCIQLLGFCAFESCVGIFWPSIMKMRSQYIPEEARSTIMNFFRIPLNIFVCVVLYNVCYTIYYFNAMLELYQCSSIFLSLVLTNCVFSRCRLMHSLSLLCLACAQ

SEQ ID NO: 163442 - protein, 83 aa, Glycine max
  Clone ID: PAT_MRT3847_118607C.1.pep
FVIHSEGMTHNCPCHKANVHRQNPIRIGNKCLNDWPINATCYHIQPSVTAPLELCNFYNIFYNLCLTDAISIMPWTDETKSYN

SEQ ID NO: 163443 - protein, 36 aa, Glycine max
  Clone ID: PAT_MRT3847_118608C.1.pep
IDYCQRYIYIRWAVLLIKLLMWLDYQKRKTRAADIE

SEQ ID NO: 163444 - protein, 108 aa, Glycine max
  Clone ID: PAT_MRT3847_118609C.1.pep
ILFSYCILTNNLKYLIHIMSIQQLPLPEIVTFIAKNYVVLLGYWCCCICKFLISYLPFTMMYPVKFCSLKKKTSQTACVDVGHMSRTILNLCILLLPALLLILVFGIT

SEQ ID NO: 163445 - protein, 85 aa, Glycine max
  Clone ID: PAT_MRT3847_11860C.1.pep
NRALVGWVGCLGNGVRRFHLSSRLHVSVGRGVWCQQAAAVGVDHNQPRSSGCSLRGALPEPVPRKVRPMKPFLSTLPPSHLPGQG

SEQ ID NO: 163446 - protein, 554 aa, Glycine max
  unsure (1)..(554): unsure at all Xaa locations
  Clone ID: PAT_MRT3847_118610C.1.pep
LIGYAVFFGAVPLPARFCQTNVTEPSLSGMPVSRPSLNNQYNNRPHQQLVGHQRVSQQNKEWKPKSSQKPNSNXPGVIGTPKKAAVAAASPPAENSGDIESNTTELQDKLSQVNIYENQNVIIAQHIRVPETDRCQLTFGTIGTELDSSRLQSKYHIIGASEKSNEELTASLTVPAPELSTDDVSGSKQVDLRDEHIRSSRSDSPVSGAASEQQLPDNKDSSNTQNLDNYANIGLVRDSSPSYAPSEPQQQDSHDMPGFAAYDPPAGYDIPYFRPTIDETVRGQGLSSPQEALISHATNNPPASTIAMVQQQQPPVPQMYPQVHVSHFANLMPYRQFLSPVYVPPMAMPGYSSNPPYPHPTNGSSYLLMPGGGSHLNANNLKYGVQQFKPVPAGSPTGFGNFANPTGYAMITPGVVGGATALEDSSRVKYKDNLYVPNPQAETSEIWLQNPRDLPGMQSTPYYNMPGQTPHAAYMPSHTGHASFNAAAAQSSHMQFPGMYHTPPQPAAMASPHHLGPPAIGNNVGVGVAAAAPGAQVGAYQQPQLGHINWTTNF

SEQ ID NO: 163447 - protein, 81 aa, Glycine max
  Clone ID: PAT_MRT3847_118611C.1.pep
FFIVLINIATINPLPYDLVRFYMHRMLFLVNSKTGSKNLKFCSASFVLILVRLDAMLLFDTNRFFKISHQRKPNKQIAIYN

SEQ ID NO: 163448 - protein, 126 aa, Glycine max
  unsure (1)..(126): unsure at all Xaa locations
  Clone ID: PAT_MRT3847_118612C.1.pep
VLVPRPPLSPLXXLRXRXLPXSXXXXLLFSLXASFXPRPPXCXLSLPPSSXLXAFVLRXXLFPXRPCXFXSSXWXXPSXXPLXXVLPPVSLXVPXPXXSXXGFAGGXXXVXSLPXXFGAXGVFRFG

SEQ ID NO: 163449 - protein, 368 aa, Glycine max
  unsure (1)..(368): unsure at all Xaa locations
  Clone ID: PAT_MRT3847_118613C.1.pep
MDPQAPATATTARSAAAEPSQSQPPKPSPPLPLPPPSTSSTPPISAPPQPPPNTNPSPNPNPSPAPGPGPIQAPSPKPPTPTPTTTPTPPQPFNRALSPPSQPQFPHYSSPSPPSSAPGAAPPPRGGMAXGVPAHHQSPSPPFSSSFGQHFGGLGRTGVNVAESTSNSSTSQVRTXGARKMRPSGIDSHQQRSVQSSLRPPTSAPNNQPAGSQSFQGHGLMRPSSVGSTATPSPSSSQSMQSLNQPWLSSGSQGKPPLPSAAYRQQLNPLSGRHWSHIPPSQRPTPPSSRQPHQHPCRPIHPRGLFGHQVPPSRAPLHMPHQPQVTRLQGPGNQKPSSLVAAQSSAAQPGTQSRLTNSDTDESSNSIL

SEQ ID NO: 163450 - protein, 343 aa, Glycine max
  Clone ID: PAT_MRT3847_118614C.1.pep
QVRTPVQGMGMLGSQMMPSGIGSHQQRSVQSSLRPPTSAPNNQPAGSQSFQGHGLMRPSSVGSTATPSPSSSQSMQSLNQPWLSSGSQGKPPLPSAAYRQQLNPQSMQQRSHIPPMQQSTPTSSQQQQQQPLLSNQSQEHFGQQVPPSRAPLHVPHQPQVTRLQGPGNQKPSSLVAAQSSAAQPGTQSRLTNSDTDESSNSILSKRSIHELVNQVDPLEKLEPEVADILVDIAENFLESITRSGCSLAKHRKSTTLESKDILLHLEKNWNMTLLGFGGDEIKSYRRPITSDIHKERLAVIKKSMAATEAAHGKGSAGQASGSAKGNQGKTPLNIIGSPNLKNS

SEQ ID NO: 163451 - protein, 47 aa, Glycine max
  unsure (1)..(47): unsure at all Xaa locations
  Clone ID: PAT_MRT3847_118615C.1.pep
VTIAPRAGRELGYVRVKMDSVXFNQGMLTRQSLSDHITXQLAPRAAD

SEQ ID NO: 163452 - protein, 98 aa, Glycine max
  unsure (1)..(98): unsure at all Xaa locations
  Clone ID: PAT_MRT3847_118616C.1.pep
MAAATIAVSGSSLAGQAIKLAPCTPELGVTRVSMTNTDYTTVSSGRPWYGPDRITYSSPFSGEPSFYLTDEFPTDYCXNTARLIPDPETSANHRELEV

SEQ ID NO: 163453 - protein, 82 aa, Glycine max
  unsure (1)..(82): unsure at all Xaa locations
  Clone ID: PAT_MRT3847_118617C.1.pep
IYWVYEEDGLEEFVLVAERNGVGVVDFMERMLWATDEGLPHVLSRNYGXNGNKRCCSVDGEEITMNRFTRVNEAYNKFSVVY

SEQ ID NO: 163454 - protein, 78 aa, Glycine max
  Clone ID: PAT_MRT3847_118618C.1.pep
AGAPAGAAAALLARPTRPPPSWAAVPRNRIRTLAVLAAKNLCMGCYCDGSYVIRTGQSLSVLATDCVNDCLLHSECIC

SEQ ID NO: 163455 - protein, 62 aa, Glycine max
  Clone ID: PAT_MRT3847_118619C.1.pep
CATLIIASDVVPEEDFFTHGPIISMDIPTSLRNSQIHMLVSMPANIPRSMLIMVSQSAYDKF

SEQ ID NO: 163456 - protein, 33 aa, Glycine max
  Clone ID: PAT_MRT3847_11861C.1.pep
PFVKKKVKRSARYYSPGWRTWAAVSGLLALCKN

SEQ ID NO: 163457 - protein, 56 aa, Glycine max
  Clone ID: PAT_MRT3847_118620C.1.pep
LDLICVHEFKSIISLFVSSNQKLLVDFKSSKQQRNTLKSFDFSFHFETYCGVRCLS

SEQ ID NO: 163458 - protein, 60 aa, Glycine max
  Clone ID: PAT_MRT3847_118621C.1.pep
LLLNQFPILNNLIILKSLQFPYFILLGLNPFFPNPFKLFKPPPFSFFNIFFYPNFNFHPP

SEQ ID NO: 163459 - protein, 362 aa, Glycine max
  Clone ID: PAT_MRT3847_118622C.1.pep
AYTCKKNSQQPNQQAGIGTNNPQIPPPLQPSPPSSVTTGIGGSDYIQGSIRPGSMADRARMAKIHQPDAALKCPRCESTNTKFCYYNNYSLSQPRHFCKTCRRYWTRGGALRSVPVGGGCRRNKRNKGNSARSKSPMKPSASANSSSSGCTPDHVMMTHLPTPITPTQFPFLASLHHYNGDYVSGGIGSHFGAITTPLVARNNGNNTSDVEFQIGTSSASSLGNISGGAMLSNNGLGDQQWRFNNLQQVQHQFPFLSTNFEPQIGVFQFGGGENNNAEPPSYAKGHGGRFNNIRSKMDSINSSVSGIVPQLNTIKLEENQGLSLSKNLLMTSSGNGVLWNNGSSGNAWSEVPSFIPSPNHLL

SEQ ID NO: 163460 - protein, 82 aa, Glycine max
  Clone ID: PAT_MRT3847_118623C.1.pep
MVLISGNNKSILHQTNDERAKAQGVTVLQNSHPQGNKNVESGRTQNAVSTGLTKAITTMDEFKCGFPSKGLSTTSNKWWGNT

SEQ ID NO: 163461 - protein, 154 aa, Glycine max
  Clone ID: PAT_MRT3847_118624C.1.pep
MAYAAMKPTKAGLEEPQEQIHKIRITLSSKNVKNLEKVCADLVRGAKDKRLRVKGPVRMPTKVLNITTRKSPCGEGNFIFYLLLACFLHSNQNYSFIILFMYTYPTTSCCHTFTQRTGCCQIFLISGLLNIQTHTSERAIISVKHSNYLFSDSG

SEQ ID NO: 163462 - protein, 48 aa, Glycine max
  Clone ID: PAT_MRT3847_118625C.1.pep
KRCVQNPMDKVLVIYFKAVKSHSSRCNFHFQYAMWIHSGSSAESRLLS

SEQ ID NO: 163463 - protein, 123 aa, Glycine max
  Clone ID: PAT_MRT3847_118626C.1.pep
MNRNAHNKEEKGCCYFHPKQVVVGVCPLCLNERLLILAAKQDHHNHHHRLQSSTQRKASASIHKIFAFGSLFTRHQLKSHNYYDQDDASPSPEGKTLFYSLMPAFSIVKFSYPCYFYSSSVYA

SEQ ID NO: 163464 - protein, 101 aa, Glycine max
  Clone ID: PAT_MRT3847_118627C.1.pep
EKVKKVGRSEDNNMPTVWFSLKRSLHCKSEPSDVHDPKTRKQLATILTKKGGSSRSGCSRSIANLKDVIHGSKRHLEKPPSCSPRSIGSSEFLNPITHEVI

SEQ ID NO: 163465 - protein, 118 aa, Glycine max
  Clone ID: PAT_MRT3847_118628C.1.pep
MCKGAEGEKQHGFCSSFLHKESATRSAICCELCGLQASLYCQADDAYLCKKCDKRVHEANFLALRHIRCFLCNTCQNLTRRYLIGASLEVVLPANINWTIRNLLNNRGIYRKCSRMHN

SEQ ID NO: 163466 - protein, 186 aa, Glycine max
  Clone ID: PAT_MRT3847_118629C.1.pep
MVSAAAFYIKRVQPEVLYVVSYVGYRLHCIAKLMMPNLFKKLPSSKLDYYYYYYHYPIELLKMCKGAEGEKQHGFCSSYLHKECATRSATCCELCGLQASLYCQADDAYLCRKCDKRVHEANFLALRHIRCFLCNTCQNLTRRYLIGASIEVVLPANINWTIGNLPSNRGIHRKCSRMHNNLSLLL

SEQ ID NO: 163467 - protein, 42 aa, Glycine max
  Clone ID: PAT_MRT3847_11862C.1.pep
TMSPSHAKLADIFHTPLLILWVISFTDYHFQSMYGSLCHVIR

SEQ ID NO: 163468 - protein, 75 aa, Glycine max
  Clone ID: PAT_MRT3847_118630C.1.pep
QRGGFEKKIFYAQGKLKMSFDSTPLVFFARMRLLQRLSKKFVFKKLVKNVFSGFFLYYGGDLYSLNDCYKPPQVL

SEQ ID NO: 163469 - protein, 88 aa, Glycine max
  Clone ID: PAT_MRT3847_118631C.1.pep
MISQCRMFRLQLIGLSPLRKDLPGLTYILQHNAGPDCTHVFLPIHSIHSKQPLQDYRIGELTTTSYNNISSSSHPFVHESSYIIPTTP

SEQ ID NO: 163470 - protein, 95 aa, Glycine max
  Clone ID: PAT_MRT3847_118632C.1.pep
IHPDHDDEAPYRPLVPENYAYSDKGIAQHTISVMHSKPPKRRRSCCCRFMCWTLSILLILIIAIAITIRMLYLSVRPKLRICSMDQLRISSVNVS

SEQ ID NO: 163471 - protein, 62 aa, Glycine max
  Clone ID: PAT_MRT3847_118633C.1.pep
TYEELYYSLHFACTLNVETARDLKHYTCRIVLTLLLPVAFNPPKHNLTIRGRLRNHFPSIHF

SEQ ID NO: 163472 - protein, 48 aa, Glycine max
  Clone ID: PAT_MRT3847_118634C.1.pep
QFRKEISAHLSQNKHVTISHILVHYPALDPIYMVRECLIIYRLNLLGL

SEQ ID NO: 163473 - protein, 112 aa, Glycine max
  unsure (1)..(112): unsure at all Xaa locations
  Clone ID: PAT_MRT3847_118635C.1.pep
MGYLKTELSSSSQHHAAEETPVSAGGLQQTGTLIYGNASSPGKRSAMEDLTETXTDGADGEHADPSRAGDGHGAALADADRKQNLSSKPNSHTKYETDAKSAIADAYHHTDC

SEQ ID NO: 163474 - protein, 222 aa, Glycine max
  Clone ID: PAT_MRT3847_118636C.1.pep
ARGKKWVPTYMGDAFLAGMSTPQRSESMNFFFDKYIHKKITLKEFVKQYGIILQNRYDEEAIADFDTLHKQPALKSPSPWEKQMSTVYTHAIFKKFQVEVLGVAGCQSRIEAGDGTIAKFIVQDYEKDEEFLVTWNELSSEVSWFCRLFEYKGFLLRHALSVLQRCGCSCVPSHYILKRWTKDAKIKELMADRTRRTQTRVQRYNDLCKRAIDLSEKGSLSE

SEQ ID NO: 163475 - protein, 36 aa, Glycine max
  Clone ID: PAT_MRT3847_118637C.1.pep
SQVGCRIGRESFQAVPTQVVNTPCYHLHRFPSVSRH

SEQ ID NO: 163476 - protein, 471 aa, Glycine max
  Clone ID: PAT_MRT3847_118638C.1.pep
MASPGSHIVVLAFVLLISSKLAECHNIVRFLPGFQGPLPFLLETGYVEVGETEAEEHAELFYYFIESENDPKGNPLLLWLTGGPGCSAFSGLVFEIGPLTFKNEEYNGSLPNLTLKPQSWTKVSSIIFVDLPAGTGFSYPKTERAVQQSSSKLVRHAHQFIRKWLIDHPEFLSNEVYIAGDSYCGIPVPVIVQEISNGNEGGMQPWIYIQGYLLGNPITTSTEKNYEIPFNHGMALISDELYESLQKNCRGEYRNIDPRNALCLRDMQSYEESISGIETGHVLAPLCDESDLRNDMEVTWRRSSLAHKTSAFFSPRLTLPPLYCRSHAYVLCSYWANDDNVRKALHVRKGSIGKWTRCNDDLKSKFNADIPSSFQYHVNLSRKGYRSLIYSGDHDMVVPFLATQAWIRSLNYSIVSDWRQWYYDGQVAGYTRTYSNRMTFATVKGGGHTAPEYKPEECLAMFSRWISNMPL

SEQ ID NO: 163477 - protein, 299 aa, Glycine max
  unsure (1)..(299): unsure at all Xaa locations
  Clone ID: PAT_MRT3847_118639C.1.pep
SPTYNFSPVCRFGVGALGGVCRGFLPCARRTAALRRSSWARRGSCLALHVACLIYDFLPNGTNMFHFLNXSAGTQQNSISWSKRYKIIEMIARGVLYLHEYSRLKIIHRDLKPSNILLDEHMNPKISDFGMARIVEIDQDRGKTKRIVGTWGYMSPEYIMFGQFSEKSDVFSSGVMVLEIITGKRNINSHASPYMSNGLLSHVWRQWKDHTPLSILDPILKESYSQIEVTKCIQIGLLCVQENKNNRPTMTKVVSYLDGHTLLPSPLKPAFFLLDKIHQNIATQHISVNEMSISTYCAR

SEQ ID NO: 163478 - protein, 167 aa, Glycine max
  unsure (1)..(167): unsure at all Xaa locations
  Clone ID: PAT_MRT3847_11863C.1.pep
PRVRQNPVLGLVYVLIACFLSGFAGIYFEKILKGSEVSXWLRNIQLSSLSIPFGILFIAVKEGSDVLEKGILHGFDSVVWLSVLLQAIGGLVVAVVIKYADNILKAFATSLSIVVATIASILLLGTEPKLMFFLGATFVITAVVFYGVFPYREKEEITREKGGQRNS

SEQ ID NO: 163479 - protein, 81 aa, Glycine max
  Clone ID: PAT_MRT3847_118640C.1.pep
IPQQLGTALLIKTRGEKKKKQNPGGPIYMRLGPLKISTLYGGLLNIKGVQGAMPRVLNIIKLMLIIVISTTKGLIHPWGEL

SEQ ID NO: 163480 - protein, 304 aa, Glycine max
  Clone ID: PAT_MRT3847_118641C.1.pep
MLEGHQLLGFGFFVIGLWHLFNHIKLHALSSKSYTSTLWFPTTISRYLELHFIMASCTIFIAMELFIAPIHHQPLDPDGTIPTTHLHNFEHSSMAMAFLVYAIFAIVLDRIKCTKAQHELTHLLGAIAFTQQFLLIHLHSRDHMGPEGQYHFLLQLLIIISLSTTLMGIGFPKSFLVCFVRSVSIIFQGVWLMVMGFLLWTPGFQAKGCSMHLDESDEYVVRCSDHESLHRAISLVNIQFSFLLILVTIFAMSFYLILVRRYGGEKVEYVFLTKEEHYREEDGFVKPNNDVESQSQEKSMQEQI

SEQ ID NO: 163481 - protein, 310 aa, Glycine max
  Clone ID: PAT_MRT3847_118642C.1.pep
MLEGHQLLGFGFFVIGLWHFFNHIKLHALSSKSYSSTLWFPTKISRYLELHFIMASCTIFIASELFIAPIHHQPLDPDGTIPTTHLHNFEHSFMAMAFLVYAIFAIVLDRKCIKAQHELTNLLGALAFTQQFLLIHLHSRDHMGPEGQYHFLLQLLIIISLSTTLMGIGFPKSFLVCFVRSVSIIFQGVWLMVMGFLLWTPGFQAKGCFMHLEESDEYVVRCSDDESLHRAISLVNIQFSFLLIVVTIFGMSFYLILVKRYGEKVEYVFLTKEEHYGEEDGFVKPKVTIHLDNNIHVESQSQEKSMREQI

SEQ ID NO: 163482 - protein, 111 aa, Glycine max
  unsure (1)..(111): unsure at all Xaa locations
  Clone ID: PAT_MRT3847_118643C.1.pep
GKTAPATPPARAKKRPPRGRASXERHTXSPQDGEPRNPARTKAKTXAXKPNPRXEARSREXPKRTGXHGETXSATGRTATPKQDAQGTTEGATPPQEXAPRTHXXANPQNP

SEQ ID NO: 163483 - protein, 83 aa, Glycine max
  Clone ID: PAT_MRT3847_118644C.1.pep
HLFFTPAKDNLFFKMKNGETIAPVPNFARQPVSSNQSTLTLVSVAHYTDMLVLRFVHREKAFTAWKRAPTAVPFCGEKLTAPV

SEQ ID NO: 163484 - protein, 281 aa, Glycine max
  Clone ID: PAT_MRT3847_118645C.1.pep
MTASGLSGCPTRCPQLPFHPMGSRHARVMAFSVAGRNKQGIAFRQVERTSFLSPILKCNRQLQLVKSAMDASYGDMSNDSAAVFPRINVRDPYKRLGISKEASEDEIQGARNFLIQKYAGHKPSVDAIESAHDKIIMQKFYERKNPKIDIKKKMREVNQSKFVQAVRGRFQTPSTKFIIKTSIAFLVLGVLTVLFPTEEGPTLQVAISLIATIYFIHERLKSNIRASLYGVGAFGISWLLGTFLMVSVIPPITILKGPRAFEVISSLITYVLLWVSSTYLR

SEQ ID NO: 163485 - protein, 144 aa, Glycine max
  Clone ID: PAT_MRT3847_118646C.1.pep
MEFFLGLCGVLVAFSAALCLLLLLILTFYWVVFPNQTLKKLKKCGLGGPTPSFPLGNIEEMKRKNNIQSSIVSSNFSHDIHSSVFPYFSSWQKSHGKVFVYWLGTEPFLYVAEPEFLKKMSTVEMAKKWGKPSVFRTDRDPMFG

SEQ ID NO: 163486 - protein, 85 aa, Glycine max
  unsure (1)..(85): unsure at all Xaa locations
  Clone ID: PAT_MRT3847_118647C.1.pep
SSDTIDNVKAKIQDKEGIPPDQQRLIFAGKQLEDGRTLADYNIQKESTLXLVLSXXGGIIEPSLXXXLARXYTKTRMXCRNALPR

SEQ ID NO: 163487 - protein, 60 aa, Glycine max
  Clone ID: PAT_MRT3847_118648C.1.pep
NLPAIYYSNKIKDGNKKLPRVHIYIDIYTHAQKKRELSHPYGSLEVLPHLGVLNLLKPSH

SEQ ID NO: 163488 - protein, 46 aa, Glycine max
  Clone ID: PAT_MRT3847_118649C.1.pep
VCQGNNLRQSIWPRSRCHDFPKGLLVAHMFWIIFIYQCQDSSVRSQ

SEQ ID NO: 163489 - protein, 95 aa, Glycine max
  Clone ID: PAT_MRT3847_11864C.1.pep
VGGRKKQKGEGRVYLGIETKFQGGGQKKTQKRNHALGGNLDIIRNIGKRTSLPIRRKQKRTQRGPYYRRRDNFTLIKKKRLLRKKRAAGKPRYIF

SEQ ID NO: 163490 - protein, 43 aa, Glycine max
  Clone ID: PAT_MRT3847_118650C.1.pep
AKLQIFQKEIHFEYCLWHWGWLLRGIPFMKCFQMSYLFVQCLP

SEQ ID NO: 163491 - protein, 195 aa, Glycine max
  Clone ID: PAT_MRT3847_118651C.1.pep
MSEEKHQKHHDTLSSSSSTPTCYFSSSSSSSSPGESEEELQHMLLVPPLWKNKKRLSKQLSMCEKPRDIAWERRRMQERRRSSTVCDDLTDEDLHELKGCIELGFGFNEEDGQRLCNTLPALDLYFAVNRRLSPSPVSTPQSRASSLGCRSSSFGSPRSDADSWKICSPGDDPEHVKTKLRHWAQAVACSVMQSS

SEQ ID NO: 163492 - protein, 41 aa, Glycine max
  Clone ID: PAT_MRT3847_118652C.1.pep
FVSSIFKLIYYIFGRSKKKKKANRLINKEKSNILLSTQSHG

SEQ ID NO: 163493 - protein, 84 aa, Glycine max
  unsure (1)..(84): unsure at all Xaa locations
  Clone ID: PAT_MRT3847_118653C.1.pep
PPPPPQPPPPPHPPPASNSHPPPTPPPXSHRVKDPPIPPPHGSLSCCPPQGATPPERVSGHSFWRRQKEATQKAWKKRRPQPPL

SEQ ID NO: 163494 - protein, 200 aa, Glycine max
  Clone ID: PAT_MRT3847_118654C.1.pep
MRHPFRPTRPVTYNSLIDGLCKSGKITSALDLMNEMHHRGQPADVVTYTSLLDGLCKNQNLDKATALFMKMKERGIQPTMYTYTALIDGLCKGGRLKNAQELFQHLLVKGCCIDVWTYTVMISGLCKEGMFDEALAIKSKMEDNGCIPNAVTFEIIICSLFEKDENDKAEKLLHEMIAKGLLGFRNFHGEHQCLLRLIGS

SEQ ID NO: 163495 - protein, 64 aa, Glycine max
  Clone ID: PAT_MRT3847_118655C.1.pep
LIPSLFFSASALDLANTTFSYFSRCMVSTSLVLYANMVLLVYSSTFGILVEVYICSFVLVTSSI

SEQ ID NO: 163496 - protein, 73 aa, Glycine max
  unsure (1)..(73): unsure at all Xaa locations
  Clone ID: PAT_MRT3847_118656C.1.pep
LNTFLGRLTKGHXTNTVFFTFNKVNPVQPNIMLQKDACISSCGELQLTKGGSNCVPTSGTIGRALYACPRQIW

SEQ ID NO: 163497 - protein, 310 aa, Glycine max
  unsure (1)..(310): unsure at all Xaa locations
  Clone ID: PAT_MRT3847_118657C.1.pep
TTQETALYDRQIRVWGADAQRRLSKSHVLVYGMKGTVAEFCKNIVLAGVGSLTLVDDRAATEEMLSSNFLIPPDENVYSGKTLANLCCNSLRVFIAMVHVYHFVVLFXSLDLEFLSKFDELNLSLMRRIMIIERKKRMKILYDFMHLNDSMIXGEIFCGVQHYKYSKKKXDISVVDDLKXAYVEDALSVSWRELHRRMSKQYDARREIELETIAEGRSTGEVSIADFSGLLKLKKEICTAQSLNESQVPDSLLKRLVTNATEFPPVCAIIGGILGQEVIKAISGKGDPLKNFFFFDAFDGKGIIEDISPK

SEQ ID NO: 163498 - protein, 321 aa, Glycine max
  Clone ID: PAT_MRT3847_118658C.1.pep
MDGDGEELTAQETALYDRQIRVWGADAQRRLSKSHVLVYGMKGTVAEFCKNIVLAGVGSLTLVDDRAATEEMLSSNFLIPPDENVYSGKTLAELCCNSLKDFNPMVHVSVEKGDLSSFDVEFLSKFDVVVVSCCTLSAKKLANDKCRKLSKRVAFYAVDCRDSCGEIFVDLQDYKYSKKKQDETVECDLKYPSFEDALSVPWRALHRRMSKLYYAMRVIEKFEEAEGRSAGEVSIADLSGVLKLKKEICTAQSLNESHVPDTLLERLVTNAIEFPPVCAIIGGILGQEVIKAISGKGDPLKNFFFFDAFDGKGIIEDLSPK

SEQ ID NO: 163499 - protein, 87 aa, Glycine max
  Clone ID: PAT_MRT3847_118659C.1.pep
NGQRPLKSFGLPPVGRKSIITIPGEDKNFDRAPPPMGGPQKNPRNRPQKGAPFLKKKSPPRGPPPKKWPPHRGEGPPPFRGKKRGGG

SEQ ID NO: 163500 - protein, 39 aa, Glycine max
  Clone ID: PAT_MRT3847_11865C.1.pep
YWVPEDLRRDERKLCTHVWFIRTYLQVLSFSRTHSGAMK

SEQ ID NO: 163501 - protein, 71 aa, Glycine max
  Clone ID: PAT_MRT3847_118660C.1.pep
FPGPTTPFRPPVRLTPTLLPINTIGIREWTNLYSLTATPLLFFFYFNNTTLKPNLTLFLGAIPPFRPFSLP

SEQ ID NO: 163502 - protein, 49 aa, Glycine max
  Clone ID: PAT_MRT3847_118661C.1.pep
LVLLPSISPSIIFRWPKAAGYRCEWLMLGHSCAFPGRKKIKQTKGQCFN

SEQ ID NO: 163503 - protein, 40 aa, Glycine max
  Clone ID: PAT_MRT3847_118662C.1.pep
ARDDPERVICHVISPSYSILNGVKALEHTCLVSLVLEFWN

SEQ ID NO: 163504 - protein, 153 aa, Glycine max
  unsure (1)..(153): unsure at all Xaa locations
  Clone ID: PAT_MRT3847_118663C.1.pep
RKKPSIALSGCMXIKEXNIKHENKIKSDQRSIXLSTNSINMYHDDCDIYHGNLNVEGMGNSFKKTSLKTMKXTDGSSERKSYXTTGGETAKTGSNGEIILKWSPSELSVMNPNKKTSGXNDVGYRLIPXIPTHRVLTDNEYARIHSAWSNWNI

SEQ ID NO: 163505 - protein, 79 aa, Glycine max
  unsure (1)..(79): unsure at all Xaa locations
  Clone ID: PAT_MRT3847_118664C.1.pep
LWVXCLSRSLLYGRTYATSSLLFSAPSILSMPWPYQPRACRTPSRSHLIPLCQIPLSPRGSKPMGPPPVALPDPARHTS

SEQ ID NO: 163506 - protein, 121 aa, Glycine max
  unsure (1)..(121): unsure at all Xaa locations
  Clone ID: PAT_MRT3847_118665C.1.pep
IRGGREKPHRFSKSKKKVGIPWLEIAAGGYKTPGGQSVIEILVKHPLEKVARFSARQRSPVGKQWVSKREHETGGNQGKSVNGKLVVNVLEWVQEKKAGEKISIRLFVGAMGXRLAQQWFG

SEQ ID NO: 163507 - protein, 137 aa, Glycine max
  Clone ID: PAT_MRT3847_118666C.1.pep
KVVLFQIGEIISRFERKGFYLKGLKLVTVDRPFAEKHYADLSAKPFFSGLVDYIVSGPVVAMIWEGKNVVTTGRKIIGATNPAQSEPGTIRGDFAIDIGRNVIHGSDSVESANKEIALWFPEGPANWQSSQHSWIYE

SEQ ID NO: 163508 - protein, 149 aa, Glycine max
  Clone ID: PAT_MRT3847_118667C.1.pep
MAEQTFIMIKPDGVQRGLIGEIISRFERKGFYLKGLKLVTVDRPFAEKHYADLSAKPFFSGLVDYIVSGPVVAMIWEGKNVVTTGRKIIGATNPAQSEPGTIRGDFAIDIGRNVIHGSDSVESANKEIALWFPEGPANWQSSQHSWIYE

SEQ ID NO: 163509 - protein, 83 aa, Glycine max
  Clone ID: PAT_MRT3847_118668C.1.pep
LSYDQSNFLICREFIYSYTLVFNCCLLQHAATFPLDLVRRRKQLEGAGGRARVYNTSLFGTFKHIIQNEGVRGLYRGILPEYY

SEQ ID NO: 163510 - protein, 55 aa, Glycine max
  unsure (1)..(55): unsure at all Xaa locations
  Clone ID: PAT_MRT3847_118669C.1.pep
RVASIDTQSCPVHMLSGKYDWSITPXDVAVXAAKIPGAMHKTMPGLGHFRATENP

SEQ ID NO: 163511 - protein, 76 aa, Glycine max
  unsure (1)..(76): unsure at all Xaa locations
  Clone ID: PAT_MRT3847_11866C.1.pep
GSSDAPRAVFTSIVCXANHTVVMVGIAQTDAYVGDEGQSRTGIVTIKYPIAHGIAMEWDDMEKIRRHTFCNELMVA

SEQ ID NO: 163512 - protein, 186 aa, Glycine max
  unsure (1)..(186): unsure at all Xaa locations
  Clone ID: PAT_MRT3847_118670C.1.pep
MNMEGSYDSSCNGEAGNESLQIIKYSPYKPCTMISLSSPWFVLRVFYVRVCGIQVDESTPEFLSLNHIPLSPDTLLEVNGVRSSIYSDGEESSVLRRDRVDKKSEEATFVNTDSIRFTGSMKFEVYDKENCILSGVLETSNSNGFVGESRSGVKRWSMNCQTEMSPGXGFFKGKHVAVPELPCPEI

SEQ ID NO: 163513 - protein, 312 aa, Glycine max
  Clone ID: PAT_MRT3847_118671C.1.pep
MIYHAMEKLVSKSLQIIKYSPYKPCTMISSSPWFDLRVFYVRVCGIQVDESTPEFLSLNHIPLSPDTLLEVNGVRRSIYSDGEESSVLRRDRVDKKSEEATFVNTDSIRFTGSMKFEVYDKEHCILSGVLEMSNSNGFVGGSRSCVKRWSMICQTEMSPGCGFFKRKHVAVPELPCPEIEVYVAGCFSGTPIILTKTLQLNCRKKHNRKCALDSIPEYETTECQKDVSDHGLDLQVVDCRSFKLEQEEDYNSMYWPRTVYVDGEDGELSWFNAGVRVGVGIGLGIFVGVGIGVSLLGRSYQATIRNFKRRFI

SEQ ID NO: 163514 - protein, 443 aa, Glycine max
  Clone ID: PAT_MRT3847_118672C.1.pep
MRFCPCFGSEEAKGVADRDPVLLVSGMGGSIVNSKPKKFGFTTRVWVRLLLADVEFRNKIWSLYNPQTGYTETLDKKSEIVVPDDDHGLYAIDILDPSWFTKCIHLTEVYHFHDMIDMLVGCGYNKGTTLFGYGYDFRQSNRIGKVMEGLKSKLETAHKASGGRKVNLISHSMGGIMISCFMSLYRDVFTKYVNKWICLACPFQGAGSSINDSLLTGLEFVDGFQSYFFVKRWTMHQLLVECPSIYEMLANPYYEWKKQPEILVWRKHTKDGDNNINLESYGPTQSISLFEEALRDNEVNYKGKTISLPFNFDILDWAVETRQLIANAKLPDGVCFYNIYGTSLDTPFDVCYGSENSPIEDLSEICHTMPLYSYVDGDGTVPSESAKGDGLEATERVGVAASHRGILRDETVFQHIQKWLGVEPMVGKHSKTSKVADAQPMVL

SEQ ID NO: 163515 - protein, 48 aa, Glycine max
  Clone ID: PAT_MRT3847_118673C.1.pep
ALRRVRLSYNDRQITDGLRWLQDSFYARKDDLARLRKRKTGQCECWMM

SEQ ID NO: 163516 - protein, 139 aa, Glycine max
  unsure (1)..(139): unsure at all Xaa locations
  Clone ID: PAT_MRT3847_118674C.1.pep
MRFCPCFGSEEAKGVADRDPVLLVSGMGGSIVNSKPKKFGFTTRVWVRLLLADVEFRNKIWSLYNPQTGPCLTLLLLLPHHPMHFNFSVQSSFSSKIGTAFHXYTETLDKKSEIVVPDDDHGLYAIDILDPSWFTQCIH

SEQ ID NO: 163517 - protein, 47 aa, Glycine max
  Clone ID: PAT_MRT3847_118675C.1.pep
PPPFSPWLGISEGDLEKEEGKANGGPILLRGPETPGWLNLILLYLHP

SEQ ID NO: 163518 - protein, 43 aa, Glycine max
  Clone ID: PAT_MRT3847_118676C.1.pep
SRCHKYHKTGPLIMWLVFIGKSREETSSFRSRGNSIYYNSIHY

SEQ ID NO: 163519 - protein, 108 aa, Glycine max
  Clone ID: PAT_MRT3847_118677C.1.pep
GSSTSVHGASGFSATDLDRGLGDVRVMAMIHWTAFALANLATMGRRAAYFTVTAHCLDLGRDVEVDQSYHEDGPEYSPPLSGEGACWHGMNPGGRQLSWLHDGACGKC

SEQ ID NO: 163520 - protein, 53 aa, Glycine max
  Clone ID: PAT_MRT3847_118678C.1.pep
EKKIDVVRVCEKCAPHICGGSDSYVINPKYLVENGYYFLAPRDVRKRVRLDSK

SEQ ID NO: 163521 - protein, 34 aa, Glycine max
  unsure (1)..(34): unsure at all Xaa locations
  Clone ID: PAT_MRT3847_118679C.1.pep
MTVNIKTLNTQTQNQRFLMSXMLSWAMASVLPLL

SEQ ID NO: 163522 - protein, 63 aa, Glycine max
  Clone ID: PAT_MRT3847_11867C.1.pep
FKFESSASPMLLPTVHTVTTTVQVLTKHFGAVCGSAHDVPGSDGSERCPDDQIRCNSHHHHAR

SEQ ID NO: 163523 - protein, 119 aa, Glycine max
  unsure (1)..(119): unsure at all Xaa locations
  Clone ID: PAT_MRT3847_118680C.1.pep
EAWQCHXYNMQPLIMDTVYRAQYSXEGKSACWKLAEGAHNKTGFDTIPEERGATANEYIHGEQYKSYCKTANQQAYFYARDRELHSKDTKAYSRDGAGPCNIPYYKKHGYGVEKFNSTS

SEQ ID NO: 163524 - protein, 268 aa, Glycine max
  unsure (1)..(268): unsure at all Xaa locations
  Clone ID: PAT_MRT3847_118681C.1.pep
MHPKMAASIVASSSSFSSILTTQFLTPSSFSSLFLKTLTLRSSTPFQRLSFASQPLRRLMARATLGLTLPANTESLKVSFAAKELDVAEWKGDLLAVGVTEKDVARNVESRFENAILSALDSKLGGLLGQVSSEEDFSGKLGQSTVLRIASGLGFKRVALLGLGASASTTSAFKSLGEXAVAAAAKSAQAGHVAVALASPDALSTESKPKTASAIASGTLLGTFEDNRYKSESKKSGLNSVDIIGLGTGPELEKKXKYAADISSGIIL

SEQ ID NO: 163525 - protein, 575 aa, Glycine max
  unsure (1)..(575): unsure at all Xaa locations
  Clone ID: PAT_MRT3847_118682C.1.pep
MAHQRRRQHYYQRFRHMIPVFSAVAAALFFLFALLSFLAPSPVETDRIHRRRQHTSVNVQKDEAIENSAFRVPSDGGKLGRNIWSSRNSEHFYGCSNSSNKFQKAQVITQPNRYLMITTSGGLNQQRTGITDAVVAARILNATLVVPKLDQRSFWKDSSNFSEIFDVDXFISFLSKDVKIIKQLPTKGSRKALSAYNMRVPRKCNERCYINRILPVLLKKHAVQLIKFDYRLANRLDXEYQKLRCRVNYHALRFTNPILAMGEKLVHRMRMRSKHYIALHLRFEPDMLAFSGCDYGGGEKEQKELGVIRRRWKTLHKSNPDRARRQGRCPLTPEEVGLMLRALGYGSDIHIYVASGEVYGGKRTLAPLRALFPNFHSKETIATKEELEPFSSFSSRMAALDFIVCDESDVFVTNNNGNMAKILAGRRRYFGHKPTIRPNAKKLYRLFLNRSNSTWEAFASSVRTFQKGFMGEPKEVRPGRGGFHENPSTCICEDSAAAKVDKNSQSRKYRKDNTTKKNVANDELDVGNVSEWPDMDDDDDDDQNDLAEKGTFNETISDYDALTSXDPELEEIISD

SEQ ID NO: 163526 - protein, 60 aa, Glycine max
  Clone ID: PAT_MRT3847_118683C.1.pep
SDSDSCAQPSRIKGRCRCCSRLISPTTPAFRALVSLSYSRSIFQCSFTIKSMSRLCDSGP

SEQ ID NO: 163527 - protein, 72 aa, Glycine max
  Clone ID: PAT_MRT3847_118684C.1.pep
PHTSPHEFGLALQFVVHYHSYFKHLTMTSLKFNMTLTTMHTIIIPHPHHHLNLNHLHKSQIYLLPLISKHKA

SEQ ID NO: 163528 - protein, 41 aa, Glycine max
  Clone ID: PAT_MRT3847_118685C.1.pep
ARRVDGRKSLERVDLRYMVLPVPSELTLNYPFNIINFSPGP

SEQ ID NO: 163529 - protein, 73 aa, Glycine max
  Clone ID: PAT_MRT3847_118686C.1.pep
EFRSYNPQFDPMKDRHLKKRIKRLKDMVEPDKNCETRVEDVAWPCSLSESEIAWLMYSDHIGMANVCLLFQNV

SEQ ID NO: 163530 - protein, 144 aa, Glycine max
  unsure (1)..(144): unsure at all Xaa locations
  Clone ID: PAT_MRT3847_118687C.1.pep
XDLLCPTGXPSXDXCLXXGAXXTYVXXTLEXGFXXVXAXLELQVXLVXNGXXXXXPIIXFARGHXNTPAFVXQXVMVXXXXAYRXXSXRGQCXXRIYPXAXRXSIXKXKPPLNXANVGFXXVINARCMKXLYVMCDMPXFSSXL

SEQ ID NO: 163531 - protein, 298 aa, Glycine max
  Clone ID: PAT_MRT3847_118688C.1.pep
MSGSLGFFFVGLTLLLLVGVANAVANTSNKFDQLFQPSWAFDHFIHEGDLLKLKLDNFSGAGFTSKSKYMFGKVTIQLKLVEGDSAGTVTAFYMSSDGPNHNEFDFEFLGNTTGEPYSVQTNVYVNGVGNREQRLNLWFDPTKDFHSYSIFWNQRQVVFLVDETPIRVHTNMEHKGIPFPKDQPMGVYSSLWNADDWATQGGRVKTDWSHAPFIATYKNFEINACECPVSVAAMDNAKKCTSSEGNKYWWDEPNLAELNLHQSHQLMWVRARHIFYDYCTDTARFPVTPAECVHHRHT

SEQ ID NO: 163532 - protein, 112 aa, Glycine max
  Clone ID: PAT_MRT3847_118689C.1.pep
IYIYIYIYIYIYIYIYIYIYIYLIKMKIAAHAFTFFFFHLRTCCMCSTDFVHLSHSKSKTLPDHPMDSPWRLVACNGKASDFDSKSEHVILLYCLMFNLLEREGDIFTLNLV

SEQ ID NO: 163533 - protein, 35 aa, Glycine max
  Clone ID: PAT_MRT3847_11868C.1.pep
RHFVKIRYNSVNYGKNILRYYYFEQGMRFGLIIRV

SEQ ID NO: 163534 - protein, 297 aa, Glycine max
  unsure (1)..(297): unsure at all Xaa locations
  Clone ID: PAT_MRT3847_118690C.1.pep
MSRFFGFFFVGLTLMLVGVANAMANSSNKFDQLFQPSWAFDHFIHERDLLKLKLDKFSGAGFTSKSKYMFGKVTIQLKLVEGDSAGTVTAFYMSSDGPSHNEFDFEFLGNITGEPYSVQTNVYVNGVGNREQRLNLWFDPTKDFHSYSIFWNQRQVVFLVDETPIYAHTNMEHKGFHFPXDQPMGVYSSIWNADDWATQGGRVKPDWSHAPFIATYKNFEINACECPVSVAAMDNAKKCTSSEGKKYWWDEPNLAELNLHQSHQLMWVRARHIFYDYCTDTARFPVSPAECVHHRHN

SEQ ID NO: 163535 - protein, 47 aa, Glycine max
  Clone ID: PAT_MRT3847_118691C.1.pep
IEQKLIIQVRCISITSNIERSKYIARFVYSKRMEGNHDMFTLMNYPG

SEQ ID NO: 163536 - protein, 167 aa, Glycine max
  unsure (1)..(167): unsure at all Xaa locations
  Clone ID: PAT_MRT3847_118692C.1.pep
VSXEXXXADGPSHNEFDFEFLGNITGEPYSVQTNVYVNGVGNREQRLNLWFDPTKDFHSYSIHQKYNLTLIPEDRTPIRVHTNMEHKGIPFPKDQPMGVYSSIWNADDWATQGGRVKTDWSHAPFIATYKNFEINACECPVSVAAMDNAKKCTYNEGKKYWWDEPNL

SEQ ID NO: 163537 - protein, 151 aa, Glycine max
  unsure (1)..(151): unsure at all Xaa locations
  Clone ID: PAT_MRT3847_118693C.1.pep
MAPSKEEERRLMEHKDDSATKLGPAEKFFKAKLEVHFAFKKVETILYIGNFDSQVXNPKKPFHTLQAACEKLPNSSMYLKLLDAVLKTGNRMNVTTNHCDGHAFKLDTLLKLXDVYSADSKTTLLHLVVXKIIRTEGARTSRAKQTPSTNL

SEQ ID NO: 163538 - protein, 171 aa, Glycine max
  unsure (1)..(171): unsure at all Xaa locations
  Clone ID: PAT_MRT3847_118694C.1.pep
GMMIEFAKNMADYLAGSGKKHIVVLSSLDFGQWQKVDMSSGLQIYYLPSSNSNGTDENCEQLGWKKLQEYDPSQMHWKYLSDLAEGNVTVEDITSVEDELEEENYYASMPFAALFSFXQEGDNISDAFQLGDAVCKLLQLSHPTTGIEGGKWRVPLSWMSVYGPPPDVSIF

SEQ ID NO: 163539 - protein, 280 aa, Glycine max
  Clone ID: PAT_MRT3847_118695C.1.pep
MEFVPEEGKHLHEDCSTLILPALSIGNVGQLVADLLISSMGSERVGYLDDPNVLPCVGNDAYGPFPQGDLALPLEAYDSPSNALTIIQQRSPVVKGMMIEFAKNMADFLAGSGKKHIVVLSSLDFGKWQKVDMSSGLQIYYLSSSNSNGTDENCEQLGWKKLQEYDPSQMHWKYLSDLAEGNVTVEDITSVEDELEEENYYASLPFAALFSFLKAKGLKVTCLLCYCSEGDNISDAFQLGDAVCKLLQLSHPTTGIEGGKWRVPLSWMSVYGPPPDVSIF

SEQ ID NO: 163540 - protein, 37 aa, Glycine max
  Clone ID: PAT_MRT3847_118696C.1.pep
ASRAEIAHIDIDATDIGKNKQPYVSACAAERFSFKGI

SEQ ID NO: 163541 - protein, 76 aa, Glycine max
  Clone ID: PAT_MRT3847_118697C.1.pep
VPVVKMVSLVSPIMVNPRGFCAFRTNRRKNWKGYSRSLSLPSIITSVRMSFINIRVYTVDFYFLFFNGLNVYELFQ

SEQ ID NO: 163542 - protein, 54 aa, Glycine max
  Clone ID: PAT_MRT3847_118698C.1.pep
LTFSFIFFKGVKKEKPVFCCVLQQQSELNHRSQGCSGFTVLFNDYQVDSSRPQY

SEQ ID NO: 163543 - protein, 69 aa, Glycine max
  Clone ID: PAT_MRT3847_118699C.1.pep
NATLTHYADQCERESKNKKVYPRVPPPSPILDTIVRAFISFFFSLNLELNKELKKFQSDFKSYIKSYIV

SEQ ID NO: 163544 - protein, 96 aa, Glycine max
  unsure (1)..(96): unsure at all Xaa locations
  Clone ID: PAT_MRT3847_11869C.1.pep
LFWNLIYIGLLERSQPMYSXQAAGTVCHLTTXFAFHAXPPTXTCHLIAVLXHQTPACSXXEXEXLLVXAHXHSXAXQXCXXXXXQXLSLSSLLLXS

SEQ ID NO: 163545 - protein, 70 aa, Glycine max
  Clone ID: PAT_MRT3847_1186C.1.pep
CPILIQYAEDSTMNVGPMRDQATSAAMECLVNCKLHAVNTCKRDNTLLSVLGLRGQTKTFLDLVSMTKSD

SEQ ID NO: 163546 - protein, 129 aa, Glycine max
  Clone ID: PAT_MRT3847_118700C.1.pep
MLVQQHPSQQCNQALERNRACGVRSVRKPVHKRFSAADEKMTPKYLKHSIQSALPEKPDSQKKTKLEKDNRASMHNLTAPPPAKVSWVLSGPGGFWSPSLDDSIVPESEKLKWSEAFVLSIHNDGVTNS

SEQ ID NO: 163547 - protein, 55 aa, Glycine max
  Clone ID: PAT_MRT3847_118701C.1.pep
MFFVRSRTRSVQGIVPVSSYSVIMCAICSLRPTMLCCTKSLTLTSLRSPLIGIFS

SEQ ID NO: 163548 - protein, 334 aa, Glycine max
  Clone ID: PAT_MRT3847_118702C.1.pep
MASSTTPTLPLAVPQRHHSVSHRQVLFFAKFSNKVSLSSSVASKRSCKSKCFYAKVQNALNEEAVETQSSELEEDTQSTPSSSKLVGRVGGSGGVGQLVVASLLQQNIKSRLILRNPEKATELFGEQDKEKLQVFKGDTRKQEDLDPSIFEGVTHVICCTGTTAFPSRRWDDDNTPERVDWVGLKNLVSALPSSVKRVVLVSSIGVTKFNELPWSIMNLFGVLKYKKMGEDFLRNSGLPFTIIRPGRMTDGPYTSYDLNTLLKATAGQRRAVLIGQGDKLVGEASRIVVAEACVQALDLEVTENQVYEVNSVEGEGPGNEAKKWQELFEAANSR

SEQ ID NO: 163549 - protein, 131 aa, Glycine max
  unsure (1)..(131): unsure at all Xaa locations
  Clone ID: PAT_MRT3847_118703C.1.pep
GSRQGLVQRMPSVXFFFXHVLNNDYTHWMMYAIGGSSGPTILSQGNRFIAPNNNAAKLITHRDYAEPQVWKNWQWQSEMDLFINGAQFIPSGSPIKTTYKKGLLMKPRDGTHASRLTRNSGALNCIVGRPC

SEQ ID NO: 163550 - protein, 90 aa, Glycine max
  Clone ID: PAT_MRT3847_118704C.1.pep
SSRPPQAPRQQCLTTQTKQKVEASQRTMQEGELKGGGIEMIKSNYLSLLLLLSLIHYHHVATVSDDPFVGVNIGTDVSNLLPAPDLVNFL

SEQ ID NO: 163551 - protein, 71 aa, Glycine max
  unsure (1)..(71): unsure at all Xaa locations
  Clone ID: PAT_MRT3847_118705C.1.pep
MAAIEDLLELSDLMRQAMTLLPDEDDDESSNSXKTSTFLKIVALKNVAARECAVLNSLIRHPVLVEENLDG

SEQ ID NO: 163552 - protein, 189 aa, Glycine max
  Clone ID: PAT_MRT3847_118706C.1.pep
LGRTSKKKRCLPTLTHFTDLPFEHNHQQHSNTDAEDGAHVPDATQLANEFQAQGDKLAMDGKYREALGKWEAALALAPDVPVVHEQKAQVLLETGDAWNALKAATRATELDPSWAEAWVTLGRAQLNFGEPDNAIESFDRALALKPDYEEAQDDRKTASRLVKKRKQLHSSGLSATQNRYMVGEKDESP

SEQ ID NO: 163553 - protein, 66 aa, Glycine max
  unsure (1)..(66): unsure at all Xaa locations
  Clone ID: PAT_MRT3847_118707C.1.pep
VSLTQLYQLLINLFYRKYCQLKKKKKKXXXXXXXXXXXKKKKKKKKKKKKKKKKKKKKKKKKKKKK

SEQ ID NO: 163554 - protein, 112 aa, Glycine max
  Clone ID: PAT_MRT3847_118708C.1.pep
PHWNPYLAVNIKGTFIGGFPPTLGLPPGLVLNHPVGASTIPNLGWPALAKAGNAGGSMEERPQGNSIIGMGASLLAVVFALTFLGPALVLVDGSLSPEGPGLPLGLSTNPFV

SEQ ID NO: 163555 - protein, 39 aa, Glycine max
  Clone ID: PAT_MRT3847_118709C.1.pep
CTVQIATNYVFQNSVQVKNARCLEMNTLFFSNKTTASCC

SEQ ID NO: 163556 - protein, 102 aa, Glycine max
  unsure (1)..(102): unsure at all Xaa locations
  Clone ID: PAT_MRT3847_11870C.1.pep
XSXVRXLGIRLEXGFEXTQKGTTFXNXSXIXCSXXXFXXXVLLRYGKLXGXQVXVXICXAXXSAPMMXQXVSXNXXXXNLXPLLSXLMHMXMFPXXXCXXVR

SEQ ID NO: 163557 - protein, 54 aa, Glycine max
  Clone ID: PAT_MRT3847_118710C.1.pep
TNKCISYYYLSLNEQSSSSSLKLALFGAIDDDDDDDDDDDVSFCKLCVTSIRII

SEQ ID NO: 163558 - protein, 215 aa, Glycine max
  Clone ID: PAT_MRT3847_118711C.1.pep
MANMIVASTKPLVPVCTSSRSPTPKVPILQISLPKAPTLKLKLPISKPQMLSLLGGIAPLVLARPSLAEEIEKAALFDFNLTLPIIMVEFLLLMVALDKIWFTPLGKFMDERDAAIREKLSSVKDTSEEVKQLEEKANAVMAASRAEIAAALNTMKKETQAEVEQKIAEGRKKVEAELQEALAALENQKEETIKSLDSQIAALSQEIVNKVLPTA

SEQ ID NO: 163559 - protein, 143 aa, Glycine max
  unsure (1)..(143): unsure at all Xaa locations
  Clone ID: PAT_MRT3847_118712C.1.pep
HDVRIEYDACTIPNDSGSLVVAKDGNHKQNVGEHDAGSKGRLVYALLIPYVEPVVQAQRAEGYSDFXPVEDDSQEGSSHIGELKSGVYVPLPTKTNWMETPKEWQLDLPRDKTPRVLTTTEERLAGTEHEAYDPFLGGNTNMP

SEQ ID NO: 163560 - protein, 90 aa, Glycine max
  Clone ID: PAT_MRT3847_118713C.1.pep
APLSPPTSSKFVTHTANGSHKFVIEIYSMPKGIGVGKHIASDAFTVGGFHWAIYFYPACKNSEDNFIYVLRFILFASESTDVRALFELTL

SEQ ID NO: 163561 - protein, 47 aa, Glycine max
  Clone ID: PAT_MRT3847_118714C.1.pep
PPRGSCSYGAFFYAPRRGPEFRGGARVPFLLVNSPVTNVLMDIRAMS

SEQ ID NO: 163562 - protein, 59 aa, Glycine max
  Clone ID: PAT_MRT3847_118715C.1.pep
KNPQLGDLDVFLSVVDMNEGSLFLPHFNSKAIVVLVINEGEANIELDGIKEQHQRPHQE

SEQ ID NO: 163563 - protein, 74 aa, Glycine max
  Clone ID: PAT_MRT3847_118716C.1.pep
MRCGNYIIGISYSATGSCQVCSIDLPTPNKQKKTELPTLGGRYPICKISGRNRGRKKSGHNIVTGVFKYLRDSP

SEQ ID NO: 163564 - protein, 108 aa, Glycine max
  Clone ID: PAT_MRT3847_118717C.1.pep
MYYCCCPLTGLKRNGKSCRLRWVNYLRPDLKRGQITPQEESIILELHARWGNRWSTIARSLPGRTDNEIKNYWRTHFKKKAKSPSDAAEKARNRLMRKQQFRQLRLQQ

SEQ ID NO: 163565 - protein, 66 aa, Glycine max
  Clone ID: PAT_MRT3847_118718C.1.pep
PEKLPNLRKKLHRIFHLLLLQSITSYKGMPKAYTRVIQKSKPFRSENTSFSACFPFTPKTLLILCS

SEQ ID NO: 163566 - protein, 45 aa, Glycine max
  unsure (1)..(45): unsure at all Xaa locations
  Clone ID: PAT_MRT3847_118719C.1.pep
LQNSTNTCIPQSDLFLFLCFHVHLXRTHHCGXSQSKXVPIIISLS

SEQ ID NO: 163567 - protein, 95 aa, Glycine max
  Clone ID: PAT_MRT3847_11871C.1.pep
GCERTTKGGYRLAEVNRWARLKWKSDASTTSSWCGRERYKKRQNYDWGCELYSTNGGDYSTTPRAVWSPAYHKRYADLCSRTIMEREHVLDAFYQ

SEQ ID NO: 163568 - protein, 59 aa, Glycine max
  Clone ID: PAT_MRT3847_118720C.1.pep
QGIGRYWVSFHTPQGTPSQKWYHIPRSLLKSTGNLLVLLEEETGNPLGITLDTVYITSQ

SEQ ID NO: 163569 - protein, 78 aa, Glycine max
  unsure (1)..(78): unsure at all Xaa locations
  Clone ID: PAT_MRT3847_118721C.1.pep
MLRARFPLLLLGLDFLASVSVSFGIAYWDXEMPKHNKCLHRCNSERVSYRNQACHARXNLLKVEXEVCEDGEIPRPRP

SEQ ID NO: 163570 - protein, 60 aa, Glycine max
  Clone ID: PAT_MRT3847_118722C.1.pep
FSAQIIIQRSTVELQLGLWYVNLTPRNLQGCLYSVDNWSCIDPPLGIPEGSIVTMVCKLE

SEQ ID NO: 163571 - protein, 649 aa, Glycine max
  Clone ID: PAT_MRT3847_118723C.1.pep
LIARKPLFDCHNNVKMYMNTLTYLSSDAFSSIPSELVPDLQRMLSPNESSRPTAMDFTGSPFFRHDTRLRALRFLDHMLERDNMQKSEFLKALSDMWKDFDSRVLRYKVLPPLCAELRNVVIQPMILPMVLTIAESQDKNDFEQSTLPALVPVFSSAAGETLLLLVKHAEFIINKTSQEHLVSHVLPMIVRAYDDTDARLQEEVLKKSVSLAKQLDAQLVKQVVLPRVHGLALKTTVATVRVNALLCLGDMVSRLDKHAVLDILQTIQRCTAVDRSPPTLMCTLGVANSIFKQYGVEFVAEHLLPLLMPLLTAPQLNVQQFAKYMLFVKDMLHKIEEKRGVAVTDSGTPEIKLAPMVNGHQSEAMRTSSSSIPASTKSSSWDDEDWGPKPKGTASSIQNSIDVTSQSMAGNPVGQVTSLQKHLSLAALSAKQTTKPCPSVDVEWPPRASSGVTLQFGDTETQTIAAGTSSPSNLESDDPFADWPPRPNGSVSGGSGISNNGTLGMPLNKVGFNSMRSTSSNMGPQTSNSWPVNSQSSAESISLNSRNPISTMGSLNSGGLGQQKSLGFVKQGQAFPASIVSYNNVQSTATDLGSIFSSNRNEQIAPKLAPPPSTTVGRGRGRGRGAASTTGSSHTKSHAEQPPLLDLLW

SEQ ID NO: 163572 - protein, 130 aa, Glycine max
  unsure (1)..(130): unsure at all Xaa locations
  Clone ID: PAT_MRT3847_118724C.1.pep
MGSLMASLTLTLVLAIVSLSLCSQASADKYDYSSPPPPVYKYKSPPPPYKYSSPPPPPNNHYPXPSPPKPYXYPSPPPPHYVYASPPPPYXLLDSDFSIAPHGSEELVQIKEREEAPCSLYSEEWNLRNP

SEQ ID NO: 163573 - protein, 81 aa, Glycine max
  Clone ID: PAT_MRT3847_118725C.1.pep
CAPRCESSGQILLDWSQMKTEPHLERAERQLATHISIFNERLFQNEDKMMTFRAKQKLTELITRRLILEEMLQKVTHVEEK

SEQ ID NO: 163574 - protein, 264 aa, Glycine max
  Clone ID: PAT_MRT3847_118726C.1.pep
FALTTNQKTELASKTKMAETAVSLAGQQALPKILEAVKMLRDLPKEVRDITDELESFQDFINDADKVAEAEEDDGRRHRIKERVMRLREAAFRMEDVIDEYNISCEDKQPDDPRCAALLCEAVAFIKTQILLLQSAYKIQDVKSLVRAERDGFQSHFPLEQRQTSSRGNQDITWQKLRRDPLFIEEDEVVGLDGPRGILKNWLTKGREKRTVISVVGIAGVGKTTLAKQVYDQVRNDFECHALITVSQSFSAEGLLRHMLNELC

SEQ ID NO: 163575 - protein, 41 aa, Glycine max
  Clone ID: PAT_MRT3847_118727C.1.pep
YLHYVSPAPYCVRSLATINLCSASGEVGSDKQCLFSYALIS

SEQ ID NO: 163576 - protein, 44 aa, Glycine max
  Clone ID: PAT_MRT3847_118728C.1.pep
MRLRRHQNLFRQTILVHFNHSITISSFQFDRHLRLYLLHIRLHE

SEQ ID NO: 163577 - protein, 57 aa, Glycine max
  Clone ID: PAT_MRT3847_118729C.1.pep
YMSSCMLDIFFLLCTVFNLLISRLSIFNCVSNILLGLDMNLVLVSRGVRGILAKFRT

SEQ ID NO: 163578 - protein, 71 aa, Glycine max
  unsure (1)..(71): unsure at all Xaa locations
  Clone ID: PAT_MRT3847_11872C.1.pep
GNVARNECFDGWKNKPGRDGNARGGGQPTSERGAGDIDASTDELGNEPLXNDEARQPLDRKVSIASPKIKP

SEQ ID NO: 163579 - protein, 239 aa, Glycine max
  Clone ID: PAT_MRT3847_118730C.1.pep
MSCPVSVSMSVLYSICSLLWKHTQTLCLKNAQSDTNFICKCSQTMDQYIDQLVTLAEKLSELMSENLGLEKNYIKEAFSGTNGPAMGTKVAKYPQCPHPELVRGLREHTDAGGIILLLQDDQVPGLEFFKDGKWVEIPPSKNNAIFVNTGDQVEVLSNGFYKSVVHRVMPDKNGSRLSIASFYNPVGEAIISPANKLLYPSNYRYGDYLELYGNTKFGEKGPRFESIKNMTNGHCNLKP

SEQ ID NO: 163580 - protein, 89 aa, Glycine max
  Clone ID: PAT_MRT3847_118731C.1.pep
MGLPFFPSDFPDCKAYSCLMEAKAAAFNKKAELCPLVTRHLRVPILPPWGIVRITFDKVINAMETPDLSTREDLINANSLPNPCHGNFE

SEQ ID NO: 163581 - protein, 54 aa, Glycine max
  Clone ID: PAT_MRT3847_118732C.1.pep
HRRFILCKKRLPIALTKLRLPRRVLTPLVICSSLSSYSSLASSSCFVASTYLGL

SEQ ID NO: 163582 - protein, 54 aa, Glycine max
  Clone ID: PAT_MRT3847_118733C.1.pep
NRAHQQETLFELKPYWTEKRLSEQQNTNQYSSLSPSPSPWLPYPVLLLLYFYCM

SEQ ID NO: 163583 - protein, 78 aa, Glycine max
  unsure (1)..(78): unsure at all Xaa locations
  Clone ID: PAT_MRT3847_118734C.1.pep
DNPFSFYVSITIFDCTLSLNPSESFQYHNLLSTTNLISPPSPILSNLTTLHTSLLFMNTLFHDTNKIPTTTTTTTSVX

SEQ ID NO: 163584 - protein, 72 aa, Glycine max
  Clone ID: PAT_MRT3847_118735C.1.pep
PSFPISFASPTFKMGLLLLPSRSPPVAPAKSKSSPIASAVGHVEGRSSDVARNMWRNGSSRKKGLVLFFYVV

SEQ ID NO: 163585 - protein, 46 aa, Glycine max
  Clone ID: PAT_MRT3847_118736C.1.pep
YSCRISLHVQVFVLLLSFLLMHISLHLTPFPFLDARFSYLTFNFSS

SEQ ID NO: 163586 - protein, 107 aa, Glycine max
  Clone ID: PAT_MRT3847_118737C.1.pep
SSNPSSFVTNRCQVRSIRSPSAGGGNAPVVCIGSNVSFATKLLYDAVPSLYLQRLGLSCLEGVPQRLFIGSGGCVSKRDGQHVESLSFPLSILVPLRPRALINSCNN

SEQ ID NO: 163587 - protein, 83 aa, Glycine max
  unsure (1)..(83): unsure at all Xaa locations
  Clone ID: PAT_MRT3847_118738C.1.pep
VVAAVAFSVDLSSELTDPSKATAPXIHAHFGAYDIYXGFSDVTAAKSLEEXLKSSGISYEVHIYPGCSLAFMNTSPEALKGRR

SEQ ID NO: 163588 - protein, 34 aa, Glycine max
  unsure (1)..(34): unsure at all Xaa locations
  Clone ID: PAT_MRT3847_118739C.1.pep
PXLPTSSILAKEKTFSSGSHPINCFLAGKKIQFG

SEQ ID NO: 163589 - protein, 128 aa, Glycine max
  unsure (1)..(128): unsure at all Xaa locations
  Clone ID: PAT_MRT3847_11873C.1.pep
LFPPXHAAHNANQPQEKDPPEGTXPLKQKPRSRMENAPPQKPNPARGKTPQHDTTGAGPHSPEDLPEKENQEKPKKIDARPRQRIDPQPHEAQAQMETNLPQPPPDDAETPKGSMADPKTPQAKQAPP

SEQ ID NO: 163590 - protein, 90 aa, Glycine max
  Clone ID: PAT_MRT3847_118740C.1.pep
LQLLLHSAYAPPLTQVITPKGYISLQIRILSTLTETLLFLVIWSLSEPALFSLLVSSDLYRSDPNYRECQKHPIGRQRALPQNEVRSRLK

SEQ ID NO: 163591 - protein, 86 aa, Glycine max
  Clone ID: PAT_MRT3847_118741C.1.pep
LLQPPARTWPNRDAKSLKSPASCRSCPAFCAAVAENSTARNICLCHLCVASWSSFIERQFSIGHVCFLYRYLVMIDRRIENLLPWA

SEQ ID NO: 163592 - protein, 75 aa, Glycine max
  Clone ID: PAT_MRT3847_118742C.1.pep
DERNMLLLHVIHRLIRGCECPLYCMTLLTIWVNFLHMIPIGRQFLTTPLLVWIHTCTSRGSSTMPALTVELLRQT

SEQ ID NO: 163593 - protein, 77 aa, Glycine max
  unsure (1)..(77): unsure at all Xaa locations
  Clone ID: PAT_MRT3847_118743C.1.pep
MVSLKLQKRLSPSVLKCGKGXSGFDXNEVYEISMANSRQNIKKMVKDGVIIRKPSXIHSHSHALRMNEAITKGRSSL

SEQ ID NO: 163594 - protein, 43 aa, Glycine max
  unsure (1)..(43): unsure at all Xaa locations
  Clone ID: PAT_MRT3847_118744C.1.pep
KFFNXAHXLVSLLGANITXFPSDYXKQACYFLLDTAGICKNIL

SEQ ID NO: 163595 - protein, 166 aa, Glycine max
  Clone ID: PAT_MRT3847_118745C.1.pep
RERFDQCSISPLSLKGVKDAGYEKMTVVQEATLPVILKGKDVLAKAKTGTGKTVAFLLPSIEVVAKSPPSDRDHRRPPISVLVICPTRELASQAATKLLKYHPTIGVQVVIGGTRLALEQKRMQANPCQILVATPGRLTDHTQNTAGFATRLMGVKVLVLDEADHF

SEQ ID NO: 163596 - protein, 104 aa, Glycine max
  Clone ID: PAT_MRT3847_118746C.1.pep
MKGGGTGPTAQARFGCELMIGRDIWRNTWIMLLLNLDLSDWLPSTTTYRIMPADDLLATGIQRSVLAAEVLNDYRISTTAEIEEYSIEPIHTNHYNEGLYKCDI

SEQ ID NO: 163597 - protein, 131 aa, Glycine max
  Clone ID: PAT_MRT3847_118747C.1.pep
LPPLKKKIVPEDRPPFVGKKDYLVNHRHLGICFEMRDPTLYELIKMNPFRGLSLGIVQQFFKQILYGRAPLKKAGIIHCDLKPETLFLCPSPVNPPEIKIFAFGPAGMETRPVYSYIQRRYNRSPGVFFGI

SEQ ID NO: 163598 - protein, 62 aa, Glycine max
  Clone ID: PAT_MRT3847_118748C.1.pep
ANEENNQSYLHVAFFALRHIPPMTELTYDYGLAQSDHAEGSSAAKGRKKCLCGSSKCRGSFG

SEQ ID NO: 163599 - protein, 62 aa, Glycine max
  Clone ID: PAT_MRT3847_118749C.1.pep
MRERISIHIGHAGIQVGNARCELYCLEHGIRPDGQMPSDKTVRSLDDADMTSDSLTESGLHV

SEQ ID NO: 163600 - protein, 224 aa, Glycine max
  Clone ID: PAT_MRT3847_11874C.1.pep
MAFHGYAAAPTIAALFCFLYFFHRRLCCRHPLLTDYPILGMLPQLLFNLWRAHDFFTEILKLHGPTGEFTGPWFTNMDYLVTCDPINVHHMLSKNFHNYVKGPEFRHIFQAFGDGIFTADFEAWKYNRDLFHSLFKQKSFEVFLVKTIHNKVHNGLLPILDHVQQQGRVVDLQDVFNRFTFDNICSIVLGNDPNCLSIDFSEVAIEKAFNEAERVHISTELVVP

SEQ ID NO: 163601 - protein, 46 aa, Glycine max
  Clone ID: PAT_MRT3847_118750C.1.pep
PQKGTQTHTGWVHTMMHVFNSLILNTALLHHHIITLTTYYVTFFIS

SEQ ID NO: 163602 - protein, 60 aa, Glycine max
  unsure (1)..(60): unsure at all Xaa locations
  Clone ID: PAT_MRT3847_118751C.1.pep
GLFPKNMVKVLEYXGLAPKGSLRVQTFLEKAPKGLFXGGKKKIFPPMSFFLARNPYLNRK

SEQ ID NO: 163603 - protein, 49 aa, Glycine max
  Clone ID: PAT_MRT3847_118752C.1.pep
QGSAEVERHISQSPLHLRSRLWMQNTIGLGKTNLMVLGTSNCHINRPNA

SEQ ID NO: 163604 - protein, 90 aa, Glycine max
  unsure (1)..(90): unsure at all Xaa locations
  Clone ID: PAT_MRT3847_118753C.1.pep
FVPLQGAEXSRVKLGTVCYSSTSKXNPKRLAFQVFRVHPGTVQISNLMPQDQVAFVPKQKCLFGPKILTTALVSCPNFIIPPHIRPHSWI

SEQ ID NO: 163605 - protein, 42 aa, Glycine max
  Clone ID: PAT_MRT3847_118754C.1.pep
FCCLYDSCYFFFSFVVLFIFFCYEIQTVIAFTNLFILIQVAF

SEQ ID NO: 163606 - protein, 126 aa, Glycine max
  Clone ID: PAT_MRT3847_118755C.1.pep
PRVRPRVRAGLIMAMLLMMPSSSVAKKDEEFSVFITYCGITYAVQVKATDNVEILRQKIGKVIEIEPGQIGTIRGFQKELTDEKTLKDYGIQKFTNILLESTLKCAQRKQEKNNNGRLAKMFPVDH

SEQ ID NO: 163607 - protein, 194 aa, Glycine max
  unsure (1)..(194): unsure at all Xaa locations
  Clone ID: PAT_MRT3847_118756C.1.pep
MEKGSTKMAAVTQPKDLVKKPKDAKSFAIDFMMGGVSAAVAKTAAAPIERIKLLVQNQDEMIKQGRLATPYKGISDCFARTYADEGLVSLWRGNTANVIRYFPTQALNFAFKDYFKSMFNFKKSESYAKWFAGNIASGGAAGASSLLFVYSLDYARTRLANDNKSAKKXGGSRQFNGLISVYRQTLATDGIARL

SEQ ID NO: 163608 - protein, 70 aa, Glycine max
  unsure (1)..(70): unsure at all Xaa locations
  Clone ID: PAT_MRT3847_118757C.1.pep
TDIHYNCLSHSFPIGFSGVHASFGCKTSHFQVRNNMVLVLFTSSIFRAXXFIPSAYIACQYLCLTSKSRM

SEQ ID NO: 163609 - protein, 179 aa, Glycine max
  Clone ID: PAT_MRT3847_118758C.1.pep
VNNEYFLKSQYDTSIYLQNLFLYGYGAIFNFLGILGTVVVKGPSSFDILQGHSKATMLLIANNAAQGILSSFFFKYADTILKKYSSTVATIFTGIASAVLFGHTLTMNFVIGISIVFISMHQFFSPLSKVKDEQNGVLELHDVHDKQRSKESFINMAAGANEEATHRVGHDERQPLLPS

SEQ ID NO: 163610 - protein, 47 aa, Glycine max
  unsure (1)..(47): unsure at all Xaa locations
  Clone ID: PAT_MRT3847_118759C.1.pep
MKNGIMECSVWHSKLVSPSAKTISRAYDRHXSRISSKQRALNVFLGG

SEQ ID NO: 163611 - protein, 71 aa, Glycine max
  unsure (1)..(71): unsure at all Xaa locations
  Clone ID: PAT_MRT3847_11875C.1.pep
YQRTESEEVLPKLNLNMAYGPCLGMTRLARWERAQRLHLSPPHEMDRLXTSGNVQTDSLWDGGIYEPFGCA

SEQ ID NO: 163612 - protein, 403 aa, Glycine max
  unsure (1)..(403): unsure at all Xaa locations
  Clone ID: PAT_MRT3847_118760C.1.pep
MKNGIMECSVCHSKLVSPSAKTISRAYDRHKSRISSKQRALNVFLVVGDCVLVGFQPILVYMSKVDGKFNFSPISVNFLTEITKVFFAIVMLLLQARHQKVGEKPLLSISTFVQAARNNVLLAVPALLYAINNYLKFIMQLYFNPATVKMLSNLKVLVIALLLKVIMKRRFSIIQWEALALLLIGISVNQLRSLPEGTTALGLPVTMGAYIYTLIFVTVPSLASVYNEYALKSLYDTSIYLQNLFLYGYGAIFNFLGMSRGLAAXDILQVHSKATMLIDSKXLLPKDAAQGILSSFVFKFADKILTKYSSIVTAIFTGIASAVLFGHTLTMNFVIGISIVFISMHQFFSPLSKVKDEQNGVLELHDVHDKQRSKESFINMAAGANEEATHRVGHDERQPLLPS

SEQ ID NO: 163613 - protein, 59 aa, Glycine max
  Clone ID: PAT_MRT3847_118761C.1.pep
GLCKIWYDYLTYLWNTLSKIRLGLRKVFSITDIYMFLFLSYRYRISFDNCPQFCSIIFY

SEQ ID NO: 163614 - protein, 225 aa, Glycine max
  Clone ID: PAT_MRT3847_118763C.1.pep
SVDNMIHVGACSVFAKILKESPMKVQARVAWAVSELAANYPKCQDLFAQHNIIRLLVGHLAFETVEEHSKYTIVSTKPTSIHAVVIANNNVKKEDHFHDNEKKARMPHPLGDNRPRNLHRVITSTIAMHAATKQGNEPNHNHQTNGNGVDNDAKQGNQNHQRNYSHSGINMKGRDHEDPETKANMKEMAARALWHLAKGNSPICRSITESRALLCFSVLLEKGTE

SEQ ID NO: 163615 - protein, 90 aa, Glycine max
  Clone ID: PAT_MRT3847_118764C.1.pep
DNSNPSIGPTLAAYHTVPNPRMSSTAWLHNSSQMAAPMIRSGSTPAMTAPHHHTHEYHDVSNLGSRADTLAADRSTSTSIDNNSTSSSHC

SEQ ID NO: 163616 - protein, 127 aa, Glycine max
  Clone ID: PAT_MRT3847_118765C.1.pep
IEDVEEAVMKQIGIYDQLAKDTEECTSSSSDTSTMQLEKQGGQTQRKKLTEQARRGSEQIGRLQFEVQNIQYILLKLADVKNNKCKNKNSRPTGVLLKDFIRIGRKNSRRRRKGCVCGCSRPSTNED

SEQ ID NO: 163617 - protein, 86 aa, Glycine max
  Clone ID: PAT_MRT3847_118766C.1.pep
FRMVFFPFIIMCLKTFKLIMYDFISFYYLFIFVRGRGGSGFQNPSSSSSISSSVSPSCSSQEQSKSHISGAISQIKCPSTLFVCIT

SEQ ID NO: 163618 - protein, 59 aa, Glycine max
  unsure (1)..(59): unsure at all Xaa locations
  Clone ID: PAT_MRT3847_118767C.1.pep
VPNDGCLNPIQENEKVLTPGFGQKGSYXEIFSGVKFKVVKVSGVSLLALFKKKKEKPRS

SEQ ID NO: 163619 - protein, 109 aa, Glycine max
  unsure (1)..(109): unsure at all Xaa locations
  Clone ID: PAT_MRT3847_118768C.1.pep
ASSMISSPAVTTVNRAGAGMVAPFTGLKSMAGYTTIKTNNDITFIAINGGRVQCMQEWPPIGXTKYEILYYLSDLDDAQLAMEIEYLLTKGWILYXEFNWEHCFMYREH

SEQ ID NO: 163620 - protein, 148 aa, Glycine max
  Clone ID: PAT_MRT3847_118769C.1.pep
MMDFESPVSLEFLKEQYGHNVPTDHSVVNREKFNLTWLRDACDKIVKNCNSQLSQDELAMAICRVLYSEKPGEKIAGDLLDLVGDSAFETVQIFLLHRKEIVDSIHHGLLVLKSDKNASNAQSRMPSYGTQVAVQTESEKQIGKLRRQ

SEQ ID NO: 163621 - protein, 65 aa, Glycine max
  Clone ID: PAT_MRT3847_11876C.1.pep
LPMLQSAGRLRTPFGERAFSILLFQDLSIVPLITLVTILSRNPADAGGPPGWLLFLYTVAAVAGL

SEQ ID NO: 163622 - protein, 170 aa, Glycine max
  Clone ID: PAT_MRT3847_118770C.1.pep
MLLELETWTALVFLFLLVLILKESIMGGKSSKRSERRHVSSYGSAGSSSSRDSYGYPQSPNAYPQQNPYNTPLHHRAPAPFHDYSRPKRRLDRRYSRIADDYHSLDEVTTALSHAGLESSNLIVGIDFTKSNEWTGKRSFNRKSLHHIGSGQNPYEQAISIIGKTLSVFD

SEQ ID NO: 163623 - protein, 100 aa, Glycine max
  Clone ID: PAT_MRT3847_118771C.1.pep
IDLHYRHILIHSEDHPSRVNHYLLLYLSLLTSTLIIYFTHAIPFNKQLYTLISITITLISPTSLPTTLYKPVIILFITFSILPNNCTFINPILPYVLSSY

SEQ ID NO: 163624 - protein, 30 aa, Glycine max
  Clone ID: PAT_MRT3847_118772C.1.pep
NKKKKKKKKKKKKKKKKKKKKKKKKKKKKK

SEQ ID NO: 163625 - protein, 107 aa, Glycine max
  Clone ID: PAT_MRT3847_118773C.1.pep
ESSSVDATEVITELNALWDALAIMSTGLGYGGAALLAASLSSTLECAIYFAKLLAKIMLLVTLGYTEWYVYRYLMIKSIATDLATLIESLTETVSGAEYSGDSRYIV

SEQ ID NO: 163626 - protein, 60 aa, Glycine max
  Clone ID: PAT_MRT3847_118774C.1.pep
TLLLLQESCGIYAQLHECSTRTLFRFLSTFYTMKSDNFGSLCGPRIDDVKLLGVRYFTHA

SEQ ID NO: 163627 - protein, 130 aa, Glycine max
  unsure (1)..(130): unsure at all Xaa locations
  Clone ID: PAT_MRT3847_118775C.1.pep
LLSSLVLLLAALIISPKVLANYESPPLYKPGTDKPPLYKPTFXKPSIYKPPVKNPPIYNPAFEKPPLYKPPAEKPPVYNTPSEKPLPIITAVDKPPVSKPATEKPPLFKPTVEKPPVYNPPIDKPPLYKP

SEQ ID NO: 163628 - protein, 40 aa, Glycine max
  Clone ID: PAT_MRT3847_118776C.1.pep
KCESRLLFQRGTHVKPWKIIYFFFSITQIQKLMNNTKLIS

SEQ ID NO: 163629 - protein, 227 aa, Glycine max
  unsure (1)..(227): unsure at all Xaa locations
  Clone ID: PAT_MRT3847_118777C.1.pep
IRPRYPGILYSRPAAVNYFQTRFTEQDYSRPYLDGVPFKSISQGQREQMTVPFSDQEIKEAVWSCGGDKCPGPDGLNFNFIKKFWDIISPEFRRFVDEFYAHGSFPRGSNASFVALIPKMNHPQSFNDYRPISLIGCMYKVIATLLSNRLKSVMDGLIDERQSAFIKGRHILHGILILNEVVEEARRNKKPVMIFKVDXEKAYDSVSWSFLDCMLXRLGFCPNRRSW

SEQ ID NO: 163630 - protein, 134 aa, Glycine max
  Clone ID: PAT_MRT3847_118778C.1.pep
MGNDHALEIVGVGTIKLKMYDGIVRTIQGVLHVKGLKKNQLFVGKLDDLECKIHIEGEILMGSFMYVMICTKPNIAQAMRAISRFMVDLGKEHWSVVKRILRYINGTSGVALCFEGSKFIVMGYVNSDFVGDLD

SEQ ID NO: 163631 - protein, 166 aa, Glycine max
  unsure (1)..(166): unsure at all Xaa locations
  Clone ID: PAT_MRT3847_118779C.1.pep
MNTITLLLLLPFFTQFLEVEPARPKLPGKTRFPISQISVMGFVYCDFCSNSSFSRHSYFLPGAEVKVDCMFKALSEKTSXERFHFQLNRTTNKYGKYKLEIPFSGWSKMVQKIVQLCLLXQASLIGSSSSSCNVPGFKTNPNEIAIKLRRATLCICNSNALILIPF

SEQ ID NO: 163632 - protein, 217 aa, Glycine max
  unsure (1)..(217): unsure at all Xaa locations
  Clone ID: PAT_MRT3847_11877C.1.pep
MESLLTTTELDELVYKIDETVGDAANAAVEDIKSFASSVVVNKDSVIPNNNKFLTAYTNIVPKLKNANLSVFVETFSNEFVSQAWDFFSDAXTLRFNSYIEGAQIDGIITDFPKTADRYRRNKCLGLGDNKPTYMEPVQPGSLFGLITKEFLPPAEAPLPPLTESEVAESPLPPVAKIAPASSPNARTKFPQGNSQPKVTVCFFLSTLAVFIASLLL

SEQ ID NO: 163633 - protein, 82 aa, Glycine max
  Clone ID: PAT_MRT3847_118780C.1.pep
GKESNPVQPGGTNKEQLTVLLLWRRCHYKNKPPGDWDGFPFLKNPSLLGEPQWFFPQNFPKFRPGKGHLNPGGGSPPRDRPT

SEQ ID NO: 163634 - protein, 88 aa, Glycine max
  unsure (1)..(88): unsure at all Xaa locations
  Clone ID: PAT_MRT3847_118781C.1.pep
SSSGPIRRLSMHRFRSHLELHYDASKFGIGAVLSQSNRPIAFXQETFWAKLCYSTYAXELYALFQAFKHXHHYLFHREFVLFTDHDAL

SEQ ID NO: 163635 - protein, 59 aa, Glycine max
  Clone ID: PAT_MRT3847_118782C.1.pep
TNNVFCFPSECNYEGVLFIWVNRFIGCTVIIVLIEPYLSTDKIRILRCNTTTPHRSRRL

SEQ ID NO: 163636 - protein, 70 aa, Glycine max
  Clone ID: PAT_MRT3847_118783C.1.pep
THRIHAEENNTVLYTTINPTHTLKLRRTPFSVASKETLRSAGLATLLGRRTQTFCVTHAQVDDLVIRPQS

SEQ ID NO: 163637 - protein, 69 aa, Glycine max
  Clone ID: PAT_MRT3847_118784C.1.pep
RWKPSRVLNSPTARACGGGSITDQVQQFISDHCLSTPGDFHAPYLKTFLKKLITQVEFDRGCVLDHLYE

SEQ ID NO: 163638 - protein, 78 aa, Glycine max
  Clone ID: PAT_MRT3847_118785C.1.pep
TTPMGPLGGKLLRLSLNFLLVEEQTVLHLSKTNFLTLPEEFGASLRLFSLLQIANSNLRKISSPAITIRVGTLILPLV

SEQ ID NO: 163639 - protein, 43 aa, Glycine max
  Clone ID: PAT_MRT3847_118786C.1.pep
KTNQDGKNLVINHFKSYIKLWNVTKLSQFPIAKFYTCIATDAW

SEQ ID NO: 163640 - protein, 55 aa, Glycine max
  Clone ID: PAT_MRT3847_118787C.1.pep
VAHLTGGIDGKLAQDVNGAVALMPKDVCDFNAINSVGKRSNDDTASDFLGTCFDA

SEQ ID NO: 163641 - protein, 116 aa, Glycine max
  Clone ID: PAT_MRT3847_118788C.1.pep
FGPMDQMPLANHPISGLYFPPPGGPENVALPIFSFVKVIRIPLRPLKGFVYYPKFQFCIKKAFYFLFQAAMGIFWPPPQNLLGPLSRFFSYALPGPIPEFPSFPKESPVPFFQFNP

SEQ ID NO: 163642 - protein, 53 aa, Glycine max
  Clone ID: PAT_MRT3847_118789C.1.pep
VMTSFMKSKGIGILYEKQINYQLYLSCIVLANKIRGFSAKKKKKKKKKRAALE

SEQ ID NO: 163643 - protein, 43 aa, Glycine max
  Clone ID: PAT_MRT3847_11878C.1.pep
PGEILVKIPGIGIKPPQPCLVLKTPAEKTFAQNPNRNPNLRTG

SEQ ID NO: 163644 - protein, 93 aa, Glycine max
  Clone ID: PAT_MRT3847_118790C.1.pep
LSLNPKYKLCNKMSQKVKKKKQSLPKSKPIVDYIFFINAYHFPRTTSSSLLTFGMICPQLGMKNQNKLLCFFQLFIKAKRDYWAELGPETSQL

SEQ ID NO: 163645 - protein, 55 aa, Glycine max
  Clone ID: PAT_MRT3847_118791C.1.pep
FKDFLLLCVLLFEGKKIALRAGHRLGDRFSLPLSVYLLNTLLYAIRLRVGLRLSL

SEQ ID NO: 163646 - protein, 47 aa, Glycine max
  Clone ID: PAT_MRT3847_118792C.1.pep
QIADIPLDHRLTRQFHWTCSTWHPDNRSFMLNIDPVIIVIDLLVNQL

SEQ ID NO: 163647 - protein, 274 aa, Glycine max
  Clone ID: PAT_MRT3847_118793C.1.pep
RVRHHLVVEDFLGEEVKKSDFYGSVSSILKVNEPKVRNLFAGQRIILRFPSSVKASKPGKSDATPAKGSLTSEKLNVMQIDPPSPQTEVDHILSAKLYNALRLLRKSLVTEAGEGVMPHHIFGNATLLLISKRVPRTKEELLDINGIGKAKVSKYGDQLLETIEKTVNEHYKLDKVSSGSKGSSDSTKKRRLSNGNPDANAEDDDAPTKSTGRSKKRMVKRQNRKAVIYDSPEEDYFQGCPDEDLDFDIIEIDALDQVTCKNAAGRVLPQWTAS

SEQ ID NO: 163648 - protein, 113 aa, Glycine max
  Clone ID: PAT_MRT3847_118794C.1.pep
RHGDKEDPTNKRIDFNKYLFYSGTSKLRPPMHVILQSFAMCFFSLRPLVIELNLVLWSTNRSYSNSVGLLCTRLVTLGSIILLVLGHDSACSVKELVVAHHQLLFTLFILMRF

SEQ ID NO: 163649 - protein, 40 aa, Glycine max
  Clone ID: PAT_MRT3847_118795C.1.pep
SLVTALCSIMYVLDLCQLYRGPNILSGFITFTNDVRTSGR

SEQ ID NO: 163650 - protein, 55 aa, Glycine max
  Clone ID: PAT_MRT3847_118796C.1.pep
TPPIFYAKKTPPPGPPPGPPPGPTPGPTPGRTPGSPPEFPPGSWRGTNFPFKGAY

SEQ ID NO: 163651 - protein, 50 aa, Glycine max
  Clone ID: PAT_MRT3847_118797C.1.pep
SKYKRQTKECYIEEKSICIKSIMQKSITPNKLQYHQNIANKSTIYNLSNI

SEQ ID NO: 163652 - protein, 120 aa, Glycine max
  Clone ID: PAT_MRT3847_118798C.1.pep
MILLSNNTDLVSLMISSRTASTVKRGRAGLAAPFTGHQFLADSNTRLTYTDISSVATTVGRVQCSPVWPAVERMTSPTLLYFSHRVYAGLDSEGNCLVRRGWLICVPFWWAHGHVYREHD

SEQ ID NO: 163653 - protein, 68 aa, Glycine max
  Clone ID: PAT_MRT3847_118799C.1.pep
ELYIYIYIYEIRSALHGCIVGSTECEKIGSDNSHASIDLTFKFATAPLNLYFHMIMNSFFLRSKVFHL

SEQ ID NO: 163654 - protein, 129 aa, Glycine max
  Clone ID: PAT_MRT3847_11879C.1.pep
LSKLTVPQGTCRFVKRTPLSIGGGAGAKNAILMNMPNACLPMWRYFCGDLVFEVSKMTSPYIKWTASFFIAFGNLADDTINFEAFPHKLVHPGEIHEKVVLEFPPEELLTAWSTQVRTCTTFVADGCPY

SEQ ID NO: 163655 - protein, 114 aa, Glycine max
  Clone ID: PAT_MRT3847_1187C.1.pep
SIHTILTLALSHGWELFQLDINNAFLNGVLKESMFMTQPPDFEVGDRFLVCKLNKALYGLKQAPRQWFDRLKSTLLQLGFVGSKCDSSLFIYKHQTHTVYLLVYVDDIIITGCS

SEQ ID NO: 163656 - protein, 159 aa, Glycine max
  Clone ID: PAT_MRT3847_118800C.1.pep
LSLEQLREALSTVRQASSRPINVNFFCHQPPAADAVRDRHWKALLEPYYRELGADFDAPTPLSNREPFSEATCTVVEEFRPEVVSFHFGLPEKALLDRVKATGAKVLSSATTVEEAIWLEQHGCDAIIAMGLEAGGHRGLFLSDDLNTQIGLMALVPQI

SEQ ID NO: 163657 - protein, 184 aa, Glycine max
  Clone ID: PAT_MRT3847_118801C.1.pep
MSTSTNVVVLDNGGGLIKAGIGGERDPSAIVPNCLYRPPSSKKWLHLHSGDEDLTSAAVRRPMDRGYLINPDLQREIWSHLFSSVLHINPSQSSLLLTEPLFTPPSIQRSVDELVFEDFNFRALYVAHSPSLVHLHEASRNNANGLLSKAQCSLVLDAGFSFTHASPVFHNFALNYAVKRIDLG

SEQ ID NO: 163658 - protein, 53 aa, Glycine max
  Clone ID: PAT_MRT3847_118802C.1.pep
YNGYCYPYNRSSRLSQLRPGRGTIKLYHVIVPTEVCSTNDTYHCPNLCMLERA

SEQ ID NO: 163659 - protein, 98 aa, Glycine max
  Clone ID: PAT_MRT3847_118803C.1.pep
IFQNRFERCGLSYTGLRTHGLVNLHSYTSCYLCFFFFLLFHLHLFFIPFCIGLLIFFVFLFFAVCVLHYYLNVFCTLTCLVFYACYLDHLDMHGNNII

SEQ ID NO: 163660 - protein, 53 aa, Glycine max
  Clone ID: PAT_MRT3847_118804C.1.pep
KMVNIFFPFQHKKVKLFKWKMNLKNFCLSSNNVFCRGSVVKKLLFFQKMPLFY

SEQ ID NO: 163661 - protein, 50 aa, Glycine max
  Clone ID: PAT_MRT3847_118805C.1.pep
GMIFNGLFEGFRTSVGVVYSRIMFSLELFCVLEVEGVEYLFCYGSRLNGE

SEQ ID NO: 163662 - protein, 113 aa, Glycine max
  Clone ID: PAT_MRT3847_118806C.1.pep
MDILLAELHMACIYIVLPANQYTAVSLNAKVNKFYFCQMAGFALYKRYKSQFLKMLNVVSENFLVDLKSRNIPELTRTVTEIQTYIEDKKFLQEPERWRQQPNYAPNGRFNNY

SEQ ID NO: 163663 - protein, 55 aa, Glycine max
  Clone ID: PAT_MRT3847_118807C.1.pep
WFCLMEFVSFVICPCFSIQSNQRRTIFGCFIKQRIIFDTVQLLNVIIACYFFFLK

SEQ ID NO: 163664 - protein, 117 aa, Glycine max
  Clone ID: PAT_MRT3847_118808C.1.pep
MADTRLTYRRRQPYNTVSNKVRVIRTPGGEHRYLHIKKRGTSPKCGDCGVKLPGIPALRPREYAQISRPKKTVQRAYGGSRCANCVRDRVVRAFLIEEQKIVKKVMKEAEKKQKGGR

SEQ ID NO: 163665 - protein, 77 aa, Glycine max
  Clone ID: PAT_MRT3847_118809C.1.pep
MGGGNGQKAKMARERNMEKNKPAKGSQLEANKKAMNIQCKVCMQTFICTTSEVKCREHAEAKHPKAHLYTCFPHLKN

SEQ ID NO: 163666 - protein, 791 aa, Glycine max
  unsure (1)..(791): unsure at all Xaa locations
  Clone ID: PAT_MRT3847_11880C.1.pep
FLKHAEAVEKDLPARELHELLLLSLQWLSGMISLSNLVCPLQLLREIETKVWLLAVESETQVKSEGDFNFTFSTRESGIKNDPSIIDRTASIIAKMDNHINTMRSRIVEKYESRENNXSSHKNQVMDAGLSTTFGGNTKTKRRAKGYMAPRRPPLESADKSADTDDGSSTNSLKNEFQLQEENVKVEMSFSRWEERVGAAELERAVLSLLEFGQIAAAKQLQDKFSPGQIPSEFRLVDAALKLAAISTPPSNVSVPMLDEEVRSVMQSYGIMNDKHYVDPLQVLESLVTIFIEGSGRGLCKRIIAVIKAANTLGLSFFEGFNKQPIELLQLLSLKAQDSFEEANFLVQTHPMPAASIAQILAESFLKGVLAAHRGGYMDSQKEEGPAPLLWRFSDFLKWAELCPSEPEIGHALMRLVITGQEIPHACEVELLILSHHFYKSSSCLDGVDVLVALAATRVDAYVLEGDFPCLARLITGVGNFYALNFILGILIENGQLDLLLQKYSAAADTNTGTAEAVRGFRMAVLTSLKHFNPNDLDAFAMVYNHFDMKHETAALLESRAEQSCEQWFHRYNKDQNEDLLDSMRYFIEAAEVHSSIDAGNKTRKDCAQASLLSLQIRMPDFQWLYRSETNARRALVEQSRFQEALIVAEAYNLNQPSEWALVLWNQMLKPEVMEEFVAEFVAVLPLQPSMLIDLARFYRAEVAARGDQSHFSVWLTGGGLPAEWAKYLGRSFRCLLKRTRDLKLRMQLATVATGFGDVIDACTEEMDKVADNAAPLVLRKGHGGAYLPLM

SEQ ID NO: 163667 - protein, 172 aa, Glycine max
  Clone ID: PAT_MRT3847_118810C.1.pep
MGNCQAVDAAVLVIQHPCGKIERLYWPVTASEVMRTNPGHYVSLIIPLPVPPQEQNQEQKTVRFTRVKLLRPNETLNLGHAYRLITTQEVMKVLKAKKHAKTKKPLAEAAEKPHRVQSEKQSSASEAHTAGESTHQGMRAERHRPRTASANPAVVRSKSWRPSLQSISESAS

SEQ ID NO: 163668 - protein, 218 aa, Glycine max
  Clone ID: PAT_MRT3847_118811C.1.pep
HFMGVMHRDLKPENFLLANKDPKAPLKATDFGLSVFIEEGIVYREIVGSAYYVAPEVLKRNYGKEIDVWSAGIILYILLSGVPPFWGENERSIFEAILGGKLDLESAPWPSISAAAKDLIRKMLNNDPKKRITAAEALEHPWMKEGGEASDKPLDNAVLTRMKQFRAMNKMKKLALKVIAENLSEEEIKGLKQMFNNMDTDRSGTITFEELKSGLTKL

SEQ ID NO: 163669 - protein, 48 aa, Glycine max
  Clone ID: PAT_MRT3847_118812C.1.pep
SSLTKRKKYTNIRMYDSYDSPGTQAQIMQHCTSQSFLEKVGMMFPLKP

SEQ ID NO: 163670 - protein, 79 aa, Glycine max
  Clone ID: PAT_MRT3847_118813C.1.pep
GGPIAMREVLSLPSIGIHAQFINFTHGKNQADTHISGRETIPLNRVGIIDMSMPHKALTRTITADWAIVNPHDRILDLR

SEQ ID NO: 163671 - protein, 42 aa, Glycine max
  Clone ID: PAT_MRT3847_118814C.1.pep
TLQGTGGKVQKKGRRIGFGLIKKKKGSPVNPCLRAWLLAYEI

SEQ ID NO: 163672 - protein, 324 aa, Glycine max
  unsure (1)..(324): unsure at all Xaa locations
  Clone ID: PAT_MRT3847_118815C.1.pep
MEDTQEIEEQAHKEVISDKTFEKQQETLDEILSRHRKEILQLQKKEVEMKKAAARGSKAEQKAKKKQVEEEVSQLSAKLKENQAKELTALGYISGNGNEKSNLDSLVKAIAGVSVTSQPEHTKVSKAKQRRDKRAQQEAEREQRIQAEQSDIXSDRVIENEKLEKKLKPLGLTVCEIKPDGHCLYRAIEDQLAILSGGXSSYTYQELREMVAAYMRNHTSDFLPFFLSENLIEDDSNESFAQKFENYCKEVESTATWGGQLELGALTHCLKKHIMIFSGSFPDVEMGKEYKSDGGTGLSNSSIMLSYHKHAFGLGEHYNSVVPT

SEQ ID NO: 163673 - protein, 105 aa, Glycine max
  Clone ID: PAT_MRT3847_118816C.1.pep
GSHIIFLVELDGAPQHYKTRNGLAFLDDSKSNTYSGVGTNIKYTALRGEATPFNGLPNAQTETYFLAKHRGSHGPPVGPNKAEPMGDPMFLSRLDPKTGKFILPV

SEQ ID NO: 163674 - protein, 96 aa, Glycine max
  unsure (1)..(96): unsure at all Xaa locations
  Clone ID: PAT_MRT3847_118817C.1.pep
LKQVFPQEKFFLNFGNKTIAMVLEQNVSGENALKGGVVFAYXPKLKVPFMRSGLIVSCIRLIKKKKXVFPVFLREFQNKGGPPDRFLDGTGNRFSF

SEQ ID NO: 163675 - protein, 351 aa, Glycine max
  Clone ID: PAT_MRT3847_118818C.1.pep
MSKLLLLPTPPLTTSIHRFNTSSSASALQFQCRFSLSLLSRLHHSPTSFRSLVRRTRDLPLRAFDSSSDANSEEKEEVKENEEGVDNRSGSRIADEDYPSGQFDFEPVTGWRSFLVKLKMLVAFPWERVQKGSVLTMKLRGQISDQVKSRFSPGLSLPQICENFLKAAYDPRISGIYLHIDSLNCGWGKVEEIRRHILDFKKSGKFVLAYVPLCQEKEYYLASACEEIYAPPSAYFSLFGLTVQASFLKGVLDNIGIEPQVERIGKYKSAGDQLARRTMSEENCEMLTTLLDNIYTNWLDKVSSAKGKTREDIENFINEGVYQVDKLKEEGLISNINYDDEDVNTSPSKDG

SEQ ID NO: 163676 - protein, 62 aa, Glycine max
  Clone ID: PAT_MRT3847_118819C.1.pep
MKLLRGSFSFDNFRMEQCVIIWNMKIVFVSDVHKCHCNNNHKFPSVDLLSLSMITLMPYANE

SEQ ID NO: 163677 - protein, 71 aa, Glycine max
  Clone ID: PAT_MRT3847_11881C.1.pep
MYSPDFVRKSSYKWSAKQHSCNIEAFADSTFNLLRKLVQSALAVDFSGGVQSSISTESLTYDIVQVIVGGS

SEQ ID NO: 163678 - protein, 82 aa, Glycine max
  Clone ID: PAT_MRT3847_118820C.1.pep
HESDLTAYTRYSPKRKKKKRKKIASSPQKKKKKKKKKKKKKKKKKKKKKKKKKRKKQKKKKKKILGGGPGPNSPYKEVYKPP

SEQ ID NO: 163679 - protein, 53 aa, Glycine max
  Clone ID: PAT_MRT3847_118821C.1.pep
PKKEKKENLEPPKVPVPLKPHEAFPLYFQITPPYGQSPYVPSYKKVPRDWVIW

SEQ ID NO: 163680 - protein, 36 aa, Glycine max
  Clone ID: PAT_MRT3847_118822C.1.pep
NLEPCVTMKKKKKQKKKKKKKKKKKKKKKKKKKKKK

SEQ ID NO: 163681 - protein, 68 aa, Glycine max
  Clone ID: PAT_MRT3847_118823C.1.pep
KTIGMKLTHFFNLIGSSYLCLRRNGGSRSIYYCDELVRDSKHSPMRYCFRRWSFSRMLYVDRTVEGMC

SEQ ID NO: 163682 - protein, 80 aa, Glycine max
  Clone ID: PAT_MRT3847_118824C.1.pep
WEGNGCDALSDEGEHERITKEAALLRTTVLVLHRAEQPNPTQKYCHGGLYRNSALLGYKRNGLLRRTSGPKQIFGWTFLH

SEQ ID NO: 163683 - protein, 103 aa, Glycine max
  Clone ID: PAT_MRT3847_118825C.1.pep
GPRAGTAPETHACPTSSDQHNGNFREDQSIKKWEVRRTPGNLNPKELRSSRGQTKDSGLHRQQGALNGSRRQGLTNFKWITIPSSTKLSTHYMRTGEPPGRTR

SEQ ID NO: 163684 - protein, 73 aa, Glycine max
  Clone ID: PAT_MRT3847_118826C.1.pep
PTRPPTRPYGCEKTTEGGLGWERYYDGDPDLYQFHKHSSIDLISLPKDFSKFNSINMYDIVIKNPNVFHVRDK

SEQ ID NO: 163685 - protein, 153 aa, Glycine max
  Clone ID: PAT_MRT3847_118827C.1.pep
MMQGLSKKIGKEVFIVANTALMPNDFVSSPPAYGFSSFRIACCGQGPSNGIGLCTPLFNLCPNKNSHAFWDPFHPSVKADSLLVEHIMVGFVRSINPMVLSSVLALDVSEMPHASICLPLVTVVNSYRLSSACVRETIIVFRVVISPPQVLVN

SEQ ID NO: 163686 - protein, 39 aa, Glycine max
  unsure (1)..(39): unsure at all Xaa locations
  Clone ID: PAT_MRT3847_118828C.1.pep
DSSQEAVRVLSSXHAFGLFGXQTFEPFQQSIISFIXXGX

SEQ ID NO: 163687 - protein, 43 aa, Glycine max
  Clone ID: PAT_MRT3847_118829C.1.pep
EISCFHFQILSFFFYFLLFYINSTILDHIYPTCGLITPVYLIF

SEQ ID NO: 163688 - protein, 80 aa, Glycine max
  unsure (1)..(80): unsure at all Xaa locations
  Clone ID: PAT_MRT3847_11882C.1.pep
CISLGGFAQRLLVQCEAVLSVDFFAPNTEVGVDNLFEMMDRMVAHNPSFFDITXGAGGTTADLTLGMAIYMHDIVCVEAI

SEQ ID NO: 163689 - protein, 50 aa, Glycine max
  Clone ID: PAT_MRT3847_118830C.1.pep
SLSHPTICLLHGIAPRVLCFIEHTSYMHGSNFFIWSGPIPWMTPTDPVQI

SEQ ID NO: 163690 - protein, 58 aa, Glycine max
  Clone ID: PAT_MRT3847_118831C.1.pep
FPRRPTPPYTPRNISFFLSLIHIHKHQHFLTSASPPTPLQQSMSLPNLKHPATPLLSY

SEQ ID NO: 163691 - protein, 91 aa, Glycine max
  Clone ID: PAT_MRT3847_118832C.1.pep
DTIHDSSEFQHSRLFISRTLSFHSPLMSPDFTHWDFPELIHSTRITFRAILRVMLIILMFNLLFTHGGLPWAWARAIHIIPGPVSDQFRII

SEQ ID NO: 163692 - protein, 73 aa, Glycine max
  unsure (1)..(73): unsure at all Xaa locations
  Clone ID: PAT_MRT3847_118833C.1.pep
STTXRTTSNGYLAQTAYKNSLHTAGKRAKPETELPSRAVEKYRTCLFSEIMTGPMCNLNFSTALGYCTSCINH

SEQ ID NO: 163693 - protein, 44 aa, Glycine max
  Clone ID: PAT_MRT3847_118834C.1.pep
FSQNLLAFGLVPCSLLPPSHLAAHYSPPLRLKGLPARGGALVEN

SEQ ID NO: 163694 - protein, 226 aa, Glycine max
  unsure (1)..(226): unsure at all Xaa locations
  Clone ID: PAT_MRT3847_118835C.1.pep
FGPEFPRRPTRPEAESTERVKDKEEKDKSKELDREKEKEKENDKKGENEKDKLRSVEGTNLDALLQRLPGCVSRDLIDQLTVEFCYLNSKSSRKKLVRALFNVPRTSLELLPYYSRMVATLSTCMKDVSSILLQMLEEEFNFLINKKDQMNIETKIRNIRFIGELCKFKISPPGLVFSCLKACLDDFTHHNIDVACNLLETCGXFLYRSSETTIRMANMFEILMPV

SEQ ID NO: 163695 - protein, 108 aa, Glycine max
  Clone ID: PAT_MRT3847_118836C.1.pep
PRVRPRFRFGIGLASYGIRLHLVVSVFFFHFSAVAQSATLMATDQITASAPSERGAGGKLRKPPPRKPLPSPYSRPPEATRRRWISKLVDPAYRLIAGGATRILPSFF

SEQ ID NO: 163696 - protein, 52 aa, Glycine max
  Clone ID: PAT_MRT3847_118837C.1.pep
FSLQKAPFYCDHLVHTCNRETHPQVNIDRLGCVSMITSFHKLTVIYETPPIS

SEQ ID NO: 163697 - protein, 69 aa, Glycine max
  Clone ID: PAT_MRT3847_118838C.1.pep
FKKPNWKSERGRQKVVKPLAHQKVGTPKRFTGKNPLPKKKLCLKRSIGLVQEKLEKPFQKNNLWKNPPG

SEQ ID NO: 163698 - protein, 95 aa, Glycine max
  Clone ID: PAT_MRT3847_118839C.1.pep
RHLETPTYPSPPLSSHIIAHALLVVLLSGSWLPSKSFPPTSLQQGCSRFYLSPHLINATPNMHSVAASCRHPSFFFLSYPISIHRPYPSSLITLP

SEQ ID NO: 163699 - protein, 365 aa, Glycine max
  unsure (1)..(365): unsure at all Xaa locations
  Clone ID: PAT_MRT3847_11883C.1.pep
MEKLEAENVLVLPSEQPNNNRPKPKPKRFVKNQIPDSILNNPLLSAAISVLPSNYNFEVHKCVWRVLSTGAKRVALQFPEGLLMYSLPLSDIFTTFAGVTHCFVLADVTYGACCVDDLAASALGADLLIHYGHSCLVPIDATTIPCLYVFVDIKIDVPHFVDTLSLNLLAQTKTLVVAGTIQFASAIRAAKPQLEELGFRVLIPQSKPLSAGEVLGCTAPKVSRRNCSVXDGESSVLVFVADGRFHLEAFMIANPGIRAFRYDPYMGKLFLEEYDHLGMKRSRKNAIFKAREEARSWGLVLGTLGRQGNPRILERLEKMMRDRGFDYTVVLMSEMSPTRIALFEDSLDAWIQIACPRLSIASCRI

SEQ ID NO: 163700 - protein, 157 aa, Glycine max
  Clone ID: PAT_MRT3847_118840C.1.pep
LKISASVLLDVPRDSLIMNDEIFCPLLPILTVDKIQESFDVINSGSKPLAAYIFTNTKKLKEQFVMTISAGGLVVNDTTLHLAVHTLPFGGVGESGVGAYHGKFTFEAFSHKKAVLYRRFIGDAPVRYPPYTNTKMRLLKALIGGGILGIIRALFGW

SEQ ID NO: 163701 - protein, 32 aa, Glycine max
  Clone ID: PAT_MRT3847_118841C.1.pep
RYSLQLSSTSYSSLLYESIIQSYSWHNCHCVT

SEQ ID NO: 163702 - protein, 68 aa, Glycine max
  Clone ID: PAT_MRT3847_118842C.1.pep
PISTLKNQFVRGGLLLTWILYFDTIFNQWGTSTHPLFAYGYLPMWDFSTPLFGHGYLPQLRGAKDDHN

SEQ ID NO: 163703 - protein, 48 aa, Glycine max
  Clone ID: PAT_MRT3847_118843C.1.pep
TSCPDTRQFFFSTLCDTTMGGDLERAAVYLIFFELREQSLSLDCHSCL

SEQ ID NO: 163704 - protein, 188 aa, Glycine max
  Clone ID: PAT_MRT3847_118844C.1.pep
MPSHADLDRQIEHLMECKPLPEADVKALCDQARAILVEEWNVQPVKCPVTICGDIHGQFYDLIELFRIGGNAPDTNYLFMGDYVDRGYYSVETVTLLVALKVRYRDRITILRGNHESRQITQVYGFYDECLRKYGNANVWKFFTDLFDYLPLTALIESQIFCLHGGLSPSLDTLDNIRALDRIQEVPH

SEQ ID NO: 163705 - protein, 60 aa, Glycine max
  unsure (1)..(60): unsure at all Xaa locations
  Clone ID: PAT_MRT3847_118845C.1.pep
KDGPSGDKSHVPPMVMGTYXYAAPEYLSTSHLTVKIDVYRFGVVLLEILSGNRADYNNTP

SEQ ID NO: 163706 - protein, 156 aa, Glycine max
  unsure (1)..(156): unsure at all Xaa locations
  Clone ID: PAT_MRT3847_118846C.1.pep
MPSHADLDRQIEHLMECKPLPEAEVKALCDQARAILVEEWNVQPVKCPVTVCGDIHGQFYDLIELFRIGGNAPDTNYLFMGDYVDRGYYSVETVTLLVALKVRYRDRITILRGNHESRQITQVYGFYDECLRKYGNANVXKFFTDLFDYLPLTALI

SEQ ID NO: 163707 - protein, 123 aa, Glycine max
  Clone ID: PAT_MRT3847_118847C.1.pep
MARIKVYELRNKTKAELLNQLKDLKAELALLRVAKVTGGAPNKLSKIKVVRLSIAQVLTVISQKQKAALREAYKKKKYLPLDLRPKKTRAIRRRLTKHQVSLKTEREKKKELYFPLRKYAIKV

SEQ ID NO: 163708 - protein, 307 aa, Glycine max
  unsure (1)..(307): unsure at all Xaa locations
  Clone ID: PAT_MRT3847_118848C.1.pep
MPSHADLERQIEQLMDCKPLPESEVKALCDQARAILVEEWNVQPVKCPVTVCGDIHGQFYDLIELFRIGGNAPDTNYLFMGEYVDRGYYSVETVXLLVTLNVRYXDRITILXGNHESRQITQVYGFYDECLRKYGNANVWKYFTXDLFDYXPLTALIESQIFCLHGGLSPSLDTLDNIRALDRIQEVPHEGPMCDLLWSDPDDRCGWGISPRGAGYTFGQDIAAQFNHTNGLSLISRAHQLVMEGFNWCQDKNVVTVFSAPNYCYRCGNMAAILEIGENMDQNFLQFDPAPRQIEPDTTRKTPDYFL

SEQ ID NO: 163709 - protein, 70 aa, Glycine max
  unsure (1)..(70): unsure at all Xaa locations
  Clone ID: PAT_MRT3847_118849C.1.pep
GEHSSPFCSSYLQGCSRSSFCPKVXQQXIGFLGFRFTRSIPRLNHDXXDMXDAXSIETPNLLVEAXVDPL

SEQ ID NO: 163710 - protein, 54 aa, Glycine max
  Clone ID: PAT_MRT3847_11884C.1.pep
ADASRQQTGETEGSTFSGFFLSHKPEQANAIHIDARLSITTEHNVSYRRHKSHT

SEQ ID NO: 163711 - protein, 53 aa, Glycine max
  unsure (1)..(53): unsure at all Xaa locations
  Clone ID: PAT_MRT3847_118850C.1.pep
KKVYXTLFNFKKKKLLDKRTAPKLYIFFQEVKKKGGGLSKIDRAYIPRTHFNS

SEQ ID NO: 163712 - protein, 83 aa, Glycine max
  Clone ID: PAT_MRT3847_118851C.1.pep
MNQKCQGFSVGNQKEVGPAEPVFLFKEAGDFKGKGVLGFQHSEESSMFVGQSNPFFQTALEEPSKGVFSLFFGPPTPKTFERF

SEQ ID NO: 163713 - protein, 38 aa, Glycine max
  Clone ID: PAT_MRT3847_118852C.1.pep
SIHITFSNASAVWNNSLVDHIRFQQVEYTFRYRCLINL

SEQ ID NO: 163714 - protein, 80 aa, Glycine max
  Clone ID: PAT_MRT3847_118853C.1.pep
SDNVHVLFAWISNSFFYCLHPFFKTLLSICNYYLSWETYISLFYVVLVITLYFESIDLFSTSCMTFSLLLLRFFLVLLSK

SEQ ID NO: 163715 - protein, 98 aa, Glycine max
  unsure (1)..(98): unsure at all Xaa locations
  Clone ID: PAT_MRT3847_118854C.1.pep
RGYVASNSKDXPRKXRVVXXTXXXXXXXQPXXXGNGXALVLDCXTSQIAVKFXELMTXIDRXIRQRVEKEPRFLKKGXXGXVKMIPTKXXLXXFXGYP

SEQ ID NO: 163716 - protein, 46 aa, Glycine max
  Clone ID: PAT_MRT3847_118855C.1.pep
INRLIEYIRCLIYAMISMHLIIAIYHSPIKLIVQNSQNLICINKKE

SEQ ID NO: 163717 - protein, 58 aa, Glycine max
  Clone ID: PAT_MRT3847_118856C.1.pep
KNNSVIGQNKEIAFSMIFYPTFTTLNRALSRIVSPFTCLKFIACFPTRKTHNYITSIS

SEQ ID NO: 163718 - protein, 40 aa, Glycine max
  Clone ID: PAT_MRT3847_118857C.1.pep
HAFVFCLSSQDVPTPYAGTLEEWTVVQPAQIVTAVEKLCQ

SEQ ID NO: 163719 - protein, 132 aa, Glycine max
  Clone ID: PAT_MRT3847_118858C.1.pep
LPHFPNLRLREDDRRDPSIFHESGFQQHYSQLSDLHYNGIGHKSYVPQLPSYDYPPMSESSTYNNSYNNSNQNFSYASVLSTPSSSPTPLNSNSTFVKGSSSTEDETESYVSSNNLLRFEIPDMLRMNTLII

SEQ ID NO: 163720 - protein, 35 aa, Glycine max
  unsure (1)..(35): unsure at all Xaa locations
  Clone ID: PAT_MRT3847_118859C.1.pep
LGLISSALTLKITRPGTPIPIKXVVAASMCSSDFE

SEQ ID NO: 163721 - protein, 283 aa, Glycine max
  unsure (1)..(283): unsure at all Xaa locations
  Clone ID: PAT_MRT3847_11885C.1.pep
MAAPFFSTPFQPYVYQSPQDAIIPFQILGGEAQVVQIMLKPQEKIIAKPGSMCFMSGSVEMENAYLPENEVGIWQWLFGKTITSIVLRNSGPXDGFRLELLHLYFARILPIDXLAMFNGEILCQPDAFLCSVNDVKVSNIVDQRGRNAVASAEGFLRQKLSGQGLAFILAGGSVVQKNLEIGEVLAVDVSSIVAVTSAVNIQIKYNGPARRTMFGGDNAVTAVLTGPGIVFIQSLPFHRFSQRIARAVTSPNMRENPKFFIQIAVFFFLAYVVIVSSLILTDV

SEQ ID NO: 163722 - protein, 78 aa, Glycine max
  unsure (1)..(78): unsure at all Xaa locations
  Clone ID: PAT_MRT3847_118860C.1.pep
NHYCYVYVRVGRGRSLPELVAYVPASTFLLFIYEYKVFLFFCHFVSMIIMFSTILYNFIYTSFCVFVGMIILIVXWYH

SEQ ID NO: 163723 - protein, 40 aa, Glycine max
  Clone ID: PAT_MRT3847_118861C.1.pep
RRRWPDLPQHLPHAHWLAHEPGSYGHRSIICISQTSVTSS

SEQ ID NO: 163724 - protein, 148 aa, Glycine max
  Clone ID: PAT_MRT3847_118862C.1.pep
PISEKLKFLVNLIERKVLKTKIESYMPNFKLAFKHFCIHTGGRAVLDRMQKSLELEDWHMEPSRMTLYRFGNTSSSSVWYELAYCEAKGRIKKGDRVWQMAFGSGFKCNTAVWVALNTIEPGSIKSPWRDEIHNFPVKVDPLPVKSNK

SEQ ID NO: 163725 - protein, 70 aa, Glycine max
  unsure (1)..(70): unsure at all Xaa locations
  Clone ID: PAT_MRT3847_118863C.1.pep
EXXRXXXXXVXACXXXXXXAXXSSSHRHRXSSIXTCETXXTRSXNDTQLXXXXSXXXARAEXRADXXPXX

SEQ ID NO: 163726 - protein, 92 aa, Glycine max
  unsure (1)..(92): unsure at all Xaa locations
  Clone ID: PAT_MRT3847_118864C.1.pep
MGNPFFTVSLIWVWGILLRSACYTITSSKFNECQLNNLNALEPDHTVXPXGGLIGTWYFXHPGRQCACVTGYKRTLNRNGLHLTSHSHYPLM

SEQ ID NO: 163727 - protein, 56 aa, Glycine max
  Clone ID: PAT_MRT3847_118865C.1.pep
SRNMHCSSELSTRSGTEASELENMTIIANESGSISCGEGQIIHTLAKFLQPCARIL

SEQ ID NO: 163728 - protein, 66 aa, Glycine max
  Clone ID: PAT_MRT3847_118866C.1.pep
IHHPSSIILYIVQQISHLSCTGALIILNKFNQKCRKLNNSKVSKEIEVNQILHASISNITCLYFII

SEQ ID NO: 163729 - protein, 45 aa, Glycine max
  Clone ID: PAT_MRT3847_118867C.1.pep
IKTLHYCETVIITQYKNPLSLSYISLFTTEPLFIVTSKQLQPCFI

SEQ ID NO: 163730 - protein, 114 aa, Glycine max
  Clone ID: PAT_MRT3847_118868C.1.pep
KKLTMLFMNRNNRTWEEFASRVRTFQVGFMGEPNELRPGSGEFTENPSACICQNSGGGEISYPQNHNNITEFEEQQEWYDVVDNKLNANGTKIDSLPLLMNTDQLAEVQEFFSD

SEQ ID NO: 163731 - protein, 41 aa, Glycine max
  Clone ID: PAT_MRT3847_118869C.1.pep
ARVWLQYDLMLLFYMHAFDLLPMLSRFYSHYYMVQYLYLFI

SEQ ID NO: 163732 - protein, 26 aa, Glycine max
  unsure (1)..(26): unsure at all Xaa locations
  Clone ID: PAT_MRT3847_11886C.1.pep
SXSPNGGLARALVIVVNLNQACSSAL

SEQ ID NO: 163733 - protein, 199 aa, Glycine max
  Clone ID: PAT_MRT3847_118870C.1.pep
MRLELTLKKQTVKSKHETDANEVRACQSKQSDQSLQEDNKGNAKRKRVSKSQSSAPAVIKQVKSTKKVENQRYSLRRQSAGLKAEKPEPACVLLRVLLTPHLLVFSAMVSGPASLGSFALGVAWDASESARPSNPEQVHVKKNVEKKRQSMRRQTNRFRPENPEPAEDCFKTDDAKFNVSQLSDNMSEKKLSNNINCNF

SEQ ID NO: 163734 - protein, 62 aa, Glycine max
  Clone ID: PAT_MRT3847_118871C.1.pep
GGSVLNECESNVTTTMAEYERGFTFEKLTPPSTFHRSFLLSFGPSYNTFQVDFFKLIVLLVA

SEQ ID NO: 163735 - protein, 80 aa, Glycine max
  Clone ID: PAT_MRT3847_118872C.1.pep
SNAAGSRLLLVSIPISLRSFTRVRGSTASTAQNMPTTNLALKGPTLHYSLAPREISPRSFNLTPVTCKVWEQVWELLTRT

SEQ ID NO: 163736 - protein, 52 aa, Glycine max
  Clone ID: PAT_MRT3847_118873C.1.pep
KKYIKKKLNDSSWISIMYDIKTCSAIAAQKDSYPVSSPFFFFWFFLKKVQVT

SEQ ID NO: 163737 - protein, 56 aa, Glycine max
  Clone ID: PAT_MRT3847_118874C.1.pep
IRLVAEQAPRALPVSDVHFGGGTPTTIAPADFLALMALLRRCFAFSKSATIAIEID

SEQ ID NO: 163738 - protein, 89 aa, Glycine max
  Clone ID: PAT_MRT3847_118875C.1.pep
EMATSISWRQLSCSGLWTVSLIHNRSLLLLSHAHELFWRRPVAIKGHRHRAGYAAKRAWTHNKCCECTSAAGCACARICTGIIQMKTSE

SEQ ID NO: 163739 - protein, 128 aa, Glycine max
  Clone ID: PAT_MRT3847_118876C.1.pep
VASFSFLRGMTRTTLDFSSTFQRPHPTAIIMPSPSLPFSLTVHNHHHHYPLKAPIPYSFIRNIIIIIHQPFAPHAAASDDDHHLHHHKHHTTAQAQEEDDEEHSQGRSKVAAASLMRMRKTLLWYLAS

SEQ ID NO: 163740 - protein, 87 aa, Glycine max
  Clone ID: PAT_MRT3847_118877C.1.pep
MASLIPGVLLKLLQSMDSDVKVNGEYRSVLLQVISIVPAITGSELWPNQGFFLKVSDSSHSTYVSLSKEDNELILNNKLQLGQFFYV

SEQ ID NO: 163741 - protein, 94 aa, Glycine max
  Clone ID: PAT_MRT3847_118878C.1.pep
YYFYFFVFFFFFFLFFFVFPDGAQMGKNLLFPPKSHYNFWGNQGGFKGQKGTKFLSQKREKKTHTLEKIVTKSLKWMSIFCISQNPNDHLNSFS

SEQ ID NO: 163742 - protein, 44 aa, Glycine max
  Clone ID: PAT_MRT3847_118879C.1.pep
AVWVCAVGVLSVLAICPLVSLLLFRVYPQSVLDAVFKLKSTLVG

SEQ ID NO: 163743 - protein, 98 aa, Glycine max
  unsure (1)..(98): unsure at all Xaa locations
  Clone ID: PAT_MRT3847_11887C.1.pep
MAAPFFSTPFQPYVYQSPQDAIIPFQILGGEAQVVQIMLKPQEKIIAKPGSMCFMSGSIEMENAYLPENEVGIWQWLFGKTITSIALXNSGPSDGFVG

SEQ ID NO: 163744 - protein, 99 aa, Glycine max
  Clone ID: PAT_MRT3847_118880C.1.pep
YIETLEIEQRKLSRNSNGHNFSLGGPIQAHNISRRSKLNNGSSREIQMVITFHSEVRFKRIIYRDARKLNSGSSRNIQMVITFHTEVRFRGIIYRDVRN

SEQ ID NO: 163745 - protein, 53 aa, Glycine max
  Clone ID: PAT_MRT3847_118881C.1.pep
MVHVDDDYIDMELCSSPNFFSYSLSSPPSNREFEFQMSEKESSTSPADDLFYK

SEQ ID NO: 163746 - protein, 52 aa, Glycine max
  Clone ID: PAT_MRT3847_118882C.1.pep
ILAGTVITPLTLAFCMEGSCWTYMDDCGMLIHNRPNWILGRAYAKLNSYLLV

SEQ ID NO: 163747 - protein, 224 aa, Glycine max
  Clone ID: PAT_MRT3847_118883C.1.pep
VYDNMHNGNLQDHLNGIGERKMDWPLRLKVALGAAKGLAYLHSSSCLGIPIVHRDFKSTNVLLDAKFEAKISDFGLAKLMSEGQETHVTARVLGTFGYFDPEYTSTGKLTLQSDVYAFGVVLLELLTGRRAVDLNQGPNDQNLVLQVRHLLNDRKKLLKVIDPEMARNSYTMESIFTFANLASRCVRSESNERPSMVDCVREIQMIMYTNSKGLGMVMHRLRLV

SEQ ID NO: 163748 - protein, 101 aa, Glycine max
  Clone ID: PAT_MRT3847_118884C.1.pep
KNLCRLENMRSEFHWIKNKANVLKTMGMVYKQKLETKSSDLSKAEAEVDLLGDEVDTLLSLLEKIYIALDHYSPILQHYPGIIEILELVRRELTGDSRKHV

SEQ ID NO: 163749 - protein, 53 aa, Glycine max
  Clone ID: PAT_MRT3847_118885C.1.pep
FHIILISKSLNYCTSQSTRYQQLIRSLGRRSSPRVSPRVCGRVDRPGNPDRYR

SEQ ID NO: 163750 - protein, 58 aa, Glycine max
  unsure (1)..(58): unsure at all Xaa locations
  Clone ID: PAT_MRT3847_118886C.1.pep
TSPQTLLSXAPDQXLCLSIALVTYTLLHIDSNWDFLRKSKRGRENLNEFEIGLRDCSN

SEQ ID NO: 163751 - protein, 68 aa, Glycine max
  Clone ID: PAT_MRT3847_118887C.1.pep
AASSDSGHMIVGSLELQWATVVPNVGPFGGLMKDAVGLICRIIVWWAKGKWAIVQEVCINELSREKLS

SEQ ID NO: 163752 - protein, 84 aa, Glycine max
  Clone ID: PAT_MRT3847_118888C.1.pep
KHNTTQHTVFHFLSHTNLLRFHLLLRRYNYYLAHGSHKRDRLNLLPRGPRLCELRTAWQKESGLLRLTFPGVGLTGLTAIIVTT

SEQ ID NO: 163753 - protein, 55 aa, Glycine max
  Clone ID: PAT_MRT3847_118889C.1.pep
MYWGVNWSNTNTYQTDERTLTIMVWSSEKRGYRKTDGRMEDNLIKRSRIQKTLSH

SEQ ID NO: 163754 - protein, 51 aa, Glycine max
  Clone ID: PAT_MRT3847_11888C.1.pep
GFFPVILGFFVRNPQNVYIFNDKDKVVACQTLVRVVGFGPFVSTHFFIGCL

SEQ ID NO: 163755 - protein, 155 aa, Glycine max
  Clone ID: PAT_MRT3847_118890C.1.pep
YPNKSAALKSVENAFGQEPVASDEVAPTELKVGATQHFILIDGTWSNSAAMFRRLQDKAKSVWGDEDLSCISLNPGASAMHKLRPQPSWDRTCTAAAAAGLLSELQLLPQFSSVELEKQAEAVEHALTVLLDALTNRRLRMGRSITRKMRHTNIQ

SEQ ID NO: 163756 - protein, 111 aa, Glycine max
  Clone ID: PAT_MRT3847_118891C.1.pep
NTTTFRGNRFFPGITLVMQDFLQLLGRKQLKISFLQVQIIRNRKKNDKTYFHLIIISTSTFFFLFHSQSSLPCKRHENSLMSNPYDSYGSIIRMNFVFFFKNGFLIHMKSI

SEQ ID NO: 163757 - protein, 95 aa, Glycine max
  Clone ID: PAT_MRT3847_118892C.1.pep
VVPLEIRNEANNRIELEGERERWWSVFFLILLDLLFLFVIVPNTFQTLYLLLGSSIPDILCQTRSGSRDQKHVVLAEICGQHAVVVGIRGTSVVP

SEQ ID NO: 163758 - protein, 465 aa, Glycine max
  Clone ID: PAT_MRT3847_118893C.1.pep
MGRETMCLPTPPTTATTTVNPVPPPAPAPPTSLAPGFRFHPTDEELVIYYLKRKVSGKSFRFDAISEVDIYRSEPWDLADKSRLKTRDQEWYFFSALDKKYGNGGRMNRATSKGYWKATGNDRPVRHDQRTVGLKKTLVFHSGRAPDGKRTNWVMHEYRLVEEELERAGSGSSQPQDAYVLCRVFHKNNIGPPNGQRYAPFIEEEWDDASGMVPGADPGDNRSFAHQPHVEGKGGVLCAEGRNGAVQDTQSFNKAPFDVNKLPIETQNLLAVCKRESMAEYPSPEKDDNNCKHMDDYPSPQTDNPKPFSQIYKRRRHNLNSNNSHVSGDSIRTSQDPCSSTITTAATALPTTNAAAGTATNTAPKKHFLSALVEFSLLESLESKDSLASIKTPDFDVENLESSMPPSCAKFIKEMKSEMQKLSVEKETMRFEMMSTQAMINILQSRVDVLSKENEDLKRMVAQNP

SEQ ID NO: 163759 - protein, 72 aa, Glycine max
  Clone ID: PAT_MRT3847_118894C.1.pep
RCPMSSSTHNAFLSGVDVQASSCDYELDRRCELTPGSFLTAVWAVIQQNVLIRLVSPLCGVLSPRGRTGSDP

SEQ ID NO: 163760 - protein, 138 aa, Glycine max
  unsure (1)..(138): unsure at all Xaa locations
  Clone ID: PAT_MRT3847_118895C.1.pep
VXFWPFSPEFSPLSPXNPNXFPTPRKPPPXXXIAXACRXXAXTFCKIAXXSLXERERXQXXXXXHXLXLXWLVVVGRXCXSXSSSXQQXANPSHMHAVAVQNPMKVGTAEEKERRFDYRTCVGFTSDASFTDDSTLPH

SEQ ID NO: 163761 - protein, 100 aa, Glycine max
  Clone ID: PAT_MRT3847_118896C.1.pep
VRVTRRSWMSGRPNDFLLVVYRAESRCEVSFLRSHTAQSRVFIPRVSPLVLTDALCPGDVARSVRHSRLRHPLLDSISAHSRPFCPGFLVAVRIIFHGST

SEQ ID NO: 163762 - protein, 40 aa, Glycine max
  Clone ID: PAT_MRT3847_118897C.1.pep
TISGFYRMLDHKYYMIMHHFSVPLIVAQRPLTRLTAGSSI

SEQ ID NO: 163763 - protein, 42 aa, Glycine max
  Clone ID: PAT_MRT3847_118898C.1.pep
RLYGGSPQFPWKLRHNPKRRGRPQNLGEHQGPFWGQGLLKPR

SEQ ID NO: 163764 - protein, 98 aa, Glycine max
  Clone ID: PAT_MRT3847_118899C.1.pep
YFLFNDQDNFFGFLPVFLFGSNSIRNMVIQILNVNTSSNRHLKIDLWEINPFCRTQPTFFDKDLVSPLPPQSELFTFKGNGSVNSNSQNHPHFLLLSL

SEQ ID NO: 163765 - protein, 114 aa, Glycine max
  Clone ID: PAT_MRT3847_11889C.1.pep
MLLPRFSHLLRHPPPPLHAMARAVTCATQPPHFHRSSGIATSRCGVSLPSKSSLFGRTFHALARCAGEEAATRRRPVAGVRTEQREYRKARRRAPPKSKGKELQLCVEICIEKD

SEQ ID NO: 163766 - protein, 38 aa, Glycine max
  Clone ID: PAT_MRT3847_1188C.1.pep
PYMPLFFLDKLKSSLVGCHNRLLGFQSPYSFPDVFRFN

SEQ ID NO: 163767 - protein, 69 aa, Glycine max
  unsure (1)..(69): unsure at all Xaa locations
  Clone ID: PAT_MRT3847_118900C.1.pep
RNGRNRVLSNYNTINFXPGNGPILKLLIPIMGRKLTSTETGATVPTFYRALGATPRIPDRRLPGKRLYL

SEQ ID NO: 163768 - protein, 88 aa, Glycine max
  unsure (1)..(88): unsure at all Xaa locations
  Clone ID: PAT_MRT3847_118901C.1.pep
FQCIRSQEMLTQMQMSILESQPINTYGRQMKFTQSYCIMQALRTFRILNLIHYWSKSSTARITHGVKHPPSQGPCIXLDAWVGPVILD

SEQ ID NO: 163769 - protein, 45 aa, Glycine max
  Clone ID: PAT_MRT3847_118902C.1.pep
LWTKHEKNPVLTEEEMMGVIRIRDILVDALAKRAHEAEKHVAHES

SEQ ID NO: 163770 - protein, 620 aa, Glycine max
  Clone ID: PAT_MRT3847_118903C.1.pep
FGSRLEEIDLSHNELSGSIPPGSSRLLETLTHLDLSDNHLQGNIPAETGLLSKLTHLNLSWNDLHSQMPPEFGLLQNLAVLDLRNSALHGSIPADICDSGNLAVLQLDGNSFEGNIPSEIGNCSSLYLLSLSHNNLTGSIPKSMSKLNKLKILKLEFNELSGEIPMELGMLQSLLAVNISYNRLTGRLPTSSIFQNLDKSSLEGNLGLCSPLLKGPCKMNVPKPLVLDPNAYNNQISPQRQTNESSESGPVHRHRFLSVSAIVAISASFVIVLGVIAVSLLNVSVRRRLTFLDNALESMCSSSSRSGSPATGKLILFDSQSSPDWISNPESLLNKASEIGEGVFGTLYKVPLGSQGRMVAIKKLISTNIIQYPEDFDREVRILGKARHPNLIALKGYYWTPQLQLLVTEFAPNGSLQAKLHERLPSSPPLSWAIRFKILLGTAKGLAHLHHSFRPPIIHYNIKPSNILLDENYNAKISDFGLARLLTKLDRHVMSNRFQSALGYVAPELACQSLRVNEKCDVYGFGVMILELVTGRRPVEYGEDNVLILNDHVRVLLEQGNVLECVDQSMSEYPEDEVLPVLKLAMVCTSQIPSSRPTMAEVVQILQVIKTPVPQRMEVF

SEQ ID NO: 163771 - protein, 283 aa, Glycine max
  unsure (1)..(283): unsure at all Xaa locations
  Clone ID: PAT_MRT3847_118904C.1.pep
GKAVWIMTSLFFSKLAMLFISSNSVVWVSAVLLVADCSSLPLYRDRSKTTSKIKPWQGYARGRTRXADAWVCRETIFEALQWWNGRSPSDGLLLGFCILLTGLACVPIVAIHFSHVLSAKRCLVLVVATGLLFILMQPPLPVSLTYQSNLIKTARHSTDDISIYGYIAGKPTWPSWLLIIAILLTLASVTSIIPIKYIVELRTFYSIAMGVALGIYIAAEYFLWAGILHVLIVVSMVCASVFVVFTHLPSATSTKLLPWVFALLVALFPVTYLLEGQLRIKNI

SEQ ID NO: 163772 - protein, 393 aa, Glycine max
  Clone ID: PAT_MRT3847_118905C.1.pep
MHGRPRKALKQEDEAASAAKAEKLRSLQAQFLANHHNHIYSKEALDVSAKLLEVNPECYTAWNYRKLAVQHLLSNSDSDPHSIFDDELKLVEIALRKNFKSYGAWHHRKWVLSKGHSSIDNEMRLLNGFQKMDPRNFHAWNYRRFVAELMKRSDEDELKYTEEVIATNFSNYSAWHNRSVLLSNLLKRKAEGYFPKEKVLEEEFEHVHNAIFTDPDDQSGWFYHLWLIQQTVKIDAPLLVSSWPSHGSNITLIGDNDLRGCGLSLLNGTLSNPGTLPIILYFNQAVEGINSSTVAIKSELLKEELVWKPLSMNNSNTAQNLFVYLNLANLELQLSKTYSVEINIGHSKGIISSNGNHYGDPSQISFKVFVQTAYTEPTEGQGGKRTTWMDTNL

SEQ ID NO: 163773 - protein, 82 aa, Glycine max
  Clone ID: PAT_MRT3847_118906C.1.pep
ELASMSYLPAGATVLRWTASNGGVGVYVGVIVRVIAAGDVLALSISLPCRLGDPEIMNLILQTFAFDSALSFIQYQYHVVCS

SEQ ID NO: 163774 - protein, 53 aa, Glycine max
  Clone ID: PAT_MRT3847_118907C.1.pep
LSQFIIPDEDFETGAYLLKFMPSMCFHQFHLSRTRIPTLQRRYSSQQRQLQHV

SEQ ID NO: 163775 - protein, 39 aa, Glycine max
  unsure (1)..(39): unsure at all Xaa locations
  Clone ID: PAT_MRT3847_118908C.1.pep
XXXXELXDLXVRXAYEXXQIDTFXXVLDXNTFVXLAYEG

SEQ ID NO: 163776 - protein, 78 aa, Glycine max
  unsure (1)..(78): unsure at all Xaa locations
  Clone ID: PAT_MRT3847_118909C.1.pep
PLPLPPLLVCSPFSFAXXCVFLRLLLGXLAPPWRVLSCXFLLSPRAGSFPLCFACLGASVCCWFVLLWLCPRXLASGL

SEQ ID NO: 163777 - protein, 101 aa, Glycine max
  Clone ID: PAT_MRT3847_11890C.1.pep
LARPTHAFVIFSLARYRDEELLAQARAPRTLLQFIKKFAFLCEHGDYDLASVHGYVKPYFNGNTPERVMAWTGTTITAGFDKARAAVDITKVAERESVMRN

SEQ ID NO: 163778 - protein, 476 aa, Glycine max
  unsure (1)..(476): unsure at all Xaa locations
  Clone ID: PAT_MRT3847_118910C.1.pep
MEMLRRSSRRIFVSACVWLLLSLSPSPPSVVNASHGVFNVKCKYQDRSLSALKAHDYRRQLSLLAGVDLPLGGSGRPDAVGLYYAKIGIGTPPKNYYLQVDTGSDIMWVNCIQCKECPTRSSLGMDLTLYDIKESSSGKLVPCDQEFCKEINGGLLTGCTANISCPYLEIYGDGSSTAGYFVKDIVLYDQVSGDLKTXYSANGSIVFGCGARQSGDLSSSNEEALGGILGFGKANSXMISQLASSGKVKKMFAXHCLNGVNGGGIFAIGHVVQPKVNMTPLLPDQPHYSVNMTAVQVGHTFLSLSTDTSTQGDRKGTIIDSGTTLAYLPEXFYEPLVYKIILQHPDXKVRTLHDEYTCFQYSESVDDGFPAVTFYFKNGLXVKGLPHDYLFPSWDFWFFGWPNXGNNPEITKIITLLGDLWLSIKLAFYDLETLVIGGIKYTYFQAFKXGGEGTGTVPLIGSPFNSFCFCFNHELG

SEQ ID NO: 163779 - protein, 134 aa, Glycine max
  Clone ID: PAT_MRT3847_118911C.1.pep
TTLFFPPSKGNPKGFLPGWGKNPKGFLAWVFHSRATFLPPLGGFLKRGGPPSPLFCKICRGPWKFFPKKKGFFFNSPPGPPFVFPRGGAKIFPFPIAKSFWVVFVRIKGGFGPPPPPPLKNPLLKGAPPKSPLC

SEQ ID NO: 163780 - protein, 219 aa, Glycine max
  unsure (1)..(219): unsure at all Xaa locations
  Clone ID: PAT_MRT3847_118912C.1.pep
MRIPHVPFLSFIFCYCFLIHHSVYYTGVKAQIVEDQQQSLLKLKNSLKFETNKSTKLVSWNPSVDFCEWRGVACDEDGQVTGLDLSGESIYGGFDNSSTLFSLQNLQILNLSANNFSSEIPSGFNKLKNLTYLNLSHAGFVGQIPTEISYLTRLVTLDISSVSYLYGQPLKLENIDLQMLVHNLTMLRQLYMDGVIVTTXGYKWSNALFKLVNLQELSM

SEQ ID NO: 163781 - protein, 324 aa, Glycine max
  Clone ID: PAT_MRT3847_118913C.1.pep
MAQNNFWHIFCETRNIFEAHSRHLLTLSLIFLFPLSFSLLLSPTLSNLFNHFYTNIIPYPYNYSSTTNPNYKHHSLFFHLLYSLFTFIFSNCGVISITYSVFHFFNDQSLNLNLKSTITKSISTSFLPLLATTIVSHVIIFFVSLLYALLLVLIICGAIFFNVTTSYSSLYYFIGFLIALPLLFFLIYLQVNWTLVPVIVILESCWGLEALKRSARLVRGMKRVALSSLFVYGFFEVIVVLNGLLVTKDLNGTSDGWVLVVSYWVFIVSQSYFVAVFMVSKIAFNTVLYAYCKPNHGEVIVEEFEKEGLIGLPFHDDGKVSNAV

SEQ ID NO: 163782 - protein, 274 aa, Glycine max
  Clone ID: PAT_MRT3847_118914C.1.pep
MKHHSLSFKWLLLIFLTHSTLLTATHSLTIPRMSPIPEWETTLHNHPAINTEEVKTFYFKQVLDHFNYRPESYTTFQQRYLINFKYWGGANSSAPIFAYFGAESPIDNSPNGVGFLTDNAASFNALLVYIEHRYYGKSVPFGSREEALKNASTIGYFNSAQALADYASILKHVKKTLHAKNSPVIVIGGSYGGMLASWFRLKYPHLAIGALASSTSILYFDKITPQNGYYSTVTRDYREASETCYETVLKSWSEIRRIASQPNGLVTLSQRFNT

SEQ ID NO: 163783 - protein, 352 aa, Glycine max
  Clone ID: PAT_MRT3847_118915C.1.pep
CKAGMGRTGLMICSLLLFLKFFPTAEEAIDYFNHKRCVDGKALVLPSQIRYVKYFERTLTHFNGEVQPGRRCMLRGFRLHKCPYWVRPSITISDHTGILFTTRKHPKTKDLMPEDFWISVPKKGIVVFALPGEPGLAELVGDFKIQFQDRQGDFYCWMNTTMTENRKFLDGSDFDGFDKRKIPAPGFKVEVVMIDYNGTLPANTKSNPASKGSDGNTSNALPGPKSTTSNSSESKVPRNGDDDVFSDSDEEETRDTQSNKAAAEYKFMAPHQVSETTNDHVGMLTQKTDQLSLQHEECKQNDASEESDTDKLHKNHTGNKSINMGSVGASDIKAIAADASVFSFGDEDFESD

SEQ ID NO: 163784 - protein, 142 aa, Glycine max
  Clone ID: PAT_MRT3847_118916C.1.pep
LELKTRSWRKIEGMYPYVNGGAQAPPLVAVVDNQLYAVEHLTNMVNKYDKERNTWSELGRLPVRADSSNGWGLAFKACGEKLLVVSGQRGPEGEAVVLNSWRPRTGFRNGTIDWKVLGVKEHVGVFVYNCAVMGWSGEMLLD

SEQ ID NO: 163785 - protein, 221 aa, Glycine max
  unsure (1)..(221): unsure at all Xaa locations
  Clone ID: PAT_MRT3847_118917C.1.pep
HASVKEDIQNVVVVXCKAGMGRTGLMICSLLLFLKFFPTAEEAIDYFNHKRCVDGKALVLPSQIRYVKYFERTLTHFNGEVQPGRRCMLRGFRLHKCPYWVRPSITISDHTGILFTTRKHPKTKDLMPEDFWISVPKKGIVVFALPGEPGLTELVGDFKIQFQDRQGDFYCLLKTPMNFRLATLFFCFSLTYQNHYDCIVAYIVILLESFLYEGLNVYHDE

SEQ ID NO: 163786 - protein, 67 aa, Glycine max
  Clone ID: PAT_MRT3847_118918C.1.pep
FASCLCTLFSLPTCYVLGEETTFPSALAFHIHLAHDTFTQPTSWILCLFFPAGFKIPHLYIWNIEHL

SEQ ID NO: 163787 - protein, 114 aa, Glycine max
  unsure (1)..(114): unsure at all Xaa locations
  Clone ID: PAT_MRT3847_118919C.1.pep
RGXYXRERXXCERYIYTARMQDSCSVFFFLFLXMDLCLWRCACLFFPKSANKNKYCFWLWGGNASGVFFFSFWPRFSSLSKKKKXXFLSFLFLSLFYXLGIXLYSXSRXKGLTX

SEQ ID NO: 163788 - protein, 108 aa, Glycine max
  unsure (1)..(108): unsure at all Xaa locations
  Clone ID: PAT_MRT3847_11891C.1.pep
MARHFLLLALLLFAAVATDVMEEADCYAHYILIPSCWRHDVVYAEEDDXLLNAEHQFQSLNGKVVKTYTDKEEREHMLWEFKSNLHRTRLHAXLDPSPVHCVTKCYDL

SEQ ID NO: 163789 - protein, 85 aa, Glycine max
  Clone ID: PAT_MRT3847_118920C.1.pep
VRELSSDTTTDMTIRKSATMGSLTHYTDYTSHRLHVSENNPSLPGETHKHARGDSRATATMTSDQALLLANAIDEEHIHGLATII

SEQ ID NO: 163790 - protein, 97 aa, Glycine max
  Clone ID: PAT_MRT3847_118921C.1.pep
LPSFNFFQIYLSLPSMPMAPPILLPFFLSFLSLCLLINANGVMRSFQEKKIFNVQTLQNKHQLGNQACLLPESRKEKGAIVLEMKDRGHCSEKKIDW

SEQ ID NO: 163791 - protein, 78 aa, Glycine max
  Clone ID: PAT_MRT3847_118922C.1.pep
QKVFHFLHVFLFLMQIPFCVVIGWIIGQPMDLNFQLFETAALFLTVIVVAFMLQVCIQSQKKKKKKKKKSGRSNSDAW

SEQ ID NO: 163792 - protein, 67 aa, Glycine max
  unsure (1)..(67): unsure at all Xaa locations
  Clone ID: PAT_MRT3847_118923C.1.pep
RTWICTFDFNATPHKIDATKPLAATRDNKSDIKLLGNNSSSKNKXQKWNKNKNLXSHLAQTPAHTET

SEQ ID NO: 163793 - protein, 133 aa, Glycine max
  Clone ID: PAT_MRT3847_118924C.1.pep
LFNIVAEGLTGLMREALDKSLYSSLMVGKNKIPVNILQYADDTIFLGEATMQNVMTIKSMLRVFELASGLKIHFAKSSFGAIGKPDHWAKEAGLNTFNCRNLIVHIRQLDQAFDKMSFILRCFLLNQRFKLCP

SEQ ID NO: 163794 - protein, 776 aa, Glycine max
  Clone ID: PAT_MRT3847_118925C.1.pep
KRELKAAGIDIRQRKRKRKGIDYNAEISFEKRPPPGFFDVTDEDRPVEQPQFPTTIEELEGKRLLDVEAQLRKQDIAKNKIAQRQDAPSAILHASKLNDNQTVRKRKKLMLAPPQISDQELDEIAKLGYASDLAGSQELAEGSRATQALLTNYAQTPGQGMTPLRTPQRTPAGKGDAIMMEAENLARLRESQTPLLGGENPELHPSDFSGVTPKKKEIQTPNPMLTPSATPGAAGLTPRIGMTPTRDGFSFSMTPKGTPLRDELHINEDMNMHDSTKLELQRQADMRRSLRSGLGSLPQPKNEYQIVMPPVLEDAEEPEEKIEEDMSDRIAREKAEEEARQQALLRKRSKVLQRELPRPPTASLELIRNSLMRTDGDKSSFVPPTSIEQADEMIRRELLTLLEHDNGKYPLDDKVIKEKKKGAKRAVNGSAVPVIEDFQEDEMKEADKLIKEEALYLCAAMGHEDEPLDEFIEAHRTCLNDLMYFPTRNAYGLSSVAGNMEKLAALQNEFENVRNKLDDGKEKTVRLEKKVMVLTQGYEMRVKKSLWPQIEATFKQMDVAATELECFKALQKQEQLAASHRINNLWAEVQKQKELEKTLQNRYGSLIEELEKMQNVMDQCRLLAQQQEEIEANNHARESTETPETKAGETDVQSTENCETVPDSVEHGHALAVESSDDGTADQQVDIVHDQATSSVSHDMDVDSDKLANPTPAAENVDGKLEVTATASYTDDGKTMLEMGAAVEVSSSPNHDVVADAVNSHDNSMEETNAVGEETN

SEQ ID NO: 163795 - protein, 79 aa, Glycine max
  Clone ID: PAT_MRT3847_118926C.1.pep
MSGRSNHGTINSFNNHGNGNQNFAGATINSGANSGNRNSYSTANYYGGHTINNSGTFNGNGNGSFIKGGFNSSTMNYYR

SEQ ID NO: 163796 - protein, 71 aa, Glycine max
  Clone ID: PAT_MRT3847_118927C.1.pep
GAIACYGKLPSLKMSRVRAEKPSSEMWKDAASTIVSELCFTSSSCVELITDNPVSMSPLGARNLLLSRYTG

SEQ ID NO: 163797 - protein, 60 aa, Glycine max
  Clone ID: PAT_MRT3847_118928C.1.pep
MDAGCKITKGAAGRKGGGPKKKPLSRSVKAGLHIPVGRIGRYLKKGRYSQRVCTGAPVYL

SEQ ID NO: 163798 - protein, 86 aa, Glycine max
  unsure (1)..(86): unsure at all Xaa locations
  Clone ID: PAT_MRT3847_118929C.1.pep
MSLTPNDDADVKPYGLSSEAHEDRYNLSNDAPLLHMAECLICQEEDSVSCLETPCSCSGCLNVGHRTXVQLWXIDKGNITCEIMHK

SEQ ID NO: 163799 - protein, 72 aa, Glycine max
  Clone ID: PAT_MRT3847_11892C.1.pep
TPGCSPPPPGLRGWGGTLLSNLTDNPIKGDFSAGVAQKKKTPICVEGFFFFFPRKGKSEKVNQRDRRFKALP

SEQ ID NO: 163800 - protein, 55 aa, Glycine max
  Clone ID: PAT_MRT3847_118930C.1.pep
STTSATSALTFRGAGSLTQGVLCTGVILPGGGPISSVGLLLVAAHLKGSEIMLQG

SEQ ID NO: 163801 - protein, 78 aa, Glycine max
  Clone ID: PAT_MRT3847_118931C.1.pep
GPVLLSIRCQEGHFYALASRQFLILYCKLDLQPCNLRHHRVWLAKTNFLPTIYVFTSHHYPLSGEDECSPKKPLFGTR

SEQ ID NO: 163802 - protein, 70 aa, Glycine max
  Clone ID: PAT_MRT3847_118932C.1.pep
LKTCCNLPASRENYIKSMKAHLERNFFWGLFVPFALNITNWSLQGVSPSDVWKHNDQQVGFDPQVGLVHH

SEQ ID NO: 163803 - protein, 85 aa, Glycine max
  unsure (1)..(85): unsure at all Xaa locations
  Clone ID: PAT_MRT3847_118933C.1.pep
VKTLDXSXNSXXGTXPXXXQXXRRLTWXXXQNNSIXGAXPDFNLPSLXHLNLSXNNLNGSIPXXXXXXPXHXFVGNXLLCGPPLX

SEQ ID NO: 163804 - protein, 84 aa, Glycine max
  Clone ID: PAT_MRT3847_118934C.1.pep
LTPFVDFATERFNNNNKKGCALRGVVFVGDYADLHVIYYFTISKTKRARERRKKTECSFLFSHLLYKKKTIPFLLILPLIPYIN

SEQ ID NO: 163805 - protein, 99 aa, Glycine max
  Clone ID: PAT_MRT3847_118935C.1.pep
NELPLVIYTGGAIYDYTTSFQTWSQSIYIAIMDRTGGPLRRMKRKTLAAVLMIAYTSVIPTFAYCGVCYPDNSCAREEWNGADDPYSQPFVDVPALLIR

SEQ ID NO: 163806 - protein, 66 aa, Glycine max
  Clone ID: PAT_MRT3847_118936C.1.pep
SRLHTNIFNITWLLCCINLQSNNLVVNHCIRMYSGRTVCYFLCFHSELHYIYNLLEIRLRKPFAHE

SEQ ID NO: 163807 - protein, 92 aa, Glycine max
  Clone ID: PAT_MRT3847_118937C.1.pep
GRYHRHHTRSHGPSESRHIWPCVRPLKRLGGHTTQVISSSINSQVAGHHSIDRVRCEHLFNMRHTTPTPACVADVNLELLPLVQGHECPVGG

SEQ ID NO: 163808 - protein, 76 aa, Glycine max
  unsure (1)..(76): unsure at all Xaa locations
  Clone ID: PAT_MRT3847_118938C.1.pep
SVFSTKPVPLLVVLLDXAGTPSVSSLADXVPLLVSLLRQPGTPSSRSLDQTGTPSSQSSRQPVETRRSRXRXIPDR

SEQ ID NO: 163809 - protein, 264 aa, Glycine max
  Clone ID: PAT_MRT3847_118939C.1.pep
MAASTMALSSSSLAGQAIKLAPSTPELGVGRVSMRKTASKTVSSGSPWYGPDRVKYLGPFSGEPPSYLTGEFPGDYGWDTAGLSADPETFAKNRELEVIHSRWAMLGALGCVFPELLSRNGVKFGEAVWFKAGSQIFSEGGLDYLGNPSLIHAQSILAIWATQVILMGAVEGYRIAGGPLGEVTDPIYPGGSFDPLGLADDPEAFAELKVKELKNGRLAMFSMFGFFVQAIVTGKGPLENLADHLADPVNNNAWAYATNFVPGK

SEQ ID NO: 163810 - protein, 221 aa, Glycine max
  Clone ID: PAT_MRT3847_11893C.1.pep
MSTKECCHHDEERRQLPRRVFAAILGFILLILLVIFLIWIILRPTKPRFILQDATVYAFNLSSTGDTPSPITPTPNTLTLTMQVTLAAFNPNHRIGVYYTKLDAYAAYRGQQVSVATSLPATYQGHRDTSVWSPYLYATAVPVSPFTLQILQQDKTSGGILVNVKVNGRVKWKVGTWVSGIYHINVNCPAYLRLAGDRDDAIGFAGPAVKFQLFQTCIVDV

SEQ ID NO: 163811 - protein, 126 aa, Glycine max
  unsure (1)..(126): unsure at all Xaa locations
  Clone ID: PAT_MRT3847_118940C.1.pep
WYGPDRVKYLGPFSGEAPSYLTGEFPXGLSADPETFAKNRELEVIHSRWAMLGALGCVFPELLARNGVKFGEAVWFKAGSQIFSEGGLDYLGNPSLIHAQSILAIWATQVILMGAVEGYRIAGGPL

SEQ ID NO: 163812 - protein, 265 aa, Glycine max
  unsure (1)..(265): unsure at all Xaa locations
  Clone ID: PAT_MRT3847_118941C.1.pep
MAASTMALSSSSLAGQAIKLAPSTPQLGVGRVSMRKTASKTVXSSGSPWYGPDRVKYLGPFSGEPPSYLTGEFPGDYGWDTAGLSADPETFAKNRELEVIHSRWAMLGALGCVFPELLSRNGVKFGEAVWFKAGSQIFSEGGLDYLGNPSLIHAQSILAIWATQVILMGAVEGYRIAGGPLGEVTDPIYPGGSFDPLGLADDPEAFAELKVKELKNGRLAMFSMFGFFVQAIVTGKGPLENLADHLADPVNNNAWAYATNFVPGK

SEQ ID NO: 163813 - protein, 133 aa, Glycine max
  Clone ID: PAT_MRT3847_118942C.1.pep
SGSQIFSEGGLDYLGNPSLIHAQSILAIWATQVILMGAVEGYRIAGGPLGEVTDPIYPGGSFDPLGLADDPEAFAELKVKELKNGRLAMFSMFGFFVQAIVTGKGPLENLADHLADPVNNNAWAYATNFVPGK

SEQ ID NO: 163814 - protein, 178 aa, Glycine max
  Clone ID: PAT_MRT3847_118943C.1.pep
MMALDMIDVVPRTRMEEAASAGLKSMEHLIRLLSPTSSNSNSSSSPLLNTNPNNLHCSQITDFTVSNFKQVINLLNRTGHARFRRSPPQAQAQAQTQTQTQTSLQPQPETQQGFSLDFVKPTILNSKPSNKDETLTLSTTSYFSFTSSVTNDASVSDGKIGPFLPPSAAKPPLSSVGS

SEQ ID NO: 163815 - protein, 264 aa, Glycine max
  Clone ID: PAT_MRT3847_118944C.1.pep
MAASTMTLSSSSLAGQAIKLAPSTPELGVGRVSMRKTASKTVSSGSPWYGPDRVKYLGPFSGEPPSYLTGEFPGDYGWDTAGLSADPETFAKNRELEVIHSRWAMLGALGCVFPELLSRNGVKFGEAVWFKAGSQIFSEGGLDYLGNPSLIHAQSILAIWATQVILMGAVEGYRIAGGPLGEVTDPIYPGGSFDPLGLADDPEAFAELKVKELKNGRLAMFSMFGFFVQAIVTGKGPLENLADHLADPVNNNAWAYATNFVPGK

SEQ ID NO: 163816 - protein, 265 aa, Glycine max
  Clone ID: PAT_MRT3847_118945C.1.pep
VVFRTRMEEAASAGLKSMEHLIRLLSPTSYNSNSSSSPLLNTNPNNLHCSQITDFTVSNFKQVINLLNRTGHARFRRSPPQAQAQAQTQATQTQTSLQPQPETQQQGFSLDFVKPTILNSKPINKDETLTLSTTSSSFMSSVTNDASVSDGKIGPFLPPSAAKPPLSSAHRKKCRDAAAALSAKPSCHCSKKRKSRVKRTIRVPAISSKIADIPPDEYSWRKYGQKPIKGSPYPRYYSIPSSIFMLNRSKSNADLKVLSFRINYD

SEQ ID NO: 163817 - protein, 63 aa, Glycine max
  Clone ID: PAT_MRT3847_118946C.1.pep
TRRLVAAQELLLGPHMLECCMLADGARYLNSDLPLSSSRETESIGYKMLGRKMYMSIFILGSS

SEQ ID NO: 163818 - protein, 168 aa, Glycine max
  Clone ID: PAT_MRT3847_118947C.1.pep
TALCDAGWASDVDDHRSTLGSAIFLGPNLISWWSRKQQVTAQSSTEAEYRSIAQTSAELTWIQALLMELQIPFTPPVILCDNKSAVAIAHNLVFHSRTKHMEIDVFFVHEKVLSKQLQIFHIPALDQWAGILTKPLSSARFTFLKSKLTVKGFSSEKPMSLRGGGGGY

SEQ ID NO: 163819 - protein, 265 aa, Glycine max
  unsure (1)..(265): unsure at all Xaa locations
  Clone ID: PAT_MRT3847_118948C.1.pep
MAASTMALSSSSLAGQAIKLAPSTPQLGVGRVSMRKTASKTVSSGSPWYGPDRVKYLGPFSGEPPSYLTGEFPGDYGWDTAGLSADPETFAKNRELEVIHSRWAMLGALGCVFPELLARNGVKFGEAVWFKAGSQIFSEGGLDYLXGNPSLIHAQSILAIWATQVILMGAVEGYRIAGGPLGEVTDPIYPGGSFDPLGLADDPEAFAELKVKELKNGRLAMFSMFGFFVQAIVTGKGPLENLADHLADPVNNNAWAYATNFVPGK

SEQ ID NO: 163820 - protein, 120 aa, Glycine max
  Clone ID: PAT_MRT3847_118949C.1.pep
SSAHRKKCRDAAPALSTKPSCHCSKKRKSRVKRTIRVPAVSSKIADIPSDEYSWRKYGQKPIKGSPYPRGYYKCSTVRGCPARKHVERAQDNPKMLIVTYEGEHRHVLPLTAAAGVSFGH

SEQ ID NO: 163821 - protein, 65 aa, Glycine max
  Clone ID: PAT_MRT3847_11894C.1.pep
KVTMHHDFLLMVSTFGKTILGIGNFMDSYTMIWGEILFNLTILIWGGGILSRICFYITRPKFCWP

SEQ ID NO: 163822 - protein, 298 aa, Glycine max
  Clone ID: PAT_MRT3847_118950C.1.pep
MMALDMIDVVPRTRMEEENIAIQEAASAGLKSMEHLIRLLSPSSSLHNNLNNLNLNHLDCSEITGFTVSKFKQVINLLNRTGHARFRRSPPQAQAQAQAQAQAQAQTNPQPQPQIQQQGFSLDFVKPTILNSKPINKDETLTLSTTSSSFMSSVTNDASVSDGKIGPFLPPSAAKPPLSSAHRKKCRDAAAALSAKPSCHCSKKRKSRVKRTIRVPAISSKIADIPPDEYSWRKYGQKPIKGSPYPRGYYKCSTVRGCPARKHVERAQDDPKMLIVTYEGEHRHVLPLTSAAGVSFGH

SEQ ID NO: 163823 - protein, 54 aa, Glycine max
  Clone ID: PAT_MRT3847_118951C.1.pep
KPGDYFMNRVEHKTQNFTSNNHFSLNIYFLISHTISPTLNSFFLNTLQVLENEP

SEQ ID NO: 163824 - protein, 107 aa, Glycine max
  unsure (1)..(107): unsure at all Xaa locations
  Clone ID: PAT_MRT3847_118952C.1.pep
PYPLLRITIQIFVKTLSNKTITFEIESSDTIYNFKAKIQDKESIPPDQQLLIFSGKQLXDCLTLSYYNIQKESTLHLVLXLRFGSNNLKKKTYTKPNKIKHKHKKVK

SEQ ID NO: 163825 - protein, 74 aa, Glycine max
  unsure (1)..(74): unsure at all Xaa locations
  Clone ID: PAT_MRT3847_118953C.1.pep
VLRWCRNPSGTLRYVSNQWLRLVEKTMGRKEYMVTREYTINLHTRSMSAHFXKKTPKAINVIRNFAQKAMVTND

SEQ ID NO: 163826 - protein, 34 aa, Glycine max
  Clone ID: PAT_MRT3847_118954C.1.pep
MEVIQGIDVIQECWIDNCYWTCNAINLSKNYVHP

SEQ ID NO: 163827 - protein, 42 aa, Glycine max
  Clone ID: PAT_MRT3847_118955C.1.pep
VGSDDVETTLCSIYSLGRASSYWLLKYMLSSNLYTIFPTATL

SEQ ID NO: 163828 - protein, 313 aa, Glycine max
  Clone ID: PAT_MRT3847_118956C.1.pep
MGKEQVQVLNALDVAKTQWYHFTAIIIAGMGFFTDAYDLFCISLVTKLLGRIYYHVDGAAKPGSLPPNVSAAVNGVAFVGTLSGQLFFGWLGDKMGRKKVYGMTLALMVIASIASGLSFGHDAKTVMTTLCFFRFWLGFGIGGDYPLSATIMSEYSNKKTRGAFIAAVFAMQGFGILAGGVFAIIIASVFKSKFDSPPYEVDPLGSTVPQADYVWRIILMFGAIPAAMTYYSRSKMPETARYTALVAKNMEKAAADMSKVMNMEIQAEPKKEEEAQAKSYGLFSKEFMSRHGLHLLGTTSTWFLLDIAFYSQN

SEQ ID NO: 163829 - protein, 107 aa, Glycine max
  Clone ID: PAT_MRT3847_118957C.1.pep
MNYNPQAADWALKRQMVHSMSRGIDWLFLVSDDSDFSEMLRRAREADLGTVVVGDWDRALGRHADLWVPWSGVEIGVGVRPFLDLVVAAVMFFPSENEDCKCVLMVW

SEQ ID NO: 163830 - protein, 55 aa, Glycine max
  Clone ID: PAT_MRT3847_118958C.1.pep
LPKNLGTKANSIKDSIPNPVTWPVFVIATLAPIVTRQAVITSTYSIIKQCHALCF

SEQ ID NO: 163831 - protein, 112 aa, Glycine max
  Clone ID: PAT_MRT3847_118959C.1.pep
SFFFFFFFFFFFFFFFLAKLLFLLILKQKTDYKDKGLTILERKILKTGGKRGGGERFPPPKGENHPFIQKLNITLLKKLRLLKKHNTSKAVFMRIQRWGWQSPHGELKARES

SEQ ID NO: 163832 - protein, 55 aa, Glycine max
  Clone ID: PAT_MRT3847_11895C.1.pep
LNLFFYPNPKTHKIKLHQNIPPLFTNINFHYSTPTSTSSIYTTLLSYYTNLLSFI

SEQ ID NO: 163833 - protein, 69 aa, Glycine max
  Clone ID: PAT_MRT3847_118960C.1.pep
LEDRSTRSIDRETMSAGNWCDMGSQMVNAIMDMDNTCPLCQSGLAEQMGHTPRSRSIRSTSHAGFESYR

SEQ ID NO: 163834 - protein, 64 aa, Glycine max
  unsure (1)..(64): unsure at all Xaa locations
  Clone ID: PAT_MRT3847_118961C.1.pep
KHVIKMPQKGKVRFTHAKVSLGXRDLGYKPPPDLAPGLKKFVQWNAGYYGVRFGGKKEKHPALA

SEQ ID NO: 163835 - protein, 69 aa, Glycine max
  unsure (1)..(69): unsure at all Xaa locations
  Clone ID: PAT_MRT3847_118962C.1.pep
FIGNTTLLGAPLLFNGWAXGTRWAGIIRAGCVSSVPIFLNITLAGTDVGYPGGVWFDPLSWGSGSPETI

SEQ ID NO: 163836 - protein, 99 aa, Glycine max
  Clone ID: PAT_MRT3847_118963C.1.pep
PPPFFVFFRGVASNPVLLGVTSFGAWAFGPPAGGGPLALPWCPLFVSCGWGALFFFPPFGETGPATRVFSLGYARVFPFPVFLPPGPCLGFGGPKSCSV

SEQ ID NO: 163837 - protein, 95 aa, Glycine max
  unsure (1)..(95): unsure at all Xaa locations
  Clone ID: PAT_MRT3847_118964C.1.pep
FIFFFSALAVFTAGPSDCAYCWPTRFFGLADLPDLPCHFRPHXLAHLATFLPLAFATLNAHRAIIPACFCHLSARPLAPLYSALADLGRIPPPLS

SEQ ID NO: 163838 - protein, 76 aa, Glycine max
  Clone ID: PAT_MRT3847_118965C.1.pep
VVREKKQFFSNRGGGPGYTPVISGRFFGGSLFSFWGSFLSVGENREKTDSLGKNVMLIKFPKKYRREKNMFNPGGP

SEQ ID NO: 163839 - protein, 77 aa, Glycine max
  Clone ID: PAT_MRT3847_118966C.1.pep
MMESPDSHRCLRPSTCLHYARPLLRRVLFRGLLSPATLERVVQQREYPVGRCPLRDRCSLLTLGVHRLCPQLMRGRP

SEQ ID NO: 163840 - protein, 257 aa, Glycine max
  unsure (1)..(257): unsure at all Xaa locations
  Clone ID: PAT_MRT3847_118967C.1.pep
ARLLSEIECVIRSQELPPARRQQLVNILGHAGSYDLPNYLQAITIIVRELAPKKFLAIVPSIRNRMEYILRRSFAASLDYVREKAVILDEKKGTYTHSSQTDRLLAKMRRRFDEFLTQTCDTADEGIRSYIASTFQVVSFRDGMRLLPLPEEYLSKFLRDELDVGDIEERVRTELADKDEFKHVLPTADPAHLEFLMAPLDNTRELTEKTVLFFRLWAGYLFAAIREHXANSVRVLLYQHFLNPILEGSGEESTRHC

SEQ ID NO: 163841 - protein, 59 aa, Glycine max
  Clone ID: PAT_MRT3847_118968C.1.pep
LVLLWVQDSINKFNCTRSETLFFCNHLTILSLSSVLEPNFPQSAIHMTSRSSRVDLQAC

SEQ ID NO: 163842 - protein, 53 aa, Glycine max
  unsure (1)..(53): unsure at all Xaa locations
  Clone ID: PAT_MRT3847_118969C.1.pep
LSNFXSKRXXXNXPERXXGNQXXLQXKXXATFAVEKXXSPXEXEDXPKVSEFK

SEQ ID NO: 163843 - protein, 86 aa, Glycine max
  Clone ID: PAT_MRT3847_11896C.1.pep
AAFSFSYFPSFPVSTPFPQFTISLAMPSRQLPTSAPPPNHRVSTPLFAFTASVCSLFFLALLCLRKRQPNNSILEPPSTVPLPRPP

SEQ ID NO: 163844 - protein, 75 aa, Glycine max
  Clone ID: PAT_MRT3847_118970C.1.pep
WILVNRIYHACTWEVAFLLSCNHKIPLKFSNNLFKYFNCCLYTVLLPFVILLFVLLSKTISLVYFIFFFINHCNV

SEQ ID NO: 163845 - protein, 49 aa, Glycine max
  Clone ID: PAT_MRT3847_118971C.1.pep
LPVAQQVNNDPRSLTHGYQNSKGEEDLHKQRVRNQSSVFRNKARANSEI

SEQ ID NO: 163846 - protein, 85 aa, Glycine max
  Clone ID: PAT_MRT3847_118972C.1.pep
SSSSIQLSDSFFFFFFLGSVNCKALSDKAKEESELFRACFSWTYLSVSICNVVATSQARSNTTLNLILVYKVLCFGWYLDQIPLT

SEQ ID NO: 163847 - protein, 42 aa, Glycine max
  Clone ID: PAT_MRT3847_118973C.1.pep
MTLCGRVMSQLEAFANRAEIVHVDVDSAPIGENKHVGCLALR

SEQ ID NO: 163848 - protein, 86 aa, Glycine max
  Clone ID: PAT_MRT3847_118974C.1.pep
MKNLQSSEELQSSTQASHEPKSEQPNNHTTDAPVTDTGSASATSNDSKKVSRQDIEFVQNLIERCLQLYMNKDEVVKTLLTRAKID

SEQ ID NO: 163849 - protein, 77 aa, Glycine max
  Clone ID: PAT_MRT3847_118975C.1.pep
LVGLFKFVDKKTVFCFFSLVFFGCRFRNWCVRSCLLDESVCRFHFSSQFLIDNRDLISSTWGVIDINANNLEFEGSK

SEQ ID NO: 163850 - protein, 50 aa, Glycine max
  Clone ID: PAT_MRT3847_118976C.1.pep
ILFYSIRLIKPMTEKEGVTHNTIDPEIMLRLESNQTSSKKSLLFLPGSWE

SEQ ID NO: 163851 - protein, 109 aa, Glycine max
  unsure (1)..(109): unsure at all Xaa locations
  Clone ID: PAT_MRT3847_118977C.1.pep
MEQKGGVLMQRYELGRLLGQGTFAKVYHARNIITGMSVAIKIIDKEKILKVGMIDQIKREISVMRLIRHPHVXVELYEVMASKXIYFVMEYVKGGELFHKCPKEAQADD

SEQ ID NO: 163852 - protein, 79 aa, Glycine max
  Clone ID: PAT_MRT3847_118978C.1.pep
MKNLQSSEELQSSTQASHEPKSEQPNNHTTDAPVTDTGSASATSNDSKKVSRQDIEFVQNLIERCLQLYMNKDEVLKHY

SEQ ID NO: 163853 - protein, 330 aa, Glycine max
  unsure (1)..(330): unsure at all Xaa locations
  Clone ID: PAT_MRT3847_118979C.1.pep
MKNLQTSEELQSSTQASHEPKSEQPNNHTTDAPVTDTGSASATSNDXKKVSRQDIEFVQNLIERCLQLYMNKDEVVKTLLTRAKIDPGFTTLVWQKLEEENADFFRAYYIRLKLKKQILLFNHLLEHHYXLMKCSMPGKVPLAPIQNGIHPMXCAVNNLPMGYPVLQQPPMPATGQPHIDSMGCGLSSCHVVNGVPASGNFHPIRMNSGNDMMMDHSAPDMVPVIPPNGTMSSVSEMPVSPTSVASSGHFPFTASEIPGMGADTSALDTAFTSDVASSVGLQLAADGGNGISRSLDQIQWNFSLSDLTADLPNLGGDFLFDSLIHFYICS

SEQ ID NO: 163854 - protein, 142 aa, Glycine max
  Clone ID: PAT_MRT3847_11897C.1.pep
SSRSSRSSRSVSALILCRMFINRLRARLLSSSAAAGGGHHNHTGGATLFGEAPLAKGQKRQWQGWEMPIYIGYAAGVIAFVSLLYAPNTNLTDWARDESFARNQRIKEGKEIKTGVNYSQHHYLHSSWKRTVGDRKFCATED

SEQ ID NO: 163855 - protein, 365 aa, Glycine max
  unsure (1)..(365): unsure at all Xaa locations
  Clone ID: PAT_MRT3847_118980C.1.pep
MKNLQSSEELQSSTQASHEPKSEQPNNHTTDAPVTDTGSASATSNDSKKVSRQDIEFVQNLIERCLQLYMNKDEVVKTLLTRAKIDPGFTTLVWQKLEEENADFFRAYYIRLKLKKQILLFNHLLEHQYHLMKCPMPAKVPLAPIQNGIHPMXCAANNLPMGYPVLQQPPMPATGQPHIDSMGCGISSCHVVNGVPAPGNFHPIRMNSGNDMVVDHSAPDMAPVIPPNGTMSSVSEMPVSPTSVASSGHFAFSASEISGMGADASALDTAFTSDVVSSVGLQLAPDGGNGISRSLDQIQWNFSLSDLTADLPNLGDLGALGNYPGSPFLPSDSDILLESPDQQDIVDDFFVNSEPPCSQSDEEKS

SEQ ID NO: 163856 - protein, 89 aa, Glycine max
  Clone ID: PAT_MRT3847_118981C.1.pep
GLPFSVALAFVSLSENLTSPHIGEGPFVCARRLPFQVAVACGLPRRSFRFKAPLCAMVEGRSSYHKVHVHVVIHGPVAQVKRSKSHLEP

SEQ ID NO: 163857 - protein, 42 aa, Glycine max
  Clone ID: PAT_MRT3847_118982C.1.pep
FKNLSPIVVYCSGSHKRESYTLTPTPTLLSKLSEPMERPIVL

SEQ ID NO: 163858 - protein, 79 aa, Glycine max
  Clone ID: PAT_MRT3847_118983C.1.pep
MCVFRLPLFYVIGGHPLFFVILSIIDRNKKQITQKKKKKKKKKKKKKKKKKKKKKKKKGRPPLIEPVIIPLFAQLRTVR

SEQ ID NO: 163859 - protein, 67 aa, Glycine max
  Clone ID: PAT_MRT3847_118984C.1.pep
MWVTRVGPLHMLNHISHCFWGGLKKFSLFIRLRKKVRGLEHFPAHNGVFTKKLLAGEPKGGSTLFEK

SEQ ID NO: 163860 - protein, 195 aa, Glycine max
  Clone ID: PAT_MRT3847_118985C.1.pep
MAEDWNRTALLVIDMQKDFIEDWSPVALKGGKDIVPNVIKAVEVARQRGILIVWVVRENDPLGRDVELFRRHHYTAGKVGPANKGSEGAELVDGLVIKEGDYKLVKTRFSAFFATHLHSVLQGAGINNLVVTGVQTPNCIRQTVFDAVSLDYQPVTVIVDATAAATPDVHQANMFDMKNIGVATPTLQEWSESKA

SEQ ID NO: 163861 - protein, 356 aa, Glycine max
  Clone ID: PAT_MRT3847_118986C.1.pep
MGKLLCDSTSVAEPFQGSPPAALPWREPKPEPIGTVDLVVPANVGGAPFAGGGWEDVVGLEEQQRRHLQRLHAKGVLWKPPPEEEDSSSPLSSSALRSVVFRLSHGGEVSADGNCLFTASRKAMGGEDVDARELRRRTVARFLEDLGSVSFEEREAIDNAIRHMYSPDLKNGWGIHVVQEVKLLAKKEDRFALDSAIEELVHLGMQREMAAESIYKERCVPVNDGPSWAKYMLISGSPDDEYDIITLQYTEEGLLSVDENREGRAAAFGDDIAIECLATEFKREIYVVQAHGSDAMVDEENCVFFLPHRPRSRINEPPFFLFMKGTGWCGAGADHYEPLIAHPSAFGSQEKVAVVL

SEQ ID NO: 163862 - protein, 41 aa, Glycine max
  Clone ID: PAT_MRT3847_118987C.1.pep
IGITQGHHWLTSKVKTDKTKKSYSREKKPKRKKPLRLMVSM

SEQ ID NO: 163863 - protein, 50 aa, Glycine max
  Clone ID: PAT_MRT3847_118988C.1.pep
ESDMGPGCLVTVLVSVSHNNVESCTIKHVHLLRPFFQQALPHWPLICHHR

SEQ ID NO: 163864 - protein, 150 aa, Glycine max
  Clone ID: PAT_MRT3847_118989C.1.pep
MSLIPSFFGGRRSNVFDPFSLDVWDPFKDLSFPSAEDSAFLKTRVDWKETPEAHVFKADIPGLKKEQVKVEIEDDKVLQISGERSVEKEDKNDKWHRVDRSSGKFLRKFRLPENAKVDQVKASIENGVLTVTVPKEEVKKPDVKAVQISG

SEQ ID NO: 163865 - protein, 442 aa, Glycine max
  unsure (1)..(442): unsure at all Xaa locations
  Clone ID: PAT_MRT3847_11898C.1.pep
MASSEQEKRVEDELSYPIMVAERVRSAVDESDSFKLECSEVGKHVDRILQMLRTLVRFATATATSAATPPLYDRPIRRVAAETAKNLERALALVSKCKRRSILRRVVSIVGAADFLKVLTHLDASGGDMKWLLSILDGGGGIVVSLPPIASNDPILSWVWSFIASIQMGQLNDRIEAANELASFAQDNARNKKIIVEECGVPPLLKLLKEGTSPLAQIAAATTLCHLANDLDRVRVIVSEHGVPAVVQVLSDSPMRVQTLAANLVARMAKHDPVAQEDFARENAIRPLVTLLSFDTFVDDPLGHLGKQSIHSIVQINKELGKGGRGGHQFSSSYSSSYLFTEWSSRGVNHRKERENEDPVVKLQLKVSCAEALWMLVQGSVTNSRKITETKGMLCLAKIVEMEQGELQLNCLMTMMEITAAAEXHADLRRAAFKTNSXAAKS

SEQ ID NO: 163866 - protein, 74 aa, Glycine max
  Clone ID: PAT_MRT3847_118990C.1.pep
KMVALQRLLEPYGICEVCFISFLSLTIVDILLRQLTCLNSLFHKSPEPNLVHLLPQMYLLILSKIVYSIAIILF

SEQ ID NO: 163867 - protein, 98 aa, Glycine max
  Clone ID: PAT_MRT3847_118991C.1.pep
RALSRTNDFAVVDRKLDVIGPKACSTAVFDDWTCVLLRSHSLRCPSTSEGAHDDFSASQVRCSNRYLLILNQLDVNVLLTMYPSIDQNVINCPLEDVT

SEQ ID NO: 163868 - protein, 60 aa, Glycine max
  Clone ID: PAT_MRT3847_118992C.1.pep
TLKTSKLCSTYYAALLRASSILTPLLSHGNFLLLCPLMCSVLPIGVIPSWKPQAHTYIPI

SEQ ID NO: 163869 - protein, 150 aa, Glycine max
  unsure (1)..(150): unsure at all Xaa locations
  Clone ID: PAT_MRT3847_118993C.1.pep
GEXXESLSELKRLRFLGLSXXXXXGNPSPKLETXXCLNALXLSGXNLTGELSFSKDFFGKMGRRFGAWNNPNLCYQIGLMSSSHVPFGVKPCQKEVNLLESDSKTELINGDMNETFHFIASKGFSSCATDGFWWTFLEKILMMGLFLSLI

SEQ ID NO: 163870 - protein, 76 aa, Glycine max
  Clone ID: PAT_MRT3847_118994C.1.pep
YASTALQYLLGNQSETCLWFPLHRSCSYETLFSGTLQDVFPATCSGETVMFNVTSSSSTLLVVFLFENFVAHILKR

SEQ ID NO: 163871 - protein, 37 aa, Glycine max
  unsure (1)..(37): unsure at all Xaa locations
  Clone ID: PAT_MRT3847_118995C.1.pep
XFYXNYXLVLTTXXIYXKIISYKLVINYQLFFYYKLS

SEQ ID NO: 163872 - protein, 94 aa, Glycine max
  Clone ID: PAT_MRT3847_118996C.1.pep
PESKGLTFIYLSFPEGTGPGLFWGLVQGPKGQVQSGKTFFGFSYSLAFSLTFFFFFHPKGRELGKFLFLEFNWEFQGPFLKPPLRSLPPWLNLG

SEQ ID NO: 163873 - protein, 66 aa, Glycine max
  Clone ID: PAT_MRT3847_118997C.1.pep
VGGKRYIITKVPGVPQEQLSFLLRCHRWPINIISLFKVRYLHYWNLPGVPQEQLSPLLRCHIKFLT

SEQ ID NO: 163874 - protein, 68 aa, Glycine max
  Clone ID: PAT_MRT3847_118998C.1.pep
FLTPSYSISGLIIDHQEYRFLHHRCIQDYSHVKLSIRGILMVYHGKTGCTVLSSQYVFYLIRLTERLD

SEQ ID NO: 163875 - protein, 136 aa, Glycine max
  Clone ID: PAT_MRT3847_118999C.1.pep
ITSYLLNRQMGFRVLGVSLLIFIYLINLAPAYPLQNKLFSEFVQNSKYEDKGIYESKIEGGAGHGGSSHGNGNSRSPETRGGGAAVIPVYAAGAANKNHQHQTRHGAANCNLNKIRFSNMLMIILVYPLILSFLLM

SEQ ID NO: 163876 - protein, 208 aa, Glycine max
  Clone ID: PAT_MRT3847_11899C.1.pep
MGRHSCCYKQKLRKGLWSGSRDEKLLNYITKHGHGCWSSVPKLAGLQRCGKSCRLRWINYLRPDLKRGAFSQQEENSIVELHAVLGNRWSQIAAQLPGRTDNEIKNLWNSCLKKKLRQRGIDPNTHQPLSEIENDKDKPLTADKSNQKASNEVMSHSEPPKPKPIATTATTSMPMDRHPLEVSSTSKISSGNNNSTLYRFDSSITVLI

SEQ ID NO: 163877 - protein, 108 aa, Glycine max
  Clone ID: PAT_MRT3847_1189C.1.pep
LPRTNPLSPLAAFSQKLKQKKCAISAEIVKENVCNEETKSKSSFTTSNPLVFSHRVFHYSPRERNSLHQLLWGKIGRRDRRVRRFGNPICFLQSLQLSFLDGGGEIGE

SEQ ID NO: 163878 - protein, 112 aa, Glycine max
  unsure (1)..(112): unsure at all Xaa locations
  Clone ID: PAT_MRT3847_118C.1.pep
GEPYPNLGKYKKKVGKLNYLTLTITDIYFHVNVVSQFFNAPHDSHWNVVVQILRXIKGLPGKGLIDMDKGQANTIVHRNANWERDASDRRSTIGYCVFIGGDLILWKSKKQI

SEQ ID NO: 163879 - protein, 96 aa, Glycine max
  Clone ID: PAT_MRT3847_119000C.1.pep
IVQNSKFEDKGILYGSRIGGAGHGGSSHGNGNGNSGSPETRGGGAALIPVYAAGAANKNHQHQTRHGAANCNLNKIRFSNLLMIILVYPLILSFLL

SEQ ID NO: 163880 - protein, 77 aa, Glycine max
  Clone ID: PAT_MRT3847_119001C.1.pep
SKNLLSFLLSLLIFLVSHIQMCTYIYIYIYTHTCTPRYLLSRYHLILQQKHLFNLTGSRWYLAREAIVKHFCPRNPA

SEQ ID NO: 163881 - protein, 95 aa, Glycine max
  Clone ID: PAT_MRT3847_119002C.1.pep
GANLCVMAKKNTLFYPRRSSQRLLCFGNTITWAPYRGMAMSQQYRARRTTLLMPHGVLQAGKRTSLAHLPRLDNNLLKTKKGGGWGPHSRLPKEV

SEQ ID NO: 163882 - protein, 51 aa, Glycine max
  Clone ID: PAT_MRT3847_119003C.1.pep
MLHLLMGVDPETNPVSHFIGSKAILWVPGQSVTPANQTNIVVTLVHTSGAP

SEQ ID NO: 163883 - protein, 104 aa, Glycine max
  unsure (1)..(104): unsure at all Xaa locations
  Clone ID: PAT_MRT3847_119004C.1.pep
AVRPRVRPRVRTAARRRQKGLIFTASFCVGYTDPLDVAAINSLYXDXGXSXXEVWKATGGDPCXEHWEGVSCVFSNITALRLGGMDLSGKLGTNLDFPSIIEMD

SEQ ID NO: 163884 - protein, 68 aa, Glycine max
  Clone ID: PAT_MRT3847_119005C.1.pep
SRMHAITHIHCLVNRLLHFIITSELETPGPVILKEHNADSRWGLDSFGTLLQRERVSQVSQVFSRTGR

SEQ ID NO: 163885 - protein, 103 aa, Glycine max
  Clone ID: PAT_MRT3847_119006C.1.pep
GCEKTKKGEKVTSRGGKDGWVSNNINKGRFDKYYWLLATMSAVNVLYYLVCSWAYGPTSDQESKVTEENGSNEEELPLIRSRTKGQFDKVSQVSEEILRTSHR

SEQ ID NO: 163886 - protein, 55 aa, Glycine max
  Clone ID: PAT_MRT3847_119007C.1.pep
LRTSADADNGTALPVASETRAQTTPVYAAPVGGWLSDVLGMHHTIGPANHADTPT

SEQ ID NO: 163887 - protein, 35 aa, Glycine max
  Clone ID: PAT_MRT3847_119008C.1.pep
RNHETPRISHGAYNLFKTLIVLQSFHIKLPFNKES

SEQ ID NO: 163888 - protein, 69 aa, Glycine max
  Clone ID: PAT_MRT3847_119009C.1.pep
THCHCCVDGVCTGYLNSTYYRLTHGPGCRYSGFCLVGVRSLPLRMCHTLYSDCDRTLDSSIEIARRCSV

SEQ ID NO: 163889 - protein, 53 aa, Glycine max
  Clone ID: PAT_MRT3847_11900C.1.pep
SSQRIPAHTSRVCINMVGPVVVLVGDPHGLLLDVIASLLLVLSHYVEGCHNKA

SEQ ID NO: 163890 - protein, 331 aa, Glycine max
  Clone ID: PAT_MRT3847_119010C.1.pep
MAGIAILLDLWRKNQNLSSGLHSSHAFQSSSAFFSASAATAAAASFAAGTGFASRALFGSSVAYCDAGAALPEDYISNIQSSFERNYKYDALRYSTKQYNVELKPLFSAFELRAFTLTSLRSFLMFYLPLLEPRVEMEDDEDFQEEDQEHHVDLVVPFKKSVKQIMRETTVVTTRRILERIAVHYVSQRMAWKLLKDIPRSATRKAGRSMPTLVYVYCVSRTTFRGHMLGVAASWLVQVGIDLYRFFSSAFQGQHEDNDVDQTNQVGVLGQKVFIATVRCTSSLIFASIGAGIGATLIRPSLGQWVGCALGDLGGPIIVAFCADKLFQVKL

SEQ ID NO: 163891 - protein, 46 aa, Glycine max
  unsure (1)..(46): unsure at all Xaa locations
  Clone ID: PAT_MRT3847_119011C.1.pep
SFWWKAGQIGELDYPLPIWAPIHGIRAYLTTNXLNTYDKARNAAAL

SEQ ID NO: 163892 - protein, 64 aa, Glycine max
  Clone ID: PAT_MRT3847_119012C.1.pep
DRPNKKTNYSHSSMNIFASLSLENAESGIPRGISDLISFGSRIGPIRKQHNSYSYMNIFASPNS

SEQ ID NO: 163893 - protein, 67 aa, Glycine max
  Clone ID: PAT_MRT3847_119013C.1.pep
IPVLLITCIPMFMHILVLLVLRVGKTMMTTGVTLPSESYSLCCSYHGGPWRLPLYPFGFPLSSSLRC

SEQ ID NO: 163894 - protein, 91 aa, Glycine max
  Clone ID: PAT_MRT3847_119014C.1.pep
FPPKFERWNYRFEWLTLQKTSFFPPENICHRGILYFKGKKFLGPTFLPRGEGKAFWPRVICSFVPPKMPQTTFLFCFNCHLRGTKKAFKLF

SEQ ID NO: 163895 - protein, 86 aa, Glycine max
  Clone ID: PAT_MRT3847_119015C.1.pep
KRGSQFQKRVEQLLKKNIGRPLFIKNQLAKREIFAKQKKWENPGFFPSPRLKNTAQEIKLGDPKKKKLLSKKGEVKLDPLKGPPAN

SEQ ID NO: 163896 - protein, 65 aa, Glycine max
  unsure (1)..(65): unsure at all Xaa locations
  Clone ID: PAT_MRT3847_119016C.1.pep
ICQDAFAAEDDDDLDLFCDETXEDKMAAQEREACKKSTKKKENGSISCSVAVNPWMMKQDMRSWE

SEQ ID NO: 163897 - protein, 56 aa, Glycine max
  Clone ID: PAT_MRT3847_119017C.1.pep
NGLRIIYLGRVVKRFWVPSVSYTSLYLSKKKTLKMVIKSSSGCNFMFITGPATGLL

SEQ ID NO: 163898 - protein, 144 aa, Glycine max
  unsure (1)..(144): unsure at all Xaa locations
  Clone ID: PAT_MRT3847_119018C.1.pep
YDIIGAGSLFLEDFPVFEDQEKPKKIDARLRQRIDXPQYNEXVRLRMETNLFKLSFDDGETLKGSCWDLKIAYFKIALSKEXTVGGTILRSDLXANFLTEGNFRASVDLQGTHRIKGIIKMGAQLXYPENTGLDLACALNSFFR

SEQ ID NO: 163899 - protein, 73 aa, Glycine max
  Clone ID: PAT_MRT3847_119019C.1.pep
TEDLKLTIQQLIFSCGFNGFRASNSSLLTPLLEGLRIFLDYGLYYAIIHVPRVCKNIYHSVTAELELPDIFSL

SEQ ID NO: 163900 - protein, 51 aa, Glycine max
  Clone ID: PAT_MRT3847_11901C.1.pep
DWETRFEIAGGAATGMEYLHHGRDTPVTHRDVKSRNIPLDELLEPRTAEFG

SEQ ID NO: 163901 - protein, 223 aa, Glycine max
  Clone ID: PAT_MRT3847_119020C.1.pep
EGDSFSGKAGVQFYTQIKTVVHQWKDFPRQALFPATCPSERDSPRQLSQAMPVESESDSPTYEVQVAITDADIPNTTMSSASTSTDKDHRSQDVSLLLPSASERDMSDRDISLVLSPALQSNLPSQGVSVATSQSSERMYVSETSQWNENSPATSKRSEIILPTSERSLVSASQMNGNLFIPHTTDTATALKPEGIYMCTSHKTDSIAQASQESSDSISPGSS

SEQ ID NO: 163902 - protein, 49 aa, Glycine max
  Clone ID: PAT_MRT3847_119021C.1.pep
IRRGYYLSMEPLQFIALITVLPMIVKTMTDDVSGSVDLRVNERVVVRVG

SEQ ID NO: 163903 - protein, 47 aa, Glycine max
  Clone ID: PAT_MRT3847_119022C.1.pep
IIHPFKDNLSIIHKAKSDLHALLQIRPKYSVLYLHSRTTFQNAFITL

SEQ ID NO: 163904 - protein, 78 aa, Glycine max
  unsure (1)..(78): unsure at all Xaa locations
  Clone ID: PAT_MRT3847_119023C.1.pep
KXXLTXXGXXXGXXXGVXPWXSIXSLXNESKXEXRXKXFGXASMXDLGPINXXLKKXKNLMKIPMHVLLFIILXLTIS

SEQ ID NO: 163905 - protein, 41 aa, Glycine max
  Clone ID: PAT_MRT3847_119024C.1.pep
CIEIQDQESMIIENAQLKVDTILLTAPYPISGCLFVNINLA

SEQ ID NO: 163906 - protein, 71 aa, Glycine max
  unsure (1)..(71): unsure at all Xaa locations
  Clone ID: PAT_MRT3847_119025C.1.pep
TTRAHNSVVKEKILQRKSLQLHHQQQDWQESPEGXKMLEFRRSLPAFKEKDAFLSYFRVRWKGKNGALCDF

SEQ ID NO: 163907 - protein, 536 aa, Glycine max
  Clone ID: PAT_MRT3847_119026C.1.pep
MEVSVIGSSQAKLGASELASREVGFCNLKNNLRVLNDRVSFGRNNIRWEKAGISFTLRALQTEPVREEKKPSGIGTRSKTVDGVRLFVGLPLDAVSYDCKSINHARAIAAGLKALKLLGVEGVELPIWWGIVEKDAMGQYDWSGYLAIAEMVQKVGLKLHVSLCFHGSKKPNIPLPKWVSQIGESQPSIFFTDKSGQHYKECLSLAVDNLPVLDGKTPVQVYQSFCESFKSSFSPFMGSTIMSISMGLGPDGELRYPSHPQLPSNGKTQGAGEFQCYDQNMLSFLKQHAEASGNPLWGLGGPHDAPTYDQPPYNGFFNDGASWESTYGDFFLSWYSNQLIAHGDCLLSLASSTFGDSGVTIYGKLPLMHSWYGTRSHPSELTAGFYNTANRDGYEPVAQMFARNSCKIILPGMDLSDANQPEENHSSPELLLAQVMAACKKYEVQVSGQNSSESGVPGGFEQIKKNLSGDNVLDLFTYHRMGASFFSPEHFPLFTEFVRSLKQPELHSDDLPAKEEEGAESAMDMSHESSVSMQAA

SEQ ID NO: 163908 - protein, 218 aa, Glycine max
  Clone ID: PAT_MRT3847_119027C.1.pep
MEVSVIGSSQANLGASELASREVGFCNLKNNLRALNDRVSFGRNNIRWEKAGISFTLRALQTEPVREEKKPSGIGTRSKMANGLRLFVGLPLDAVSYACNSINHARAISAGLKALKLLGVEGVELPIWWGIVEKDAMGQYDWSGYLAIAEMVQKVGLKLHVSLCFHGSKKPNIPLPKWVSQIGESQPSIFFTDRSGQHYKECLSMAVDNLPVLDGKTP

SEQ ID NO: 163909 - protein, 576 aa, Glycine max
  Clone ID: PAT_MRT3847_119028C.1.pep
MGDTVSLPNLSTKVVAIAAGEAHTLLLTGDGRVYSWGRGILGRLGQGSEHDKHFPVEVKFGSEEDSVRIVGIPYHMIIEIKQMDDGYVWCWGYNIYGQLGIHGEEFHGRKYTDGDYSIVPCLLNKFLDLHPPDSSSISIVPETEGQASLKIIDVKAGGMMSLCIDNLGALWLWGNCPQQSKEGDFSLISNFTPTPVWDFHGHTVVKGASGNEHVVALVTAGESYKGVDDLVCYTWGNNSHGQLGLGDTKNRPRPQVVKTFDLESPWAIYEVACGAFHTALLTHKKRHSDTLESTCWTFGLGDNGQLGRGTTQSTSLPEPVKELPQNVHLVSVDCGLFHTCVVSSDGDVWSWGMEKGLGLCSDDSNGGTHSGDALSPFLISCNPHQPKFSQPVQVACGAAHTVIIAHEGCKLWSWGRGRSGVLGNGKTMDSYTPTIVLWPPLMEDFKQEELYSSCEHDKNETKEVTEIDERLSSALNQLKLLQTKLSIIERYASILHSSLFGEPFDEQDVPASLKNSGAFDIAKEWENMLEAADGTKLINLEMLYRNMHASVKEKLMKRRIKAIIDECLLQSSQVKN

SEQ ID NO: 163910 - protein, 127 aa, Glycine max
  Clone ID: PAT_MRT3847_119029C.1.pep
SFLYIYPFLFVLKRYLATKTPFALYIKTFLLLRPTPAPLNQQAKLFTFLHLLILPSTLTPSLSRLNFNSINPSTLSLGNFHIRNFITFHLHPLNYALVSGLQTCYLYLSKNIYRYPTQMRKSCYTMA

SEQ ID NO: 163911 - protein, 411 aa, Glycine max
  Clone ID: PAT_MRT3847_11902C.1.pep
VFALKQDLKAFAFKTKAMLSQMEREVQSARKKESLNWHIASHGVPQSLHCLCLKLAEEYAVNAMARFFLPSPEHVSRLVDPTFHHIVLLTDNVLAASVVVTSTVENSANPGRLVFHVVTDKKTYTPMHTWFAINSINSAVVEVRGLHHYDWSKEVNAGVKDMQETNNLIWKHYYSNYKQKELDHSEEHDRYLEALRPSSLSLLNHLRIYIPELFPDLNKVVLLDDDVVVQHDISSLWELDLNGKVSGSVFKSWCENSCCPGNKYVNFLNFSHPIISSNFDGDKCAWLFGVNIFDLEAWRKSDITKTYHQWLKLNVQSGLTLWNPGVLPPALIAFAGQVHPIDSSWFVTDLGYRHRSEEISNSIERVEAAAVVHFNGPAKPWLEIGLPEVRTLWTRYVNFSDKFISKCRIIL

SEQ ID NO: 163912 - protein, 46 aa, Glycine max
  Clone ID: PAT_MRT3847_119030C.1.pep
THNPVVVAVAAGDEGDEECLIGVQAGISIDDVYVSTISIHHRILTN

SEQ ID NO: 163913 - protein, 56 aa, Glycine max
  Clone ID: PAT_MRT3847_119031C.1.pep
STQRPNKPFRFVTPFLFPSESAEHPFSGNCIKPYQYTVYRVARIDARVIDLNVSET

SEQ ID NO: 163914 - protein, 111 aa, Glycine max
  Clone ID: PAT_MRT3847_119032C.1.pep
TYQGPPPFLKSHFPKNFCPTLIAFPRVLVPPRGLARFLFLFFSPLFKWFALQKISLGWWLSKEKIWSLFRAFNLFTQLYFFFFNLLNKNFLGKGWGFYPRSFFKEPVFLGF

SEQ ID NO: 163915 - protein, 65 aa, Glycine max
  Clone ID: PAT_MRT3847_119033C.1.pep
GVHSNVRDDFSCRGEGVILDNACQIYSSIMTVDMQCGLYVVRYCNKYPPYTAQWNPVRHGLQDLV

SEQ ID NO: 163916 - protein, 157 aa, Glycine max
  unsure (1)..(157): unsure at all Xaa locations
  Clone ID: PAT_MRT3847_119034C.1.pep
AIIVDTTGDRITLIQNSPISNLLXVAAWKKGCLMVTIAMSGNASIKKNDXGPSLVHGFLTYMNRSLHIYAXRWTKSEPHSWELISPIEVCGPHXWIDRWNYEWANQTPWRLSFLIDNPKQSTVLDILLXSSQDIESAGDTLMPAFSVPQAYCRSSEN

SEQ ID NO: 163917 - protein, 38 aa, Glycine max
  Clone ID: PAT_MRT3847_119035C.1.pep
FLTWTESKKIGLVTPHPPASDKRSLMTCDCWPSWCCCC

SEQ ID NO: 163918 - protein, 144 aa, Glycine max
  Clone ID: PAT_MRT3847_119036C.1.pep
GPRPGFLVLGGKNKKGAFLGGEKKTILALGGKKRGPPQENPPKGSLAPFILGHNPPPPRGGGFPGGKAPKKKKPLPLGPAPKPPGLRVGAPPSPPMGGIINWASLLKGGFLFFPIPKPGANFPTPFTGRGPPISPPRSKPKPPF

SEQ ID NO: 163919 - protein, 42 aa, Glycine max
  Clone ID: PAT_MRT3847_119037C.1.pep
PKFVFDDYMKLYAGLKFQAKEPRFEAMKANASVVDVGAIATV

SEQ ID NO: 163920 - protein, 79 aa, Glycine max
  unsure (1)..(79): unsure at all Xaa locations
  Clone ID: PAT_MRT3847_119038C.1.pep
GGSHAGPTRPPXRPSGWGGHRRGDLHVRAVTTSTCGGRGASALGPPAMGSXXERTPSSARLSNGAPGGGKLNLRQEKWE

SEQ ID NO: 163921 - protein, 120 aa, Glycine max
  Clone ID: PAT_MRT3847_119039C.1.pep
SVMHRVIAQADDTRMSIASFYNPGDDAVISPAPALVKELDETSQVYPKFVFDDYMKLYAGLKFQAKEPRFEAMKANASVVDVVSLRLSHGNGYVCFLLIINKGYSEHISVWCPWIIGMEA

SEQ ID NO: 163922 - protein, 40 aa, Glycine max
  unsure (1)..(40): unsure at all Xaa locations
  Clone ID: PAT_MRT3847_11903C.1.pep
EAPXXXFXFXIGXXWAPPVFQRXHXSLRPLQXAXSCKXTV

SEQ ID NO: 163923 - protein, 86 aa, Glycine max
  Clone ID: PAT_MRT3847_119040C.1.pep
FHIQYDKESVIPLLSLTQQLESHPLLVYFESKPKSRLQDKTVIRSTNFTLKQGYSKTPLMLGVISTVHHRSCDCISKTLARTNQPT

SEQ ID NO: 163924 - protein, 131 aa, Glycine max
  Clone ID: PAT_MRT3847_119041C.1.pep
RKRDRSLSRHLIAEIFCISQYKMRHRGAPEEPPQPKPSFPHQKKKRKCRATATATVGSTSVSSETSHTNGPNQLNTHIHDVAVACEKSKAIVVGDDFRFGELRQNESGWVENVWLERSEQCLLRGKTESEE

SEQ ID NO: 163925 - protein, 63 aa, Glycine max
  Clone ID: PAT_MRT3847_119042C.1.pep
GPSFFFSPAGDNYLLPRRGGLPHWLVFLTKLCPLVCKPFFQTLVLSPPVKKKFKLPKKMKRKK

SEQ ID NO: 163926 - protein, 177 aa, Glycine max
  Clone ID: PAT_MRT3847_119043C.1.pep
MVKNINSMQKTEWLLCNSTHELEPAAFSLAPQIIPIGPLLSSNHLRHSAGNFWPQDLTCLKWLDQHSPCSVIYVAFGSFTTFSPTQFQELCLGLELTNRPFIWVVQPDFTEGSKNAYPEGFVQRVADRGIMVAWSPQQKILSHPSVACFISHCGWNSTLESVSNGIPVLCWPYFADQ

SEQ ID NO: 163927 - protein, 152 aa, Glycine max
  Clone ID: PAT_MRT3847_119044C.1.pep
APNQNQNQNMGHMSYNRVSSGRASSSSCHGKCRGFRLNLRRLYFLRLRKRFTFILSIFDSWKLSYSQALQLLKNVFRRKSGFKRNYSNSSRSGLVRDEGIKGHTDCRASSYGRNNSFYAEAIADCLEFIKRTSISSMDQIQDPVGHIQDRNS

SEQ ID NO: 163928 - protein, 82 aa, Glycine max
  Clone ID: PAT_MRT3847_119045C.1.pep
FRLMEEKTVPGIIDKFGWCTWDAFYLNVHPEEVREGIKGLVEGGCPPGLVLIDDGWQTFCRDDEAVSDGGSLNCSVPGEQML

SEQ ID NO: 163929 - protein, 115 aa, Glycine max
  unsure (1)..(115): unsure at all Xaa locations
  Clone ID: PAT_MRT3847_119046C.1.pep
MHTKCESAFADAALTAIEIQYRISQHLHLANETPSGHQHRTPRPPHKEVIDRANALLAVPHVPDFESVEPSAPSAVASVRPICLTDPKDMAFGCGHITXCNECGVVLAPCPMCRK

SEQ ID NO: 163930 - protein, 53 aa, Glycine max
  unsure (1)..(53): unsure at all Xaa locations
  Clone ID: PAT_MRT3847_119047C.1.pep
ASLPQCEASFSDIFNVPMKHLSSQLDSXNHSPLTPSLTNVKIFSSFVLNGFLN

SEQ ID NO: 163931 - protein, 61 aa, Glycine max
  Clone ID: PAT_MRT3847_119048C.1.pep
IITIRLYSQSPFFLYFKEMKITQQRKPKSVISKPHETNLIVISSNNNILLLGKELHNEMDD

SEQ ID NO: 163932 - protein, 52 aa, Glycine max
  Clone ID: PAT_MRT3847_119049C.1.pep
GKPGKIGGHTQPKKKGFKTPKLDTGTPPKNSQGPGTLNPAGGENRTPNPRGK

SEQ ID NO: 163933 - protein, 76 aa, Glycine max
  Clone ID: PAT_MRT3847_11904C.1.pep
CTTRSAKRQPNWLMCNRISLNAIASAEFVYNFPQHQRMRQNHYHNRDHNLKSCHTVSKVVTIIAQRISFQHQLINP

SEQ ID NO: 163934 - protein, 92 aa, Glycine max
  unsure (1)..(92): unsure at all Xaa locations
  Clone ID: PAT_MRT3847_119050C.1.pep
NTLVKPICQVTPPGPSLHSSPARXEGEVPESELDLDTRRRLLILQHGQDTREXTSSEPPIPVRHXDXFSGSXVPSRKGWFSVREEMGSQQLN

SEQ ID NO: 163935 - protein, 91 aa, Glycine max
  unsure (1)..(91): unsure at all Xaa locations
  Clone ID: PAT_MRT3847_119051C.1.pep
LGQVDKWVYEEANTNFIHDMQMLNKPINTNPNFFRKLVXTLLETNGXCGYWEISEENIERLRNLYSEVEVKIEKSILLIKVILFSFSHSLR

SEQ ID NO: 163936 - protein, 82 aa, Glycine max
  Clone ID: PAT_MRT3847_119052C.1.pep
TPPERFLGRRKIKKPGVFYFFPPAPLFKKKFPREGGLKKFFGIRVVKISKRKASRPFSAPFFFTHGKGEKSVVVPPPPFLLG

SEQ ID NO: 163937 - protein, 207 aa, Glycine max
  Clone ID: PAT_MRT3847_119053C.1.pep
MDLELVPEAVENSAEIISAACEGSSIEEPNVGMEFQSEEAAKNFYEEYARREGFVVRLDRCHRSEVDKQIISRRFSCNKQGFHVRVRNKTKPVHKPRASIREGCEAMMYVKVNTCGKWVVTKFVKEHSHLLNASALPYNSLIESKDRIIQQLAKELEHQDRLCQHYRRQLFSLLETVDEQTKCLSTKVELVVNTVKKLENEVQKPLI

SEQ ID NO: 163938 - protein, 189 aa, Glycine max
  Clone ID: PAT_MRT3847_119054C.1.pep
MALNQSKAVLLRVSLVVVALFIAGYIVGPPLYWHFVEGLAAVNHSSSTCAPCICDCSSQPILSIPQGLSNTSFGDCAKPDPEVSGDTEKNFAELLAEELKLRENQAVENQQHADMALLEAKKIASQYQKEADKCNSGMETCEEAREKAELTLVTQKKLTALWELRARKKGWKEGLAKSHAHSQGKVQSS

SEQ ID NO: 163939 - protein, 203 aa, Glycine max
  Clone ID: PAT_MRT3847_119055C.1.pep
MKQIEMESNASALAKKVWSMVRVVLFMLRKGITKGKLMMDLNMMLKRRGKLAGKAIANLMSSHHHHNRGGSHNSHHLKFSAPREYEFSCSNTPHNFFFPTGGKHHRHHFFACVHAPPTQDDDVVTVNAMKAVMEMLNNNNNDAVKVEASPALPGFGRSPMVRQLRVTDSPFPLRDADQDNDHLVDKAAEDFIKRFYKELRKQD

SEQ ID NO: 163940 - protein, 48 aa, Glycine max
  Clone ID: PAT_MRT3847_119056C.1.pep
WRDILCYVIIPIKFNYRWVRNLLIYYSGCAGRASRILFLKKKNCHKTD

SEQ ID NO: 163941 - protein, 88 aa, Glycine max
  unsure (1)..(88): unsure at all Xaa locations
  Clone ID: PAT_MRT3847_119057C.1.pep
MAIENQDTVVREIKPKNRXIKGAGGPVDEDTRWTPWLKPLLKESFFVQSKMHADSHKSECSMYCLDCKNGPLCFICLNHHKDHRAIQV

SEQ ID NO: 163942 - protein, 53 aa, Glycine max
  Clone ID: PAT_MRT3847_119058C.1.pep
NGNLKDTPNFPLNKSRPPPIKKDFAQGKNPLVSVMSSMGKDHFCAPKKTGPKN

SEQ ID NO: 163943 - protein, 280 aa, Glycine max
  Clone ID: PAT_MRT3847_119059C.1.pep
PRVREQSTVAIKEVFGKFDDVLEPGFHCVPWFFGTQVAGYLSLRVQQLDVRCETKTKDNVFVTVVASIQYRAMAERAVDAFYRLSNTREQIQAYVFDVIRACVPKMDLDSSFEQKKEIARAVEEELEKAMSAYGYEIVQTLIVDIEPDERVKRAMNEINAAARMREAANEKAEAEKILQIKKAEGDAESKYLSGLGIARQRQAIVDGLRDSVLAFSENVPGTTSKDVMDMVLVTQYFDTLKEIGASSKSNSIFVPHGPGTVRDIASQFRDGLLQGKVAQS

SEQ ID NO: 163944 - protein, 73 aa, Glycine max
  unsure (1)..(73): unsure at all Xaa locations
  Clone ID: PAT_MRT3847_11905C.1.pep
GXLKXRXPIXLKQGNEITISTDYXLGGDEKTMCMRYKKLSEDVRSGMDILCGDDTXSFRVFSCDKQGVVPQSR

SEQ ID NO: 163945 - protein, 61 aa, Glycine max
  Clone ID: PAT_MRT3847_119060C.1.pep
MAPIALGNVIPDGILAYLDEENEPQTVSIQSLATGKKVIIFGVPGAFTPTCRSLLSLFTIN

SEQ ID NO: 163946 - protein, 138 aa, Glycine max
  Clone ID: PAT_MRT3847_119061C.1.pep
RSHIRVSEVRTSIRELFHVWSSGNKNESSYTLVDITQWFAYLTFNMVVRMVVGKRYFGVMHVEGKDKAERFMKNIREFMNLMGTFTVADGVPCLRWLDLGGYEKAMKGTAKEIDKLLSEWLEEHLQKKLLGEKVESDR

SEQ ID NO: 163947 - protein, 49 aa, Glycine max
  unsure (1)..(49): unsure at all Xaa locations
  Clone ID: PAT_MRT3847_119062C.1.pep
GLRVSLLVFLASSDPQKFCCCLRRVLLLLFRQVHPXELFCLLXCSPPAP

SEQ ID NO: 163948 - protein, 71 aa, Glycine max
  Clone ID: PAT_MRT3847_119063C.1.pep
MIIPVRCFTCGKVIGNKWDTYLDLLQSDYSEGDALDALGLVRYCCRRMLMTHVDLIEKLLNYNTLDKSDPS

SEQ ID NO: 163949 - protein, 71 aa, Glycine max; identical to SEQ ID NO: 163948
  Clone ID: PAT_MRT3847_119064C.1.pep

SEQ ID NO: 163950 - protein, 62 aa, Glycine max
  Clone ID: PAT_MRT3847_119065C.1.pep
RCYYGFRARSLLDVALHWLVFCENVDNGLSTCSSYNGHLLQWRENVTYELSTHNEERREPMV

SEQ ID NO: 163951 - protein, 204 aa, Glycine max
  unsure (1)..(204): unsure at all Xaa locations
  Clone ID: PAT_MRT3847_119066C.1.pep
MGLFLSRNLACKFIYPFLFSNKVSKDLFPKQLENMMSLISPRTGXRHLQRYDNGXRQVVGCIPYRYKNNGXQDKELEVLVISAQKGHGMQFPKGGWETDESMEQAALRETIEEAGVVGSVESKLGKWYYKSKRQPIMHEGYMFPLLVKKELDNWPEMNTRKRRWMTVDEAKVICPYAWMKEALDELVRRQTQLHSKKDGDMSRL

SEQ ID NO: 163952 - protein, 45 aa, Glycine max
  Clone ID: PAT_MRT3847_119067C.1.pep
SNTPHHQKERVAKTMTKNPSPQLTETILKPPPKVKPKNLDTTPNP

SEQ ID NO: 163953 - protein, 115 aa, Glycine max
  unsure (1)..(115): unsure at all Xaa locations
  Clone ID: PAT_MRT3847_119068C.1.pep
MELLRNIGGINLNVDSSNCTPTRLXSLKCFISSLIIHGSVDSWDGSDLHXIGAPHSSDQNDHHHKTKRSARGDDESLKRESSARRHSSTXKKPRVNRAIEVPAISIKLADLHTDD

SEQ ID NO: 163954 - protein, 126 aa, Glycine max
  Clone ID: PAT_MRT3847_119069C.1.pep
SNGVDPDRITYNSLISSLCRDGMVDEAIGLLVDMERSEWQPTVISYNIVLLGLCKAHRIVDAIEVLAVMVDNGCQPNETTYTLLVEGVGYAGWRSYAVELAKSLVSMNAISQDLFRRLQKQNHFRA

SEQ ID NO: 163955 - protein, 47 aa, Glycine max
  Clone ID: PAT_MRT3847_11906C.1.pep
MEHGRGALHEAEAKQKKGVLEKIKEKLPCYHSKAAEEKVKEKESGAH

SEQ ID NO: 163956 - protein, 45 aa, Glycine max
  Clone ID: PAT_MRT3847_119070C.1.pep
LHNGPNTWHAIFRAALRALNGFDFRLRYKFIKFHSLTIFLNKKIY

SEQ ID NO: 163957 - protein, 49 aa, Glycine max
  unsure (1)..(49): unsure at all Xaa locations
  Clone ID: PAT_MRT3847_119071C.1.pep
XSXXXRTXAXXXRASXLXRXXXXHYCKYXXGXXQDXRMXXPLIHRSVPP

SEQ ID NO: 163958 - protein, 77 aa, Glycine max
  Clone ID: PAT_MRT3847_119072C.1.pep
VVWVLCAEHSADRVEFLKLCKRIEYTIRAWYLLQFEDMMQLYSLFDPVSGTQKLEHQKLPREEIDVLEQNFLTYLFE

SEQ ID NO: 163959 - protein, 87 aa, Glycine max
  Clone ID: PAT_MRT3847_119073C.1.pep
RHGQVCSDAVPRPTRGFNRILWNSTPFNIRQPRDSVLLSSLWRSVALNTSAAYGPFGLVVSFWACGMCPRTRGLCPLTLSLILPLIA

SEQ ID NO: 163960 - protein, 260 aa, Glycine max
  Clone ID: PAT_MRT3847_119074C.1.pep
MGDSSAANDHLGESPAVELTGKIMIVVIIIMFFVIVIALCLHLFARNFWWRSPAPQSRSHRRRRFVFSSGPDGGSGLDPAVLSSLPVLVFEGHAQEFKDGLECAVCLSEVVEGEKARLLPKCNHGFHVACIDMWFQSHSTCPLCRNPVASSEESSESPTFPTNVLVWGNQAQISSTGGGGASLEEGSSSSSSASTCDDHGMLVIDIPSEMTSTSLSPEDDVKSPMTGRLRSLKRLLSRDKRFNPSSPTSSPDVQQPGSGS

SEQ ID NO: 163961 - protein, 202 aa, Glycine max
  Clone ID: PAT_MRT3847_119075C.1.pep
LLRSLNLLERPQSGTLTIDDVTIDYGANLTNKEILAVRQKTAMVFQSWNLFPHLTILQNITEGPIHVLKQDPDKAKQKAHELLKKVGLDDTANRYPGQLSGGQQQRISICRALAMDPAYILFDEPTSALDPELEAQVLRVLQQLANDGDSLIVVTHNMEFARRVADKIVFVEDGRVDFTGSADDFFNHPTPRIKEFLAAMEF

SEQ ID NO: 163962 - protein, 94 aa, Glycine max
  unsure (1)..(94): unsure at all Xaa locations
  Clone ID: PAT_MRT3847_119076C.1.pep
NSNVVEGNLCGKITDSKTIFPPSVAPPLNTKVNASTGILGLEXVPNAREVLIGLYSKTLKEIHNVPEDQGYRKAVESFIKHRLGVCHDDDDWEN

SEQ ID NO: 163963 - protein, 54 aa, Glycine max
  Clone ID: PAT_MRT3847_119077C.1.pep
KILFVGFYSANSGCLKKKQPKRQLFLKKTADKDGWAWTAYTTSNKLWVLKQQKK

SEQ ID NO: 163964 - protein, 118 aa, Glycine max
  unsure (1)..(118): unsure at all Xaa locations
  Clone ID: PAT_MRT3847_119078C.1.pep
FPIHRAVLVPALXGIDIIARANTGTGKTFSFGISIIKGLTENEHTPSHRRSGRLPRFLVLAPTRELAKQVEKEIIESAPYLSTVCVYGGVYYVTHQSALSRRVDLVDGTHQRIIDSVE

SEQ ID NO: 163965 - protein, 149 aa, Glycine max
  Clone ID: PAT_MRT3847_119079C.1.pep
GVFFFFFFFFFFFFFFFSQKGTKIIFATNFIKTPFTGTKQNHFFFLKIAGPSEGRGGNLQKRGRPFFWGPYKSIGKNLCPKIFFGLGGMGGKNFPTRGGPIGPKKVFFFKPPNGFDNLKNMGHEKRMGPRGGSIRVCFPLQLGWKSLPF

SEQ ID NO: 163966 - protein, 57 aa, Glycine max
  Clone ID: PAT_MRT3847_11907C.1.pep
PFFFFPLFMILIFNHQGQFFSLFFFQPIPCKIFRADSVFFLGQIFIITAPIVRYSAY

SEQ ID NO: 163967 - protein, 130 aa, Glycine max
  Clone ID: PAT_MRT3847_119080C.1.pep
NSARGSVNGRDSFGESAFTSFDTYVCSVATATSDRVESLELKRVSANDSIPKRSPVSYVLEKSYHGNSVWSTTTIGDEKGRERVYDTIFRLPWRCELLIDVGFFVCFNSFLSLLTIMPTRIAMTIWRLLK

SEQ ID NO: 163968 - protein, 42 aa, Glycine max
  Clone ID: PAT_MRT3847_119081C.1.pep
PSSSQTPLDFYHILPVLSLYPLNLLSSINQLPTYDLPNMQVP

SEQ ID NO: 163969 - protein, 89 aa, Glycine max
  unsure (1)..(89): unsure at all Xaa locations
  Clone ID: PAT_MRT3847_119082C.1.pep
XLXLGXVNXXXRXXEXXXXXXXXTXXXFXXQVXLXXXXXXXXAXXXXTQXYVQXXVXXTXWIXHXSXKXXXXXVXXXXHGXXXXPXXVI

SEQ ID NO: 163970 - protein, 92 aa, Glycine max
  unsure (1)..(92): unsure at all Xaa locations
  Clone ID: PAT_MRT3847_119083C.1.pep
LPPPITGKDITVDTTIHTRNVDTNKKGTAXTLPINTIENTAKTSPCEGPAENARKYRENDKHPPAPISWHRRNRKGLHKSPPNPKWTSIFGS

SEQ ID NO: 163971 - protein, 53 aa, Glycine max
  unsure (1)..(53): unsure at all Xaa locations
  Clone ID: PAT_MRT3847_119084C.1.pep
KINPNKIGYLHKHWKKKHKFLVYCDXNILTFFQQRTRHTDLETALKKIYPFPQ

SEQ ID NO: 163972 - protein, 87 aa, Glycine max
  Clone ID: PAT_MRT3847_119085C.1.pep
TCSYLDLKWLEEKPKRETMQGGISFVDQLYEQQHPSPTQLIQINLEVGWCQDESFITIDDQFSRRVNNGGKKVLFFSLVFSVGRLLR

SEQ ID NO: 163973 - protein, 55 aa, Glycine max
  Clone ID: PAT_MRT3847_119086C.1.pep
EYDRKEKRGIWYRGSVSRAYLLRRSATRSILIPNLSTLKLNTHESATSTRIDPYV

SEQ ID NO: 163974 - protein, 215 aa, Glycine max
  Clone ID: PAT_MRT3847_119087C.1.pep
MSNNGSNNPYVQISPLHTNRPKPMDTVCDALNRCSRKVGKATRRAETMADNFWNHIRIGSSLADAAVARIVQGTKVLTLGGPDILFQQSFGNFPGEKLIKSFACYLSTSTGPVIGTIYVSTKRVAFCSDYPLCNYPLSLQQNQSVHYKVVLQLDQLSTVSPFSNRFNPAEKYMQLVTVDGYEFYFMGFIAYDKALKTVREASLQYHNHSRESSNA

SEQ ID NO: 163975 - protein, 80 aa, Glycine max
  unsure (1)..(80): unsure at all Xaa locations
  Clone ID: PAT_MRT3847_119088C.1.pep
TVDRNYLHVVDESNGHLDALRNLYEPNIGSDVFNHGNRIXTLVMEFVRASNMCLQRKLHLGWLAEXPDDAEIAYASSNTA

SEQ ID NO: 163976 - protein, 78 aa, Glycine max
  unsure (1)..(78): unsure at all Xaa locations
  Clone ID: PAT_MRT3847_119089C.1.pep
PLSWEFFFPIRGGGPINGXEMCGLGWANLPPWPGSFLMGTPKRCSVFVFLWGLFQHFERGGNSLIPAFFVPPVLPRFF

SEQ ID NO: 163977 - protein, 70 aa, Glycine max
  Clone ID: PAT_MRT3847_11908C.1.pep
KDFPAPCKVKVIPPSFALKFLDNFKVEGVFVFSYNRYFCYFTRPFLGGGLKQVGIKVSPGRDILPDKILC

SEQ ID NO: 163978 - protein, 473 aa, Glycine max
  Clone ID: PAT_MRT3847_119090C.1.pep
MESGGNSLPSGSDGVKRKVSYFYDPEVGNYYYGQGHPMKPHRIRMTHALLAHYGLLQHMQVLKPMAAKDRDLCKFHADDYVAFLRGITPETQQDQLRQLKRFNVGEDCPVFDGLYSFCQTYAGGSVGGALKLNHGVSHASVNWAGGLHHAKKCEASGFCYVNDIVLAILELLKIHERVLYVDIDIHHGDGVEEAFYTTDRVMTVSFHKFGDYFPGTGDIRDIGYGKGKYYSLNVPLDDGIDDESYQSLFKPIMGKVMEIFRPGAVVLQCGADSLSGDRLGCFNLSIKGHAECVRHMRSFNVPLLLLGGGGYTIRNVARCWCYETSVALGIELDDKMPQHEYYEYFGPDYTLHVAPSNMENKNSRHLLDEIRAKLLDNLSRLQHAPSVPFQERPPDAELLERDEDQDDRDERWDPDSDREADNDSNPVRRRVKSECVEAEDKDAVLGVDSMAVDEPCIKEEQDNLKELSDHRSR

SEQ ID NO: 163979 - protein, 122 aa, Glycine max
  Clone ID: PAT_MRT3847_119091C.1.pep
NSARGLQHAPSVPFQERPPDAELLERDEEQDDRDERWDPDSDREVGDDSNPVRRRVKSECVDAEDKDTESYHKHLDCGRDYLTPFKEISCSKVSGVDSMAVDEPCIKEEQDNLKELSDHRPR

SEQ ID NO: 163980 - protein, 196 aa, Glycine max
  unsure (1)..(196): unsure at all Xaa locations
  Clone ID: PAT_MRT3847_119092C.1.pep
MESGGNSLPSGSDGVKRKVSYFYDPEVGNYYYGQGHPMKPHRIRMTHALLAHYGLLQHMQVLKPTAAKDRDLCKFHADDYVAFLRGITPETQQDQLRQLKRFNVGEDCPVFDGXLYSFCQTYAGGSVWXGLLKLNHGXCDVAINWAGGLHHAKKCEASGFCYVNDIVLAILELLKIHEVSLINSPHYLIDAWLFSF

SEQ ID NO: 163981 - protein, 56 aa, Glycine max
  Clone ID: PAT_MRT3847_119093C.1.pep
IEPWNLLHHNPLKFLATDTKLGMIHKTRSSMNVALVAMTVHRVSSISCAATFVRSL

SEQ ID NO: 163982 - protein, 34 aa, Glycine max
  Clone ID: PAT_MRT3847_119094C.1.pep
GGNGIAHPIETLVGDCEAHWNHPPYESMCTEEVD

SEQ ID NO: 163983 - protein, 104 aa, Glycine max
  Clone ID: PAT_MRT3847_119095C.1.pep
VITLKFNLKTSNKSCSTRNRRDPVYSHSNKSNYISRKQKLKYFNNQTYYISHHIKFYKEKEEYHSLMTLSCVSSPAWYPWPEISMDCDGGGSMAQFTFSLSLWH

SEQ ID NO: 163984 - protein, 69 aa, Glycine max
  Clone ID: PAT_MRT3847_119096C.1.pep
LHGRSQQKRPLKAKLGIRITGLRSILQKAVQKPIRITVAYRNLILNELVLLDCQYQHEFDTVHFVLPEF

SEQ ID NO: 163985 - protein, 61 aa, Glycine max
  unsure (1)..(61): unsure at all Xaa locations
  Clone ID: PAT_MRT3847_119097C.1.pep
PNDQXXKQNSDFSFKXXXEVKGIKFGGQFIVXSXXNQKSRPXRXXRXFFSTSXKXHGGRGX

SEQ ID NO: 163986 - protein, 207 aa, Glycine max
  unsure (1)..(207): unsure at all Xaa locations
  Clone ID: PAT_MRT3847_119098C.1.pep
MKMMERRQNRTPQDQIARILVEFLEVAITAVVFLKGVYPSGAFERRRYMNVVVQTASHPQLRYYIHATDSYPLPSIYXGMVERVAVIFFNADNVPLEKFVFKLAMNQTYSSEVEEVDLEFSLRSFLIKLSNSESLSKGLPPDCWWEITGYFRSLPETGTSKEADLWIPTDTKQWQQPALITPIKSMSSEPLCLQLYLEHPCLSESLL

SEQ ID NO: 163987 - protein, 66 aa, Glycine max
  Clone ID: PAT_MRT3847_119099C.1.pep
QGSLTVYYICYDLVTLAVEKNIKYFKDNSRVTSTLGFWLVTVNFFSLNIESLACIAEMMCFLFFSL

SEQ ID NO: 163988 - protein, 66 aa, Glycine max
  Clone ID: PAT_MRT3847_11909C.1.pep
ASANAHDLLDMDSDTIRNGSIIYVLPATQGLGGGTVRTARGNDTCPIVVVVSPNPHTKGCVINFES

SEQ ID NO: 163989 - protein, 74 aa, Glycine max
  Clone ID: PAT_MRT3847_1190C.1.pep
GQDLLTVLVCVSCTAAVFTPSDASTPLFVPGVLIDTGFMVVFIGWRFNFAHKTQSDPTEGYAGGNIMPCRQSLL

SEQ ID NO: 163990 - protein, 74 aa, Glycine max
  unsure (1)..(74): unsure at all Xaa locations
  Clone ID: PAT_MRT3847_119100C.1.pep
ANYLLTGRFSNSSDRTSSIAEIMTGEGALTQLTIVTGGPLNDMQPLXLLKDIPYFIAALTPVTGKFVTYDGEDD

SEQ ID NO: 163991 - protein, 87 aa, Glycine max
  unsure (1)..(87): unsure at all Xaa locations
  Clone ID: PAT_MRT3847_119101C.1.pep
SMYINSHIRYKSYYIQKSPSPPIYSLVPLFQDVILLTVLYSEVASSKYTPIVKSPVSSLSSVKINRNKTGRPRASMRATVRVHRTXF

SEQ ID NO: 163992 - protein, 85 aa, Glycine max
  Clone ID: PAT_MRT3847_119102C.1.pep
SKIRMRTLLTIHNTLQSDNEKKTLEKKNGGEKKIIISPTQNQHIWRNTTLNPSTQYFTRFLKKVGDHKFSHNTKVFGPPMTALGP

SEQ ID NO: 163993 - protein, 66 aa, Glycine max
  Clone ID: PAT_MRT3847_119103C.1.pep
HPPLPGVDCIPVWPVLVCFIPRLEGSLSVASDSAATSSPNVCLHLFKRKKRIVRLWRHRNQNRYVI

SEQ ID NO: 163994 - protein, 76 aa, Glycine max
  Clone ID: PAT_MRT3847_119104C.1.pep
CACIQSPRESATLERKKKSVLIYSKDPPLPSPSLQSVTFNLQKKLQDNHVGQQIETPYPAFFPNQSAKVQYYLFQY

SEQ ID NO: 163995 - protein, 120 aa, Glycine max
  unsure (1)..(120): unsure at all Xaa locations
  Clone ID: PAT_MRT3847_119105C.1.pep
YLGYLWINTLVNRCIFNGNGKVLDDLVLAAKEGVFVNIDSEFDLENIIAAAKIAXKRVXNVLLRINPDVDPXVHPYVATGNKNSKFGIRNEKLQWFLDAVKEHSNELKLVRAHCHLGSTS

SEQ ID NO: 163996 - protein, 34 aa, Glycine max
  Clone ID: PAT_MRT3847_119106C.1.pep
FRDNKLMSALTQVRRLMGKTDDLFPPFIYTMHFL

SEQ ID NO: 163997 - protein, 57 aa, Glycine max
  unsure (1)..(57): unsure at all Xaa locations
  Clone ID: PAT_MRT3847_119107C.1.pep
GSLARAGKVRGHTPEVVKXDTKKKPRGPAHNRMYYNLRLGTVVAGFRQKRGPNSSHK

SEQ ID NO: 163998 - protein, 81 aa, Glycine max
  unsure (1)..(81): unsure at all Xaa locations
  Clone ID: PAT_MRT3847_119108C.1.pep
SSVVRSPCRRRSXFSPAHRXRRESAPENEIWRPENPHESYXPDDVEMRGLIXALDXRAMXWRGGGXCRRXWXKRGRSMKER

SEQ ID NO: 163999 - protein, 106 aa, Glycine max
  unsure (1)..(106): unsure at all Xaa locations
  Clone ID: PAT_MRT3847_119109C.1.pep
XXXXXXCGPTAXGXXXLTXLEAXDRNXILQLXNCLXLSLXQSPAGMVQXLIIWXPXTQNXVAXXQNNXQXXXEXFRXVAXYXFPIXXXXXXXXXSSRIPSXRTXXC

SEQ ID NO: 164000 - protein, 67 aa, Glycine max
  Clone ID: PAT_MRT3847_11910C.1.pep
EFYRPMVSTEFKTSFSEDMGVLWDSTRRSCSRHMLEYEFTLLDTNSVSCNHQIYNVPANDPSSARNI

SEQ ID NO: 164001 - protein, 74 aa, Glycine max
  Clone ID: PAT_MRT3847_119110C.1.pep
SGSSTTSGSSKSAGCNSNSSATASRMRSQFAMISPSSMFCTHVSPMSVYWNFSRTQQVANNVIIYTAAIFMKYA

SEQ ID NO: 164002 - protein, 42 aa, Glycine max
  Clone ID: PAT_MRT3847_119111C.1.pep
TRPKKDFSFVLNFASSRKSKIQHVIHKIYSHVIETPLSKSMT

SEQ ID NO: 164003 - protein, 38 aa, Glycine max
  Clone ID: PAT_MRT3847_119112C.1.pep
LGILGTIVFLWCVNLIGFSLFPNGLTLTSVHLSPYHLI

SEQ ID NO: 164004 - protein, 83 aa, Glycine max
  Clone ID: PAT_MRT3847_119113C.1.pep
SSSGHTYNECSGKRVVKGVRQRCVYRTLAQRFNRILRLCVSLQSRLFCSHQRLSECSERRRVHACSINWESFELHHVTLVPFP

SEQ ID NO: 164005 - protein, 100 aa, Glycine max
  Clone ID: PAT_MRT3847_119114C.1.pep
TCLDTPATRSRSAFKSVSPKIFLYIFNRKTFKSTFDLYGSMLLRLFGYKNIKCFFRAFQKNSIKKSSTFSRKNLSKTLITYIQINLKLIMFSFSLWIQAS

SEQ ID NO: 164006 - protein, 41 aa, Glycine max
  Clone ID: PAT_MRT3847_119115C.1.pep
MSTVRKSSQLSPVGKVMSGQKSSVLYRTKQYWFRFPWARLS

SEQ ID NO: 164007 - protein, 56 aa, Glycine max
  Clone ID: PAT_MRT3847_119116C.1.pep
FGSLVYLVGMVVLVILLVSLVAFVYMDTLRGHGNIGANCAYLEYRMDDFSGYLRRR

SEQ ID NO: 164008 - protein, 46 aa, Glycine max
  Clone ID: PAT_MRT3847_119117C.1.pep
NKLCTSFLKMASLTRSKDRIFVHHKHKAEVYTKGNVFYFLGFIRPS

SEQ ID NO: 164009 - protein, 71 aa, Glycine max
  Clone ID: PAT_MRT3847_119118C.1.pep
KVKIKGSWVIINCYKVVVEREKGFMKIIKGGKKKGCKVEFLKKKHEGNEVLGKDKSIRGNVMGYGKYRQLH

SEQ ID NO: 164010 - protein, 579 aa, Glycine max
  Clone ID: PAT_MRT3847_119119C.1.pep
AGITIAASRTKAKATYVTLICKNCKKGKQVPCRPGLGGAIVPRSCDHVPQPGEEPCPIDPWLVVPDKSRYVDQQTLKMQENPEDVPTGELPRNLLLSLDRHLVQTVVPGSRLTIMGIFSIYQASNSNTSNKGAVAIRQPYIRVVGIEETNETNSRGPAAFTQDEIEEFKKFAAEPDAYKNICSMIAPSIFGHDDVKKAVACLLFGGSRKNLPDGVRLRGDINVLLLGDPSTAKSQFLKFVEKTAPIAVYTSGKGSSAAGLTASVIQDSGTREFYLEGGAMVLADGGVVCIDEFDKMRPEDRVAIHEAMEQQTISIAKAGITTVLNSRTSVLAAANPPSGRYDDLKTAQDNIDLQTTILSRFDLIFIVKDVRMYSQDKIIANHIIKVHKSAGGRMGESRTLKEENWLKRYLQYCRTQCHPRLSESATTLLQNHYVKIRQDMRQQANETGEAAAIPITVRQLEAIVRLSEALAKMKLSHLATEENVQKAVRLFTVSTMDAAKSGINQQINLTPDMANEIKQAETQIKRRIGIGNHISERRLIDDLSRMGMNESIVRRALIIMPQRDEIESKRERRVVFRKA

SEQ ID NO: 164011 - protein, 123 aa, Glycine max
  Clone ID: PAT_MRT3847_11911C.1.pep
MLVLYLKIFNFCIFFIPQNFYMIGRDKSRTYWKVLKIDRLDPSELNLREDSTTYTESECSDLLRRIHEGNKSTGGLKFVTTCYGIVGFIKFLGPYYMLLITKRRQIGAICGHTVYAVSKSEMI

SEQ ID NO: 164012 - protein, 146 aa, Glycine max
  unsure (1)..(146): unsure at all Xaa locations
  Clone ID: PAT_MRT3847_119120C.1.pep
VKISQDMSHQANETGEAAAIPITVRQLEAIVRLSEALAKMKLSHLATEENVQEVVRLFTVSXMDAKKSGINQQINLTCAMANKIKQAETQIKRRIGIGTHISERRLIDDLSRMGMNESIVRRALIIMHQRDEIEYKRERRVVFRKA

SEQ ID NO: 164013 - protein, 61 aa, Glycine max
  unsure (1)..(61): unsure at all Xaa locations
  Clone ID: PAT_MRT3847_119121C.1.pep
GGSNAXSHGMTLKGLVATMYCYHSCTLRMEIAVLAVPATTSAPSIGLKRIHGGLLFLFVSA

SEQ ID NO: 164014 - protein, 147 aa, Glycine max
  Clone ID: PAT_MRT3847_119122C.1.pep
FRWFANESHRGRMLKRLVDRATSNTDNGREVDFDLDILVTLVCEEQEFIRPVLSMMREVAERANVDRAALWHQLCASEDEIVRVREESKNEISNMAKEKVMISQKLSESEATNNRLKAVLGSVVDRLSRPRVDRAEQIQEVESQLEW

SEQ ID NO: 164015 - protein, 167 aa, Glycine max
  unsure (1)..(167): unsure at all Xaa locations
  Clone ID: PAT_MRT3847_119123C.1.pep
MANNAAACAERATSDMLIGPDWAINIELCDIINMDPRQAKDAIKILKKRLSSKNPQIQLLALFALETLSKNCGDSVFQQIIEQDILHEMVKIVKKPDLRVREKILILIDTWQEAFGGQSGKYLQYKVPYNXLKSAVVCFTPRVENSVPFFTPPQTLPVHLAAAEYDD

SEQ ID NO: 164016 - protein, 77 aa, Glycine max
  Clone ID: PAT_MRT3847_119124C.1.pep
DVFKEKKLYMLDYHDLLLPYVSKVREIEGTTLYGSRTLFFLTKQGTLKPLAIELTRPPIDGKPQWKQVFTPAFYSIS

SEQ ID NO: 164017 - protein, 143 aa, Glycine max
  unsure (1)..(143): unsure at all Xaa locations
  Clone ID: PAT_MRT3847_119125C.1.pep
RRRRRSLVVHKKPVTVKELFQTGLLDGGSGXYVGCKKDSTTELRGEIKDGGXILCSCRLCNGRRVIPPSQFEIHACNIYKRAAQYICLENGKSLLDLMRACRAAPLHTLEATIQNFINSPPEEKYFTCKSCRGCFPSSNVERV

SEQ ID NO: 164018 - protein, 161 aa, Glycine max
  unsure (1)..(161): unsure at all Xaa locations
  Clone ID: PAT_MRT3847_119126C.1.pep
HPRNTALTAKTHHDLEISLPIKTHTPYFMHSFSTFMCYDXTPSACHRPGKAQRKVPRYTLKVMDAPXALQDHVYLNVVDGSMHNGWTEGLGNCVYVGNAGSSKDTKYXDLGIDDLDGSGACAHXGTHLAVVTSYGKDQICDASLCTKIRSLEGDHIQDAAL

SEQ ID NO: 164019 - protein, 126 aa, Glycine max
  Clone ID: PAT_MRT3847_119127C.1.pep
KPFGSLPFEVKSRPSKSPSTTLLYSATPEFNTHTYTSMASSQADLRKIAVESFDLIDKLYGRRGPASNDAFPSQRQCFWVVHQVPNGDMDQKPGLKNKHVVNYGIPVANQYPRGKAQNRWGRPIKF

SEQ ID NO: 164020 - protein, 48 aa, Glycine max
  Clone ID: PAT_MRT3847_119128C.1.pep
CLNLTNRKLYILAAVCNCLIIVIAYYYCCCFPFLIIYSQPCLISGHIS

SEQ ID NO: 164021 - protein, 66 aa, Glycine max
  Clone ID: PAT_MRT3847_119129C.1.pep
QARGTSLQSRIRGPPTTFWGENFDSRFGFFEATEFSTGGSGNKPSCVRRGRTPPPLHTNGSNLSYH

SEQ ID NO: 164022 - protein, 603 aa, Glycine max
  Clone ID: PAT_MRT3847_11912C.1.pep
MDTHVVDGSVEWMQEEKAELVVDGKVDWKGRRALKHKHGGMKVSLLILGAFAVENMATLSLAVNFVSYFTGIMHYELADAANIVTDYMGVSYMLSIVVAVVADTWIGRYKSVVISGFIESLGLALLTVQAHMGSLTPPICNVYVKDAHCAKLSGKQEAFFFISLYLLAFGSAGLKASLPSHGADQFDERDPKEAMQMSSFFNGLLLAVCIGGAVSLTFNVYIQDRYGWDWGFGISTFAIVLGTILFAFGLPLYRIHVAHTKNGIIEIIQVYVAAIRNRNLSLPEDPIELYEIEQDKEAAMEIEHQPHRDIFRFLDKAAIQRKSDVQPENQETPNPWKLCRVTQVENAKIILSMLPIFCCSIIMTLCLAQLQTFSVQQGSTMDTRITKHFNIPPASLPIIPVGFLIIIVPFYDRICVPFLRKFTGIPTGITHLQRIGVGLILSCISMAIAAIIEVKRKGVARDHNMLDALPVKQPLPLSIFWLAFQYFIFGIADMFTYVGLLEFFYSEAPKGLKSTSTCFLWCSMALGYFLSSILVKIVNSATKNITSSGGWLAGNNINRNHLNLFYLFLSILSLINFFVYLFVSKRYKYRPQHPAVTGGNSEE

SEQ ID NO: 164023 - protein, 55 aa, Glycine max
  Clone ID: PAT_MRT3847_119130C.1.pep
NNIYWDAFFFQNIQNFSILVPNTKKAKKKSVLVFFCWGKGGIKTPKFTVLLVMGV

SEQ ID NO: 164024 - protein, 118 aa, Glycine max
  Clone ID: PAT_MRT3847_119131C.1.pep
RCVASLLFAACRLVWAVLLGVFFGSRLGFPCPVVVVLRPVLCLLVPLLCGFVVARSRALAWVLLCGRPFVVFFSFFAMLLLVFFLPVAFLLPPLLASRAFAGKIAGRVGRSGFLVFGP

SEQ ID NO: 164025 - protein, 71 aa, Glycine max
  Clone ID: PAT_MRT3847_119132C.1.pep
SNKEGHNKTEVIMVINYRAQYWMYTVMIKSPYFFPLFLSPEPPKLPFCCALAFNSSCRIRHEASQEETEAS

SEQ ID NO: 164026 - protein, 243 aa, Glycine max
  Clone ID: PAT_MRT3847_119133C.1.pep
MQDPSRPAPPPFYHQNGGQPPPPAASAAIATGYPYAAQQQYYNTTYPPPRSYASRSFFRAFFATMICLAVVFGVVLIITWLVLRPSLPHFTLHSLSVSNLSSTSQSLSATWHLSFLVRNGNKKMTVSYNALRSSIFYRQNYISESQLAPFRQDTRSQTTLNATLTAAGTYLEPKLIDNLNAERNASSVLFDVQVVAATSFRSGSWRFRTRVLKVLCRKVPVGVSSKSSSGDLVGGDRECQVWT

SEQ ID NO: 164027 - protein, 42 aa, Glycine max
  unsure (1)..(42): unsure at all Xaa locations
  Clone ID: PAT_MRT3847_119134C.1.pep
ISXXAPVALTGVPPATTDDSYNNRWSTFLFDGLFNIYGWGGP

SEQ ID NO: 164028 - protein, 83 aa, Glycine max
  Clone ID: PAT_MRT3847_119135C.1.pep
GFRRAGALLKKPHPGLRLSVHLVPALAPCLPNPGTKNGLAGPPFLLGSADPSTSGTSGVPSTHTGPSDLSRGPGPKPASSFLG

SEQ ID NO: 164029 - protein, 60 aa, Glycine max
  Clone ID: PAT_MRT3847_119136C.1.pep
FNSGIRIYREAIRWKPYSVSKDNCFKAAYNSYAIVCNTIECSNSSPHLNNPKDWFALAFP

SEQ ID NO: 164030 - protein, 44 aa, Glycine max
  Clone ID: PAT_MRT3847_119137C.1.pep
SAGSCYAVGLDDNALCVENFMRHHCPICYEVLFDSLKDGIVMKC

SEQ ID NO: 164031 - protein, 265 aa, Glycine max
  Clone ID: PAT_MRT3847_119138C.1.pep
MASSSESQSQSKPLQDRVAIVTGSSRGIGREIALHLASLGARLVVNYTSNSAQADSVAAQINAGSATTTPRAVVVQADVSDPAQVKSLFDSAERAFDSPIHILVNSAGVIDGTYPSVADTTVESFDRTFAVNARGAFACAREAANRLKRGGGGRIILLTTSQVVALRPGYGAYAASKAAVEAMVKILAKELKGTQITANCVAPGPIATEMFFEGKTEEVVNRIVQESPLGRLGETKDVAPVVGFLATDASEWVNGQIVRVNGGYI

SEQ ID NO: 164032 - protein, 128 aa, Glycine max
  unsure (1)..(128): unsure at all Xaa locations
  Clone ID: PAT_MRT3847_119139C.1.pep
RGKRTEDNTNPQKQKGXDRGXXNAXXRGGDRDXGGXRHGEXEPARNGXTRNNDPRKTKEXXEQIFLFKXPAKLLNVTNLTNFRKDGHPCVFGKNTMGGRKVSTRKQDRSHWCLPGSPDARNELINATL

SEQ ID NO: 164033 - protein, 67 aa, Glycine max
  Clone ID: PAT_MRT3847_11913C.1.pep
CCLRHYSSLRCQHMMSQEAISAPYSNLTDPSAQAKEPNLDIDSNPNKPNPNLLRRQRSRPGTAQPKA

SEQ ID NO: 164034 - protein, 81 aa, Glycine max
  unsure (1)..(81): unsure at all Xaa locations
  Clone ID: PAT_MRT3847_119140C.1.pep
GLFGGLGLLLCVGVCGCPRCFSGLCGGLCCGGVLLVLALGLCGLVLGAVCSLXVXCWLCPAGPCCVCXLSLGLLLSGGGEG

SEQ ID NO: 164035 - protein, 121 aa, Glycine max
  Clone ID: PAT_MRT3847_119141C.1.pep
FFTMDRVSHRGSRFLLRESPLLEFEFQSIMDPVINWFVSLISCLGTKINPILEKITGHQFNVKTESCDEISMGGGWLLYVAIADGVALAATAVDWLLWKLISGVVWLLRKLIYGDAFTAWE

SEQ ID NO: 164036 - protein, 64 aa, Glycine max
  Clone ID: PAT_MRT3847_119142C.1.pep
TKQLKLLLFSFNNLSSNASAKSSGISQPSLSQHCQKKRSRKKETLYFFLGTQVVFVLFWLLTLS

SEQ ID NO: 164037 - protein, 93 aa, Glycine max
  unsure (1)..(93): unsure at all Xaa locations
  Clone ID: PAT_MRT3847_119143C.1.pep
QLIKYRYVLVNGYIVDILVYGCNXQDIIIAKDEXKSKTLIYNYFDLAXCEKLLNHSTLHPSPPVACTRSLARNSARGLKINELLVVEYYSRQT

SEQ ID NO: 164038 - protein, 232 aa, Glycine max
  unsure (1)..(232): unsure at all Xaa locations
  Clone ID: PAT_MRT3847_119144C.1.pep
MALYSFFSPSLLYPPSHIPRRLFCPKASLSSSSPESKASQSVSSATSTTTSPTPSVESRPPDPAFNYALTNPNGNPIVRIVRATESSIERVIFDFRFLALLAVGGSLAGSLLCFLNGCIYIIDAYKVYWSSCVKGVHTGQMVLRLVEAIDVYLAGTVMLIFGMGLYGLFISNVPPDVPPTVDRALKXSSLFGMFAMKERPXWMKICSLDELKTKVGHVIVMILLLKRFERSK

SEQ ID NO: 164039 - protein, 118 aa, Glycine max
  unsure (1)..(118): unsure at all Xaa locations
  Clone ID: PAT_MRT3847_119145C.1.pep
RICPGAGWGCSCVPPSIASYYMDRVFSVDDIFYHFWQPSIPVFVGHTYSQMIRSCFEWCFXRCLQEASASAPSPPSSYYAADVVFVWIEDQPKPAPPPPSNGAVLPNAPGSVPLDSDE

SEQ ID NO: 164040 - protein, 85 aa, Glycine max
  Clone ID: PAT_MRT3847_119146C.1.pep
KGNGYSTCHGHNPCLKREAKQSPTKRWRHFWPLIKRVWLGIETCGVGLAKRKGRIILFVSFGSTASKENGGSKQESKGNGFVVCS

SEQ ID NO: 164041 - protein, 86 aa, Glycine max
  Clone ID: PAT_MRT3847_119147C.1.pep
DIASGDLPPTHPIRLGLALNFSVFYYEILNQSDKACAMAKQAFEEAIAELDTLGEESYKDSTLIMQLLRDNLTLWTSDVQDQLDEP

SEQ ID NO: 164042 - protein, 100 aa, Glycine max
  unsure (1)..(100): unsure at all Xaa locations
  Clone ID: PAT_MRT3847_119148C.1.pep
MASSQEEVXXXGXTGRPFVXXVHMALKXKGVQYKYVEENLRXKSELLLKSNPVXKXGPVXIHNEKXIAEXLXIVAYMXDWSXXHLASXPYKELCXFWSNH

SEQ ID NO: 164043 - protein, 113 aa, Glycine max
  Clone ID: PAT_MRT3847_119149C.1.pep
PFKQWYLTHYGVDIGRKKKTPAAKKDNAEGQEVEAAAEETKKSNHVTRKLEKRKEGRTLDAHIEEQFGSGRLLACISSRPGQCGRADGYILEGKELEFYMKKLQRKKGKSAVA

SEQ ID NO: 164044 - protein, 104 aa, Glycine max
  Clone ID: PAT_MRT3847_11914C.1.pep
MAAIYSLYIINKSGGLIYYKDYGSAGRMDTNDSLRVASLWHSMHAISQQLSPVSSCLGIELLQADTFDLHCFQSLTGTKFFVVSEPGAQHMESLLKFVYEMTPT

SEQ ID NO: 164045 - protein, 102 aa, Glycine max
  Clone ID: PAT_MRT3847_119150C.1.pep
KGKIFFKCLTNSISQMPHSLKNKKNNHTKTTFIWGAHPPNQKNQNNWPHPPKKKTSFAATPKKPPPGGGSHTGLLNNKNQGSPPPPYNAGAFCIHKNLKQAP

SEQ ID NO: 164046 - protein, 87 aa, Glycine max
  Clone ID: PAT_MRT3847_119151C.1.pep
PGFPPPLMTRTHKAPVRRIPPKPQKQEPPRPMDFVPDVSALHPAPLQVPKEPLHMLHPLGLTAIPGIPQVAPVPAHQASPLPRRYRC

SEQ ID NO: 164047 - protein, 93 aa, Glycine max
  Clone ID: PAT_MRT3847_119152C.1.pep
IFCFYTKTHKVHGPPLLPQKYHPESTRYPTLSCQTEKENAPLNGTNVPPGKKRKHPSQAQKKRTPQQHGKTPGRLEGGKNFTRSVTHCTPPFP

SEQ ID NO: 164048 - protein, 38 aa, Glycine max
  Clone ID: PAT_MRT3847_119153C.1.pep
LQQDLQQEKPFDCKYYFTMGFLMSFLKINHTNSLYFHN

SEQ ID NO: 164049 - protein, 85 aa, Glycine max
  Clone ID: PAT_MRT3847_119154C.1.pep
REIGVADDESSHPLHRKPYISFLTSHIVTCCITCRGWVRRSMTCASQVLHTLHPLSAQFICALASFNLRTIGHLAHLMSIHAKAI

SEQ ID NO: 164050 - protein, 95 aa, Glycine max
  Clone ID: PAT_MRT3847_119155C.1.pep
MGYIQDARQNHVKKKVEEALRSKMKQKALKECDHYTAKYAECALGRTLSVVWRCRQQAQELNDCLHQFTNDSVLEEMKKEYMLKQGEGSTRIQTA

SEQ ID NO: 164051 - protein, 356 aa, Glycine max
  Clone ID: PAT_MRT3847_119156C.1.pep
MKSMCLESLHNARYLLPIEKEGEFSVSDMVWGKVRSHPWWPGQIFDPSDSSEKAMKHYKKDCHLVAYFGDRTFAWNEESQLKPFRTHFSSIEKQSTSESFQNAVDCAVDEVTRRAEYGLACSCIPKDTYDSIKFQTVENTGIRSELSARHGVDESLNASSFSPGNLVEYLKTLSALPTGGFDRLELGIAKAQLLSFYRFKGYSCLPELQYCGGFDDDMDSLVHDDENNHAAPVSKNDGQAGSGNLKNQSSSHRKRKHNLKDIMHETKKERSLSELMGGTPDSPDGDYWSEEKVIDNLVSPGRSKKRRTVDHYADDFGKPDGRKTISVAKVSNTTKPSFLIGDRIRRVASKLTGSPS

SEQ ID NO: 164052 - protein, 162 aa, Glycine max
  Clone ID: PAT_MRT3847_119157C.1.pep
MESGAGGLVSSSEKEGASYTYWVRKITEDAAPLPLPRKLNPEDLPPSQSQSSTLASAWNRAGTWEEKSLSNWATPRIKELLFSLGSIQFSFGRAEVEDVTKCVGDAFMVIVRNKKRVGYTYELTLKVKGEWIIQGEKKVIGGHIDGPEFSFGELDDLQVEVR

SEQ ID NO: 164053 - protein, 203 aa, Glycine max
  Clone ID: PAT_MRT3847_119158C.1.pep
MESGALVSSEKEGQQGASYTYWVRKITEDAAPLPVPRKLNPEDVPPCHSQSQSRSATLGSAWNRAGTWEEKSLNNWATPRIKELLISLGSIQFSFGRAEVEDVTKCVGDAFMVIVRNKKRVGYTYELSLKVKGEWIIQGEKKFVGGHIDVPEFSFGELDELQVEVRLSDARDLFGELDDLQVEVRLSEARDILHQDKTQMRND

SEQ ID NO: 164054 - protein, 94 aa, Glycine max
  unsure (1)..(94): unsure at all Xaa locations
  Clone ID: PAT_MRT3847_119159C.1.pep
GPLTNTHSTETISYTFNKFNPNQPNIMLQKEPNITSTGVKQLTKVGNNTMPTSISHNRALYTVPNQIXDNETLKVAKLATFYKYNNFTPNKKNS

SEQ ID NO: 164055 - protein, 40 aa, Glycine max
  Clone ID: PAT_MRT3847_11915C.1.pep
MSLNAATEATLESNTSTSSPKPIFGAALTTGCNPCVPIFN

SEQ ID NO: 164056 - protein, 34 aa, Glycine max
  Clone ID: PAT_MRT3847_119160C.1.pep
FYLLVDRGWVYEYVRIIKHRDLTRSFAHEIFMIV

SEQ ID NO: 164057 - protein, 326 aa, Glycine max
  unsure (1)..(326): unsure at all Xaa locations
  Clone ID: PAT_MRT3847_119161C.1.pep
IPYSHLLPFQFAWTFVGVHCSRPPNLGLPPLLPGAPHGRPLPPPLPPRDLHFHPHHQFQPHHNHQNTEDEAGNGRGQKRDRDENAGGGGPASAPPRGGGVGRGPGAGHGGGSDMGRRPRGSPAGXETGPSPPVSEIANGCDIMESVTAFARRRQRGICVLSGSGTVTNVTLRQPASPGAVVTLHGRFEILSLSGSFLPPPAPPAASGLAIYLAGGQGQVVGGSVVGPLVASGPVVIMAASFGNAAYERLPLEEEETPVPYHGTEGLGSPGIPGTQQQSQSQPQQQQQQLVGDPNSSSLFHGVPQNLLNSIQLPAEGYWGGSARPPF

SEQ ID NO: 164058 - protein, 79 aa, Glycine max
  unsure (1)..(79): unsure at all Xaa locations
  Clone ID: PAT_MRT3847_119162C.1.pep
NPYITQLNHLAAHTPFSSFVISNKXHTYHPSQQYPILNFYINSPFIGTLISTNFLNTHNITTSLSNSLTPSPFNFFPYF

SEQ ID NO: 164059 - protein, 79 aa, Glycine max
  Clone ID: PAT_MRT3847_119163C.1.pep
SNFPQLGFQGLAKAGPRWFPMGLNTRGKERPKLLRAYWEGGLSGKVFYFQISLPRGGFLNGQGGVTSRYSGALKRGCFI

SEQ ID NO: 164060 - protein, 53 aa, Glycine max
  Clone ID: PAT_MRT3847_119164C.1.pep
LRNDMESVVLSLRAIREGRMNEHYPHVLYTVALDVHLMLNQLTLIPCISCRTL

SEQ ID NO: 164061 - protein, 84 aa, Glycine max
  Clone ID: PAT_MRT3847_119166C.1.pep
SYSFFPSLVPFPPAVLDGALILGPPFFFKNKEPPPSGGGVFFFFFSSLGRIFVLFKGGGFFGGGLLCALKGQECSMLRFHNSCL

SEQ ID NO: 164062 - protein, 38 aa, Glycine max
  Clone ID: PAT_MRT3847_119167C.1.pep
HCLLKCFKQLMVTSHILKFFNFKIHFPYHNLIETFFFN

SEQ ID NO: 164063 - protein, 66 aa, Glycine max
  Clone ID: PAT_MRT3847_119168C.1.pep
IKKGKAQPKGGATRYSIKTKHSIWGGIFLLGGKKLLSPGPFYTLRTETKGVDYCYSKNKLGTRKLL

SEQ ID NO: 164064 - protein, 55 aa, Glycine max
  unsure (1)..(55): unsure at all Xaa locations
  Clone ID: PAT_MRT3847_119169C.1.pep
VXFFKTFLISQCIINVILLHSCRLKLSMKSIIIKPNHVLRIILVKFFNLPLFIIL

SEQ ID NO: 164065 - protein, 143 aa, Glycine max
  unsure (1)..(143): unsure at all Xaa locations
  Clone ID: PAT_MRT3847_11916C.1.pep
MAAICSLYIINKSGGLIYYKDYGSDGQMDTNNSLRVASLCHTMHAISQHLSPVSGALGXIELLQAYTFDLHCFQSLIGPKIFVVCEPVEQXMESLLKFVYEFYTDYVLKNPXFYEMEMPIRCELFDINLTQAVQKXRVAFLGR

SEQ ID NO: 164066 - protein, 66 aa, Glycine max
  Clone ID: PAT_MRT3847_119170C.1.pep
RWRERFVPLNDNTVMVRSGFRVGNVRDRESQSGLVSVDVDRFPCKHYLKKNPFYDTHFTLVIINPS

SEQ ID NO: 164067 - protein, 219 aa, Glycine max
  unsure (1)..(219): unsure at all Xaa locations
  Clone ID: PAT_MRT3847_119171C.1.pep
NEVKHAKYVFNSMAQSGVTPGVQSYTIMIDGLCKTKMVDEAISLFEEMKHKNVIPNTITVNSLIDGLCKSRRIAYVWDLXDKMRDRSQLADVITYSSLIDALCTNCHLDQAIALFKKMITQDIHPDMYTYTILIDGLCKGGRLKIAQEVVQHLLIKGYHLDIRTYTVMISXFCKARLFDEALALLSKMEDNGRIPNAITVDIDICALFDKDENDKAEKL

SEQ ID NO: 164068 - protein, 46 aa, Glycine max
  Clone ID: PAT_MRT3847_119172C.1.pep
KKSKHYIFHQKGQDADTEGRFHGSQFTTGVCRLLMMHPDEADQTAE

SEQ ID NO: 164069 - protein, 158 aa, Glycine max
  Clone ID: PAT_MRT3847_119173C.1.pep
KIINSPSRPPSSVIYKSNMETESLLPKPTYGGIKRYLRRRRYQRLDGDGGATATTGGKKTKMIRSRRRSPRRQWRIKAIPKLTWMVRSPLKMMAKLKNAYTNFMLNSMSTDNIFGTKRIPKADPHQVSKYYTGDAFEARLIFEISKALVASHELYPVH

SEQ ID NO: 164070 - protein, 86 aa, Glycine max
  Clone ID: PAT_MRT3847_119174C.1.pep
ARAARARAESARGSSKISIRKKKKQRKMIMVVVMTGILGEYTAVLTRVTERLLPRHGISFRGLRRNLRFASTTSSSDSASSFLVYF

SEQ ID NO: 164071 - protein, 79 aa, Glycine max
  unsure (1)..(79): unsure at all Xaa locations
  Clone ID: PAT_MRT3847_119175C.1.pep
XWXXIXXSERSQLTSVPLGTHQFALMFHLCTLVQTSKERFFGDDQQQYQLLVQLFGNPAALSSSRENPLPLXLSCCISK

SEQ ID NO: 164072 - protein, 65 aa, Glycine max
  Clone ID: PAT_MRT3847_119176C.1.pep
LRKFLKGPPPIFWSQGPKKIAIPLFSNKKKKFSVQVKVENPHVAVRGPVNYLGVEIFKPKNALSG

SEQ ID NO: 164073 - protein, 46 aa, Glycine max
  unsure (1)..(46): unsure at all Xaa locations
  Clone ID: PAT_MRT3847_119177C.1.pep
PSKWGIFWFFSGWVPAKXVLGLFRWPETKNVPIEKMTEKVWNQLWF

SEQ ID NO: 164074 - protein, 172 aa, Glycine max
  Clone ID: PAT_MRT3847_119178C.1.pep
MALQLPPLPGRAMRFNSSVCSLPARKSSTFATLSQPRSDWVEATNSFFDQDKRPIMLFDGVCNLCNGGVKFVRDNDRNKTIRYEPLQSETGKILLRRSGRAPDDISSVVLVEKERSYIKSEAVLKIMEYIDLPFPQLAILLQFVPLFIRDFVYDNVANNRYLIFGRSESCEI

SEQ ID NO: 164075 - protein, 196 aa, Glycine max
  Clone ID: PAT_MRT3847_119179C.1.pep
RPDFAVGEKWDSLSIDNYDGHRGALVNWVESAGGAITAFDFTTKGIFQAAVQGQLWRLKDSNGKPSGMIGVKPENAVTFIDNHDTGSTQRIWPFPSDKVMQGYAYILTHPGTPSIFYDHFFDWGLKEQIAKLSSIRVKHGINEKSSVNILAAEADLYVAKIDNKIFLKIGPKMDLGNLIPPNFHVATSGQDYAVWE

SEQ ID NO: 164076 - protein, 41 aa, Glycine max
  Clone ID: PAT_MRT3847_11917C.1.pep
NHWQISPFYFQSGMHIKLSFSKKICGEKLGHGLTPGFGRGG

SEQ ID NO: 164077 - protein, 89 aa, Glycine max
  Clone ID: PAT_MRT3847_119180C.1.pep
WHTVTLDGSVNGSVCGCATSRAAPSFPDRQCKLSPKHLHQPTASFQIALLRVRASLANSSNYNTSTSTMKCRRLKSDSEICNALRQFLD

SEQ ID NO: 164078 - protein, 97 aa, Glycine max
  Clone ID: PAT_MRT3847_119181C.1.pep
FELDLSLQDALIERTRHACSRNGTIFVRSQGSFYRCCSDLHSSSYLYWWIVQCNWNTSLFFKASDAYADLAMVIAMLALFTKLGRCHGYYDCLSQLD

SEQ ID NO: 164079 - protein, 79 aa, Glycine max
  unsure (1)..(79): unsure at all Xaa locations
  Clone ID: PAT_MRT3847_119182C.1.pep
IFPLSFSLFKTFLIYYISFILFYIFLIFCFLFYFFIFLYFFIYSFFFXVWLLFLFIFFLLFFIYFFFNFFYLFFLFFFF

SEQ ID NO: 164080 - protein, 50 aa, Glycine max
  Clone ID: PAT_MRT3847_119183C.1.pep
HGSCNFAIPEQVQAICFWPHRFFSIAYRACLYLLLSSSSVQSRDLLVEKG

SEQ ID NO: 164081 - protein, 135 aa, Glycine max
  Clone ID: PAT_MRT3847_119184C.1.pep
MAACLSLCTPTLYRPRVCKHFKLLNGSHKFSFNGYGLDLAVVLQNSNAAGRIRATLTFGGGDLGSYLKSSDVVTNRFGTGTQFDAVAFGTLGADTAVPAGSGFSDDESEHDFDSPTEGFAYIPEAIEDIRNGKMV

SEQ ID NO: 164082 - protein, 38 aa, Glycine max
  Clone ID: PAT_MRT3847_119185C.1.pep
DGIIVLDTLQIDVKEKGVTYIPECSLKIHATSSISKGI

SEQ ID NO: 164083 - protein, 67 aa, Glycine max
  Clone ID: PAT_MRT3847_119186C.1.pep
QCLINIALLLDIYCCSAPPLFFLFLLFYPTTFGFYFTPFCVKLCKEVSFPFLLERQYRKYEQRTKIR

SEQ ID NO: 164084 - protein, 232 aa, Glycine max
  unsure (1)..(232): unsure at all Xaa locations
  Clone ID: PAT_MRT3847_119187C.1.pep
IATLCCVAEYLEMTEDYSVGNLMGRTDAYLNEVALKTIAGAVSVLHMSENLLAIAERAKLVSRCIDAIAFIACXESQFCSSARSESGSVGVVSSMXSNQRPVVDWWAEDLTVLRIDIFQRVIIAMMARGFKQYAIGPILMLYAQKSLRGLDVFGKARKKIEPRQEHEKRVVLETIVSLLPREKNSMSVSFLSMLLRAAIYLETTVACRLDLEKRMGMQLGQAVLDDLLIPSY

SEQ ID NO: 164085 - protein, 40 aa, Glycine max
  Clone ID: PAT_MRT3847_119188C.1.pep
NYSNIHDTPNQTIQRITYTILYYNLTLSCIFMSDMCLWFL

SEQ ID NO: 164086 - protein, 381 aa, Glycine max
  Clone ID: PAT_MRT3847_119189C.1.pep
PIRKWEAIIRRILNISSEPESKHKSYSAPHSAVQKTSSSASVNALADSVDVNPLDMMNEEYLGTFDNDDLEQEEQKSSIFGIGKNLQLRKIHDIDLQTILDWPERPLDATPHTDSSPKLRRVLSSSERTGFSWTDTASKYSNAMKRSHHSSGNLGLLWKEQKVMPEEVIDIIDDLSDMLSDEEDDDDYFEVANDKEVNGISKVKSHRKYVRIVSKQMVGIYVSVWVQRRLRRHINNLKVSPVGVGLMGYMGNKGSVSISMSLFQSRMCFVCSHLTSGQKEGVGHRVNSRVGEILRRTCFSSSVFDADQPQTIPSHDQIFWFGDLNYRINMLDAEVRKLVALKKWDELKNYDQLSKELRMGHVFDGWKEGLINFPPTYKYEI

SEQ ID NO: 164087 - protein, 49 aa, Glycine max
  Clone ID: PAT_MRT3847_11918C.1.pep
TKNFHFPFKKNKGSSFLIWKNPDMVLIFNKFRFFLKNKGNPSGGPLPCS

SEQ ID NO: 164088 - protein, 98 aa, Glycine max
  Clone ID: PAT_MRT3847_119190C.1.pep
SSPVQCFLLHHHPELHSPISRNEVPALSAILRRHHPSRFSFVKSTCTNESPSVLFVIALLDFVVCTILQPSLPARPPTETRRRGSNPGSVPAGVTPFP

SEQ ID NO: 164089 - protein, 76 aa, Glycine max
  unsure (1)..(76): unsure at all Xaa locations
  Clone ID: PAT_MRT3847_119191C.1.pep
AGNSALANRLIERRTYTSKNSXFQRTPAGQYYAQSDLISTLLQRLLSVHVAANIRHKHTQNKYIPIHMTKHAHRRQ

SEQ ID NO: 164090 - protein, 74 aa, Glycine max
  Clone ID: PAT_MRT3847_119192C.1.pep
RVSHRRKGDPHDCSLLLIRGGAKHHRQGEPKEAMNALSDSAVTMRVSTRVNSPDLHWPVKRTSTCHRDILGHFR

SEQ ID NO: 164091 - protein, 160 aa, Glycine max
  Clone ID: PAT_MRT3847_119193C.1.pep
MAKVRDQKLYVTVPSLFRCPISMDVMRSPVSLCTGVTYDRASIQRWLDSGHDTCPATLQVLPSKDFIPNLTLHRLIRLWLLSSSAGEPFSPSSADHLRPLLRKIHTSDDDLAGTLSIIAEFSLKSGEKRRSLATFPGFDSALVRALAGSNSLIDAAENSI

SEQ ID NO: 164092 - protein, 54 aa, Glycine max
  Clone ID: PAT_MRT3847_119194C.1.pep
IPRGKKKGKPVLEKLFKKGPFKGGKRALFRYLGGSCLVYNKIPQNGGGDKRNWL

SEQ ID NO: 164093 - protein, 103 aa, Glycine max
  Clone ID: PAT_MRT3847_119195C.1.pep
VVHYHHFIVSFLFQTSNQTLATLLSLSFPELPVAVESSYLLTSEASLCLACVLPPSVRFAFLHLHFHNIKIPLPLFLLLFDLFVVKKYFRCICLCDLIRNSGQ

SEQ ID NO: 164094 - protein, 79 aa, Glycine max
  Clone ID: PAT_MRT3847_119196C.1.pep
IIFSYRLTLSLLCMNVNVEIYGIHTGADRHITEGGAILTSFLKIKINECDCKKKNKWGAFSKNYTNTSNNTPSVVFSQP

SEQ ID NO: 164095 - protein, 53 aa, Glycine max
  Clone ID: PAT_MRT3847_119197C.1.pep
KATPGKKLSYNEKGSRLSLNQNPMAPKKLGKGNAGLRASFVKLDQIPKAKLRA

SEQ ID NO: 164096 - protein, 73 aa, Glycine max
  Clone ID: PAT_MRT3847_119198C.1.pep
GTESVKITFFKLGNWYSIHFGSSLCQKKNPKSWFVYKEDVYLKSIRIFRTLVRNRRNVRWRLFPRESCTPFLR

SEQ ID NO: 164097 - protein, 350 aa, Glycine max
  unsure (1)..(350): unsure at all Xaa locations
  Clone ID: PAT_MRT3847_119199C.1.pep
SSWDKVLIHVLGEISLGVRRDEWLKALPLXLIAGLVKTDREFEKGEGTSGTTATVVVVGRWPVNDASVGASRCILDTQGGAVASLTVDHRLEENIEERERVTSSGGEVGRLSIVGGAEIGPLRCWPGGLCLSRSIGDMDVGEFIVPIPYVKQVKLSKAGGRLIIASDGIWDALSSEMAAKSCRGLPAELAAMQVVVKEALRTRGLKDDTTCIVVDIIPPDNELPPTPPPPKRNKLRDLLSFRKRSRDSASKLSKKLSAINIVEELFEEGSAMLAERLGNDDNLNSGQSTSGIFVCAVCQVDLAPSEGISVHAGSIFSTSSKPWEGPFLCFDCRDKKDAMEGKRPSGVKVS

SEQ ID NO: 164098 - protein, 98 aa, Glycine max
  Clone ID: PAT_MRT3847_11919C.1.pep
LRRCSNDVVQLDLSTPTTGTTTTTTTTNNTNSSSFSSSCSLSIDVDESTEARIQRLISEHPVIIFTRSSCCMCHVMKKLLATIGVNPTVIELDDHEIA

SEQ ID NO: 164099 - protein, 138 aa, Glycine max
  unsure (1)..(138): unsure at all Xaa locations
  Clone ID: PAT_MRT3847_1191C.1.pep
LPLPGCFQPPVTFPGLRGWGPPAPRIGGLPAFPQVVFPFPPXQGLRPPRGSSPQRALPSPRGKKQAGRVSPERIPKPPFFRATITFKKGKLVKKXRPPPGKLPIVSSYTLGDSKKVVSKYPFNFPGTFVKTPRTKGFP

SEQ ID NO: 164100 - protein, 271 aa, Glycine max
  Clone ID: PAT_MRT3847_119200C.1.pep
MACSMNSVFCVPELNESIFGSKTKGVLLPCPSKTANAKSWGCSVLSNAFMGKSIALGEKGSGCCNSKFSSNVPVHAQATICVSKALKWWKKTLKPNMIEIHSAQELVHSLLNAGDSLVVVDFYSPGCGGCKALHPKICQIAELHPNAIFLKVNYEELKTMCHGLRIHVLPFFRFYRGAEGRVSSFSCTNATIKKFKDALTKHGNERCSLGPAKGLEESELKILASIGEINSSPLLSPKQGKLEDLLTESHDFAGVWNMENNSRGLMLDAIY

SEQ ID NO: 164101 - protein, 259 aa, Glycine max
  unsure (1)..(259): unsure at all Xaa locations
  Clone ID: PAT_MRT3847_119201C.1.pep
MASGEGRRRHHDLVPLAALLKREMKSEKMEKPTVRVGHAAQSKKGEDYFLIKTDCQRVPGNSSSSFSVFAIFDGHNGNAAAIFTREHLLNHVLGALPRGLGRDEWLQALPRALVAGFVKTDKEFQSRGETSGTTATFVIVDRWTVTVASVGDSRCILDTQGGAVTSLTVDHRLEENIEERERVTSSGGEVGRLSIVGGAEIGPLRCWPGGLCLSRSIGDMDVGEFIVPIPYVIQVKLSKAGGRLIXASDGIWDALSSEM

SEQ ID NO: 164102 - protein, 507 aa, Glycine max
  unsure (1)..(507): unsure at all Xaa locations
  Clone ID: PAT_MRT3847_119202C.1.pep
MTSLTNGDAGSLNKVPTIKFTKLFINGDFVDSLSGKTFETIDPRTGDVIARISEGDKEDIDIAVKAARHAFDNGPCTQPCLAFERNIAEMXQIIEENAEELAALDXGDFVASLSGMTFETIDPRTGDVIARISEGDKEDIDSAVXSRTFHAYTLLEPLGVVGHITPWNFPNTMFYIKVAPSLAAGCTMVLKPAEQTPLSALFNAHLAKLAGIPDGVINVVPGFGPTAGAALSSHMDVDKVSFTGSTQTGREIMQAAAKSNLKQVSLELGGKSPLIIFDDADIDKAAELALLGILYNKGEVCVASSRVLVQEGIYDEFEKKLVEKAKAWVVGDPFDPKVQQGPQVDKEQFEKVLSYIEHGKKEGATLLTGGKTVGNKGYFIEPTIFSNIREDMLIAQDEIFGPVMALKKFKTIEEAIKSANNTKYGLAAGIVTKNLDTANTVSRSIRAGTIWINCYFAFGDDVPFGGYKMSGFGKDHGLEALHKYLQVKSVVTPLYNSLRVLTIPSMA

SEQ ID NO: 164103 - protein, 105 aa, Glycine max
  Clone ID: PAT_MRT3847_119203C.1.pep
HYNHNNIWGWGEGFNFFKRGSFFFHWLKYFVSSRGLGFFIKSLQEFPVFFIWVLEWDKTLPALSGERRDHYLGGVLLYIKQLRSVGRGKNFYAGKVCLKGVMFSF

SEQ ID NO: 164104 - protein, 84 aa, Glycine max
  Clone ID: PAT_MRT3847_119204C.1.pep
VLTVRCLLKRMQLTVLGLGGHRFYSSPFQPSRPCEPHYSTHKATKPSLLDSGCPLLSLCYSISLVSRSRSVRNSPLLCRTLYTA

SEQ ID NO: 164105 - protein, 75 aa, Glycine max
  Clone ID: PAT_MRT3847_119205C.1.pep
SIIVAPKKHTDPTINIGGKSWAKKQLVQLFRAFSFLTNVRGVLSRNSTLRITIFFTMNQHPGGFKKLSYRRDACN

SEQ ID NO: 164106 - protein, 77 aa, Glycine max
  Clone ID: PAT_MRT3847_119206C.1.pep
QLPTAAAADHDMTRAQTIRSHCGAFRNNDISNNHGSIRSHELGQRDIYNVSERSSAMRKENIAEEMQDILFAEALDA

SEQ ID NO: 164107 - protein, 68 aa, Glycine max
  Clone ID: PAT_MRT3847_119207C.1.pep
QVTALILSGVFQSLTSQDWKVTNNTRSVNLVFSSLIIKHYNLSSAFKINVYLPAPQPVLAQLFLEKFQ

SEQ ID NO: 164108 - protein, 115 aa, Glycine max
  Clone ID: PAT_MRT3847_119208C.1.pep
SHGKTREIYEKLEELGEEMAKAGYVADTSFVLKEVDGDEKSQTIRYHSERLAIAFGLITFPPEWPIRVMKNLRVCGDCHTAIKFISKCTGRVIIVRDNNRFHRFEDGKCTCGDYW

SEQ ID NO: 164109 - protein, 54 aa, Glycine max
  Clone ID: PAT_MRT3847_119209C.1.pep
LTSLIAFLESFVPLVIVITQKKFVSQIQPVDMINQLAKLLSIYQMKIKINKFKS

SEQ ID NO: 164110 - protein, 77 aa, Glycine max
  Clone ID: PAT_MRT3847_11920C.1.pep
SLMIFCCSLMIRFDRGPRRKRRRFFFFLPDAFRGHRISLIFTSQSESHRSSLLPAPVTSLSSILLALSPSTFLFFCA

SEQ ID NO: 164111 - protein, 90 aa, Glycine max
  unsure (1)..(90): unsure at all Xaa locations
  Clone ID: PAT_MRT3847_119210C.1.pep
TAPAXYPGXARVPIWNHPETEKELFFLFNAISHLSLLAFLFQVQGFNNVTAIFIFNLIIVALRASFYIFSRPGKEESLVIIFGEIQPMIL

SEQ ID NO: 164112 - protein, 76 aa, Glycine max
  Clone ID: PAT_MRT3847_119211C.1.pep
YIRNHAEYGLTATINITDNHVINGARPNRNMLKEKFKYKCDTFKFQTKNNKDIINSILQPTCRSTLEDPRVTRSNS

SEQ ID NO: 164113 - protein, 39 aa, Glycine max
  Clone ID: PAT_MRT3847_119212C.1.pep
SCSHVWPCAIGVLPFSRADIVSLFRLKLCYGWSKLELNA

SEQ ID NO: 164114 - protein, 56 aa, Glycine max
  Clone ID: PAT_MRT3847_119213C.1.pep
PFILIFPKIPILFPPLKNYSPSFNLEPFLKFQHLLNFLPPSFFFFFPNIPQIFSYF

SEQ ID NO: 164115 - protein, 72 aa, Glycine max
  Clone ID: PAT_MRT3847_119214C.1.pep
SLVIPSVYNTAVALLVDDRVLTQSTDIVLINDVEDCRDSLSLSLSLSLSLLYSFWDYSGFPYPQYSCLGHPA

SEQ ID NO: 164116 - protein, 89 aa, Glycine max
  unsure (1)..(89): unsure at all Xaa locations
  Clone ID: PAT_MRT3847_119215C.1.pep
SEVVSSSGGNTYGKITTFRTVSQTNIPHTFPHHIISLFCGFNISFLXYLVSCSFATIRYPVFLGRNLCPFFLSRSMITCHRISKMTMVG

SEQ ID NO: 164117 - protein, 363 aa, Glycine max
  Clone ID: PAT_MRT3847_119216C.1.pep
TRRSDFKAPLIKIPESFEKIVVHTLTHNFRNATSIVRTPLRLPVKPKHVLVKIIFAGVNASDVNFSSGRYFGGNNNDVVSRLPFDAGFEAVGIIAAVGDSVTDLKVGMPCAFMTFGGYAEFLMIPSKHALPVPRPDPEVVAMLTSGLTASIALEKAGQMESGKVVLVTAAAGGTGQFAVQLAKLAGNTVVATCGGGAKAKLLKDLGVNRVIDYHSEDVKTVLREEFPKGIDIIYESVGGDMLNLCLNALAVHGRLIVIGMISQYQGEKGWTPSKYPGLLEKLLAKSQTVSGFFLVQYGHLWQEHLDRLFNLYSSGKLKVAIDPKKFIGLHSAADAVEYLHSGKSVGKVVVSVDPSFLPQVAKL

SEQ ID NO: 164118 - protein, 66 aa, Glycine max
  unsure (1)..(66): unsure at all Xaa locations
  Clone ID: PAT_MRT3847_119217C.1.pep
XERXTIXRRKXLXPXLRXAXIRXXIGXAGXXXGTXPXLIPXSXXSLVGXXSRXXTXGIPSLRTRXC

SEQ ID NO: 164119 - protein, 45 aa, Glycine max
  Clone ID: PAT_MRT3847_119218C.1.pep
KDSPGTNSRFLATVVAGSVLAGELSLMCAIAAGQPVNSRIKCIRS

SEQ ID NO: 164120 - protein, 77 aa, Glycine max
  Clone ID: PAT_MRT3847_119219C.1.pep
GSDGLLPLELYTATYRITATHPYIPNDLCWNTYLMCTRESIPIQFQIDGVPRWPSCCWMSTALLPQSPVCPTEVAYH

SEQ ID NO: 164121 - protein, 312 aa, Glycine max
  unsure (1)..(312): unsure at all Xaa locations
  Clone ID: PAT_MRT3847_11921C.1.pep
MALFSLQNNLFPLPLLTTPSSTKSFPSVTTRRATIFGSSLVLLNSTPPTLAQQLPNDHDELQQQEDHLVQLFQDASLSVVFIKDLELTKVPKSSSKGAMLNDDEDAKVEGTGSGFIWDKFGHIVTNYHVVAKLATDTSGLQRCXLVDAKGNSFDREGKIIGFDPAYDLAVLKVDVDGYEIKPVVLGQSNDLRVGQSCFAIGNPYGYENTLTTGVIFNNLYLNMVVSGLGREIPSPNGGAIRGAIQTDAAINAGNSGGPLIDSYGHVVGVNTATFTKKGTGVSSGVNFAIPIDTVVRTVPYLIVYGTPYSNRF

SEQ ID NO: 164122 - protein, 490 aa, Glycine max
  Clone ID: PAT_MRT3847_119220C.1.pep
MSIMQLYGRSKSVVKRSKKYLEEALYMKLFKDGSSQLIVRQSLNNFVKSRKRVYKWEVGDTLKKLRDRKLYQPALKLSETMAKRNMIKTVSDHAIHLDLLAKARGITAAENYFVSLPEPSKNHLCYGALLNCYCKELMTEKSEGLMEKMKELSLPLSSMPYNSLMTLYTKVGQPEKIPSLIQEMKASNVMLDSYTYNVWMRALAAVNDISGVERVHDEMKRGGQVTGDWTTYSNLASIFVDAGLFDKAEVALKELEKRNAFKDLTAYQFLITLYGRTGNLYEVYRVWRSLRLAFPKTANISYLNMIQVLVNLKDLPGAEKCFREWECGCPTYDIRVANVLIRAYVKLDMLEKAEELKERARRRGAKPNAKTLEIFMDYYLLKGDFKLAVDYLNEAISMGRGNGEKWVPSSRIISIMMRHFEQEKDVDGAEEFLEILKKSVESPGVEVFESLIRTYAAAGRISSAMQRRLKMENVEVSEGTQKLLEAISVE

SEQ ID NO: 164123 - protein, 56 aa, Glycine max
  Clone ID: PAT_MRT3847_119221C.1.pep
LRYNKWCLTILIWNVQLLIQGYVALIRALFNVRFVQTPGVECTDEFTHAVIRKIWL

SEQ ID NO: 164124 - protein, 55 aa, Glycine max
  Clone ID: PAT_MRT3847_119222C.1.pep
MSGDHNSSVSMVGKKKKNGSLRSIFMGADGLDWFLMIFGLFGAIGDGIGTPLVLF

SEQ ID NO: 164125 - protein, 531 aa, Glycine max
  unsure (1)..(531): unsure at all Xaa locations
  Clone ID: PAT_MRT3847_119223C.1.pep
DKQPLHVVMVDPKVSNKXRFAQEVISTILITVAVGLVWFMGAAALQXYIGSLGGIGPSGVGSSSSYAPKELNKEVMPEKNVKTFKDVKGCDDAKQELEEVVEYLKNPSKFTRLGGKLPKGILLTGAPGTGKTLLAKAIADGTGVPFFYRAGSEFEEMFVGVGARRVRSLFQAAKSWSWCSIFIDEIDAGGXTRKQWEGHTKKTLHQLLVEMDGFEQNEGIILMAATNLPDILDPALTRPGRFDRHIVVPNPDVRGRQEILELYLQDKPIADDVDVKAIARGTPGFNGADLANLVNVAAIKAAVEGAEKVTAAQLEFAKDRIVMGTERKTMFISEESKKLTAYHESGHAIVALNTDGAYPIHKATIMPRGSALGMVTQLPSSDETSISKKQLLARLDVCMGGRVAEELIFGQDYVTTGASSDLHTATELAQYMVSNCGMSDAIGPVNIKERPSSEMQSRIDAEVVKLLREAYDRVKALLKKHEKALHVLANALLEYETLSAEEIRRILLPYREGWLPEQQEQEAAEGDLVLV

SEQ ID NO: 164126 - protein, 52 aa, Glycine max
  Clone ID: PAT_MRT3847_119224C.1.pep
WFKDFYYHLQKAVPPVSEGGEVRLTLFFGRDRSFIFARHFFVAADGFKSRDP

SEQ ID NO: 164127 - protein, 98 aa, Glycine max
  Clone ID: PAT_MRT3847_119225C.1.pep
SKCGMSDAIGPVNIKERPSSEMQSRIDAEVVKLLREAYDRVKALLKKHEKALHVLANALLEYETLSAEEIRRILLPYREARLPEQQEQEAAEGDLVLV

SEQ ID NO: 164128 - protein, 1658 aa, Glycine max
  Clone ID: PAT_MRT3847_119226C.1.pep
PSDMFYGKIIPALKEKGIKRVISRRDWPHEVKCKVLLDLMKEVPRHLLYQELWCASEGYKAFSSKMKRYSGSVAAMSMVGHVLGLGDRHLDNILIDFCNGDIVHIDYNVCFDKGQRLKIPEIVPFRLTQMIEAALGLTGIEGSFKSNCETVIGVLRKNKDILLMLLEVFVWDPLVEWTRGDFHDEAAIGGEERKGMELAVSLSLFASRVQEIRVPLQEHHDQLLTSLPAVESALESFADILNHYELASTLYCRADQERSGLILRETSAKSILAEATSNSEKIRASFEIQAREFAQAKAMVAEKAQEAMAWAEQHGRILDALRCNLIPEINVSFKLNNMEAALSLTSAVTVAGVPLTVVPEPTQAQCHDIDREVSQFVAELGDGLTSATTSLQAYSLALQRILPLNYLSTSAVHNWAQVLQLSINALSSEILSLARRQASELIAKFHVDSIDSIKCSHDDLCFRVEKYAVEIEKLEKECAEIESSIGSESESKTKDRCLSAFMKFMQSIGLLRKEDVMSSVQSRPLGELEEEREKALSILNIAVSSLYNDVKHRIQNIYNDMSGGRNQYNMLQNDSGTIFAEFEEQVEKCNLVTEFVNDLCQFIGKDTPSVDINKVRSKFSSESNWVSIFKAILISCKGLVSQMTEVVLPNVIRAAVSLNSEVMDAFGLISQVRGSIETALEQLVEVEMERASLIELEQNYFVKVGLITEQQLALEEAAVKGRDHLSWEEAEELASQEEACRAQLDQLHQTWNQRDVRTSSLIKREADIKNALVSVNCQFQSLVGSEEERELHILRSKALLAALFKPFLELESMDIMLSAADGSVALPSSKFHTLADLINSGNSISEYVWKVGDLLDNHSFFIWKIGVIDYFLDACIHDVASSVEQNLGFDQSLNFMKKRLEIQLQKHIGHYLKERIAPSLLTCLDKENEHLKQLTESSKELALDQVKKDGAAKKVLLMLEEYCNAHETARAAKSAASLMKKQVNELKEALRKTALEVVQMEWMHDVSLNPSYNRRIRFEKYLDTDDSLYTIILNLSRSKLMDNIQSAVSKITTSMDCLQSCERNSLIAEGQLERAMAWACGGPNSSSSGNTSTKNSGIPPEFHEHIKTRRQILWESREKASDIVKLCVSVLEFEASRDGFLLIPGQPYPFRSSVDGKTWQQVYLNALTRLDVTFHSYTRTEQEWKLAQCTVEAASNGLYTATNELCIASLKAKSASGDLQSTVLSMRDCAYEASVALSAFARVSRIHTALTSESGSMLEEVLAITEDIHDVYNLGKEAAAIHLSLMEGLSKANAILFPLESVLTKDVAAMADAIARESEIKKEISHIHGQAIYQSYCLRIREACHTFKPLAPSLTSAVKGLYSLLARLARTANVHAGNLHKALEGIGDSQEVKSEDIALSRSDGGGGDAVEFDDKEGESLSRSEDDKTDDFIGFSRLSLEDKGWVSPPDSIYCSSSGSDISLAEVSLPDSLNDSAGNKDLLSQGSGSRIPTGYMHTTLLSQTDVEQISPFELSESSPVETDLNRAGSVKSINEATEHAEAISLSGDKSVAIPGNSQIPSNENLDKFDGEDELLSAKEVKNAAEHHEAPDPYINANTRVGRGKNAYALSVLRRVEVKIDGRDISENREIGTAEQVDYLLKQATSVDNLCNMYEGWTPWI

SEQ ID NO: 164129 - protein, 464 aa, Glycine max
  Clone ID: PAT_MRT3847_119227C.1.pep
MPSELAMNNDELHVVMFPFLAFGHISPFVQLSNKLFSHGVHVTFLSAASNIPRIRSTLNLNPAINVISLKFPNGITNTAELPPHLAGNLIHALDLTQDQVKSLLLELKPHYVFFDFAQHWLPKLASEVGIKSVHFSVYSAISDAYITVPSRFADVEGRNITFEDLKKPPPGYPQNSNISLKAFEAMDFMFLFTRFGEKNLTGYERVLQSLGECSFIVFKTCKEIEGPYLDYIETQFRKPVLLSGPLVPEPSTDVLEEKWSKWLDGFPAKSVILCSFGSETFLSDYQIKELASGLELTGLPFILVLNFPSNLSAKAELERALPKGYLERVKNRGVVHSGWFQQQLVLKHSSVGCYVCHGGFSSVIEAMVNECQLVLLPFKGDQFFNSKLIANDLKAGVEVNRSDEDGFFHKEDILEALKTVMLEDNKEQGKQIRENHMQWSKFLSNKEIQNKFITDLVAQLKSMA

SEQ ID NO: 164130 - protein, 93 aa, Glycine max
  unsure (1)..(93): unsure at all Xaa locations
  Clone ID: PAT_MRT3847_119228C.1.pep
TCPYFVCVTVSDLPAVHTIDMDALYNVQRXHPYTVSFTADHPTFTALFKMPPMEDDPTYGPIICSIALMKLATALERQANAMINVGSEQLTLM

SEQ ID NO: 164131 - protein, 48 aa, Glycine max
  Clone ID: PAT_MRT3847_119229C.1.pep
LKSGGGVSVQPRNIKAVGVCLSHRRSLYALWLCSECECQSKSISGRYY

SEQ ID NO: 164132 - protein, 59 aa, Glycine max
  unsure (1)..(59): unsure at all Xaa locations
  Clone ID: PAT_MRT3847_11922C.1.pep
HARVRKLGIRLEGXPXPVGPXGXRXSXXIXXPAGPPGPXXXPGPPXVSGGGYDFXFEGX

SEQ ID NO: 164133 - protein, 101 aa, Glycine max
  unsure (1)..(101): unsure at all Xaa locations
  Clone ID: PAT_MRT3847_119230C.1.pep
GKSKKGPELAVMKKNVTARARESYEEEGVNPKKKNLMKDKEQRNVPNHTTALMVQXHTEVGPPHPDLEDTKYMDWEIQNKVYLEKGMMDCLYTKSSRCIKE

SEQ ID NO: 164134 - protein, 73 aa, Glycine max
  Clone ID: PAT_MRT3847_119231C.1.pep
RVYDKQLCTSSGGGLFVKKKQGWNTPILLNLKTQWVTYYGLDIGGHYTTNSGISKNERILFWAPLIYWFEAVP

SEQ ID NO: 164135 - protein, 187 aa, Glycine max
  unsure (1)..(187): unsure at all Xaa locations
  Clone ID: PAT_MRT3847_119232C.1.pep
ERSGGGSLAPCKXASERIQPARDKGLILNREDDPLDEQYPPPLTDTTNQLASEALKTLCLAYAXPENGFSXNDPIPVIRYTSIGSVWIKEPVPTGDXEFLPMCRAPGLSNKKDTGDDINTAKALTMECGSLTGDCLNIXXAKFTYKILKXLVELIPKINGMGQSSTFYXRTLVEHLQTTFWEVVAAT

SEQ ID NO: 164136 - protein, 65 aa, Glycine max
  Clone ID: PAT_MRT3847_119233C.1.pep
HKYDRRGTLRILPFWALIRVVLGADLSLRRAALHYALRTSCVFCVPLLLLAISTYSTSVSATTEH

SEQ ID NO: 164137 - protein, 57 aa, Glycine max
  unsure (1)..(57): unsure at all Xaa locations
  Clone ID: PAT_MRT3847_119234C.1.pep
SISQADTGRRRSTXPPHNWVGALITRNNNMAARQSFEGNETNRSRKKLGDALNQTFF

SEQ ID NO: 164138 - protein, 53 aa, Glycine max
  Clone ID: PAT_MRT3847_119235C.1.pep
QILVKTLTGKTMTLEVESSDTNDSVSAKIDYKEGMPPNQQDRMCAGKQQRDGQ

SEQ ID NO: 164139 - protein, 119 aa, Glycine max
  Clone ID: PAT_MRT3847_119236C.1.pep
TQFGGGIHSELNKKVYKLGKAGDESHSALTEFDRTEKDITPIGGFPHYGVVKDDYIMVKGCCVGPKKRVITLRQSLLKQTSRVALEEIKLKFIDTSSKFGHGRFQTTQEKQKFFGRLKA

SEQ ID NO: 164140 - protein, 43 aa, Glycine max
  Clone ID: PAT_MRT3847_119237C.1.pep
LSQKIRVGGGSNPQGDPTNKLPCPLGVYSPVDWHTCKTPPRVR

SEQ ID NO: 164141 - protein, 605 aa, Glycine max
  unsure (1)..(605): unsure at all Xaa locations
  Clone ID: PAT_MRT3847_119238C.1.pep
MAGGLLGDNLGLKEDVIKRVCGLASKAHNHKSTDKLYFYDKVRTSSGTYHVFSFSGSWDPAEWFFSKPFGGSKIDPTQFPSLRSIGNDEPALVNEGFAKRFDRVLKTNFKDVVKKAILDGKQVVFTGHSSGAAMATLTTFWVLEEYINPTKIQKPMLPFCVTFGSPLIGNHIFSHASRRENWSRYFIHFVLRYDIVPRILLAPLASLXKNSDAVLQLLKFHTAQIERFGEFQKFETRQXAYCNTRPEADWMIMXAECCVLGATRDTFLKDPNFIRWKXYSTSGTQGHFFLASLVTAVKGYSVLVFFPLNEEAISXSDDAFDVYLSCRCSVGYFSVVTLYLYSXMFLIPKFCCLLMVQIAMLQQPWMALVLSTRARLCLRAAGELEKQKRKNEDKIMKEIQDKALTSMKELQNYKTTCEMHKGKGYYDAFKVQKESNDFQANVKRLVLAGVWDEVIEMLKRYELPDEFEGDKEWIKRGTEYRRLVEPLDIANYYRHLKNEDTGPYMIRARPKRYRYTQRWLEHAKRMPPAPITESTFWAEVEELYSWINSKKPLDDHVEQRVKQLQKDLKNWTDDEKVLAKDTFLKDPNFIRWKDILPQELKDTSS

SEQ ID NO: 164142 - protein, 388 aa, Glycine max
  unsure (1)..(388): unsure at all Xaa locations
  Clone ID: PAT_MRT3847_119239C.1.pep
MAGGSLGDNIGLKEDAIKRVCGLACKANNHKSTDKLYFYDKVQISSETYHVFSFPGSWDPAEWFVNKPFGVSKINSTQFPSLRSIGNDELAWVNEGFAKRFDRLLETNFEDVVKKAILDGKQVVVTGHSSGASMATQTTFWVLEKYFNPTKIQKPKLPFCVTFGSPLIGNHIFSHASRRENWSRYWLQFVLRYDIVPRILLAPLASIEENFGSVLQFLNPKSKTSTQDPTRAILISEVYKTVMRNAASVTSHAACILMGSTNLLLETVANFVELSPYRPFGTYVFCNGNGQLIVVENSDAVLQLLFHTALLSDLAELEEVADKSISQHLNYVAELQESLGMQNVVYLEQLEQLPLSADGSNSDVATALDGPLTDHRAXLCLRAAGELE

SEQ ID NO: 164143 - protein, 52 aa, Glycine max
  Clone ID: PAT_MRT3847_11923C.1.pep
NKKNYKKKKKKKGQKKKKKGGLHKKWVGRFNGSMLTNKIFYRGAHFYRVTPW

SEQ ID NO: 164144 - protein, 66 aa, Glycine max
  Clone ID: PAT_MRT3847_119240C.1.pep
LMSSIYKCRPSLMDHLIFSRSISSKKTFYLKVVMGAFLWNSIGILSAGLISQSNKNQHRDHSYNQH

SEQ ID NO: 164145 - protein, 83 aa, Glycine max
  Clone ID: PAT_MRT3847_119241C.1.pep
ELFILLLENIVFGLQEHFSLLLLKTPHLLKHSLHLKQFFFRKITAFWSLLVSLTELVPYQMRLRCCPRSLMGFSPAAPSPLWL

SEQ ID NO: 164146 - protein, 127 aa, Glycine max
  unsure (1)..(127): unsure at all Xaa locations
  Clone ID: PAT_MRT3847_119242C.1.pep
KGPQNLFFSPPQGSQSTKKKSPGPQKKNPLGPSQKFASPSSKEAPYGRAIPPKKAYGWGNPPLKPGFSFKPPPPPLFKTPKRPPLSKFHFKKKKSPLHQGPNXVKKTKIPPPFPLFWGGPHPPPGGV

SEQ ID NO: 164147 - protein, 42 aa, Glycine max
  Clone ID: PAT_MRT3847_119243C.1.pep
ARAKMHSSPIKRLIISQDLRGGTDTDQPPPTSPTCPPNYVDT

SEQ ID NO: 164148 - protein, 88 aa, Glycine max
  Clone ID: PAT_MRT3847_119244C.1.pep
PPVYLSLALSVRSHSVPTKRRNPRPRRFSLLSHFAPRSVCVNVQRRVAMTTGKSDLVSIRVPYKNLHDDSSAPELELVDVHHRGNHRN

SEQ ID NO: 164149 - protein, 85 aa, Glycine max
  unsure (1)..(85): unsure at all Xaa locations
  Clone ID: PAT_MRT3847_119245C.1.pep
LLGSXFCCPSXLVGVGCPAVWRGGLXALXFALRLRGSWCYADVFVVSTAHSCGRLSYEAVALACLVLYINISRVIVKFIVKDFPT

SEQ ID NO: 164150 - protein, 118 aa, Glycine max
  Clone ID: PAT_MRT3847_119246C.1.pep
TNELFIELKEKATIRDNPQKMVDSMGGYSKAETLGIKMQMQQKYDDELKRITNMVESKLKEESATLLKSLEEKKVARLKAEENYRSIQITSNNEIQKLKWDLEVANKRPPPRGGCVIM

SEQ ID NO: 164151 - protein, 92 aa, Glycine max
  Clone ID: PAT_MRT3847_119247C.1.pep
SGKLETISFKVGTHHPAIPPDIVRRQQHSRQPLLWHAADLPTHRLSLSHNDSRTAGLDRVPPRQQPERRNPLSLTRTLLWPDAWVDPGVSDR

SEQ ID NO: 164152 - protein, 664 aa, Glycine max
  unsure (1)..(664): unsure at all Xaa locations
  Clone ID: PAT_MRT3847_119248C.1.pep
NSRKKEENESXINIWERGAKIVGVLHGDEAAIILQTTRGNLECICPRKLVLVSIINALVQKRFKDALLMVRRHRINFNVIVDYCGWQAFSQLASEFVRQVNNLGYITEFVCSIKNENIIEKLYKNHISVPCPKVADVMLVGGIQNSLAGNKVSSVLMDGRKALEDHITESPARELCILTTLAQSDPPLLEDALKRIKVIREKELSHADDQGRMSYPSAEEALKHLLWLADSDAVYEAALGLYDLNLAAIVALNAQKDPKEFLPFLQELERMPTLLMQYNIDLRLKRFEKALRHIASAGDSYYDDCMTLVKKNPLLFPLALQLFTGPTKQKPFLEAWGDYLSDEKCFEDAAAIYMSCFNLDKALKSYRAINNWSGVLTVAGFLNLGKDELLHLASELCEELQALGKPGEAAKIALEYCGDVNTGVNLLITARDWEEALRVVFMHRREDLIKTVKSASLECASTLTSEYEEGLEKVGKYLARYLAVRQRRLLLAAKLQSEERAASDLDDDAASETSSNFSGMSAYTTGTKKSSAASMSSTATSKARETRRLKKRGKIRPGSPDEEIALVEHLKGMSLTVEAKRELKSLLVSLMMFGEGETCKKLQQTGENFQLSQMAAVKLAEDTISNDTINEYAHTLEQYTQKVRNEIHNSEAFSWRLKVFLSYE

SEQ ID NO: 164153 - protein, 107 aa, Glycine max
  Clone ID: PAT_MRT3847_119249C.1.pep
PGGEHGHDPVLSPVIFRPSETVNQFSVMAPASRPRLYHSSAVLLRDGRVLVGGSNPHVFYNFTGVEYPTDLSLEAFSPPYLAPDFAPVRPVIRYITNNNVLGYRVFW

SEQ ID NO: 164154 - protein, 213 aa, Glycine max
  Clone ID: PAT_MRT3847_11924C.1.pep
MDQETTRRNTMQECHVIAPTTTTATSSYRGVRQRKWGKWVSEIREPGKKSRIWLGSYESPEMAAAAYDVAALHLRGRAARLNFPELVETLPRPTSSKPEDVQVAAQQAAVMFRISPTMSPINNHQGCVNDNNIIKGSVVPVRVGLSPTQIQAINESPLDSPKMWMVQMAEALRFGFDDHSMMMLPSDDDDYALELSGWEEIQHESLWDSPEYM

SEQ ID NO: 164155 - protein, 69 aa, Glycine max
  Clone ID: PAT_MRT3847_119250C.1.pep
PTPLWSSPPLIPIKKLRWWGITKFVKGGFFNKEKLFRPKTVTSCPGFEIGKKEEPLGGGIPGLFFGREP

SEQ ID NO: 164156 - protein, 205 aa, Glycine max
  unsure (1)..(205): unsure at all Xaa locations
  Clone ID: PAT_MRT3847_119251C.1.pep
MFPKTIHPMAVVEEIQGLIRVHKHGYVERPQVVPCVTASTXMSPELNVTSRDMAIDSATNTWARFYVPISQHKKMPFLVYFHGGGFCVGSAAWSCYHDFLARLSAKVECVIMSVNYRLAPENPLPAPYDDGLKAIMWVKQQMLHQQHNKGGSEWWTSKCNFSSVFLGGDSAGANIAYNVATRLCACDGAALRPLXLKGLILIQPF

SEQ ID NO: 164157 - protein, 213 aa, Glycine max
  Clone ID: PAT_MRT3847_119252C.1.pep
KSYIEPLSWNTRFKIAIGAARGLAFLHASEKQIIYRDFKASNILLDVNFNAKISDFGLAKLGPSGGQSHVTTRVMGTYGYAAPEYIATGHLYVKSDVYGFGVVLLEILTGMRALDTKRPTGQQNLVEWTKPLLSSKKKLKTIMDAKIVGQYSPKAAFQAAQLTLKCLEHDPKQRPSMKEVLEGLEAIEAIHEKSKESKTCNSYQPPRQRVVRV

SEQ ID NO: 164158 - protein, 352 aa, Glycine max
  Clone ID: PAT_MRT3847_119253C.1.pep
GCEGTDRTIVRIFEWPSIAGFSFDELISASRRFRYDIQGLVIGKGCFGPVYKGWLVENTLTPAKAGYGMAAPEWSVAIKKLNPESTQGFQEWQSEVNFLGRLSHPNLVKLLGYCWDDDELLLVYEFLPKGSLENHLFRRNPNIEPLSWNTRLKIAIGAARGLAFLHASEKQVIYRDFKASNILLDLNFNAKISDFGLAKLGPSGGQSHVTTRVMGTYGYAAPEYIATGHLYVKSDVYGFGVVLLEILTGMRALDTKRPTGQQNLVEWTKPLLSSKKKLKTIMDAKIVGQYSPKAAFQAAQLTVKCLEHDPKQRPSMKEVLEGLEAIEAIHEKSKESKTRNSYQSPRQRVVRV

SEQ ID NO: 164159 - protein, 688 aa, Glycine max
  unsure (1)..(688): unsure at all Xaa locations
  Clone ID: PAT_MRT3847_119254C.1.pep
MALIPSMMLFSFLSFLVILKSEANNDQLQFVYHYCNNEYGNITTETYSDNRNNLLSNMYYDKENDYGFYNSSYGQDPDKVYAIGFCRGDANLDKCRSCLEKSAVLLRERCPVQKEGIGWFDECMLRYTNHSIFGVMVTQPNNIMCNTKNAPKDPRSAAGFDQVVHNLLNELRNRTTTVADPESDSSRSRKFFAEGDAPVQSSNVTIHALIQCTPDISSQNCTRCLEHAMTNILYCDGKRGGRYLGPSCSVRYEXSIPFFEPIVHHAPPPQPATQVTTTTGKEKSNPSRTIIAIVVPVVAVVVLLVAFTYNYLGARRRRQKPFQSEGGEGELDNDIKIDELLQFDFATIKFATNNFSDANKLGQGGFGIVYKGTLSDGQEIAIKRLSINSNQGETEFKNEILLTGKLQHRNLVRLLGFCFSRRERLLIYEFVPNKSLDYFIFDPNNRVNLNWERRYNIIRGIARGLLYLHEDSRLQVVHRDLKTSNILLDEELNPKISDFGMARLFEINQTQASTNTIVGTFGYMAPEYIKYGQFSVKSDVFSFGVMILEIVCGQRNSEIRGSEENAQDLLSFAWKNWRGGTVSNIVDDTLKDYSWNEIRRCIHIGLLCVQEDIADRPTMNTVLLMLNSDSFPLAKPSEPAFLMRDKSSLPTAMLSGGQHSEVTRSGYSGSQSAQESSIMAPITEPYPR

SEQ ID NO: 164160 - protein, 121 aa, Glycine max
  Clone ID: PAT_MRT3847_119255C.1.pep
AIFLQAWKNWRGGTVSNIVDDTLKDYSWNEIRRCIHIGLLCVQEDIADRPTMNTVLLMLNSDSFPLAKPSEPAFLMRDKSSLPTAMLSGGQHSEVTRSGYSGSQSAQESSIMAPITEPYPR

SEQ ID NO: 164161 - protein, 106 aa, Glycine max
  unsure (1)..(106): unsure at all Xaa locations
  Clone ID: PAT_MRT3847_119256C.1.pep
MESGGEIKVGTGGTKGRSPFQSPVSTSVKSGLEFLVVRSGRECKNRMYAQLLRNSALVYLTADLEXAIYXVRELDVNAARDSIXTRIILGHLLMAMRNENDLRKLH

SEQ ID NO: 164162 - protein, 272 aa, Glycine max
  Clone ID: PAT_MRT3847_119257C.1.pep
MRSGKKSIHAITTWVRRQPPKVKAFLAVVSGMAALVLLRFIVHDHDNLFVAAEAVHSLGISVLIYKLIKEKTCAGLSLKSQELTAIFLAVRLYCSFVMEYDIHTLLDLATFATTLWVIYMIRFKLKSSYMEEKDNFAIYYVVIPCAVLALFIHPSTSHHLLNRISWAFCVYLEAVSVLPQLRVMQNTQIVEPFTAHYVFALGVARFLSCAHWVLQVLDSRGHLLVALGYGLWPSMVLISEIVQTFILADFCYYYVKSVFGGQLVLRLPSGVV

SEQ ID NO: 164163 - protein, 260 aa, Glycine max
  Clone ID: PAT_MRT3847_119258C.1.pep
METMNVQVMRSLSDMVIKKGPWTEEEDSVLINYVNVHGEGHWNSLARSSGLKRTGKSCRLRWFNYLRPNVRRGNITLQEQLLILELHSHWGNRWAKIAEQLPGRTDNEIKNYWRTRVVKQAKQLKCHVNSKQFRDALRFVWMPRLMEQIQASSSSYGLDQTTLCNTQTHRDNSMVSSYSSEVDLQPPSLSDTSITSSSYNLIGDGGLSTESAEKGSIYSLWQHWDYSDIQAFEPCNGFGDADLWTDENMWFLQQHLADEL

SEQ ID NO: 164164 - protein, 96 aa, Glycine max
  Clone ID: PAT_MRT3847_119259C.1.pep
GKLTSDFIGTNFTIYDNQPTHNGAKPSSGMVSRLFANKQISPQVPACNNDVGHVSYKVNLLNSIGPSRMGCSFKCPVTPVSPTSVSSDSKPVNGHM

SEQ ID NO: 164165 - protein, 80 aa, Glycine max
  unsure (1)..(80): unsure at all Xaa locations
  Clone ID: PAT_MRT3847_11925C.1.pep
INSIMAFIIFKSCIHSIFRDSCKNRYLMLVVLSQFKVHTTHQVTTIGYLHYFPIIQANIFTHAPNFHAIXLLHKALIQGI

SEQ ID NO: 164166 - protein, 356 aa, Glycine max
  Clone ID: PAT_MRT3847_119260C.1.pep
MALTVHLIILMHVCTLVVVRSDPLPKPNFSSILVFGDSSADSGNNNYIMGSLAKANHLPYGKDFPGHVPTGRFSNGKLVIDFLASILNIKDGVPPYLNPNLPNKELLTGVCFASGGSGFDDCTAASANAISMTKQIEYFKAYVAKLNRITGENETKQILGDALVIIGAGSNDFLLKFYDRPHARVMFNINMYQDYLLDRLQILIKDLYDYECRKFLVSGLPPIGCIPFQITLKFERDRKCVLQENFDAEQYNQKLVQRLLQIQAMLPGSRLVYLDLYYSILNLINHPENYGLEVTNRGCCGLGALEVTALCNKLTPVCNDASKYVFWDSFHLSEVSNQYLAKCVEINVLPQFCNSS

SEQ ID NO: 164167 - protein, 178 aa, Glycine max
  Clone ID: PAT_MRT3847_119261C.1.pep
MATVEVVSAKVALPEDTKEASLKVDEEKNTEEVVETPTPETVVTEQTKEESTEAPRPAASEDKPSVEVQTKEVAEEVVSETITQEPTVEKQEAAEGTKENADPAEIKTPEAAEDVNIKEEKEAEAEAEAKEEEAPAEKSEEKVETEGSAEKKEEEVIEEAEAEKKEEVTVTDTEAPTE

SEQ ID NO: 164168 - protein, 130 aa, Glycine max
  unsure (1)..(130): unsure at all Xaa locations
  Clone ID: PAT_MRT3847_119262C.1.pep
VFRGMMGKRADSQGPCGRVHRVSLGIRGGAVAHNAXVTNLPYARFIVXRNEDGKESFEVCKMTSIYNKCADDKVIVIGKTTEGTLYVEVVCHKLLHEGATXQRVERTWSQDELTALWNTQVRLARTVHVD

SEQ ID NO: 164169 - protein, 441 aa, Glycine max
  Clone ID: PAT_MRT3847_119263C.1.pep
MANTGNLDAAIEQLLNVEKQMRLAGDVAGTRKAATDILQLCFDARAWKTLNDQIVVLSKRRGQLKQAVTAMVQQAMQYIDETPDIETRIELIKTLNSVSAGKIYVEIERARLIKKLAKIKEEQGLIAEAADLMQEIAVETFGAMAKTEKIAFILEQVRLCLDRQDYVRAQILSRKISPRVFDADLSKEKKKPKEGDNVVEEAPADIPSLLELKQIYYELMIRYYSHNNDYLEICRCYKAIYEIPSVKEDPAKWIPILRKICWYLVLAPYDPMQSSFLNSTLADKNLSEIPNFKLLLKQLVTMEVIQWTTLWDTYKSDFENEKASGKSLGEKAAEDLRQRIIEHNILVVSKYYARITLKRLAELLCLSVQDAEKHLSDMVVSKALVAKIDRPLGIVCFQTAKDSNDILNSWAANLEKLLDLVEKSCHQIHKETMVHKAALKV

SEQ ID NO: 164170 - protein, 189 aa, Glycine max
  unsure (1)..(189): unsure at all Xaa locations
  Clone ID: PAT_MRT3847_119264C.1.pep
GLASWTXXXSVPFPCXTVKGTFGXXAPEYFEHGKVSDKTDXXXXGVVLLELLTXXNPIEXXXPPGEENLVVWAKPLLRKGKGAIEELLDPQVKYNSSYTDQMVRMIDAASVCVTSEESRRPSIGEIVAILKGEVEHVLSRRRKSGYFGNGYMIDNYPKLQETNNEMKSHLALAMLGVPECEDDDFVYCR

SEQ ID NO: 164171 - protein, 441 aa, Glycine max
  Clone ID: PAT_MRT3847_119265C.1.pep
MANTGNLDAAIEQLLNVEKQMRLAGDVAGTRKAATDILQLCFDARAWKTLNDQIVVLSKRRGQLKQAVTAMVQQAMQYIDETPDIETRIELIKTLNSVSAGKIYVEIERARLIKKLAKIKEEQGLIAEAADLMQEIAVETFGAMAKTEKIAFILEQVRLCLDRQDYVRAQILSRKISPRVFDADLSKEKKKPKEGDNVVEEAPADIPSLLELKQIYYELMIRYYSHNNDYLEICRCYKAIYEIPSVKEDPAKWIPILRKICWYLVLAPYDPMQSSLLNSTLEDKNISEIPNFKLLLKQLVTMEVIQWTTLWDTYKSDFENEKASGKSLGEKAAEDLRQRIIEHNILVVSKYYARITLKRLAELLCLSIQDAEKHLSDMVVSKALVAKIDRPMGIVCFQTAKDSNEILNSWAANLEKLLDLVEKSCHQIHKETMVHKAALKV

SEQ ID NO: 164172 - protein, 162 aa, Glycine max
  Clone ID: PAT_MRT3847_119266C.1.pep
GRPHSDDPKPAPGPPVPPKKVFLKSADMIPPIQKGAVDIPVPAFEKSNVEKTVSDQIKKEFDKRHGPPGHCIVGRNFGSYVTHEPTPFVYFSLDQKPVFLFKSGYPYCGTKKVEIYGNCLGIMLLYPVPPVLIPLPPKIFASPSWDLAPGYWMICKLVFGWI

SEQ ID NO: 164173 - protein, 120 aa, Glycine max
  Clone ID: PAT_MRT3847_119267C.1.pep
MVDDPMLRSSLPAPRVAQAAMFSLIPEDWGEHVSPWVKEISQYFDCLKSLHFRRMIVKDSDLQNLARDRGHVLHALKLDKCFSFTTDGLFHIGRFCNDKLGLSLELDSFATGVMISTTDL

SEQ ID NO: 164174 - protein, 145 aa, Glycine max
  unsure (1)..(145): unsure at all Xaa locations
  Clone ID: PAT_MRT3847_119268C.1.pep
WSFPHRSLLQTNELYQLASVAFCLLVAWXDKLGLSLELDSFATGVMISTTDLGQHTLEQVEPIRNFFAALFLASIGMLIHVHFLWNHVDILLAVVILVIIIKTIVTISVVKGFGYNNKTSLLVGMSLAQIKEFAFVLLIVLQYSF

SEQ ID NO: 164175 - protein, 154 aa, Glycine max
  unsure (1)..(154): unsure at all Xaa locations
  Clone ID: PAT_MRT3847_119269C.1.pep
TCVPWLLKLMISXSSQTNELYQLASVAFCLLVAWCSDKLGLSLELGSFAAGVMISTTDLGQHTLEQVEPIRNFFAALFLASIGMLIHVHFLWNHVDILLAVVILVIIIKTIVATSVVKGFGYNNKTSLLVRFDNSYYNYICLLITSYISLTEEP

SEQ ID NO: 164176 - protein, 57 aa, Glycine max
  Clone ID: PAT_MRT3847_11926C.1.pep
SWSITRSSPPSTTRCPKEREQRPRLCGYLKNTSMRPYVNSPASRRVASNCRGTVPTC

SEQ ID NO: 164177 - protein, 59 aa, Glycine max
  unsure (1)..(59): unsure at all Xaa locations
  Clone ID: PAT_MRT3847_119270C.1.pep
QLKYVFSPNKMNNXHSNKTFIKKIQHFCKFTIQKMWLLKNNQTKAVSSHNDSAWSQRSI

SEQ ID NO: 164178 - protein, 70 aa, Glycine max
  unsure (1)..(70): unsure at all Xaa locations
  Clone ID: PAT_MRT3847_119271C.1.pep
VEXDXRGVHNLXKQLVXSGHXFGAKRLVATXDRQCXXLAIAMASNIPXVGVXVIXXXDGXXXXLRXXSGD

SEQ ID NO: 164179 - protein, 96 aa, Glycine max
  Clone ID: PAT_MRT3847_119272C.1.pep
KMGRKMVLIYWARIPGVKKVHFFCPPIFLGEVNYLGLVKESLFTKTRACKFRGSFFLYLQKVVLKNNGDLLKRLKSVGFSFERGSGFKFDFAPGDL

SEQ ID NO: 164180 - protein, 69 aa, Glycine max
  Clone ID: PAT_MRT3847_119273C.1.pep
SLLLKKSFLILFSFLQSFILFIYGAPTVYINNQPFSRIRDQLTQPIFEGVYYANGRYVFFKYTDKPAQV

SEQ ID NO: 164181 - protein, 69 aa, Glycine max
  unsure (1)..(69): unsure at all Xaa locations
  Clone ID: PAT_MRT3847_119274C.1.pep
LLAPSLXTKDGVMGSELLVLCGQHHWAVLGLMGNSMHHGSFLQSRNFISLYQWMSVIKSNSNAYSGGKA

SEQ ID NO: 164182 - protein, 140 aa, Glycine max
  unsure (1)..(140): unsure at all Xaa locations
  Clone ID: PAT_MRT3847_119275C.1.pep
THGSGVNGHPSVFTPDSGEGKKKGRCEQQFQPNTHFLFFYARISSFSLPRKKTPFQKHKEKGEAKKKRAEDWPARLYAEFVKSFQGDTTPGSKTFVXGGPINPNDKFKNDFEGEKFKNGVFGPKKGSRYVPFFIPPPMAP

SEQ ID NO: 164183 - protein, 92 aa, Glycine max
  unsure (1)..(92): unsure at all Xaa locations
  Clone ID: PAT_MRT3847_119276C.1.pep
MATLQSWRKAYGAIKDTTKVGLAHVNSDFAELDVAVVKATNHVERPPKDRHLRKILFATSVVRARADVAYCIHAIARRLAKTRXWTVALKTL

SEQ ID NO: 164184 - protein, 76 aa, Glycine max
  Clone ID: PAT_MRT3847_119277C.1.pep
TEGSRAGLRVIRAVPLVRRNRLKRTLILRNGRGRGRRNRSNRSRRLRSLWIKTSSSSSTRNSKASKRIEPTPYIIC

SEQ ID NO: 164185 - protein, 67 aa, Glycine max
  Clone ID: PAT_MRT3847_119278C.1.pep
LPRLSLPLRIRFSRHACFLLLVYEAWYLTNGSILIGNLGAVQVASLFTICFMKGSTVTFEDVKANFE

SEQ ID NO: 164186 - protein, 51 aa, Glycine max
  Clone ID: PAT_MRT3847_119279C.1.pep
SPVYTSSVAQYQCPSVPHSYVTTRLDHRPFTSTMSQSPAQYDRKDKCNFHG

SEQ ID NO: 164187 - protein, 37 aa, Glycine max
  Clone ID: PAT_MRT3847_11927C.1.pep
STLIYRVGSTNIVWRSLRKVILLIVNGLPFPYMFSTL

SEQ ID NO: 164188 - protein, 110 aa, Glycine max
  unsure (1)..(110): unsure at all Xaa locations
  Clone ID: PAT_MRT3847_119280C.1.pep
PSNPAERRGVSPPAFXLXVRAFXRMGIAAVGSNXITGGSSEXHFPXCKGANLVTNFXXTIFLLXLLGGIFPVLPXGVWAMRIVGFXXLGGVILLSVQAHGPQXRPPPCDI

SEQ ID NO: 164189 - protein, 231 aa, Glycine max
  unsure (1)..(231): unsure at all Xaa locations
  Clone ID: PAT_MRT3847_119281C.1.pep
KLRLPTFLTGLQGKSQIVQEELXKFGEQMVSSXEGTRALALQLCREFEDKFLQHLTGGEGNGWKVVASFEGNFPNRIKQLPIDRHFDINNVKRIVLEADGYQPYLISPEKGLRSLIKGVLELAKEPSRLCVDEVHRVLVDLVSASANATPGLGRMERQRREEELKNRSSKKTLDAEQSILNRATSPQTSQQSGGNLKSMKDKSSQQDRDTQEGSGLKTAGPEGEITAGIML

SEQ ID NO: 164190 - protein, 51 aa, Glycine max
  Clone ID: PAT_MRT3847_119282C.1.pep
SLREAKFIDWQVFIRKVEGAPKELANFVNSPSEPTNHCCRVKEFPILEILL

SEQ ID NO: 164191 - protein, 621 aa, Glycine max
  unsure (1)..(621): unsure at all Xaa locations
  Clone ID: PAT_MRT3847_119283C.1.pep
RNRMRLKLTTLLTGLQGKSQIVQEELVKFGEQMVSSSEGTRALALQLCREFEDKFLQHLTGGEGNGWKVVASFEGNFPNRIKQLPIDRHFDINNVKRIVLEADGYQPYLISPEKGLRSLIKGVLELAKEPSRLCVDEVHRVLVDLVSSSANATPGLGRYPPFKREIVAIASSALEAFKNESKKMVVALVDMERAFVPPQHFIRLVQRRMERQRREEELKNRPSKKALDAEQSILNRATSPQTSQQSGGNLKSMKDKSSQQDKDTQEGSGLKTAGPEGEITAGYLLKNRRGPSRGCCRFXSAVLLKAESVAPKVEXERHVRGGCTGEGWSSHEISDDDEASTKSSKDKKSNGPDSGKASNLIFKITSKVPYKTVMKAQSAVLLKAESMADKVEWINKLRSVAQAKGGQAIGEPSFPMRQSLSDGSLDTMARKPADPEEELRWMSQEVRGYVEAVLNSLAANVPKAVVLCQVEKAKEDMLNQLYSSISAQSSAKIEELLQEDHDVKNKRERVQKQSSLLSKLTRQLGVHDNRASAASNWSEKGSAAESSPGSSGPSSVDDWRSAFDSAANGPSDLPSRYGSGGHSRRYSDPSQNGDVSSGSNSNSRRTPTRLPPAPPHSGSRY

SEQ ID NO: 164192 - protein, 171 aa, Glycine max
  unsure (1)..(171): unsure at all Xaa locations
  Clone ID: PAT_MRT3847_119284C.1.pep
MRQSLSDGSLDTMARKPADPEEELRWMSQEVRGYVEAVLNSLAANVPKAVVLCQVEKAKEDMLNQLYNRLGRCASLDYFSAQSSAKIEELLQEDHDVKNKRERVQKQSSLLSKLTXRQLGVHDNRASAASNWSEKGXAESSPGSSGPSSVDDWXRSAFDSAANGPSDLPSR

SEQ ID NO: 164193 - protein, 248 aa, Glycine max
  unsure (1)..(248): unsure at all Xaa locations
  Clone ID: PAT_MRT3847_119285C.1.pep
MVLLGLLMVGFLSLGSFVSASGYGWMDAHATFYGGGDASGTMGGACGYGNLYSQGYGTNTAALSTALFNNGLSCGACFEIKCVNDQRWCLPRSVIVTATNFCPPNNALPNNAGGWCNPPLHHFDLFQPIFQHISQYKAGKXPVCYRRVPYRNREGIXFTRDRDAYFFRILIFPVEGDCDVXAVSICLACEKGKDRTINWQGCLQSNAYLNGQSLSFKVTTSDGHTVVSNNVAPSSWSFGQTFNGHQFI

SEQ ID NO: 164194 - protein, 116 aa, Glycine max
  Clone ID: PAT_MRT3847_119286C.1.pep
MILSFLNFYYLITYRVPCRKREGIRFTINGHSYFNLVLISNVGGAGDVHAVSIKGSRTNWQPMTRNWGQNWQSNAYLNGQSLSFKVTTSDGHTVVSNNVAPSSWSFGQTFNGHQFI

SEQ ID NO: 164195 - protein, 104 aa, Glycine max
  unsure (1)..(104): unsure at all Xaa locations
  Clone ID: PAT_MRT3847_119287C.1.pep
MYFRDSWRGPVESNATDCVTDDKRDQNLHDDDRAALCRTLCXTQQSWLLGPGEQNKKKYEHLGCMIASRKIFKGTLCTLLFVHFLAGLIVLIVNTVHCSSTYAS

SEQ ID NO: 164196 - protein, 135 aa, Glycine max
  Clone ID: PAT_MRT3847_119288C.1.pep
MGNCLRTSEKLTAEIVPHGGATVYPAVRLHGSPNSIFAAYTRFAVLHNAVPPDPVLAAAPPPQAPTAFCGGRSEAAVPVVFHVGHDVASGSRDALLRFIDLKFPDLAEEETAPPSPAEKGRGKEETLLDCEGDTA

SEQ ID NO: 164197 - protein, 164 aa, Glycine max
  unsure (1)..(164): unsure at all Xaa locations
  Clone ID: PAT_MRT3847_119289C.1.pep
EVEAEVMSIIKQCRRALKFTKFMSRFKKSYRSEEEIKKKYEIFSQNAQVIHSHNKNRLAYTLCINHFTNXNXKKFKTHRLDTSQNYSTTLNDNHKLTNTILAPTKDXRKEEIGSNSKHQSRCGSYXTCXRTRTVEAAYTQAWRKSISGGEQQVQNYAGELNNFS

SEQ ID NO: 164198 - protein, 155 aa, Glycine max
  unsure (1)..(155): unsure at all Xaa locations
  Clone ID: PAT_MRT3847_11928C.1.pep
MVNAIVTLGRGSLVFYHWAYRNNTLVFVISHDLIELICSLAILRLLIIPMXVLLHVDPLXGKIYLEKATAIVPWMPHPKDXLESTDRVGHPAHERRLTLKVILSLNVFYAIVRLHLGITNTYTGLCSYSDYIYVESYKYIALFARTTETVQQNTI

SEQ ID NO: 164199 - protein, 130 aa, Glycine max
  Clone ID: PAT_MRT3847_119290C.1.pep
KRLRRFLFMMDSMTDAELDGVVSLSESRQMRVARGSGCQLYEVEFLLKCHKQFATVVSRMGKSGLMKTGDVALGKQMARNPNAVMQQLSKVMDPKMLAQMGGPQNMMRMMKQMKGMDMNLQGETAQDMPF

SEQ ID NO: 164200 - protein, 81 aa, Glycine max
  unsure (1)..(81): unsure at all Xaa locations
  Clone ID: PAT_MRT3847_119291C.1.pep
EGVERSKSKGXXGXDVVSEAXLTVKGFXGXXXTKLXCTXGPACNSMEDLXXXALGGMXVARLNMCHGTREWHRDVIRNIKI

SEQ ID NO: 164201 - protein, 171 aa, Glycine max
  Clone ID: PAT_MRT3847_119292C.1.pep
MALNFSHRPIFSEDNLVSPMRMGIPEKSVVDNCFDYGRERGGGGANHDDILDLLPSDPFGMDISTTVTAITGWLEDLEIVDYGGYRRDELGASDGNYQLFAGLNFIWNNAMRFHASCVEEKRGFGESCSVRNDGAAAASNNFGFGSVNNYDEVSGLPATSGSGDVVRRGGG

SEQ ID NO: 164202 - protein, 82 aa, Glycine max
  unsure (1)..(82): unsure at all Xaa locations
  Clone ID: PAT_MRT3847_119293C.1.pep
APIKQYIFQENFFPXXGXXNRGLFFFFSPNFPHFPPLKKRGSLKGXKXXXKKXXXXXXIPMLFWPPNNSYXNNDLVTMVCCP

SEQ ID NO: 164203 - protein, 71 aa, Glycine max
  Clone ID: PAT_MRT3847_119294C.1.pep
ESDTNMKRTTEGRRGGENICARPRQNGKNNLKDKPEDNLFYDKLRDIISASDRNLSNYLGHSFSNIISMVD

SEQ ID NO: 164204 - protein, 278 aa, Glycine max
  unsure (1)..(278): unsure at all Xaa locations
  Clone ID: PAT_MRT3847_119295C.1.pep
NGICQTQASSLTILFSLALAGXSHVHAWLPEEDYLGSWFAPNTPIPTALRELLKPLPAGVEIDELPKQIDDTQYPKTFFYKEDLHPGKTMKVQFTKRPYAQPYGVYTWLTDIKDTSKEGYSFEEICIKKEAFEGEEKFCAKSLGTVIGFAISKLGKNIQVLSSSFVNKQEQYTVEGVQNLGDKAVMCHGLNFRTAVFYCHKVRETTAFMVPLVAGDGTKTHALAVCHSDTCGMNHHMLHELMGDDPGTNPXCHFLGSKAILWVPNLSMDTAYQTNVVV

SEQ ID NO: 164205 - protein, 273 aa, Glycine max
  unsure (1)..(273): unsure at all Xaa locations
  Clone ID: PAT_MRT3847_119296C.1.pep
MALRCLVMSLSVLFTLGLARESHARDEDFWHXAVWPNTPIPSSLRDLLKPGPASVEIDDHPMQIEETQYPKTFFYKEDLHPGKTMKVQFSKPLFPQPWGVGTWLKEIKDTTKEGYSFEELCIKKEAIEGEEKFCAKSLGTVIGFAISKLGKNIQVLSSSFVNKQDQYTVEGVQNLGDKAVMCHRLNFRTAVFYCHEVRETTAFMVPLVAGDGTKTQALAICHSNTSGMNHQMLHQLMGVDPGTNPVCHFLGSKAILWVPNISVDTAYQTNIIT

SEQ ID NO: 164206 - protein, 61 aa, Glycine max
  Clone ID: PAT_MRT3847_119297C.1.pep
AVSYKCIILTCYLCLFFYLFWCNYYCMMDPFCMKDVFNVIPCCGNIIVCLNVNRFSHIWLP

SEQ ID NO: 164207 - protein, 263 aa, Glycine max
  unsure (1)..(263): unsure at all Xaa locations
  Clone ID: PAT_MRT3847_119298C.1.pep
NKKKKKKKNIKKNPNEEDYWEAVWPNTPIPTALRELLKPLPACVEIDELPKQIDDTQYPKTFFYKEDLHPGKTMKVQFTKRPYAQPYGVYTWLTDIKDTSKEGYSFEEICIKKEAFEGEEKFCAKSLGTVIGFAISKLGKNIQVLSSSFVNKQEQYTVEGVQNLGDKAVMCHGLNYRTAVFYCHKVRETTAFMVPLVAGDGTKTQALAVCHSDTSGMNHHMLHELMGVDPGTNPCLHFXLGARAILWVPNLSXDTAYQTNXXV

SEQ ID NO: 164208 - protein, 118 aa, Glycine max
  Clone ID: PAT_MRT3847_119299C.1.pep
HRLAISIELSKVLSLGCVSVCVIVFVLFVCVLCVGCSSSVRLLNFVCYSLCCFNVFVCSLCVICLMIVVCNHFILNAVNSFFNKLVAVIMLRVNIRVVVATTFTQILYVSIVVSVIVK

SEQ ID NO: 164209 - protein, 53 aa, Glycine max
  unsure (1)..(53): unsure at all Xaa locations
  Clone ID: PAT_MRT3847_11929C.1.pep
MQECYLAWRGAFVMYPWSLVKRVKRCWDRIKTWLTNNXPEAEATLCKGATEAD

SEQ ID NO: 164210 - protein, 69 aa, Glycine max
  Clone ID: PAT_MRT3847_1192C.1.pep
HYVGEHTPDHHGGYELIEGLLDETNDLIHSEDGAATGDGEKTDNNMENTQHEHGHYISTMQYSDHDILH

SEQ ID NO: 164211 - protein, 109 aa, Glycine max
  Clone ID: PAT_MRT3847_119300C.1.pep
DYLLILSDFCCAKKKKMIPLTKTLKILVLLEQRVVVQQAMVDQAEARETTRCRKFGELSHNKCSPRMTTKKSRMSQTTHGDALTFEMVSEDRFFQYCINIFFLVCLFLI

SEQ ID NO: 164212 - protein, 62 aa, Glycine max
  Clone ID: PAT_MRT3847_119301C.1.pep
PTKPTPPKTKSSNTLETGLEQTYTSLTTVLLITLYCPSFTFSPKYAPCDFITASITKENKDF

SEQ ID NO: 164213 - protein, 110 aa, Glycine max
  unsure (1)..(110): unsure at all Xaa locations
  Clone ID: PAT_MRT3847_119302C.1.pep
HEASSSSSCAXPTLPFPFHKDSKSGSNSVSIFLLSAKHGGVLKTGSMSVLATRRRTKGGGGGDGDGDDRNKKKTGFWSKLLHPKTKSKRMDEIKGTKLVHSRSLIETRHS

SEQ ID NO: 164214 - protein, 65 aa, Glycine max
  unsure (1)..(65): unsure at all Xaa locations
  Clone ID: PAT_MRT3847_119303C.1.pep
KCIDAIDSELDPLRVFAKGSVWAVKCCYYPXRKDVFKAAVWTAIGSVDMGIVGSSVEVIIIPYNN

SEQ ID NO: 164215 - protein, 390 aa, Glycine max
  Clone ID: PAT_MRT3847_119304C.1.pep
MQEATKVIIIGAGTSGIATAGCLTKQSIPYIMLEREDCFASLWQKYTYDRLHLHLRKQVCELPHLPFPKSYPHYVPRKQFIDYLGNYVNHFEIKPLYQRAVELVEYDGWKGIWRVKAQNRRSGELEEYAGKYLVVASGETAEPRLPQIQGLESFNGKVIHSTAYKNGNEFKNKHVLVVGSGNSGMEIALDLSNFGAKPSIIVRSPVHFLSRDMMYYASLMLNYLSLSTVEKVLVMVSKVVYGDLSEYGIPYPSEGPFTMKMKYAKFPIIDVGTVKKIKSREIQVLPAEIKSIRGNEVLFQDGKSYTFDSIVFCTGFKRSTQKWLKGGDDLLNEDGFPKNSFPNHWKGRNGLYCVGLSRRGFFGANMDAQLVANDIASLIPQEEREGICVM

SEQ ID NO: 164216 - protein, 223 aa, Glycine max
  unsure (1)..(223): unsure at all Xaa locations
  Clone ID: PAT_MRT3847_119305C.1.pep
ARFGSWSATDKRGCLETLGFREGYRVDVDVPDTXWAQALSFHNILIFNTXFWWWAPSKFAPVKSPMLFFNKGQPVIPPLRPDQGLDMVLKHMIPYMEEKARLGALKFFRTQSPRHFEGGDWDQGGSCQRDRPLSIEQVEELFSEKNNGTNVETRLVNKHLYKALKGSSFIILDITHLSEFRADAHPASAGGKKPDDCMHWCLPGITDTWNDLFIELLKSKYQG

SEQ ID NO: 164217 - protein, 45 aa, Glycine max
  Clone ID: PAT_MRT3847_119306C.1.pep
QYNRVFICFANLWLRQIIHCPVSLNKGFIDRVMLYISKVPLCVSR

SEQ ID NO: 164218 - protein, 62 aa, Glycine max
  Clone ID: PAT_MRT3847_119307C.1.pep
KPGTRLVAPFHPFIKKQKLPFFNPSGGRFTLTKNLNPIFQGFLPVFFWKKLKVYLDNLRKTN

SEQ ID NO: 164219 - protein, 99 aa, Glycine max
  Clone ID: PAT_MRT3847_119308C.1.pep
HSFVQVLKTTVSFTHRCGASEARVSCLLALRYHLLLKHPIWHLKAHNVTYLTISKVTSPSLRGMIWTSAPFTLAYANSISMDYQHRPYLYAKALRVCDT

SEQ ID NO: 164220 - protein, 130 aa, Glycine max
  unsure (1)..(130): unsure at all Xaa locations
  Clone ID: PAT_MRT3847_119309C.1.pep
QFVTGTSKVPLEGFSALQGISGAQRFQIHKAYGSSDHLPSAHTCFNQLDLPEYPSKQHLEERLLLAREXNEGFGFALVEKFFNLSSKCFLDGYCLPFMNQMRDSDLVDKFFFFSFFFLGGLGRKQTVLHF

SEQ ID NO: 164221 - protein, 89 aa, Glycine max
  unsure (1)..(89): unsure at all Xaa locations
  Clone ID: PAT_MRT3847_11930C.1.pep
FMLVCSLVSPPRLFFFCFRFVFCVCLWTAIFFPQELFFSFFPPFFYPPFFKDGWPAGRGPVFIGGSPRPSXKKKKKKKKKKKKKKKKKK

SEQ ID NO: 164222 - protein, 38 aa, Glycine max
  Clone ID: PAT_MRT3847_119310C.1.pep
LVLLRNYKRTNMRKLTLLMNFFTFSYYVYIKYLIYCNF

SEQ ID NO: 164223 - protein, 80 aa, Glycine max
  unsure (1)..(80): unsure at all Xaa locations
  Clone ID: PAT_MRT3847_119311C.1.pep
IFALSFSVLSVLTGITNSXTLYNTGLNYGGPVSMQYGWFMALAFTMLVALSMAEICSSXPTTGGLYYWSAKLAGPRWAPF

SEQ ID NO: 164224 - protein, 43 aa, Glycine max
  Clone ID: PAT_MRT3847_119312C.1.pep
RDDMRGEPGDYGLNNFMMPLTFMESSFKVISIYGANLLKEKCG

SEQ ID NO: 164225 - protein, 28 aa, Glycine max
  Clone ID: PAT_MRT3847_119313C.1.pep
ALSFPCRRYCHLTIVLYTILHIDHLLIA

SEQ ID NO: 164226 - protein, 58 aa, Glycine max
  Clone ID: PAT_MRT3847_119314C.1.pep
LMISCSPFFSLGYEIAIVLGTLIHCVHLGGTTRATHSERQKIEALRANYIIPIIELLT

SEQ ID NO: 164227 - protein, 532 aa, Glycine max
  Clone ID: PAT_MRT3847_119315C.1.pep
PDCDYSDADLVVEGIPVSVHRCILASRSKFFHELFKREKESSEKEGKLKYNMNDLLPYGKVGYEAFLIFLGYVYTGKLKPSPMEVSTCVDNVCAHDACRPAINFAVELMYASSIFQIPELVSLFQRRLLNFIGKALVEDVIPILTVAFHCQSNQLVNQCIDRVARSDLDQISIDQELPHELSQKVKLLRRKPQQDVENDASVVDALSLKRITRIHKALDSDDVELVKLLLNESDITLDEANALHYAAAYCDPKVVSEVLGLGLANVNLRNSRGYTVLHIAAMRKEPSIIVSLLTKGACASDLTFDGQSAVSICRRLTRPKDYHAKTEQGKETNKDRICIDVLEREMRRNPMAGDACMSSHTMADDLHMKLLYLENRVAFARLFFPSEAKLAMDIAHAETTSEFAGLSASNSKGSNGNLREVDLNETPIVQNKRLLSRMEALTKTVEMGRRYFPHCSEVLDKFMEDDLPDLFYLEKGTHEEQRIKRTRFMELKDDVHKAFNKDKAEFSRSGISSSSSSSSLRDSVVHYKARKV

SEQ ID NO: 164228 - protein, 113 aa, Glycine max
  unsure (1)..(113): unsure at all Xaa locations
  Clone ID: PAT_MRT3847_119316C.1.pep
GPKFPGRPSRQCLCAQTSLGYGCELTTKRYECDKPTPPFRVEDCARRGVLVVPSPLXRALASFFWLLRLSMRFGGLQNPWFIDSIWVLLVRTWDIPLVEKKKKKRLPKAANLE

SEQ ID NO: 164229 - protein, 102 aa, Glycine max
  Clone ID: PAT_MRT3847_119317C.1.pep
SKRLFSKMEALMKVVEMGRRYFPHCSEVLDKFMEDDLPDLFYLEKGTNEEQRIKRTRFMELKDDVHKAFNMDKAEFSRSGISSSSSSSSLRDSVVHYKARKV

SEQ ID NO: 164230 - protein, 99 aa, Glycine max
  unsure (1)..(99): unsure at all Xaa locations
  Clone ID: PAT_MRT3847_119318C.1.pep
TRRGSPKRTEKGTRRPGQGQPTTGRRPQTKPTPEETPQAAGDQXRRDREKTRPKNNPAEPPPRKQDTETGQHQPERAPNKGRXQRQPKHTTEGNHGRKQ

SEQ ID NO: 164231 - protein, 271 aa, Glycine max
  unsure (1)..(271): unsure at all Xaa locations
  Clone ID: PAT_MRT3847_119319C.1.pep
PGAIVAAVLGIIIDMPVISVVAIFKGPDMLFKGWKRLFHDLMGREGPFLETICVPFAGLAIVLWPLAVVGAVLASVLASFVLGGYRGLGKQDPSFMSRISLLYSSXRDTAATMYPRPRYRKITELKLSRTPSRSISLPKTKSLTKTLSHAYSLKDNIPEFKPFELLDGLFKECHQLGESLVSEGVITHEDIQEAKSGKGSRVIRIGLPAYCLLQVLLRSXKTHASSLIXSEDTELTTSNKPTXQFFEWFLNPLLFLKEQINIENHKKQGEV

SEQ ID NO: 164232 - protein, 45 aa, Glycine max
  Clone ID: PAT_MRT3847_11931C.1.pep
RRYCSRYKNYTWVMKQTGISWSFGRIQIKLSHFTSVESTFSPPPI

SEQ ID NO: 164233 - protein, 97 aa, Glycine max
  Clone ID: PAT_MRT3847_119320C.1.pep
FHLCTQALVHRMIGTQGPIFSWFCESPSFSYMKLPWDSGRVYTSASSLIGSYYGFSASSPFSMLASYTTQIIGSSSVQCAAPLRGFTKSSNMNFLTN

SEQ ID NO: 164234 - protein, 139 aa, Glycine max
  unsure (1)..(139): unsure at all Xaa locations
  Clone ID: PAT_MRT3847_119321C.1.pep
LRYLPGAIVAAVLGIIIDMPVISVVAIFKGPYMLFKGWKRLFHDLMGREGPFLETICVPFAGLAIVLWPLAVVGPVLASVXASSVLGGYAHFITYQESSFVFGLGXLVAAVSLYCHQLDDLLDIEGVITHAKSSEAKSG

SEQ ID NO: 164235 - protein, 65 aa, Glycine max
  Clone ID: PAT_MRT3847_119322C.1.pep
GTFPVGSHSSVMIHLLCGFAWFGLYSPFHLTSVAIVGSRRTPHFALYSTPEFVPLFCYPPNCKVM

SEQ ID NO: 164236 - protein, 45 aa, Glycine max
  Clone ID: PAT_MRT3847_119323C.1.pep
SREVLNNEHYPLRRDQRYRLSCKATPQRFLEYPELDLIHDKANNG

SEQ ID NO: 164237 - protein, 66 aa, Glycine max
  Clone ID: PAT_MRT3847_119324C.1.pep
TYPSIDDPIAKAPEANHCSSVKTKERQNPVLDALFRRTVDMAVTDHRLVPNLINSSIANHRNFSTS

SEQ ID NO: 164238 - protein, 96 aa, Glycine max
  Clone ID: PAT_MRT3847_119325C.1.pep
CSKTTRLMGVEYWTMQYLYSGCGLNLWRRISLYISINGPQTYRKLSLARWGWVVYLYNHVIAWVCVFTRTSYTLISIVVSLVPLVLFHFNIYLFLL

SEQ ID NO: 164239 - protein, 119 aa, Glycine max
  unsure (1)..(119): unsure at all Xaa locations
  Clone ID: PAT_MRT3847_119326C.1.pep
MTFDNHKVLCDMNTEEKIGAAGNNNDNGKVLFKANSYAGACXRCKMAADCIEYHSSSGVEXHKQPRPCKXACYLNNAACTSTFIDYKHSKTSCTIVFYLDRAKLYAIYQMALSYVEVTN

SEQ ID NO: 164240 - protein, 99 aa, Glycine max
  Clone ID: PAT_MRT3847_119327C.1.pep
QRTKLPSGARLIVILNIEPLMTYLNSMTIYQSYHTIRHLFWLLEPSITPDPGLETNLWGMEIHLRNKFLLIKKYFFHTHRFENRSTPDHIYPSSHPGRV

SEQ ID NO: 164241 - protein, 71 aa, Glycine max
  Clone ID: PAT_MRT3847_119328C.1.pep
LQAILTLDGMIASGAVMQAAIYQCLFATKYSTILLTSHGSIYPDEQSVIVCEQRLFPSSASCSPPLSAHPT

SEQ ID NO: 164242 - protein, 111 aa, Glycine max
  Clone ID: PAT_MRT3847_119329C.1.pep
GGPQLIALKHGARAKWNAWQKLGNMNPEVAMEQYVSLLSDKFPGWMKDTSAGIGEHETTRPEVSESAASDLSTTLSNQQQMITTERELEQESDSKDRSPLTVSDLENSVNK

SEQ ID NO: 164243 - protein, 58 aa, Glycine max
  Clone ID: PAT_MRT3847_11932C.1.pep
YNHFHRLHPMIHSELPSRKGGKLYKIDHHLYTDWMIQWLCALTIYQQWWTEPLDDSSP

SEQ ID NO: 164244 - protein, 75 aa, Glycine max
  Clone ID: PAT_MRT3847_119330C.1.pep
DIKTQYASTAKTHSRSIFHPSGKFIRKKADILLHCNLWIHVPQFLPSIPCTTEAVLVDHSYKAALNPVIITSNQA

SEQ ID NO: 164245 - protein, 175 aa, Glycine max
  unsure (1)..(175): unsure at all Xaa locations
  Clone ID: PAT_MRT3847_119331C.1.pep
MSVKKRAFSINIEEAAVDFFNHLLQEKPRIPVFVPLILIAWAIERWVFSASTWVPLALAVWTTIQYGRYQRKLLVEDLDKKWKRIILNVSPITPLEHCEWLNKLLTEVWSNYFNPKFSIRISAIVEKRLKLRKPRLLERVELQEFSLGSCPPSLALQGCXWSTIGDQRFLALGFD

SEQ ID NO: 164246 - protein, 94 aa, Glycine max
  unsure (1)..(94): unsure at all Xaa locations
  Clone ID: PAT_MRT3847_119332C.1.pep
RDIIWLNQIQSISPAKMKYDEVRVAIRSTNTGKDHPVSNRDKEMAKTTKEMLVTALITGPGQKGVSKRVNWIQGMNQATKKXKXKXXSGRSRGS

SEQ ID NO: 164247 - protein, 170 aa, Glycine max
  Clone ID: PAT_MRT3847_119333C.1.pep
ARVPKFLVDPTLHTLRIPAFLIKKDYKRLYDFFYESSGFALDEAARLGVPREEACHNLLFATCFNSFGGMKIFFPTILKWVGRAGVKLHARLAEEARAAVKSNGGKGTMASMEEMPSMKSVVYEAFRIERPAPMKDGRAKKELVIESHENAFVVKEGEMLFGFQPCATKD

SEQ ID NO: 164248 - protein, 106 aa, Glycine max
  Clone ID: PAT_MRT3847_119334C.1.pep
ISLLFDEINAGECSLARNISREMPSFVNLKSFHAKLTNVYAIYSRISISELILTMTEIGRVDGNMAWKILEQHQAFSSLKESVYKFHMIKLWWVTSYKRREDTKII

SEQ ID NO: 164249 - protein, 52 aa, Glycine max
  Clone ID: PAT_MRT3847_119335C.1.pep
LSSSDTLSIMAKAYPITTIPGGLLHPPPLPSSIHFFFINHQPLIHPHTLIQP

SEQ ID NO: 164250 - protein, 87 aa, Glycine max
  Clone ID: PAT_MRT3847_119336C.1.pep
NFSPGNIPLVLTSRSMKQSFYFCSYLKFHHACQGTWETNYIMLSALLIKYFPCYSLPYKLVIIFNYNLQPFCILIVLTYCYFPLSLC

SEQ ID NO: 164251 - protein, 78 aa, Glycine max
  Clone ID: PAT_MRT3847_119337C.1.pep
EGNHKFFFLFTKFKIYHSINNKNWAFIKKNSNKKATMLPPSKGNLFLKIKAPNVNLPNWRPMGKQGPIKPRFNPFWRS

SEQ ID NO: 164252 - protein, 143 aa, Glycine max
  unsure (1)..(143): unsure at all Xaa locations
  Clone ID: PAT_MRT3847_119338C.1.pep
GVTRGMAPALPGTFKNSTRLGFLGLKILFWSGGPLANQAVPEATLRRVGSHPWEKLILRDPQDPSTPKAVSSKPAPGENLLGRGSTMVGIMGAQGGDLLGGPRGEGRTFKLPNXPCPPFSGSLTFNQFXLAPIYLYVIGCVQI

SEQ ID NO: 164253 - protein, 100 aa, Glycine max
  unsure (1)..(100): unsure at all Xaa locations
  Clone ID: PAT_MRT3847_119339C.1.pep
VGLPAFLELPMLLTGYLTHDFLYGASVEFLEETKPEAVIGAISFAKKHLFFLFSRLNSTQPCDCVCCPLLSVLHRLSNRVQVRSSFFSXSDGFVPLPHPX

SEQ ID NO: 164254 - protein, 82 aa, Glycine max
  unsure (1)..(82): unsure at all Xaa locations
  Clone ID: PAT_MRT3847_11933C.1.pep
FTYYKHDLLKIYLAFKVXKKKKKKKKKKKGGPPKMNPVTPEINPGREPEGEPFSPKGSRIKLGGNQGKTFSRGKIFTRPNSQ

SEQ ID NO: 164255 - protein, 91 aa, Glycine max
  Clone ID: PAT_MRT3847_119340C.1.pep
IFCQRELHIFSLPNLQKISSRTSNLCLHLLSGTILRQHNHPLPLLSSSSFRILYLIKNCVASLSFLQHQRRIIPSTCLILHTLLNLQISIV

SEQ ID NO: 164256 - protein, 90 aa, Glycine max
  unsure (1)..(90): unsure at all Xaa locations
  Clone ID: PAT_MRT3847_119341C.1.pep
STVSDEMIVFRELNKLEVQGVTGIMFKKAFXRLKAKDINLQVTEKFKERVVDEXYNPSYGARPLRRAIMRLLEDXLAEKMLAGSKEAICI

SEQ ID NO: 164257 - protein, 81 aa, Glycine max
  unsure (1)..(81): unsure at all Xaa locations
  Clone ID: PAT_MRT3847_119342C.1.pep
SECLFFXSARNGLNNINNPSASTMFKAKKTIWVPAVKCTTVSKPLTMQLAKESMLLITIFTSLVSSLLSTQTLYVRSRILM

SEQ ID NO: 164258 - protein, 128 aa, Glycine max
  unsure (1)..(128): unsure at all Xaa locations
  Clone ID: PAT_MRT3847_119343C.1.pep
SSVHTPLSSRTRDSIYSTTVVKCSEIPPQRTPPLSYSYLSLSFVHMSAGALLLPHSPSQARVLLCSYERDTHTVLVWLXDHHHALHLVERTLCVRPYIAALSEHDIYVLPHRYTRLVTALSHLVISSI

SEQ ID NO: 164259 - protein, 38 aa, Glycine max
  Clone ID: PAT_MRT3847_119344C.1.pep
TPTIITWLYLGEKLHFIFILYFHVLSKKKKKKKKKTRD

SEQ ID NO: 164260 - protein, 62 aa, Glycine max
  unsure (1)..(62): unsure at all Xaa locations
  Clone ID: PAT_MRT3847_119345C.1.pep
IXWNLIGDWRXGWXQXQSTRXHTAXEXLXIGXRVRLLYXLTIXCIGIWCAPGXQPRAHXRAP

SEQ ID NO: 164261 - protein, 290 aa, Glycine max
  Clone ID: PAT_MRT3847_119346C.1.pep
HAYVSSEFGSRTERPRPNTFIIRCLQWTTVIERTFHVETPEEREEWTTAIQTVADGLKRQEEETMDFRSGSPSDNSGAEEMEVALAKPKHRVTMNEFEYLKLLGKGTFGKVILVKEKATGRYYAMKILKKEVIVAKDEVAHTLTENRVLQNSRHPFLTALKYSFQTHDRLCFVMEYANGGELFFHLSRERVFSEDRARFYGAEIVSALDYLHSEKNVVYRDLKLENLMLDKDGHIKITDFGLCKEGIKDGATMKTFCGTPEYLAPEVLEDNDYGRAVDWWGLGVVMYEMM

SEQ ID NO: 164262 - protein, 130 aa, Glycine max
  unsure (1)..(130): unsure at all Xaa locations
  Clone ID: PAT_MRT3847_119347C.1.pep
MAPAARTTPPTPXTTTASAVPPITPPSPTPPTPTPAPTASDPEPRATDXTPPQTTTAAASTTTTXTTTTPTTPCRSRGSYAPANPRSSPTRPPSRSAPDLPETTTTTTITPPTTENSSTAATTTRRRSRS

SEQ ID NO: 164263 - protein, 91 aa, Glycine max
  Clone ID: PAT_MRT3847_119348C.1.pep
GEIFLKIVPGGGFPNAGAGIPTNPWGVFLRKFYNENKGLFPSSLHEIKLVFEVGILCPQNRSSDRPSMEDVFKLLSGVKLLKKGKPSKKGK

SEQ ID NO: 164264 - protein, 50 aa, Glycine max
  Clone ID: PAT_MRT3847_119349C.1.pep
SKKIMSPVLETEKAKLYQSTPNTGFPSKFDHRILNRQRKNSKPSKIVIKI

SEQ ID NO: 164265 - protein, 79 aa, Glycine max
  Clone ID: PAT_MRT3847_11934C.1.pep
KIQECIGPHLHKKQKLRHALLVINGMLFNSWKKSFFHLTFMGGPMNKMFFLQEMLGLLCLAYAKLSEIVIALPLNFFLK

SEQ ID NO: 164266 - protein, 309 aa, Glycine max
  Clone ID: PAT_MRT3847_119350C.1.pep
EGLTAEDIEALTTEVAILKQMNHPNIMILHDFFSEEKYYYLVTEFMAGGELFDRIVEKSYYSEREARDLVKLLLEAIKYCHDADIVHRDLKPENLLLTSKDDDASIKLADFGFAKKIEFNGDGLVTACGTPGYVAPEILEGQAYGKGVDIWSIGVITYILLCGYPPFHDDNHNALFKKIKKGKFQFDSPYWDHVSDEAKDLIAKMLVVNPAERATVGQLLEHRWVTGTEVATVQLTSALEELRRFNARRKFKAAVSTVQATIALNKTFSKSKSTTSDEGASANGDEVLSADGDEVLSADGVALQLEKSA

SEQ ID NO: 164267 - protein, 105 aa, Glycine max
  unsure (1)..(105): unsure at all Xaa locations
  Clone ID: PAT_MRT3847_119351C.1.pep
KLPPFFRNWGWGPHLNSMSPVGLQVGSRVFKRGGACQIPCSCFLIGPXKPPRILCPPSGPLTRASITKIFFSACPKAFFSPYDDPTSGAACPGATFFFTICLHRP

SEQ ID NO: 164268 - protein, 188 aa, Glycine max
  Clone ID: PAT_MRT3847_119352C.1.pep
SCRRIQCDACHKWRKLVDNSMANSSAAWFCSMNTDPLYQSCSVPEQHFHNICKITHLPGFHLKGTCGGEKQNVSFFTSVLKEHYSLINSQTKKALTWLAKISTDKLAGMETNGIRGPILNICTASNRHFHKIFQAFGLLKRVEKGVCKWYYPQHLNNLTFDVAALGMALREPLDFVRLYLSRATLVVV

SEQ ID NO: 164269 - protein, 60 aa, Glycine max
  Clone ID: PAT_MRT3847_119353C.1.pep
FSSYQRSFLPILHRRPRQNCTRTIIFLWMLPTNAIRCKMEQKGNYLLHQFLMSTELKRPL

SEQ ID NO: 164270 - protein, 67 aa, Glycine max
  Clone ID: PAT_MRT3847_119354C.1.pep
HLPLEWRMHTPPPYSFQHLCSMQVPILLKIMRSIFFQLEFRQPWIQMEFLEHLLGLLMQPGNRYSPQ

SEQ ID NO: 164271 - protein, 67 aa, Glycine max
  Clone ID: PAT_MRT3847_119355C.1.pep
ARPTGEMALGANSMCTRLLHTIIMIHDLRIRATAADQVLRTWLVRRYTYVTSSGIGTVSAYLALRLD

SEQ ID NO: 164272 - protein, 116 aa, Glycine max
  Clone ID: PAT_MRT3847_119356C.1.pep
RRGFWASQGSFFFPRFPSLQGKNLFRYPFCSENTYDHTLFHFIHKAWTAVKESTIHNMFPRGRGSDIGGHGNTNVAEWELRPGGMLVQKRNSDLNQNSASKFTIKVKVKYGSSYHQ

SEQ ID NO: 164273 - protein, 160 aa, Glycine max
  unsure (1)..(160): unsure at all Xaa locations
  Clone ID: PAT_MRT3847_119357C.1.pep
MAIPVIDFSTLNGDKRGETMALLDEACQKWGFFLVKRIRFALIPPFNQLLVXLALLFNTLHVQIENHEIDKNLMEKVKELINIHYEENLKEGFYQSEIAKPLEKKQNTPDIDWESAFFIWPRPXSXPPPNHPISQGLWLVHSTWVTFNVEKCWPYIFRLF

SEQ ID NO: 164274 - protein, 107 aa, Glycine max
  unsure (1)..(107): unsure at all Xaa locations
  Clone ID: PAT_MRT3847_119358C.1.pep
KGNPRGPGFEGKGGLIFHTAGGPRYQKEPGFHITPGGGPPQKGFGKKLFFRRPFFGGQPXKKGILPSIKRKFLWGPHSQLMFSAGTPKENKSFGGFLKNLRPKGFGG

SEQ ID NO: 164275 - protein, 76 aa, Glycine max
  Clone ID: PAT_MRT3847_119359C.1.pep
NQPWGYKKQKEVHSQKREQAVHAETGSSLMAFVARWGVTFTVHMSSVICVLSLSRNSSSHIVVASGGMKVLTDRRY

SEQ ID NO: 164276 - protein, 66 aa, Glycine max
  Clone ID: PAT_MRT3847_11935C.1.pep
LTTTFLVSNFSFQLGSNGPGFFTFNFPSGQIPWFFSLFQFFSNTFLILPSGYAFPTEVFFSSNLAT

SEQ ID NO: 164277 - protein, 35 aa, Glycine max
  Clone ID: PAT_MRT3847_119360C.1.pep
EVMISKSYCEPKAVLCHEVCMHKIKLTTCTRPLLP

SEQ ID NO: 164278 - protein, 94 aa, Glycine max
  Clone ID: PAT_MRT3847_119361C.1.pep
ETTGKVCIFCQFVTLNFGCFFSLDFGCQILWIYMRKAVFGNFSSQHTYKLVLGKFNFQIFFRHVNGTNIVFHHVPFKFSPDHASVIKILLVHTV

SEQ ID NO: 164279 - protein, 236 aa, Glycine max
  unsure (1)..(236): unsure at all Xaa locations
  Clone ID: PAT_MRT3847_119362C.1.pep
PRVRDFISNREMDLLSIPSNAGSLRLVQWPLFLLSSKILLAIDLALDCKDTQTDLWNRICRDEYMAYAVKECYYSVEKILYSLVDNEGRLWVERIFREINNSIIEGSLVITLSLKKLPVVLSRLTALTGLLIRNDPELAKGAAKAVHDLYEVVTHELVSSDLRENLDTWNLLARARDEGRLFSRIVWPNDPEIKELVKRLHLLLTVKDSAANVPKNLEARRELEFFSXSLFMDMPS

SEQ ID NO: 164280 - protein, 70 aa, Glycine max
  Clone ID: PAT_MRT3847_119363C.1.pep
EDDREEPWGVVPDDDRQTRLVNHDHRGSVRHQLLVITFLLFFFILAYLAYCCLRLTRYWITSPKMDLLRV

SEQ ID NO: 164281 - protein, 65 aa, Glycine max
  unsure (1)..(65): unsure at all Xaa locations
  Clone ID: PAT_MRT3847_119364C.1.pep
MWSLKGAKQTSWHLSFLFNNPKQFKVFXIFLGFSQNFEIGGKTLMPAFFVPKAGASFFEKGESPA

SEQ ID NO: 164282 - protein, 224 aa, Glycine max
  unsure (1)..(224): unsure at all Xaa locations
  Clone ID: PAT_MRT3847_119365C.1.pep
PILASFQLFNLVFYTRKLFNYSVPSFPIIINFFLISVISXPMXRDIIRESSFERRHTKEVLKGLKIGIILFITSEVFFFLRFFXAFFHSSLSPDIFIGQIXPCQGIKTFNPIAIPLINTLILLRSGVSVTASHHFIILRIKKKSIIYLYITVILGIYFSILQYIEYKEASFSISDSVYGSCFFIATGFHGLHVLIGTVFLVVCLIRIIKKHFSSNHHFGFEAAA

SEQ ID NO: 164283 - protein, 52 aa, Glycine max
  Clone ID: PAT_MRT3847_119366C.1.pep
VCNVDTSTYNKYRRERVSKLSIGIYVYQESIKQLIMNTSCDAFNVEVEYNNP

SEQ ID NO: 164284 - protein, 63 aa, Glycine max
  Clone ID: PAT_MRT3847_119367C.1.pep
IVRCSDPMSDKYYKHLLIRFSEARRAVMGLTSRDASASQYPSDGGQRSPMSPPILGASANLGS

SEQ ID NO: 164285 - protein, 66 aa, Glycine max
  unsure (1)..(66): unsure at all Xaa locations
  Clone ID: PAT_MRT3847_119368C.1.pep
GPLRSLSSQFPSPSNFSFNYLTFCIHKRKLMSXDHTPPFPPSFFSAYTRDGALTSNDDLESIFARG

SEQ ID NO: 164286 - protein, 286 aa, Glycine max
  Clone ID: PAT_MRT3847_119369C.1.pep
MGKVSPKEKGWKVKGRRQVRSSGNKYLRPGALAQLRCSKPSGSGGGGKCCCTDLGKKRVAFFHTRKSGCGCGGGGGGGSAHGYYGEKNIRVFDKSPLMLSPVNLVKHNGGFFGTPKTPRLDDSLSESSKLESLPMDLLVKILCHLHHDQLRAVFHVSQKIRKAVIIARQFHFNYTTPDRSRQEMLSTMTPRPTEHWPFLCKGDGKGVRIPSPHTPKAPRHGPRPPSRLKISEMRQVTAVLFPESAFPSHCLVPSVISKPLCKSLASNRVLFYEDELCQAVAQNKLR

SEQ ID NO: 164287 - protein, 46 aa, Glycine max
  Clone ID: PAT_MRT3847_11936C.1.pep
MFSRCPPPMGIFIPKQMTVFCRNLLLPNNRFLAKTFIYRLPLFYLP

SEQ ID NO: 164288 - protein, 52 aa, Glycine max
  Clone ID: PAT_MRT3847_119370C.1.pep
EGKFVRLKYKKAVMGKVGIIEGLIDKGDWMTCLIMDYICKHYILIEITNHFY

SEQ ID NO: 164289 - protein, 81 aa, Glycine max
  Clone ID: PAT_MRT3847_119371C.1.pep
CFSEADNHEDPTAKKLGVAFSLHASNFETSLLSVGSDMLQLQVLLHILFSPGFDKGYLKLKEQHMEYIEQHFVIEFHEQMQ

SEQ ID NO: 164290 - protein, 101 aa, Glycine max
  Clone ID: PAT_MRT3847_119372C.1.pep
TAGEWAGQCISTEISKFLATPISFLCQTNSHAAATKKTFTAHHDKGNTSRRKNPGGYKPQGKRDPLGSSFLRGNNRGAFFIGNKPFPTCFRVHSHLKLGFC

SEQ ID NO: 164291 - protein, 87 aa, Glycine max
  unsure (1)..(87): unsure at all Xaa locations
  Clone ID: PAT_MRT3847_119373C.1.pep
VFAFIECRDCGKQVYLGGFDTAQAAARAYDRAAIKFRGVEADINXSLSDYEEDXKQMRGLSKEEVVLLLRRQINGSSRSSTYKGALA

SEQ ID NO: 164292 - protein, 65 aa, Glycine max
  Clone ID: PAT_MRT3847_119374C.1.pep
KTFDFSFSALGFKGFFNFEKNSINLLLRALPQVDWSKRIRNHWKIGPRPGFILKGKKNLQSSLNP

SEQ ID NO: 164293 - protein, 59 aa, Glycine max
  Clone ID: PAT_MRT3847_119375C.1.pep
FSTLSHFSLSHFSHKMAGSSARLVGNALSTRGNRLTLEKDFNGMGYLYSSWRFSSIELQ

SEQ ID NO: 164294 - protein, 39 aa, Glycine max
  Clone ID: PAT_MRT3847_119376C.1.pep
TGSGNSRGQTHALPHKVDLRKLYQVKAMGANETAPMLTI

SEQ ID NO: 164295 - protein, 148 aa, Glycine max
  Clone ID: PAT_MRT3847_119377C.1.pep
SAEPDVMKEEATKHGDADGNEGLCPKPLLDKPIPIFPQEENAETSRQNPNPTPRKKKKKNVEGAEQVQTCDPSILTGVEPDVMKEEGAQQGSDLPAETTRQIPCPNPQEKQEEGCARCTTATSDMRPFNHDKCGTQCYEGRRSTSWRS

SEQ ID NO: 164296 - protein, 69 aa, Glycine max
  Clone ID: PAT_MRT3847_119378C.1.pep
IQNNAKYVRTVLWLASPMCQEEKELSLHSEVHCCWSLCIWNRENIPHYLTTPFMPGASCCYADQCLNAP

SEQ ID NO: 164297 - protein, 106 aa, Glycine max
  Clone ID: PAT_MRT3847_119379C.1.pep
IHFLFIACWAFKYYSSARVVLFTLMYALFGKHSFIIFFFMRLSPRFPFTSMTRHFTDIYYILYRLLRILTGRLLYYISTGTVPFHYRASCRHYIPPPPPKKEDVIQ

SEQ ID NO: 164298 - protein, 51 aa, Glycine max
  Clone ID: PAT_MRT3847_11937C.1.pep
GIEKGCASEVFFLVVFLAKPTVFGADQEGGDTSGRALRGSYNTGAIGKTHT

SEQ ID NO: 164299 - protein, 101 aa, Glycine max
  unsure (1)..(101): unsure at all Xaa locations
  Clone ID: PAT_MRT3847_119380C.1.pep
PHMWITPNTTSTADQLEXSSSLFXGGRVLTRVPLKRYPPISNLEILXFGKNTPLTKIVVXQKKKFLSFFFXAMKKDKEGIISNLSFXTESLSXHNPHIKFF

SEQ ID NO: 164300 - protein, 49 aa, Glycine max
  unsure (1)..(49): unsure at all Xaa locations
  Clone ID: PAT_MRT3847_119381C.1.pep
LTXDIGVVXXXDDDGEPQGFXIYVXGGXGXTHRXETXXPRXAEPSRLPQ

SEQ ID NO: 164301 - protein, 385 aa, Glycine max
  unsure (1)..(385): unsure at all Xaa locations
  Clone ID: PAT_MRT3847_119382C.1.pep
MDNRDNKSPPPLPPSSSRYVKSEQQASLSASSSFSHDDISGMPENPPKNXGHRRAHSEIITLPDDLTFDVDLPDDNDLLSIYLQFDQLDSSPLPLPPPGSSNSIANNNNNNNNKNNNNNNERPTRVRHQHSLSMDGSIHPDMLLSATAAAADDVSGGGIDTKKAMSADKLAELALVDPKRAKRIWANRQSAARSKERKMRYISELERKVQTLQTEATSLSAQLTLLQRDTTGMTAENSELKLRLQTMEQQVHLQDALNDALKEEIQHLKALTGQVMPNGGPVNFASFGGGQQFYPNNQAMHTLLAAQKFQQLQIHSQKQHQLQQQQQFQQQQQFQQLQQLQLQQQQQLQLQQQQQQQQQQQQQQQQQQQQQQQLQLQQQQQQQEQ

SEQ ID NO: 164302 - protein, 381 aa, Glycine max
  unsure (1)..(381): unsure at all Xaa locations
  Clone ID: PAT_MRT3847_119383C.1.pep
MDRDNKSPPPSSLYVKSSSSSFSHDDISAMPENPPKNRGHRRAHSEIITLPDDLSFDADLLPDDDNDLLSLYLQFDQLDSSSLPPPPPPPPPHNNINERSTRVRHQHSHSMDGSIHLEMLLSAASAADDVSGGIDTKKAMSADKLAELALVDPKRAKRIWANRQSAARSKERKMRYISELERKVQTLQTEXTSLSAQLTLLQRDTHGNDCXLKRVDCPIASMEQHVEIHMDXTDAFSELKLRLQTMEQQVHLQDALNDALKEEIQHLKALTGQVMPNGGPVNFASFGGGQQFYPNNQAMHTLLAAQKFQQLQIHSQKQQQHQLQQQQQFQHQLQQQQQFHQQQQQLQLQQQLQQQQQQQQQQQQQQTAATGTVTSTNGGHE

SEQ ID NO: 164303 - protein, 154 aa, Glycine max
  unsure (1)..(154): unsure at all Xaa locations
  Clone ID: PAT_MRT3847_119384C.1.pep
MMEVTKDPNSDFELELYTIPSSSRWFAWEEIHETERTAFKEYFDGNSITRTPKIYKEYRDFIINKYREEPSRRLTFTEVRKSLVGDVTFLHKAFLLLEHWGLINYGTAQPFFGADAXEEEEEHRKVRLEEGAPGGIRVAATPNSLEPYVVPRMG

SEQ ID NO: 164304 - protein, 73 aa, Glycine max
  Clone ID: PAT_MRT3847_119385C.1.pep
QQQHLCPWLPWSSQPGGFGFPTSPFPIFGSKRFLWPVPPCLKPHPCCLKNDLKPLHFLSPSNQSRILDSPPVL

SEQ ID NO: 164305 - protein, 83 aa, Glycine max
  unsure (1)..(83): unsure at all Xaa locations
  Clone ID: PAT_MRT3847_119386C.1.pep
XXXHXLXXPXSSXXPXXXXSXXSPXDXXGXLXLYVXXXXXXXXXXXXXXXXXXXXXXXXXXXXHXXXXXGGXXXPXXXXXVXX

SEQ ID NO: 164306 - protein, 90 aa, Glycine max
  Clone ID: PAT_MRT3847_119387C.1.pep
RPEFRVATRTLIKYYGCHGNLNPLLKPLTLVLQRKARHIFLPRRAHHQIILIQTRHNYHVLNPTLLRPAVLQISAHQRIHRVTGNDAAAS

SEQ ID NO: 164307 - protein, 365 aa, Glycine max
  unsure (1)..(365): unsure at all Xaa locations
  Clone ID: PAT_MRT3847_119388C.1.pep
GQIHDEAKKFSYQTGVKVVVAYGGAPITQQLRELERGVDILVATPGRLVDLLERARVXSLQMIRYLALDEADRMLDMGFEPQIRKIVEQMDMPPPGMRQTLLFSATFPKEIQALASDFLSNYVFLAVGRVGSSTDLIAQRVEYVLESDKRSHLMDLLHAQRETGVNGKQGLTLVFVETKKGADALEHCLCVNGFPAASIHGDRTQQERELALRSFKTGNTPILVATDVAARGLDIPRVAHVVNFDLPNDIDDYVHRIGRTGRAGKMGLATAFFNEGNLNLAKSLADLMQEANQEVPAWLSRYAARAIYSGGNRNRKSGGSRFGGRDFRKEGSFNKATDYYGSGTGGGYGGNYGGGYGQGVTSAWD

SEQ ID NO: 164308 - protein, 103 aa, Glycine max
  unsure (1)..(103): unsure at all Xaa locations
  Clone ID: PAT_MRT3847_119389C.1.pep
AWPPMAPNVVHGACCALQDSLVLATKLAQAIPSEDPFVEEAPRSYGHXRRPRVFPPPIRASYVGSVLHRSSPMVCYVRSNIVIPKQARLGPALSHPNFARQGL

SEQ ID NO: 164309 - protein, 69 aa, Glycine max
  Clone ID: PAT_MRT3847_11938C.1.pep
KNPGFFSKTLNNNVVYPKIQFVSKKRNFFFPIRKSGVELSRLIFWGKNPPHPQKLCPSKEKIRSPILSF

SEQ ID NO: 164310 - protein, 53 aa, Glycine max
  Clone ID: PAT_MRT3847_119390C.1.pep
VAFIFYILYFYLIIRYYLIVIFFLSGDVIKKNCKNQILLFSLFLKIKNPYDVL

SEQ ID NO: 164311 - protein, 357 aa, Glycine max
  Clone ID: PAT_MRT3847_119391C.1.pep
ICKDPCDRSKRKNQCENSRCLDPGQTSTSTSEDSSRSKFSKKSERTSYSNEASGCTFEKATTSLPFDASDLANFLTMDRHIGFNCSAQIFLRSRLAEKQQLCFSVVSLLWQKLIGSPETQPCAESTSAQQGWRQVADALCKVVSASPTKAAMAVVLQAEKELQPWIAKDDNLGQKLWRINQRIVKLITELLRNHDNLESLVIVASASDLLLRATDGMLVDGEACTLPQLKLLEATAKAVQPVIELGESGLGVADGLSNLLKCRLPATIRCLSHPSAHVRALSSSVIRDILHTSSIGSSPKPLQKNGIHDQYLNFDVIDWRADVENCLTWEAHSRLSNGLSIEYLNTAADDLGFAISI

SEQ ID NO: 164312 - protein, 105 aa, Glycine max
  unsure (1)..(105): unsure at all Xaa locations
  Clone ID: PAT_MRT3847_119392C.1.pep
AHYVRIVGKGIEIVILAHGCGSYHSGXNHVDPYLVYDYQVIFYHCICACTTSPYYFYLRRYYTSDGLVYGSLSILYDLQALCFIFDGHSLSAIVVLLAYISHRHL

SEQ ID NO: 164313 - protein, 105 aa, Glycine max
  unsure (1)..(105): unsure at all Xaa locations
  Clone ID: PAT_MRT3847_119393C.1.pep
SFFVPVRPRPNYVYCHCLCQEPPLCALACAPYGTLQLGVHHVVLLGLHCCVSPWCSPLYSQAWCSPLCSPSFLCLSPSRVFQFLQLFPLFGLIHCSKYHYHXAXX

SEQ ID NO: 164314 - protein, 86 aa, Glycine max
  unsure (1)..(86): unsure at all Xaa locations
  Clone ID: PAT_MRT3847_119394C.1.pep
RRRSLGCFQGKTRLHFWNSQAQGEKDLXXPLACPLGLXKVSXDAPQGXXGXIXXLXPSHETKXXQXXAXANXPAXPRXVDXXPXRX

SEQ ID NO: 164315 - protein, 45 aa, Glycine max
  unsure (1)..(45): unsure at all Xaa locations
  Clone ID: PAT_MRT3847_119395C.1.pep
RVCXPXGXPYGSLLPXNIFKXRVXXTPNXXSXRCXRLTCAKIIXP

SEQ ID NO: 164316 - protein, 58 aa, Glycine max
  Clone ID: PAT_MRT3847_119396C.1.pep
KFKWNRDFQGKRWTTVINPFLYLFKYLSKDPTERRRGWDGERNRSQLKLLSILNKEPH

SEQ ID NO: 164317 - protein, 111 aa, Glycine max
  Clone ID: PAT_MRT3847_119397C.1.pep
SFPEKNRKEIWKYLFQEGIWFAKKDFNLAKHPKIGGPNLEGIKLMPNFKFKKDGKETFGGMPYYWVLNNHGIGVLKTFLNLSFQIGPGTFKKPGQAGGRTFRGPTRGPPKG

SEQ ID NO: 164318 - protein, 27 aa, Glycine max
  Clone ID: PAT_MRT3847_119398C.1.pep
YHTVNVRTYISYKFTQAHPLLSSSRSR

SEQ ID NO: 164319 - protein, 51 aa, Glycine max
  Clone ID: PAT_MRT3847_119399C.1.pep
TSLGLFFCSCSDGYSFPLGVHLGASPLSCPPIVCLFWGVLPSNYRQVLPPY

SEQ ID NO: 164320 - protein, 234 aa, Glycine max
  unsure (1)..(234): unsure at all Xaa locations
  Clone ID: PAT_MRT3847_11939C.1.pep
MTMESALTASNWNRSLIRIRHTKPRFGAIRPTAIRCSINSYRLSNLTPSELQSLKSRPRIDFSSIFGVVNPIVDDVHKRGDAAVKEYTSKFDKVELDKIVEVVSELPDPVLEPPIKEAFDVAYDNIYAFHAAQKSSEKSVENMKGVQCKRVARSINSVGLYVPGGTAVLPSTALMLAVPAQIAGCKTIVLANPPTRDGTTCKEVLYCAKKAGVTHILKAGGAXAISAMAWGTET

SEQ ID NO: 164321 - protein, 52 aa, Glycine max
  Clone ID: PAT_MRT3847_1193C.1.pep
TQKACQSEPHKFEISFNTTFALPFIIYVRSSGLSTNNQFVSMQHPSPNVNYI

SEQ ID NO: 164322 - protein, 166 aa, Glycine max
  unsure (1)..(166): unsure at all Xaa locations
  Clone ID: PAT_MRT3847_119400C.1.pep
FQLSSTSAQENFPCFFVFFVGKKDCLVIAVIILLFLTNLPNRKGICSYTKSLRTSITLVVLAGTKYLGSSLQNKPQFPFQDIFQSSILFPGKHAQFSQSGRVKLEEDSIYGXQLAAPVTLDQESSSCALSLLSDQSQYPSCHAAXNPLASPQVFSGIRIPDRDSRV

SEQ ID NO: 164323 - protein, 77 aa, Glycine max
  Clone ID: PAT_MRT3847_119401C.1.pep
FAEVSQMSSRLSSESRIYADKARDLNRQVSHYQLSGIMHMISYIFGILLVYPFSIWMMTCLNLIRLRNIMLQLEIAC

SEQ ID NO: 164324 - protein, 74 aa, Glycine max
  unsure (1)..(74): unsure at all Xaa locations
  Clone ID: PAT_MRT3847_119402C.1.pep
SVSVGVKEVNDDSGGLDECDRFAISPAPISLPHIEGTFDIDANLIVSVSAKYMSSGXQQQITIISYSLLSYDDI

SEQ ID NO: 164325 - protein, 316 aa, Glycine max
  Clone ID: PAT_MRT3847_119403C.1.pep
MRISLFLSFPPSSPSMAAPSLSSALNSLSSPSLSLSFSTSSRRFSLLPPPSHQPSKPLFLTLKSKPSDDIDTSFFDNINPQDDITFNPPEPPEGFVAPPSFDDGPLETEDEIAAAYEELYGPGYSGVSVLGNDVYVMDAKVKKETGFGSGAKKEKVRDGFEERVVQVRRVTKVVKGGKQLRFRAVVVVGDKKGQVGVGVGKAKEVIAAVQKSAVNARRNIIKVPMTKYSTFPHRADGDYGAAKVMLRPASPGTGVIAGGSVRIVLEMAGVDNALGKQLGSNNALNNARATVAAVQKMKQFREVAEERGIPMEELWK

SEQ ID NO: 164326 - protein, 77 aa, Glycine max
  Clone ID: PAT_MRT3847_119404C.1.pep
RGKQILNISREKINSGQNFPCGPHHKPWGVKLSYKQVTRPTTHQKLEVYCWGLPFFFKKKKKKKKKKKKKKKKKKRK

SEQ ID NO: 164327 - protein, 50 aa, Glycine max
  Clone ID: PAT_MRT3847_119405C.1.pep
YLQQTPLSLMEATTRSKTNTDSARCSHNSSTLIQSPPTPSSYESHQLMPN

SEQ ID NO: 164328 - protein, 49 aa, Glycine max
  Clone ID: PAT_MRT3847_119406C.1.pep
KMQWHKIEEDLGLIKKLNNTKERAIWAPGSVRNKTKRGDRRPRVLNNCH

SEQ ID NO: 164329 - protein, 36 aa, Glycine max
  Clone ID: PAT_MRT3847_119407C.1.pep
HSCYSIYNRFLFYTNLSCVLLIPNYCKNIIPKPDVR

SEQ ID NO: 164330 - protein, 58 aa, Glycine max
  Clone ID: PAT_MRT3847_119408C.1.pep
LAILAIKCLTHPQGTASREREKRKLEFFVVSFASFLTHRFIKANLKRKPKHPKSNTQF

SEQ ID NO: 164331 - protein, 110 aa, Glycine max
  unsure (1)..(110): unsure at all Xaa locations
  Clone ID: PAT_MRT3847_119409C.1.pep
SFNQAPPGNVKCGNKIFRTKYAQYHTVXKEAEHKPKPNLNNLFRKQSNTTSGYAYSXANKNMSMTXKEKTLYDDLLNPKKCVAETKIGLPSLKKARERANLITYVRESTG

SEQ ID NO: 164332 - protein, 135 aa, Glycine max
  unsure (1)..(135): unsure at all Xaa locations
  Clone ID: PAT_MRT3847_11940C.1.pep
LLLTFSTGGAIIDSGTVITRLPPXRYGALRSAFRQGMSKYPSAGELSILDTCYDLSGYKVFSIPTIEFSFAGGVTVKLPPQGILFVASTKQVCLAFAANGDDSDVTIYGNVQQRTIEVVYDVGGGRIGFGAGGCK

SEQ ID NO: 164333 - protein, 117 aa, Glycine max
  Clone ID: PAT_MRT3847_119410C.1.pep
GARSNGSGPEGKRPIGPQGTQKWGTRALIKDFNLVPCLKMLMRGQETGVPMKLYLPMGNKRPVFISYLEKKPYIHNHSLKKYLLDAITHPLGVIPNKKKQTDVKALLKLPGQKRRPF

SEQ ID NO: 164334 - protein, 119 aa, Glycine max
  Clone ID: PAT_MRT3847_119411C.1.pep
RTRGRLREDDRRGELPRLQPISLPLSSLSLSRMRVESADRKFCRVRDVRRTAAARASINRRTALQKVVRWRRTAYTSKRIARAKLAECGLTQWEHGLTRWERGGEPRGTSQVATLFDIY

SEQ ID NO: 164335 - protein, 48 aa, Glycine max
  Clone ID: PAT_MRT3847_119412C.1.pep
QKFLLTPLPSYSSLRASALKNKHIYIYIYIYILALLHSHTSLNLLITR

SEQ ID NO: 164336 - protein, 197 aa, Glycine max
  unsure (1)..(197): unsure at all Xaa locations
  Clone ID: PAT_MRT3847_119413C.1.pep
MLSAHAVHSPDQFSIHCPLSLTRYFNPKIEEGSQNHKFLSRVCPENNLLDSHPLPLPPRASSPEQLSVVLHQSSTMNQSSIMHHATENLPSVKGRWQKXKLIGRGTFGSVFHATNIETGASCAMKEVNLIHDDPTSAECIKQLEQEIKILRQLHHPNIVQYYGSETVGDHLYIYMEYVYPGSISKXMREHCGAMTES

SEQ ID NO: 164337 - protein, 176 aa, Glycine max
  unsure (1)..(176): unsure at all Xaa locations
  Clone ID: PAT_MRT3847_119414C.1.pep
GYNTHXXSCACLPPDPVNLSVSNDTTLAPEDLPTVSSTDMYHNATFDWAYLSKKECVKFGGKLVGNNCDFVPDITLMSFILFLGTYTSSMAMKKFKTSRYFPTTARKLISDFAIILSILIFCVIDALVGVDTPKLIVPSEFKPTSPHRXWFVPPFGGNPXWVCLAAAIPALLVTIL

SEQ ID NO: 164338 - protein, 327 aa, Glycine max
  unsure (1)..(327): unsure at all Xaa locations
  Clone ID: PAT_MRT3847_119415C.1.pep
MDLMSVECVSSSDGMDEDEIHANHHHSEFSSTKPRNGGTSNINSVGPNGIAPATXSVHELLECPVCTNSMYPPIHXCHNGHTLCSTCKTRVHNRCPTCRQELGDIRCLALEKVAESLELPCKYYSLGCPEIFPYYSKLKHETVCNFRPYSCPYAGSECSVVGAMPSLVALVRCDHILDMHSGCTFSHRYVNAYPREVANASWMPTVFHCFGQYFCLHFEAFQLGMAPVYMAFLRFMGDENEARNYSYSLEVGXHRRVLVCQGAPRSVRDSHRKVRDSHDGLIIQRNMALFFSGGDRKELKLRVTGRIWKEQQQQNSEAGVCMPNLCS

SEQ ID NO: 164339 - protein, 65 aa, Glycine max
  unsure (1)..(65): unsure at all Xaa locations
  Clone ID: PAT_MRT3847_119416C.1.pep
ASTXXAHGRKDIFFSVDCLDYGWVLTYSQTPNGFALEKQKKKKNIGWRKHCKFQNWPKWIPIPPG

SEQ ID NO: 164340 - protein, 324 aa, Glycine max
  Clone ID: PAT_MRT3847_119417C.1.pep
MDLESVECVSSSDGMDEDEIHANHHHHSEFSSTKPRNGGTSNINSVGPNGIAPATSVHELLECPVCTNSMYPPIHQCHNGHTLCSTCKTRVHNRCPTCRQELGDIRCLALEKVAESLELPCKYYSLGCPEIFPYYSKLKHETVCNFRPYSCPYAGSECSVVGDIPFLVAHLRDDHKVDMHTGCTFNHRYVKSNPREVENATWMLTVFHCFGQYFCLHFEAFQLGMAPVYMAFLRFMGDENEARNYSYSLEVGANGRKLIWEGTPRSVRDSHRKVRDSHDGLIIQRNMALFFSGGDRKELKLRVTGRIWKEQNSDAGVCMPNLCS

SEQ ID NO: 164341 - protein, 47 aa, Glycine max
  Clone ID: PAT_MRT3847_119418C.1.pep
RALRPPAPLKEKNPGREETQEFPVDGPKGDPIVSKIKQKIFFLFRRI

SEQ ID NO: 164342 - protein, 139 aa, Glycine max
  Clone ID: PAT_MRT3847_119419C.1.pep
IKEWEKMERAIPTNLNPKSSPTFKDRSVSFSSPHHLTPDQPNKSEPPHAMMMRPNDGLRTLDPDPITSELSTFGAHRYFNQGTNNNNDNTIQKATINSNSRVSPLLNMDTEHKHNNQVQEQGDITKSTRSFSYSASSSV

SEQ ID NO: 164343 - protein, 290 aa, Glycine max
  Clone ID: PAT_MRT3847_11941C.1.pep
MATESPIRISEAGSKWPSLKEAATFGSPSRHMATEDLGIFLNGHRFHGSGKDAVPNRSGSAPPSMEGSFLAIENLLSQNTTRNASLGSRNRAMQKYDSGKGSFHLSQGTLATHKEESEDDLTQKLYNNLLDKASGKWHRQDAASTSSQDTNLVLEDFPHIMSPVYNKSLGVVDELIDVDTGSSSSLGPPVTTVDAVKPTIGADDVRLSSTVDSRAPVTSSSSLNSTGSMGFNVLDVTIVESQLRALNGSNLPNSESQSYEDKWKNRCQNNLMQHQQPNYPCGGPYHQFLK

SEQ ID NO: 164344 - protein, 73 aa, Glycine max
  unsure (1)..(73): unsure at all Xaa locations
  Clone ID: PAT_MRT3847_119420C.1.pep
TXNXTXARIPNXGPLVXXXTXXLVXXXDXXXPXXXRRTXXPYXXXYXXLXXIXVXXXHXXXXXXLIPXXYAXP

SEQ ID NO: 164345 - protein, 62 aa, Glycine max
  Clone ID: PAT_MRT3847_119421C.1.pep
KYRNDVPCPLTVKLQGAFCYINMMPRESRMSFLLGGMRLNDIQISLCNLQIVTFYKNSARAN

SEQ ID NO: 164346 - protein, 153 aa, Glycine max
  unsure (1)..(153): unsure at all Xaa locations
  Clone ID: PAT_MRT3847_119422C.1.pep
DVVLEKCELLGQPVAAPAEFATGXXSGFTFGNSQSLNSCSHAGGVSGLANDFSAMNLATGQVTPPAYNPINSSSDFDFGMPTNQVGQRYESQYNNFVSAGAPGSYMSCTNCGGSGHSSLLCPNIRNLPLGSGGGASVECCKCHQSDHWGERLP

SEQ ID NO: 164347 - protein, 87 aa, Glycine max
  unsure (1)..(87): unsure at all Xaa locations
  Clone ID: PAT_MRT3847_119423C.1.pep
ASFFVMFSGVFALAAPHHWGFFSLHVFXXXFPPLEEGGFSCDFVDVCLSPLECFDAVRSALAVLALRVGELGSVGGPGPLSPSLSCV

SEQ ID NO: 164348 - protein, 53 aa, Glycine max
  unsure (1)..(53): unsure at all Xaa locations
  Clone ID: PAT_MRT3847_119424C.1.pep
KLQSAGXQLLLRHGISSKPLSFSLCLCKIFILKILSYVLTNRNXMXXAKYEEL

SEQ ID NO: 164349 - protein, 50 aa, Glycine max
  Clone ID: PAT_MRT3847_119425C.1.pep
TLLHAVGPLSSSTQKALEPDPMTYMYPCGTFAIYQNHELSIIEHISHNCP

SEQ ID NO: 164350 - protein, 94 aa, Glycine max
  Clone ID: PAT_MRT3847_119426C.1.pep
MTPLLRRKRMLCLVLKVLMSQLPKKKKSIDVPHLAMVMAFIYSMVKQDYLMQEKIVSALDVKMPSEELESYCQMWSLRPFINDEIVHQAWEHIH

SEQ ID NO: 164351 - protein, 208 aa, Glycine max
  unsure (1)..(208): unsure at all Xaa locations
  Clone ID: PAT_MRT3847_119427C.1.pep
MHNINKWLLVPYLLWMVIFIIIPAILLVYFSFIDIHGHFSFTNYEQVFSTRYLKMFIDSIWYAALITMITLIISYPAAYFISYSRFQNIPVMLLIIPTWINLPSKTHAFIGLLGHDGVINQALHIFQIPXLNLVVTSGAFLLVASYIYMPFMILPICNSMKAIPNXILQASNDLGASHVLRFVKNRSFTREGINRCGSTCIPALYCYD

SEQ ID NO: 164352 - protein, 91 aa, Glycine max
  Clone ID: PAT_MRT3847_119428C.1.pep
LLQTQTFMVQPIQSQIWGVPPPLSQFGFFFWAFPFFSFRNEVGKFFFLFYKKGTFFLAKPGRQANNCLIFWLREKNPPKVFSFLIGEIFGG

SEQ ID NO: 164353 - protein, 45 aa, Glycine max
  Clone ID: PAT_MRT3847_119429C.1.pep
CKLKFRCAAVKEKGHWMTVTGTYLVSTTQPWVTCVPLTCYLLLTT

SEQ ID NO: 164354 - protein, 136 aa, Glycine max
  unsure (1)..(136): unsure at all Xaa locations
  Clone ID: PAT_MRT3847_11942C.1.pep
DPRDRRAQKHTXAERGGGXXGGDXGXXGRGXGGRGRGXDRGRGRRRGPRREEEEKXGPGTKQGRRGKEGRSRSPEQSDRHXXPSKEHQXTDTRGXPTRKDEGRKSTPAQKQTRAGQRTRRKARGGGGDNSGHDRAG

SEQ ID NO: 164355 - protein, 85 aa, Glycine max
  Clone ID: PAT_MRT3847_119430C.1.pep
MAKKINSFFLLEMDKGHLKVCRLLHRPSMLYNGRTVLKFSWRLGESTNTRHLLNYDGEVPFAAVLCILQDKDRYQDWCFGSQICE

SEQ ID NO: 164356 - protein, 128 aa, Glycine max
  unsure (1)..(128): unsure at all Xaa locations
  Clone ID: PAT_MRT3847_119431C.1.pep
METQRIIEFPHRNMDKRPRKKQRLTWDMHVPPPPPPPPPLPPPKLQVLPTMYCKQEVGNGVVPNHAYPSLFYRGMPRNGSPPWRPDDKDGHYVFAVGENLTPRYKILSKMGEGTFGQVLECLDXEKEE

SEQ ID NO: 164357 - protein, 52 aa, Glycine max
  unsure (1)..(52): unsure at all Xaa locations
  Clone ID: PAT_MRT3847_119432C.1.pep
QVTCDFKFSIHFLIKKKGEIFFSGGSXEPPSWHAXKAXQKKEGRQGTXTATT

SEQ ID NO: 164358 - protein, 97 aa, Glycine max
  unsure (1)..(97): unsure at all Xaa locations
  Clone ID: PAT_MRT3847_119433C.1.pep
NFTTVQVTYYNIFFKKNYYTTCGDILKTVAEANTKLRLIPSYILFLNPTIKTYTANHVRYRLIPNASSYPPLKKDDYPPTQXSFTNYNASLTPYNNT

SEQ ID NO: 164359 - protein, 57 aa, Glycine max
  Clone ID: PAT_MRT3847_119434C.1.pep
VVKSFSSGKREGGDFVAACVSPKGEWIYCVGEDRNMYCFSYQSGKLEHLMKVCVIVS

SEQ ID NO: 164360 - protein, 69 aa, Glycine max
  unsure (1)..(69): unsure at all Xaa locations
  Clone ID: PAT_MRT3847_119435C.1.pep
ASQAMNYRYIHHTWLEMPQRGRTGXRIFTLALLSSGGFDVHHISLCFPTACPFHTGLFLLRYYRGLIFI

SEQ ID NO: 164361 - protein, 85 aa, Glycine max
  Clone ID: PAT_MRT3847_119436C.1.pep
RKGKVAKKASHLLESRARKFFLDQIAKKIDSSNGRERRKGLKMLRNVTNGFIDVYEGGSSDGLPGLQIYTLLMNSTDTQHEILHE

SEQ ID NO: 164362 - protein, 52 aa, Glycine max
  Clone ID: PAT_MRT3847_119437C.1.pep
LFLHNRCYSFHLIFFIILHLSIKPPHHSNLFHIYFLPLSALSLLPTFASIEH

SEQ ID NO: 164363 - protein, 50 aa, Glycine max
  Clone ID: PAT_MRT3847_119438C.1.pep
RAGRPFFFFLKKSFRQSKITTLHDKKFCSPKQMKKRSIHHKNNKFLVDLS

SEQ ID NO: 164364 - protein, 187 aa, Glycine max
  Clone ID: PAT_MRT3847_119439C.1.pep
MKALILVGGFGTRLRPLTLSVPKPLVDFANKPMILHQIEALKAIGVNEVVLAINYQPEVMLNFLKEFEAKLGIKITCSQETEPLGTAGPLALARDKLIDDSGEPFFVLNSDVISEYPLKEMIEFHKTHGGEATIMVTKVDEPSKYGVVVMEETTGQVERFVENQSCLLAQNNAGIYLLNPSVLDRIE

SEQ ID NO: 164365 - protein, 91 aa, Glycine max
  unsure (1)..(91): unsure at all Xaa locations
  Clone ID: PAT_MRT3847_11943C.1.pep
RPLLELFQLSFNVXLVVTIIFKTTLRRTTSVIWRIESIVTVVAIVIRVSIRIVQVLCVRKVTARFARQYLRPYSSRGSSLALLVAHAVPIR

SEQ ID NO: 164366 - protein, 114 aa, Glycine max
  Clone ID: PAT_MRT3847_119440C.1.pep
LTNSYNQTHLLKCYKRGTSLNECINHTISYLCYTFIVTIHTLKGYAVNVHIVLSYHTLSIEHPIKNYFSTAGHQSLRSALTCTRHKNDLSHYTIRRAITERLLLFLLHRHIDDQ

SEQ ID NO: 164367 - protein, 145 aa, Glycine max
  unsure (1)..(145): unsure at all Xaa locations
  Clone ID: PAT_MRT3847_119441C.1.pep
MKALILVGGFGTRLRPLTLSVPKPLVDFANKPMILHQIEALKAIGVNEVVLAINYQPEVMLNFLKEFETKLGIKITCSQETEPLGTAGPLALARDKLISDSGEPFFVLNSDVISEYPLKEMIQFHXTHGGEATIMXDKVDEPSKY

SEQ ID NO: 164368 - protein, 361 aa, Glycine max
  Clone ID: PAT_MRT3847_119442C.1.pep
LLLILLTSGLGTLSVNGLNLVPKPLVDFANKPMILHQIEALKAIGVNEVVLAINYQPEVMLNFLKEFETKLGIKITCSQETEPLGTAGPLALARDKLISDSGEPFFVLNSDVISEYPLKEMIQFHKTHGGEATIMVTKVDEPSKYGVVVMEETTGQVERFVEKPKLFVGNKINAGIYLLNPSVLDRIELRPTSIEKEVFPKIAADKKLYAMVLPGFWMDIGQPKDYISGLTLYLDSLRKKSPSKLASGPHFVGNVIVHETATIGEGCLIGPDVAIGPGCVVDSGVRLSRCTVMRGVRIKKHTCISNSIIGWHSTVGQWARVENMTILGEDVHVCDEVYSNGGVVLPHKEIKSNILKPEIVM

SEQ ID NO: 164369 - protein, 150 aa, Glycine max
  unsure (1)..(150): unsure at all Xaa locations
  Clone ID: PAT_MRT3847_119443C.1.pep
MKALILVGGFGTRLRPLTLSVPKPLVDFANKPMILHQIEALKAIGVNEVVLAINYQPEVMLNFLKEFEAKLGIKITCSQETEPLGTAGPLALARDKLIDDSGEPFFVLNSDVISEYPLKEMIEFHKTHGGEATIMVTKVDEPXKYGGVVM

SEQ ID NO: 164370 - protein, 381 aa, Glycine max
  unsure (1)..(381): unsure at all Xaa locations
  Clone ID: PAT_MRT3847_119444C.1.pep
FWVGGFGTRLRPLTLSFPKPLVDFAKKPMILHQIEPLKGVPKPLVDFANKPMILHQIEALKAIGVNEVVLAINYQPEVMLNFLKEFEAKLGIKITCSQETEPLGTAGPLALARDKLIDDSGEPFFVLNSDVISEYPLKEMIEFHKTHGGEATIMVTKVDEPSKYGVVVMEETTGQVERFVEKPKLFVGNKINAGIYLLNPSVLDRIELRPTSIEKEVFPKIAAEKKLYAMVLPGFWMDIGQPKXDYISGLTLYLDSLRKKSPSKLASGPHFVGNVIVHETATIGEGCLVGPDVAIGPGCVVESGVRLSRCTVMRGVRIKKHTCISNSIIGWHSTVGQWARVENMTILGEDVHVCDEVYSNGGVVLPHKEIKSNILKPEIVM

SEQ ID NO: 164371 - protein, 71 aa, Glycine max
  Clone ID: PAT_MRT3847_119445C.1.pep
MARDSVLTRVATGAAVGGAIGGAVGAVYGTYDAIRYKVPGLLKIRHIGQTTLGSAAVFSLFLAAGTLIRSH

SEQ ID NO: 164372 - protein, 263 aa, Glycine max
  Clone ID: PAT_MRT3847_119446C.1.pep
MKCFYFSNGGEDEDSVAGAAPPSSRGGGSTSRVSWARSLSLMDTRSTSRSHFDSESTEFSDTVDFHHFLAQRRANHLRLFSFSDLKSATRAFSRALLVGEGGFGSVYRGLLDQNDVAIKQLNRNGHQGHKEWINELNLLGVVKHPNLVKLVGYCAEDDERGIQRLLVYEFMPNKSLEDHLLARVPSTIIPWGTRLRIAQDAARGLAYLHEEMDFQLIFRDFKTSNILLDENFNAKLSDFGLARQGPSEGSGYVSTAVRICLYS

SEQ ID NO: 164373 - protein, 67 aa, Glycine max
  unsure (1)..(67): unsure at all Xaa locations
  Clone ID: PAT_MRT3847_119447C.1.pep
ACEQYRGLRTGFIETSLDEIXTDTGPNWEFNCKIILDRNMVQPYHVPIAQYLCVNPAILFTIKHYGC

SEQ ID NO: 164374 - protein, 237 aa, Glycine max
  Clone ID: PAT_MRT3847_119448C.1.pep
MAFEEHYVSQELKTIPSSMTVTENLDGCFDCNICLDFAHEPVVTLCGHLYCWPCIYKWLHVQSASLAPDEHPQCPVCKDDICHTTMVPLYGRGQGIAHSDHDGKASSYRGSCIPPRPPALGAQSLIATSSQSVPYRNTYQNQHLYQEEDASSSQMLNPGATILAPGFPHLVFGMFGEMFYTRVFGNSENLYTHPNSYHLGESNNSPRLRRQEMQANKSLNRISIFLFCCFLLCLIVF

SEQ ID NO: 164375 - protein, 96 aa, Glycine max
  unsure (1)..(96): unsure at all Xaa locations
  Clone ID: PAT_MRT3847_119449C.1.pep
IXRACXXPLXXXXXXXXXXRXVRTIXPXFYCGIXSXSXXXXVXDXXPTTQSLXTLMCKXXXXXXPFXXXHXXLXXRGLXXRTXXXXDXXXXGAXSX

SEQ ID NO: 164376 - protein, 94 aa, Glycine max
  unsure (1)..(94): unsure at all Xaa locations
  Clone ID: PAT_MRT3847_11944C.1.pep
HASRIKLSLKTVLMLADXMINRVEFVHSKSFLHRDIKPDNFLMGLRRRANQVYCIDFGLAKKYRDSSTHQHIPYRYNDSDTNLGYPFCWTLLPN

SEQ ID NO: 164377 - protein, 75 aa, Glycine max
  Clone ID: PAT_MRT3847_119450C.1.pep
ALPFIGSFSLWNMQRARISSEGPQLRTKMLQTTTVLIYRGSSAARRLILGENSWSLYSPDTESCSLLLSHYYFSL

SEQ ID NO: 164378 - protein, 149 aa, Glycine max
  Clone ID: PAT_MRT3847_119451C.1.pep
QDHFLVILYKGPQGRYCTEMTETRVNTLMVTSYGNYGMLHNIRIHLNCQFLGLGHSIKEHGRFALECSSSLRGGGNKMKLIVKKTGKQSCLPTMMVALNEGHDAISEESTTVKLLALVAATNSKDHNKVIANEIANNPLTIVWPQNQTK

SEQ ID NO: 164379 - protein, 92 aa, Glycine max
  unsure (1)..(92): unsure at all Xaa locations
  Clone ID: PAT_MRT3847_119452C.1.pep
ASCRRQRLRLLFFLISIHPIYWLFLTNLVSPNHINIIIXLQLIITKNNTKTPFLLLNIHIEKPYFTYHQLSQFYLYTLTNYLIYTYNLQICP

SEQ ID NO: 164380 - protein, 179 aa, Glycine max
  unsure (1)..(179): unsure at all Xaa locations
  Clone ID: PAT_MRT3847_119453C.1.pep
AYKDIYEIWLQSQRTSNVRDKTPEREKWTEDVNGKKMALIRQKFMEAKRLSTDERLRQSKEFEDALEVLSSNNDLLVRLLDSQNLYELQSTPVAETKRITVLKPSKMVDNENSGGKGKKNDKQIKKPANVGAGWEKYSPAYSPASQKIDEFAVQPTRIVVLKPSPGRHMXIKAVSSPTM

SEQ ID NO: 164381 - protein, 82 aa, Glycine max
  Clone ID: PAT_MRT3847_119454C.1.pep
DCGCTKNHKVSPHIKMLLGVATQFHANVATRRIHLFISCFMKSFYFRVIIHYVKSGPCWKCLAIFSLQSVGLGRKIKLILLR

SEQ ID NO: 164382 - protein, 30 aa, Glycine max
  Clone ID: PAT_MRT3847_119455C.1.pep
CLPAHCRGDFFTRLEVANLLYLRSPIEHSS

SEQ ID NO: 164383 - protein, 97 aa, Glycine max
  Clone ID: PAT_MRT3847_119456C.1.pep
RCRRQRRRRCKNCRRLGVRDGKTRVISAKTHNGDSDSVDETAKGGCKDGKFCPPIAEVVRHTGCHPIRDRQRSVLQKGKGHFGNIDSDDVPQCNWHQ

SEQ ID NO: 164384 - protein, 47 aa, Glycine max
  Clone ID: PAT_MRT3847_119457C.1.pep
GGGSFLMVEEPHDDTDPSNYFKHLHSNPFPRGDHPLSLICLAHKDSP

SEQ ID NO: 164385 - protein, 55 aa, Glycine max
  Clone ID: PAT_MRT3847_119458C.1.pep
RSSYPCQKSCSVHGSIIKKTKCWITPINVLNFVKAFCSISRGLTRPLFALESFRS

SEQ ID NO: 164386 - protein, 318 aa, Glycine max
  Clone ID: PAT_MRT3847_119459C.1.pep
MSLVIPSSCAAPLHFSQREIRSLSSHQKFASYYSITPFQHKVALSCKTRHIRTHLRNELNVLHKYAVRSKGHDFESINDESLGWDDDEEVEDMGSPWEGAVIYKRNATILHLEYCTTLERLGLAKLSSDVSKTRAAAMGLRVTKAVKDFPNGTPVQISIDVTRKKKKLRLDGIIKTVITLLCNRCCAPSAESIFSEFSLLLTDEPIEEPETIDMGVIFGEDKLTTSGNSGEDDDDDALIDMDDQLYFPPQQRQIDISKNIRDRVHLEITMNSVCGPGCKGMCLKCGQNFNTGNCNCSKEEVQEKSFGPLGNLKEKMQL

SEQ ID NO: 164387 - protein, 138 aa, Glycine max
  Clone ID: PAT_MRT3847_11945C.1.pep
MAVHVPRRWDVKWVVGKALIAFLLLVSVSATSSHQNTDNKTTSPSNGTIGVDHHAKAFYKHHWPSMKFGWRIIVGAVVGFLGSAFGTVGGVGGGGIFVPMLTLIVGFDQKSATAISKCMITGGATATVFYILRQRHPT

SEQ ID NO: 164388 - protein, 78 aa, Glycine max
  Clone ID: PAT_MRT3847_119460C.1.pep
ILLFGCREKKIVSKQLKTREISTQQRRAVSTDSTSEQNHDVEEEQQQQPLSRAIITGHSPEDSFSGNGESHGYPIGNK

SEQ ID NO: 164389 - protein, 167 aa, Glycine max
  Clone ID: PAT_MRT3847_119461C.1.pep
NYWIPRAAGIRHEVRTKHGRPKGYKSKAEEAGNNFDKGGKKRGRPKGSHRKEKESAYHFDSLIERHGLVAEKEGTSAESASKNDTGQEKKIYSCQRSSRITRQAIKQSQSRGLKEKTPAAVTIADENEPNGVTDRSMTNARGQSLQKHKSTRFSKVLSKIMPQNDLQ

SEQ ID NO: 164390 - protein, 136 aa, Glycine max
  Clone ID: PAT_MRT3847_119462C.1.pep
ENKAGSNSINQQNPNNWLGRVRVFWIRFSGSTVVESVIIVFSFIFLSNSLFSRLGVHKVRSEWLGLMIMLALLVIGVLLAQVQGPFFSRMFEEDSVTRSISEHSGSGRTGDLFSGHRHPSETGKENMNDRAQDGDS

SEQ ID NO: 164391 - protein, 44 aa, Glycine max
  Clone ID: PAT_MRT3847_119463C.1.pep
DHFLIEVFTSDIIFKDFSPFFILFYEKSFLSLYRLILIFFYNGK

SEQ ID NO: 164392 - protein, 41 aa, Glycine max
  Clone ID: PAT_MRT3847_119464C.1.pep
FHPKDKKPSAKSFVKLICQHFKFQHSIWKFHLPINQNNMSS

SEQ ID NO: 164393 - protein, 61 aa, Glycine max
  Clone ID: PAT_MRT3847_119465C.1.pep
HFIDNFPCKHGMFIPWYRMRYRSMESCLLDEEIIDLQCNVRGHVQSEVNVVLRYAISAVDS

SEQ ID NO: 164394 - protein, 33 aa, Glycine max
  Clone ID: PAT_MRT3847_119466C.1.pep
LPANNFWVGYFNLKVPIFTLDLAKVPSSKLTIA

SEQ ID NO: 164395 - protein, 65 aa, Glycine max
  Clone ID: PAT_MRT3847_119467C.1.pep
YLHMELRVLLWSTLLSPFQFMKQIYNRKMLSNLFLYHSALDYISNMLRGYTSNKLRRLQSVGMLR

SEQ ID NO: 164396 - protein, 298 aa, Glycine max
  Clone ID: PAT_MRT3847_119468C.1.pep
MATHRLALIIQNPSNDDEFLLVKQSRPPKFHDEEYDSFVDSDLWDLPSAQLNPLLAESEPPVELELAVSHSESQDVDLRKFDIRSALNEVFGQLGFGAVDGGGWKFHKYVKEAAFGPDLPVNTVFIVGKLVAAEDKDFRDSYRWKSVRSCLNWILEVKPHGDRVGPLVVIGLINESSISTKWKVPPAINYQEYPPGNIIIPMGSRTLRPFHTTNLVVFAPENVSNDSGENNFIVRGDALIVDPGCLSEFYGELEKIVTALPRRLVVFVTHHHPDHVDGLSVIQKCNPDATLLAHEKTM

SEQ ID NO: 164397 - protein, 216 aa, Glycine max
  Clone ID: PAT_MRT3847_119469C.1.pep
MEVLNPIEGKTYKLPVGYRFDPSDEILAGYYLRKRIMAQPSPNDLIQDCDVYQTVPWELPGGGSKNLNWQRFFFHDLRTRVFENLNKREAGNGQWRTIEKAQDFELSKEQVVARKNVLAFWEAKGNGFAKSNWVMHEFRLVSKSHPSMVSAMAVYRIFKTKKEGRKGKKAKRSEGETSSSSSSEEEAMDETPIVIDFTMENGTVTGPPSPATSEAS

SEQ ID NO: 164398 - protein, 119 aa, Glycine max
  unsure (1)..(119): unsure at all Xaa locations
  Clone ID: PAT_MRT3847_11946C.1.pep
RVERQLGDTGVNGNGLLRYQQCSVSPEIVEVQDDSVKVDSKESMITEGTILWLEDSDWQKGYQIKEVINTSELTYFIASHVEEPGKNLVLXVGSHPSQLGTAMXRYALWXPVQXXTKYD

SEQ ID NO: 164399 - protein, 84 aa, Glycine max
  Clone ID: PAT_MRT3847_119470C.1.pep
TTGNTPRPASIVPQPVSGCLINAKSGVCWECSLFSIMLRSTHLWTILVSPAPSMMVDGCPYLYAMVHDSSVSIFVCYGIVDTEL

SEQ ID NO: 164400 - protein, 108 aa, Glycine max
  unsure (1)..(108): unsure at all Xaa locations
  Clone ID: PAT_MRT3847_119471C.1.pep
SPNLTEQISEKYQNKTFPISTLDESSPLLDQNRPREEPHIGLEPHSVSDYTANSVEQLPPSNFTPDVVVTSISKPDENSGHLHCVAPTIALSSAGSNXDELPPVSGPG

SEQ ID NO: 164401 - protein, 35 aa, Glycine max
  Clone ID: PAT_MRT3847_119472C.1.pep
NPLTSGGDLAPRNMAACVSFNRTSQSVTSRERVGV

SEQ ID NO: 164402 - protein, 76 aa, Glycine max
  Clone ID: PAT_MRT3847_119473C.1.pep
GDPLTKNFGGGLAAIKSFRGPFKALSFVFDLHKLTLLEMWHASLLETWISWIDTTTFTNGNFNPPSLICPQIRTGK

SEQ ID NO: 164403 - protein, 83 aa, Glycine max
  Clone ID: PAT_MRT3847_119474C.1.pep
FKRFEGASDNGCEFTKLSEPRRMIRSFMMERWGFEKTNIMKEDWLIVYSDQSFVMLITRPKGGIRSLCIYLDEVNACIDLLFY

SEQ ID NO: 164404 - protein, 60 aa, Glycine max
  Clone ID: PAT_MRT3847_119475C.1.pep
CVLAGGVINELLSGRYLYIWRVWKNECLCSWMSDIMMAIPMNHELHMHHHPSVSAEKYRG

SEQ ID NO: 164405 - protein, 59 aa, Glycine max
  Clone ID: PAT_MRT3847_119476C.1.pep
VTKMLHLHKFECLLSIISILGVKLWRSQILLSEALLKMRLNHHADVAHIADAEIPPVRC

SEQ ID NO: 164406 - protein, 65 aa, Glycine max
  Clone ID: PAT_MRT3847_119477C.1.pep
SEHVGPLRNVQPRSDTFCRSPYHTPRKDEFYPSGHGHWMHMIGKLHIVTSWQPSSGGQLQIGSRS

SEQ ID NO: 164407 - protein, 107 aa, Glycine max
  Clone ID: PAT_MRT3847_119478C.1.pep
MRGKAGSGKTILFVCIACFLAGTLFNGQMWTRPSNHENENTLLRLPPRPDCDHKRKLIEGKPGDVMEEVVKTHQAIKSLDKAVSTLEMELTASQTGGRQRSSNHSVQ

SEQ ID NO: 164408 - protein, 65 aa, Glycine max
  Clone ID: PAT_MRT3847_119479C.1.pep
FPSAKKQTLGSLSLKGPRWGVNERVHPRVRFLSQYNLEYTSQRTWPSLLLLTPPSKSAYAEFKKM

SEQ ID NO: 164409 - protein, 49 aa, Glycine max
  Clone ID: PAT_MRT3847_11947C.1.pep
NNWEGNNESDESHIFSTKEKCVLISLSGYHFIKKFVTNHSPSDTGNAWQ

SEQ ID NO: 164410 - protein, 82 aa, Glycine max
  unsure (1)..(82): unsure at all Xaa locations
  Clone ID: PAT_MRT3847_119480C.1.pep
NHPSSPKTIHFXTPTFKWRISITYIPDFSKPPVKLPYPQQISITVTENIXSRYTTVITPQNFNLFNVHIAMAGTAIYQLSRT

SEQ ID NO: 164411 - protein, 80 aa, Glycine max
  Clone ID: PAT_MRT3847_119481C.1.pep
LSADVTKGLGSRPELLEETQEDVTSGIELNLSERTINPSAGKRWANPKKNLPNWPQGLRPNPEKKYISGHRLYRFPKLSL

SEQ ID NO: 164412 - protein, 52 aa, Glycine max
  Clone ID: PAT_MRT3847_119482C.1.pep
IQTFPASFFNPNSNLKAGLGCPGLDTSDLIAISGAHTIWRTHWLFILWRWTN

SEQ ID NO: 164413 - protein, 166 aa, Glycine max
  Clone ID: PAT_MRT3847_119483C.1.pep
TRIPTAQNLVSASHPPLRKMSRKAKFSRERASLGISNLMPFTSSHGHSTHVEPPLQPSQVAQSCAPTITLVPPSIATTQNMVSPSDPLLHKVPHKAKHSKKRGSHDISNLMPHASSQGHSRYVEPPLQPSELAQFHAPTLSHIPSSIPIALDPLSRCTSPTFVHPS

SEQ ID NO: 164414 - protein, 55 aa, Glycine max
  Clone ID: PAT_MRT3847_119484C.1.pep
MSWQAYVDDDLLGEIECKQVTHAAIIGQQRNVWGQRSDFAQFKPEEMTAKHIDCN

SEQ ID NO: 164415 - protein, 65 aa, Glycine max
  Clone ID: PAT_MRT3847_119485C.1.pep
TPLVHQEQFHHHFGHTQLFIYSNVTAYPTKSFQMLITTMIINYQLYFFDISTCTNFISILIDNSV

SEQ ID NO: 164416 - protein, 85 aa, Glycine max
  Clone ID: PAT_MRT3847_119486C.1.pep
IFGFLAPKGFPRKKTLTPFPFFFTRVYFFAACTSEMLGPPITLSRPGGKFGPSRPVVWTVYFCPPGFFFSLFPPFFFLVCFFILY

SEQ ID NO: 164417 - protein, 73 aa, Glycine max
  Clone ID: PAT_MRT3847_119487C.1.pep
DLTTFPKCRAKVFLPTSPQVFKGEKFAKHLDPPPPLVGWGLKNIPICFCFLKFHHPGFLGSVFGPQWKLRGGT

SEQ ID NO: 164418 - protein, 117 aa, Glycine max
  Clone ID: PAT_MRT3847_119488C.1.pep
IQFLVTHFLKNISLQFRGWQIGFSVAGEAECVGNVLDGDMRGGVGFARRFHRAPCAEVMLLTLRCHSCRILPLGKWTPTSDSSEEERRFGEEGGEGSGGELVVTGGGGAFVAVVGGD

SEQ ID NO: 164419 - protein, 49 aa, Glycine max
  unsure (1)..(49): unsure at all Xaa locations
  Clone ID: PAT_MRT3847_119489C.1.pep
APLEVSKECMGKGWVPNFSPIKSFVNGLPGAFKVDXAKEVFYPIKEKFS

SEQ ID NO: 164420 - protein, 50 aa, Glycine max
  unsure (1)..(50): unsure at all Xaa locations
  Clone ID: PAT_MRT3847_11948C.1.pep
KAERLYESQGGPKSCPKLKMDMGPMGYEIGAXGTAYTKWATQMAMGXGTG

SEQ ID NO: 164421 - protein, 55 aa, Glycine max
  Clone ID: PAT_MRT3847_119490C.1.pep
EGIINITITDLHYTAKGGWFILKALRIHRSMTRHMLHLILIRGHLTHKIKGFGFQ

SEQ ID NO: 164422 - protein, 86 aa, Glycine max
  unsure (1)..(86): unsure at all Xaa locations
  Clone ID: PAT_MRT3847_119491C.1.pep
TRPLFYLSEQRNARSDARAPSHRARCSCCKVQTLNARVSRISFALQWSFLNVTDVLIISRLNGCCSEVHFWTASYIPGETXLDLPA

SEQ ID NO: 164423 - protein, 146 aa, Glycine max
  unsure (1)..(146): unsure at all Xaa locations
  Clone ID: PAT_MRT3847_119492C.1.pep
RETKVPLPNSKGRLSKENFEGMVQKLXKSKAGDENQKNKVSSKNPLESYAFTMKPPVEVEKLQGKINFGAHQKFFAKGNEIITWLDKTPPPKKEDFXPPQKKLEKVCTPFFSKLFQSAGGIPGGMPGGFPGGGAPPSGGVFSGPPL

SEQ ID NO: 164424 - protein, 27 aa, Glycine max
  Clone ID: PAT_MRT3847_119493C.1.pep
NHSFIYIITIYKVKPCILYIRTTKPER

SEQ ID NO: 164425 - protein, 48 aa, Glycine max
  Clone ID: PAT_MRT3847_119494C.1.pep
CPWPRRHSREFRFCFFLFRISYVVRNLKGTRVTETNTIKPNRNQMEKF

SEQ ID NO: 164426 - protein, 50 aa, Glycine max
  Clone ID: PAT_MRT3847_119495C.1.pep
TLNSFSYSKPSIPKISFKPNPFLILNHLTPQIPKTFLNPIKIFYSQISPP

SEQ ID NO: 164427 - protein, 195 aa, Glycine max
  Clone ID: PAT_MRT3847_119496C.1.pep
VDKHILARQTGLSRSQVSNWFINARVRLWKPMVEEMYLEEEKEHQNDVASSEGGGINILGDQKPTQARLVRIDSECMSSIVNNPDDKNDTKSGKTIQNDNQMDAFGSVELDFWSYTHQYSSGHSGGVSLTLGLQQHGESGVSLAFPPAATQSSMFYPRDQIEDCQTVQYSLVDGKGQNMPYRNLMGTHLLHDHLV

SEQ ID NO: 164428 - protein, 58 aa, Glycine max
  Clone ID: PAT_MRT3847_119497C.1.pep
ERNRKSFKSDKRVIYQKGECSANKKVSGKDNLFTKSVAPHREVIIFPWKSRTPRSRNK

SEQ ID NO: 164429 - protein, 251 aa, Glycine max
  Clone ID: PAT_MRT3847_119498C.1.pep
MLPGTTRGETPRLRIVDQSLRQQRAFQQISIMETHPWRPQRGLPERSVSVLRAWLFEHFLHPYPSDVDKHILARQAGLSRRQVSNWFINARVRLWKPMVEEMYLEEEKEQENDVASSDINVPEEDEKPTQEAPLLRIDSECMSSIVNDVTKSGKTIQNDNQMDAFGSVELDFSSYTHAHHSSGVSLTLGLQQHGESGVSLAFLPAATQSSMFYPRDQIQECQTVQYSLLDAEGQNMPFRNVMGTHLLHDLV

SEQ ID NO: 164430 - protein, 82 aa, Glycine max
  Clone ID: PAT_MRT3847_119499C.1.pep
KKNGGSKQRKFLHHKGEKKTSSFFQKKKGQRYCFSNPKRNKKGLLAFSLMKDTSLVFNKGSNIFEPKYELTYKGRQKNKFSI

SEQ ID NO: 164431 - protein, 110 aa, Glycine max
  Clone ID: PAT_MRT3847_11949C.1.pep
ARMFNWIKWSRPKLQDVRNIYLLMWLYAPSGLLGLNGSDSLNEEVALSAILHFFNPLLCLCFNNGVSCLALDTSTARSGSRAGGRRSAAELRGQETAIRGEKVAEGSAKE

SEQ ID NO: 164432 - protein, 29 aa, Glycine max
  Clone ID: PAT_MRT3847_1194C.1.pep
FIQLIDFVLFFITQKGFLVDCMNLFCFGY

SEQ ID NO: 164433 - protein, 143 aa, Glycine max
  unsure (1)..(143): unsure at all Xaa locations
  Clone ID: PAT_MRT3847_119500C.1.pep
FCPFVRPRVRYSSGDDYVKPYSSGSKLKSVLAGHKISITDGFDKTSANLDCRQISHCDFLKRNFKQMSNVLWVAPRDMASLWTQLHYGSXYNPEMQEAYTVNLETVPREXSLHSPYEARHSRKRALSRIVWVQKADVPTITQK

SEQ ID NO: 164434 - protein, 137 aa, Glycine max
  Clone ID: PAT_MRT3847_119501C.1.pep
SNSGLSVSPVVVPVSEEGCLKQEALLQQLKIGSSVNGVQDVGWLEQIKSTLLVPVNQRFVLDVTGRVTIETVRSFVAFLLWRISDGFKSSVSKVHEEVLGKGLEVVRYVGAKSSVILTLCLALYLHIMGGSRILLPA

SEQ ID NO: 164435 - protein, 54 aa, Glycine max
  Clone ID: PAT_MRT3847_119502C.1.pep
PPVKNALEWLDHTQSVEKKDFIKNLKEVETVCNPIINFVFQKSGEPPDGAGGKG

SEQ ID NO: 164436 - protein, 106 aa, Glycine max
  Clone ID: PAT_MRT3847_119503C.1.pep
VKHIIDLALLCTQASLVISPTMSQVVLLLSSNALEHMSPPMPIFIESLLQPPRDIYASPSSSTSKARASSYIGQALSLHDEFDAQVIVANLCWIAYRRMISNERVL

SEQ ID NO: 164437 - protein, 69 aa, Glycine max
  unsure (1)..(69): unsure at all Xaa locations
  Clone ID: PAT_MRT3847_119504C.1.pep
GSKNCVQSEAVAWLTAYEQIKKNNSLRRVPATSTRXTEKAAAATLHHIILXAIEAPEKNVYEAYVCSIS

SEQ ID NO: 164438 - protein, 153 aa, Glycine max
  Clone ID: PAT_MRT3847_119505C.1.pep
TGIDSIHRPCEPPLRFPAALYTAVVTNAHNVIPNAMDALNSEENGGGDAGPGTINNIAGDADGEPNIILAKIEANDEANYRYSYSAAGADTLANTTLQRITLHSKSNGGSNGSFTGKLTAKCHTKGNAHPIQDQLTTGEAHADAIYDDIEANL

SEQ ID NO: 164439 - protein, 159 aa, Glycine max
  Clone ID: PAT_MRT3847_119506C.1.pep
MIRLRSKRFSRSSSKPGNNGSKAASSSPEKDCKSIGEIKWELRPGGMLVQKRESNQSSGEGVITIRVSTVSQWHDINIDATSTFGELKMILSLVTSLEPREQRLLFRGPENRDNEFLHMVGVRDKDKVLLLEDPAIKEMKLLGMARGQPINNTCCTISA

SEQ ID NO: 164440 - protein, 51 aa, Glycine max
  Clone ID: PAT_MRT3847_119507C.1.pep
KLINPRFRPPTATGTKKIFQLGNQHPILFSFSFLGKVPMVVVMGKEWLKWP

SEQ ID NO: 164441 - protein, 65 aa, Glycine max
  Clone ID: PAT_MRT3847_119508C.1.pep
PRCMSHFDQTYDVVANHAYPYDAAISMRSRQQWICKARSSTSECCGSALPSLIYDRASTGIFLIG

SEQ ID NO: 164442 - protein, 66 aa, Glycine max
  Clone ID: PAT_MRT3847_119509C.1.pep
RLREDDRWALVFQVELSFLAILVSLHQFHWFLLEFNSFCKIISLNLKKEKDKKNLMSRNKVYYICK

SEQ ID NO: 164443 - protein, 430 aa, Glycine max
  Clone ID: PAT_MRT3847_11950C.1.pep
MRTLHNYTPTLTRPQCTTLVQSTKPLQKMEKMMNMPQLRSSSLPPLSKKVGKRWKEYQGMNNWDGLLDPLDENLRAEILRYGHFVEAAYKSFEFDPSSPNYATCKFPKNTLFEKSGLHNTGYKVTKHLRATSGIKLPSWVDKAPSWVAAQSSYVGYVAVCNDKEEIKRLGRRDIVVAYRGTTTCLEWLENLRATLTHVSVPSITTETTTEPCSMEENGAMVESGFLSLYTSTVSNNKSFMSLQDMVRKEIGRIRKTYQGENLSLTITGHSLGAALATLTAYDIKNSFLQPPPLVTVISFGGPRVGNRSFRRRLEEQGTKVLRIVNSDDVITKVPGFVFDDVDKTEDVAACNGGVQVAKFQRWIRKRAEEVQWLLYSEVGKELRLCSRDSPYLRGVNIATSHDLNTYLHLVDGFVSSTCPFRATAKRFLQH

SEQ ID NO: 164444 - protein, 219 aa, Glycine max
  unsure (1)..(219): unsure at all Xaa locations
  Clone ID: PAT_MRT3847_119510C.1.pep
MASLWTQLISMASLLLSLARWVPVSGDSSNVLLLPSPHHEGSRPAMILPLHHSVPDSSFSHFNPRRQLKESDSEHHPNARMRLYDDLLRNGYYTARLWIGTPPQRFALIVDTGSTVTYVPCSTCRHCGSHQDPKFRPEDSETYQPVKCTWQCNCDNDRKQCTYERRYAEMSTSSGALGEDVVSFGNQTELSPXRAIFCCENDETGDIYNQRADGIMGLG

SEQ ID NO: 164445 - protein, 43 aa, Glycine max
  Clone ID: PAT_MRT3847_119511C.1.pep
LCSRCYCTLGLCSNKAPGALLDSLPILCSPSAYGPSALSMTVF

SEQ ID NO: 164446 - protein, 75 aa, Glycine max
  unsure (1)..(75): unsure at all Xaa locations
  Clone ID: PAT_MRT3847_119512C.1.pep
XSXRPLSFLFFWFFLFSFFFFLFFFFFLLKGLKYPLLSLICWGNRTLPMLKSQFDSFSLFIKGQGATLTFFKNVT

SEQ ID NO: 164447 - protein, 166 aa, Glycine max
  Clone ID: PAT_MRT3847_119513C.1.pep
YGCEKTTEGVEGKGNNSVDDWIGVCRKIRLFYDLNGGRSLVELVGGNNGVGVGVILEHGEEELVQATEYFCSFGAKKEDVARLIVDGRELLELDLEARVVDVVKLLKYFGMSSDDVEDVRRDYAHVLGTVKMGNLPNVMRALGLHEWFFDKIKDGNHQLLVSFARA

SEQ ID NO: 164448 - protein, 93 aa, Glycine max
  Clone ID: PAT_MRT3847_119514C.1.pep
TKGPGNYQRERPWGTKFFLANNNIFFKSIGGLKPKSLTKGLGNYKRSLLIRGRLEKKKRGKLLGFKAFQSPPKTYFQRKKFNPQAPLKLRGPP

SEQ ID NO: 164449 - protein, 33 aa, Glycine max
  Clone ID: PAT_MRT3847_119515C.1.pep
NLSRTTLIMKQLNCIISSMKIKSVCRLYTVCEI

SEQ ID NO: 164450 - protein, 60 aa, Glycine max
  Clone ID: PAT_MRT3847_119516C.1.pep
PPGPNLVVLVLGPLVGLQDYDLGTIFFYCTSLFPHKEMILTFLALKKLLFKEGGKNQEKK

SEQ ID NO: 164451 - protein, 77 aa, Glycine max
  Clone ID: PAT_MRT3847_119517C.1.pep
CRLLPHDLNLAVATASVTKLRDFGHEERRDGHNSEVQRNAPLRSGSQLLHSTTIAHKSGAISYYATNHNNHIIILQI

SEQ ID NO: 164452 - protein, 68 aa, Glycine max
  Clone ID: PAT_MRT3847_119518C.1.pep
EKYLQLPIHIFHQLFHKSIQDNIPYYINPQHTYIQPTIYYLTYTSPISHNKCYNPIFFSTIHTYLNHS

SEQ ID NO: 164453 - protein, 64 aa, Glycine max
  Clone ID: PAT_MRT3847_119519C.1.pep
LVDSCVQLSLHLFFTHLPQLPLIPPICDSSLNRQTWFACRSLPVISGLTQGSHLYFGLGRYIAF

SEQ ID NO: 164454 - protein, 157 aa, Glycine max
  Clone ID: PAT_MRT3847_11951C.1.pep
LEAISSVLFAAPRCADLPELLQVQSLFASKYGKDFVSAATDLTPDCSVNGQLIELLSVQAPSQEKKLKLLKEIAVEHKLDWDPTASETKSFKKHEDLLNDPIQFCSQCVSKLPLPEEKHTEVDLQSSSQSGSLGSDKHKPNTSFDKKTVNSLWYSSQ

SEQ ID NO: 164455 - protein, 60 aa, Glycine max
  Clone ID: PAT_MRT3847_119520C.1.pep
MVTIVNCHLMIKRMNPYIEIYLYVKKLLPMHRSQAYFRESAFLIHCKMPRYLLAVPTTTC

SEQ ID NO: 164456 - protein, 121 aa, Glycine max
  unsure (1)..(121): unsure at all Xaa locations
  Clone ID: PAT_MRT3847_119521C.1.pep
LHRLPAKDDSERFEVRQHDDFHSLTRLEEEGVXLPYSRRAGSCVTCVXQIAKGDVDQTDGSCLDDEQTQSGCGLTCVAVPRSDVCHCYTQRWRDRMIDLYHNVVLCIALLMPSIYDVPGYW

SEQ ID NO: 164457 - protein, 74 aa, Glycine max
  unsure (1)..(74): unsure at all Xaa locations
  Clone ID: PAT_MRT3847_119522C.1.pep
MLLLMLRSTDAGHNYRDALRKSILFFNXQHFGKLPVDQRLRWRHDSALHDGPTAGMDLTERYYDSGDHIKFWFP

SEQ ID NO: 164458 - protein, 85 aa, Glycine max
  Clone ID: PAT_MRT3847_119523C.1.pep
HSLLKWTVSFFISLENEADDTIDSEAIPDKLAQCGQIQEKAVVKWPHHELLTARSTQVRPATTLLAARRPYLYAVVHDSSVSTIP

SEQ ID NO: 164459 - protein, 46 aa, Glycine max
  Clone ID: PAT_MRT3847_119524C.1.pep
AEDILGNPGNSGKGGVYYYSERGDRLIDLASFHDKLWQVGPLIIKY

SEQ ID NO: 164460 - protein, 67 aa, Glycine max
  Clone ID: PAT_MRT3847_119525C.1.pep
PPGKQTMFFFFPFTYRKNTITCLHLEGILFSAFKASPRNARGFSDSGKLQSASKTSHPLPTSPLLNK

SEQ ID NO: 164461 - protein, 266 aa, Glycine max
  Clone ID: PAT_MRT3847_119526C.1.pep
MAAKRLIVVVESTAAMGPYWETILRDHLDKIIRCFGENDSTVQNSCSNVEFALVSYNTHGCYSGCLVQRTGWTRDPDVFFMWLSSIPFSGGGFNDAVIAEGLAEALVMFPNSQSGDPNQQNVDMHQHCILVAASNPYPLQTPIYVPQLQNLEQSETIDSFPGNRLYDAEAVAKAFPQFSISLSVICPKELPKIKGIYNAGNRNSKAADPPVLAKTPHFLILISEGFREAQGALKVGEGYSNSSESEKVAAKWPPVMQIVQLISQAT

SEQ ID NO: 164462 - protein, 47 aa, Glycine max
  Clone ID: PAT_MRT3847_119527C.1.pep
TWLKNLDIYHLIIHMINGMCVLEIVSEIKTKTTTAGDDVRKGWTCVL

SEQ ID NO: 164463 - protein, 50 aa, Glycine max
  Clone ID: PAT_MRT3847_119528C.1.pep
NVFIYINVEISRKYIVPDYIIMSPNLDFAMWGRLIKKLVGIVDGSLAEES

SEQ ID NO: 164464 - protein, 70 aa, Glycine max
  Clone ID: PAT_MRT3847_119529C.1.pep
AIFYFFFFCGFFCWGFCEHPEGKTLGWGELKGGENPRPGQICMQRGGRGQTQNPPKKEGNGGLRRGSLRF

SEQ ID NO: 164465 - protein, 42 aa, Glycine max
  Clone ID: PAT_MRT3847_11952C.1.pep
ESLSRIRPCSLVRRTALYFLFFSECLFKHIQSPNVWNMCKHD

SEQ ID NO: 164466 - protein, 86 aa, Glycine max
  unsure (1)..(86): unsure at all Xaa locations
  Clone ID: PAT_MRT3847_119530C.1.pep
NQHRTTVLYFYLPKSEYIIYKEKNIITNCGGAFFFIMATAKRDQPLASQRTSWCRCCKGSRFAHHRLSIRGCHLFNTXXEALSCTL

SEQ ID NO: 164467 - protein, 112 aa, Glycine max
  Clone ID: PAT_MRT3847_119531C.1.pep
GLHGLQGPLHMREDILILMGGGLRRTHTQRWLKKLMEMCCYYQGNMMTVVQEITPEHVHNMLDEELSKGDDTYDHLRSAHGDRHDHYGDADIHRAHCMDTYGIEYRHDGRRK

SEQ ID NO: 164468 - protein, 123 aa, Glycine max
  Clone ID: PAT_MRT3847_119532C.1.pep
VGDAVALIKGVGKNLRRKERRVRIEQIRASLGLSDSQRTPSPGESLKDFYRRTNMYWQMAAHEHTQHTGKELRKDGFDLAEARYRELKPILDELALLEAEQKAEEAEGPETSAKKRGKKKTRN

SEQ ID NO: 164469 - protein, 142 aa, Glycine max
  Clone ID: PAT_MRT3847_119533C.1.pep
MAAATTICYGPSSYILLGSNLLRQGHLKNTSFAHRFSPSRSFLCNGFVPRKPVLGRNSFWVSKTMDESARTSAFRDGKGDETIQVFEQEAFIDGSTPFQSKFLSPEVEYNLNRMSKWIVTALFGGFILWRHDAEALWFTAGS

SEQ ID NO: 164470 - protein, 71 aa, Glycine max
  Clone ID: PAT_MRT3847_119534C.1.pep
PLERPLFFFFFFFFFWGEEFFLLTYTLMVACHHVQNSMLKLRKVIQCQFLIKTYGAGFLLEGANYTYTILS

SEQ ID NO: 164471 - protein, 105 aa, Glycine max
  Clone ID: PAT_MRT3847_119535C.1.pep
KLNFKPSMTLRFIVRNLYVAFTMFVAITFPFFGGLLGFFGGFAFAPTTYFLPCVMWLAIYKPRRFSMSWCANWICIVFGLLLMILSPIGGLRSIIISAKDYKFYS

SEQ ID NO: 164472 - protein, 363 aa, Glycine max
  unsure (1)..(363): unsure at all Xaa locations
  Clone ID: PAT_MRT3847_119536C.1.pep
LSWIITLYTLWQMVEMHEMVPGKRFDRYHELGQYAFGEKLGLYIVVPQQLVVEIGVNIVYMVTGGKSLQKFHDTVCDSCKKIKLTFFIMIFASVHFVLSHLPNFNSISGVSLAAAVMSLRYKTPLLMTLLYSYXAKSTSGTVFNFFSALGDVAFAYAGHNVVLEIQATIPSTPEKPSKGPMWRGVVVAYIVVALCYFPVALIGYWMFGNTVEDNILISLEKPKWLIAMANMFVVIHVIGSYQIYAMPVFDMIETVMVKKLNFKPSMTLRFIVRNLYVAFTMFVAITFPFFGGLLGFFGGFAFAPTTYFLPCVMWLAIYKPRRFSMSWWANWICIVFGLLLMILSPIGGLRSIIISAKDYKFYS

SEQ ID NO: 164473 - protein, 57 aa, Glycine max
  unsure (1)..(57): unsure at all Xaa locations
  Clone ID: PAT_MRT3847_119537C.1.pep
HLGGEDFDNSMLSHFVQEFKRKYKYYISXSTPATLRKLNSACDRSKSTLSSTVPTYQ

SEQ ID NO: 164474 - protein, 61 aa, Glycine max
  Clone ID: PAT_MRT3847_119538C.1.pep
MNSEEFMSHGDDHVSLAAQDSVQVCAGHHALTRTGLNNTWCARSSTEWQQPSERFPRAVPD

SEQ ID NO: 164475 - protein, 68 aa, Glycine max
  Clone ID: PAT_MRT3847_119539C.1.pep
ARAARRRQKGSYIFSFITTFQILIFLFFFLIYTQRVLRERGAKAPACPPLDPSLVSGAVVVSEVVIMC

SEQ ID NO: 164476 - protein, 95 aa, Glycine max
  unsure (1)..(95): unsure at all Xaa locations
  Clone ID: PAT_MRT3847_11953C.1.pep
HSPCELQLQLIELLSVQAPSQEKKLKLXKEIAVEHKLDWDPTASETKSFKXHEDLLNDPIQFCSQCVSKLPLPEEKTLKLIFNHQAILDHLDQTT

SEQ ID NO: 164477 - protein, 97 aa, Glycine max
  Clone ID: PAT_MRT3847_119540C.1.pep
YSRTYRAVYLGSEVVSNETPGPKMGIHGWGCVLSGSRFRQRVYAPDDHKFSIPESLVIFTPLDCGFLCIFQVGEEKWIWGYNIFKAICSVKGPKGDI

SEQ ID NO: 164478 - protein, 48 aa, Glycine max
  Clone ID: PAT_MRT3847_119541C.1.pep
QRRPGYTLFLTECERTYDTTKVSYHSGEFKGAEKMSLVHGCLLVMQGK

SEQ ID NO: 164479 - protein, 39 aa, Glycine max
  Clone ID: PAT_MRT3847_119542C.1.pep
SSPHSAARSRLNDMAVAMTLMCCSSSHVTCTFTVAHGCG

SEQ ID NO: 164480 - protein, 60 aa, Glycine max
  Clone ID: PAT_MRT3847_119543C.1.pep
VILLVNLLEMLGTTVWSICIGGFKLTYKPSMLIDGRLLLQFHIFYPVHFYLSCNVHVCGS

SEQ ID NO: 164481 - protein, 82 aa, Glycine max
  Clone ID: PAT_MRT3847_119544C.1.pep
FVLVKLYKKFSYKNYFFYGPHCISSPSPKSIFWWGWWGKTQGIPVRKESFYFPKKHFICSLYINWDSGPAKITTFCFNIRPL

SEQ ID NO: 164482 - protein, 68 aa, Glycine max
  Clone ID: PAT_MRT3847_119545C.1.pep
MPWDARRPGGGADGGPEASGAARSRAQKQCRKSSFAFYQAVRDLLPVWLLEDMRASEAFHWDERGRAR

SEQ ID NO: 164483 - protein, 125 aa, Glycine max
  Clone ID: PAT_MRT3847_119546C.1.pep
ISTNVLQSRFYLPSIFKDAYVHAQSCNKCQRTRSVSKRNELPLHTILEVEIFDYWGIDFVGPFPPSFSNEYILVVVDYVSKWVEAVACQKSDAKIVIKFLKKQIFSRLGVPWVLIDNGGSHLCNA

SEQ ID NO: 164484 - protein, 123 aa, Glycine max
  unsure (1)..(123): unsure at all Xaa locations
  Clone ID: PAT_MRT3847_119547C.1.pep
ANQDGGLLQEKLVVYVVGTYFXILVGCAYVAENLDKVKLLTQPAIPIEWGLTVIVAGHSVDHIWGAHSNPADTIADTTTIRFALKQVPHYVIAQDGXVTLASGTIRHLFHGKTDHLAGTLPFG

SEQ ID NO: 164485 - protein, 71 aa, Glycine max
  Clone ID: PAT_MRT3847_119548C.1.pep
EPSQERTHTTRQDSATTHNNHNKLPSQHHDDDSLSNTATDPNLNYKPEIRIQTHPGDRAYNRLSNATKLTN

SEQ ID NO: 164486 - protein, 38 aa, Glycine max
  Clone ID: PAT_MRT3847_119549C.1.pep
TAGPAIILGNYQQQNFYVEYDLENERFGFGPRNCKRKA

SEQ ID NO: 164487 - protein, 66 aa, Glycine max
  Clone ID: PAT_MRT3847_11954C.1.pep
PPQPLVMGGAPVKAQFKSAEMGVPPENNGRKREGKCPGNPGTCKRGVGELKLPPKMALRKKDKNYM

SEQ ID NO: 164488 - protein, 57 aa, Glycine max
  Clone ID: PAT_MRT3847_119550C.1.pep
QVVVLSLYVSAQRGIPLNPAKGHVVPFHHAASKAFMLSPLAFPLLVFQEPINKMESI

SEQ ID NO: 164489 - protein, 82 aa, Glycine max
  unsure (1)..(82): unsure at all Xaa locations
  Clone ID: PAT_MRT3847_119551C.1.pep
RISFFPHQASAKTLLLPGTFSRHLNTHLTVLGRXLADNAEGSCWPCICPSPFDLEXPPIFRATPFLFHSRIWLGDTFFRFTS

SEQ ID NO: 164490 - protein, 83 aa, Glycine max
  Clone ID: PAT_MRT3847_119552C.1.pep
KKKKKKKKKKKKKKEKKKKKKKKKKKKKKKKKKKKKKKIKKYKERKKNWRKKIKKMLPVRNCDAVTIPNNIIAGRIKGKTWRA

SEQ ID NO: 164491 - protein, 55 aa, Glycine max
  Clone ID: PAT_MRT3847_119553C.1.pep
KLWAKPIHRTPSLEKPMRPNCKSYLSNIHAPANPLHQSGLFDAIIHHSQIHFRNA

SEQ ID NO: 164492 - protein, 112 aa, Glycine max
  unsure (1)..(112): unsure at all Xaa locations
  Clone ID: PAT_MRT3847_119554C.1.pep
GFLLLLRVCIPLPFISSSSGRRLGGVXLSQHQNNPFCSHVHIVKPKPLFFSPNPTNKQQQKQSFLSIFSTPQHQKRKKKRKEKSKLFRTQFGTENGCRRLLQDPQDEPQCHG

SEQ ID NO: 164493 - protein, 64 aa, Glycine max
  Clone ID: PAT_MRT3847_119555C.1.pep
FLLSLSIFNSIMAFKKTLAQRLLNITKISNYRISSSEVRSPNPTKADIAPDPGDNRSSSTRGPP

SEQ ID NO: 164494 - protein, 75 aa, Glycine max
  Clone ID: PAT_MRT3847_119556C.1.pep
TVSSFISFTTPFLYGTSAQNPFDNTTFPGNSTIGTHARNKPSPTHVVPKGHPIPTLCMRSSSGALVHPRERDNAG

SEQ ID NO: 164495 - protein, 101 aa, Glycine max
  unsure (1)..(101): unsure at all Xaa locations
  Clone ID: PAT_MRT3847_119557C.1.pep
QHVCLVPCSLSQTLRAFPGSCDRGLERRPASIMAPSCKMICFLWXXLASTLRLLXDSDQPGAPAXLTPXXRYNNYPGKSLDAFASSKXXSSRIPSLRTRAX

SEQ ID NO: 164496 - protein, 61 aa, Glycine max
  Clone ID: PAT_MRT3847_119558C.1.pep
QLNTLRRWGRNFKNKTKQILTHTILWRKQRPTESQTMVILSQVAIICSIRWVCILRVFSFI

SEQ ID NO: 164497 - protein, 103 aa, Glycine max
  unsure (1)..(103): unsure at all Xaa locations
  Clone ID: PAT_MRT3847_119559C.1.pep
MALRITATRLFLQIASAQIGWKMVMHGDMFQXLFPGLFEGHDGVSSFFVKDTVQVDQNASRDIGYELSRDDWNFLILHYLGLDHVGHIGGRNRYHHYRFTLYM

SEQ ID NO: 164498 - protein, 124 aa, Glycine max
  unsure (1)..(124): unsure at all Xaa locations
  Clone ID: PAT_MRT3847_11955C.1.pep
KIPVPPFFKDDVFPNLPGAFSPFDVGAPPSHFPKKWVGGLFFFSPHGVEPFRLWPXKNIALFPKAFVFGPFLGFFYVPAQGAFPQMPFFGHALGPWPPHFFXRNWGFXTLFPPDVQWPFCPHLN

SEQ ID NO: 164499 - protein, 284 aa, Glycine max
  Clone ID: PAT_MRT3847_119560C.1.pep
MGTRTNFYKNPSISYKKRLSISSVLQNLHAYNIAAGNVPPADPPQATSTANVPPGNPPHLTPSARLKRSRNPEPPEFLREYRDDAPSSMSHHDYIQNRRKEVVSSRNHDRVELTEEVLGNSNSTLPLVDYDASDEDTPSECEETHTLLNSGQQEEFDGVKKSRNEQRFPVSGEPVCLICGRYGEYICNETDDDVCSMECKSELLEILKLNEGSSHNQVRDISSSGISAAVPVPVFGDDTWDYNQHHWSKKTCSLSTYECWKCQRPGHLAEDCMVTDGSNRSSSI

SEQ ID NO: 164500 - protein, 171 aa, Glycine max
  Clone ID: PAT_MRT3847_119561C.1.pep
MFLPPIHRKRLPPPMFLPAIHRISLPPPDSNAAGIPSHRNFYANTVTMPLPLCHTTITSKTEEVVSSRNHDRVELTEEVLGNSNSTLPLVDYDASDEDTPSECEETHTLLNSGQQEEFDGVKKSRNEQRFPVSGEPVCLICGRYGEYICNETDDDVCSMECKSELLENLNS

SEQ ID NO: 164501 - protein, 81 aa, Glycine max
  Clone ID: PAT_MRT3847_119562C.1.pep
EHSHPWYPASDGSARGHPDKDSARGVFILLQRQWLRITAQKNNNTKFQPDKECGIWKLHFFLVLLDALFPSLPPSSLILIV

SEQ ID NO: 164502 - protein, 241 aa, Glycine max
  Clone ID: PAT_MRT3847_119563C.1.pep
MHRSLKVAVIGAGVSGLAAARELRHEGHNVVVLEKSNHVGGMWAYDPKTDSDPLGLDPTRETVHSSLYLSLRTNLPRQLMGFSDFPFVKNESGDPRTFPGHEEVLRFLEGFAGEFGINELTQFETEVVRVERKGNEWVVESRTSRDGDSVSREGFDAVVVCSGHFVEPKLAEVPGIDTWRGFQMHSHNYRVPQPFHNQVVILIGLGPSAFDISREIAQVAREVHVATRLNPDLAGMKLGDY

SEQ ID NO: 164503 - protein, 29 aa, Glycine max
  Clone ID: PAT_MRT3847_119564C.1.pep
HWGGKHYCQELDLRNSIRHHHGPKTHVLQ

SEQ ID NO: 164504 - protein, 60 aa, Glycine max
  Clone ID: PAT_MRT3847_119565C.1.pep
FSVINRTVVLPIILEALVKNIKSHWTQAVHGLSVNVWKLFTEKDAVLFEECHRQYDEREA

SEQ ID NO: 164505 - protein, 46 aa, Glycine max
  Clone ID: PAT_MRT3847_119566C.1.pep
AFTKKLLHAEHIHLFFKPYDSWEMCIFIPIILERLNNLPKVTQLIS

SEQ ID NO: 164506 - protein, 42 aa, Glycine max
  unsure (1)..(42): unsure at all Xaa locations
  Clone ID: PAT_MRT3847_119567C.1.pep
XCSTSXPQCXTXTTXTMIYYHXLACVYDHXXSLLAIXDHVXI

SEQ ID NO: 164507 - protein, 107 aa, Glycine max
  unsure (1)..(107): unsure at all Xaa locations
  Clone ID: PAT_MRT3847_119568C.1.pep
XLXTHXHKARNXARXQKXSXXXTIXXQXXXXIXXXXXXXRXTQHXXXXXXXXKXXXIXKXXPTKFQXXSXNXXXVHNXXXXXLIXXXHPXXXXKXXXXXXXXXXXXX

SEQ ID NO: 164508 - protein, 68 aa, Glycine max
  Clone ID: PAT_MRT3847_119569C.1.pep
PEPAGFIKRFLLHMHHNRRILFYLSQSSNVLRLIDMIWNPVSFPTALTTAPKPLRKSRWFCILNYLCL

SEQ ID NO: 164509 - protein, 69 aa, Glycine max
  Clone ID: PAT_MRT3847_11956C.1.pep
IVQPTVYSELLPCEAAGEAPDSQFDELYGPYKEPLIKTLTVSVSRSLLGDGLTDDLTVANDCHNDQSDV

SEQ ID NO: 164510 - protein, 357 aa, Glycine max
  Clone ID: PAT_MRT3847_119570C.1.pep
LGCRVCTILAETWFLFRTTNFNKTKLEKLGYQPDTDMLQKFWELCQQQLNISDEAEDEDVNKEYAVETNRDAVMIAAAKLIANDVVPKEDLASEIISHFVMHGTSVAEIIKHLITVLKKKDVDLASIFLEALKKAYHRHLVNMSGSENVSSENNSSSGCKDLAAKLSGTFIGVARIKHRPDILKVVRDGIEYAFVDAPKQLSFLEEAVLHFVSKLTAPDLSDITKDVQQRTTNVNTDENPSGWRPYKVFIANLLEKCAKNEGFQDEKEGVSVRRRGRPRKRQNIPGKKLFDEQSSSEDEDSISAYEQDAQDEGKRQEDEDDDDRLINSIPSSSKLRSLGVSRGESKVSASRTSGASS

SEQ ID NO: 164511 - protein, 220 aa, Glycine max
  Clone ID: PAT_MRT3847_119571C.1.pep
PCDNSLKNTPPEKKKIEMEFSGLLNVAEKTSGLFFSYETNLTLSAQRLNDLGDESRLLPLWRQAEPRFLWNNYMLEVLIDNKLEPYLLPVVQGSFHHFQAAIGKDIIDVTLIARRCTRRNGTRMWRRGADPDGYVANFVETEQIMQFNGYTASFVQVRGSIPLLWQQIVDLTYKPKFELLKLEEAPRVLERHFLDLRKKYGAVLAVDLVNKHGREGRLCE

SEQ ID NO: 164512 - protein, 63 aa, Glycine max
  Clone ID: PAT_MRT3847_119572C.1.pep
LLLLLLHSIYTSSMTFTLDIPLFLMARFCLSINALQVPTVSINMHSTTISAITSCPITRTTAT

SEQ ID NO: 164513 - protein, 169 aa, Glycine max
  unsure (1)..(169): unsure at all Xaa locations
  Clone ID: PAT_MRT3847_119573C.1.pep
PTRPPTRPRTRGGDFYFDIKARSTLKKVSCTKAQFVSGKTFKYDIIGAGSHSSQDSPDKEDQETPTTTDARSRHRIDPQFNEGQAQTETTLFKXSLDDVETPKGAMLDLKISQSKIALPKNTVGGTILRYDTLANSLTQGNFRASVDLKSTHRIKGMMKMVATIGIPEN

SEQ ID NO: 164514 - protein, 71 aa, Glycine max
  unsure (1)..(71): unsure at all Xaa locations
  Clone ID: PAT_MRT3847_119574C.1.pep
GAWRADQIQLDACGRGPYMVAHKHKHGAESIIDKCYTVKXTVWPTALNEMSELKSEAIAILEQGLIDASRA

SEQ ID NO: 164515 - protein, 41 aa, Glycine max
  unsure (1)..(41): unsure at all Xaa locations
  Clone ID: PAT_MRT3847_119575C.1.pep
ISRXVLRPXKKDXIXXRXRXWYDGAXXLLXDNGNXXKFSKX

SEQ ID NO: 164516 - protein, 78 aa, Glycine max
  unsure (1)..(78): unsure at all Xaa locations
  Clone ID: PAT_MRT3847_119576C.1.pep
XLSLFFVSNLFVPSIRSISSKMGKDPVRVLVTGAAGKLGMSCPMIVGEVLADSXIXMXTXSXKHDGNDVSXXSKVSTV

SEQ ID NO: 164517 - protein, 92 aa, Glycine max
  Clone ID: PAT_MRT3847_119577C.1.pep
RDQKTRPHPRDCLPAIYHAKGPTETGGTFLHRTVCPGSPRASGSENSSVIPDIKPFSRIHRPSPTGPPGPVQSRPGAWLYLGGAHALLDLPG

SEQ ID NO: 164518 - protein, 81 aa, Glycine max
  Clone ID: PAT_MRT3847_119578C.1.pep
AWHTVSISEGIAEGYALLQADLAGRDATQDLAKILTERGTDRGYSVKTDVEQEVEEKVKDKALDVEQDMEPTKRTTERRNS

SEQ ID NO: 164519 - protein, 170 aa, Glycine max
  unsure (1)..(170): unsure at all Xaa locations
  Clone ID: PAT_MRT3847_119579C.1.pep
MAGAIVKYGIIGVGMMGREHLVNLYHLRTQGVAVVAIADPHLPSQQLALDLAHSFTWPLKVFSGHQELLDSGLCDVLVVSTPNMXHHRILMDIINHSKPHHVLVEKPLCTTISHCKEVVNAARKRPDILVQVGLEYRYMPPVAKLIEIVKGGNLGHVKMVAIREHRFPFL

SEQ ID NO: 164520 - protein, 266 aa, Glycine max
  Clone ID: PAT_MRT3847_11957C.1.pep
YDKFYFGEVGRETYDFFWADFADWYIEASKERLYQSGAGGKSVASVAQAVLLYTFENILKVLHPFMPFVTEELWQALPYRKHALIVSPWPETQLSRNTCSVKKFENFQALVRAIRNARAEYSVEPAKRISASVVANNEVIEYIAEEREVLALLSRLDLQNLHFTNSFPGNADQSVHLVAGEGLEAYLPLADMVDISAEVDRLSKRLSKMQKEYDGLIAKLNSPQFVEKAPEAVVRGVREKATEAEEKINLTKKRLEFLNSNVLVSQ

SEQ ID NO: 164521 - protein, 73 aa, Glycine max
  Clone ID: PAT_MRT3847_119580C.1.pep
LVVYLQCPPMPGTPKLSSRPGLPSVPAPVLGAHFAVVNFTVFKLLRCRPTAYHTCPTAPYVARVTGPWTVRSR

SEQ ID NO: 164522 - protein, 156 aa, Glycine max
  unsure (1)..(156): unsure at all Xaa locations
  Clone ID: PAT_MRT3847_119581C.1.pep
RGPKIGLGEGKKKGKKRKNRGVPPGPGKKKSPPGPGKAPSKGPSAPPGKGGEKKKIPWKGGXPGXKNPRTPPKNSPPGPISKEKKNPPAPEKKGKTGPPPEKGPEGNGXTPRPTGAPXGKGFGGALPKPKPNGPKPSNPGKGANPNLNSPPPGAGG

SEQ ID NO: 164523 - protein, 52 aa, Glycine max
  Clone ID: PAT_MRT3847_119582C.1.pep
LPIKKPKPFHYPTLEQLTTEKNDAENINIPYLHQLKEHSILKMDPTIVVVMT

SEQ ID NO: 164524 - protein, 63 aa, Glycine max
  Clone ID: PAT_MRT3847_119583C.1.pep
ETYDRWILLLEIPQKVTVARRRHKVSDVKRLHKGTAARRQQKGTSATRQQKGTDARRLLEGYG

SEQ ID NO: 164525 - protein, 90 aa, Glycine max
  Clone ID: PAT_MRT3847_119584C.1.pep
TVNKCFCCLATLELEYVWLVDGHVLSIGPKWIHCLEENNLWSIIYWSMHTFWVFLMRFINLFMDFTLVIILIIFSTLAPNILLSRLLKRL

SEQ ID NO: 164526 - protein, 81 aa, Glycine max
  Clone ID: PAT_MRT3847_119585C.1.pep
VYLGVDSNLYLEIKLWIVLGGLPTPTCILRSNYGCALASVNGGYKCRLWCFEIYTMKLAVCHRALLFITKELLIISIAHAV

SEQ ID NO: 164527 - protein, 227 aa, Glycine max
  unsure (1)..(227): unsure at all Xaa locations
  Clone ID: PAT_MRT3847_119586C.1.pep
MVKITLGTFDDSFGVASLKAYLAEFHATLITLIADVGSAIAYNELTKDAHLDPXVAGGHLNPAVTFGLAIGGNITLITGFLYWIAQLLGSIVACLLLNFITAKSIPSHAPATGVNDFQAVVFEIVITFGLVYTVYATAADPKKGSLGIIAPIAIGFVVGANILAAGPFSGGSMNPARSFGPAVVSGDFAANWIYWVGPLIGGGLAGLIYGDVFIGSYAAVPASETYP

SEQ ID NO: 164528 - protein, 250 aa, Glycine max
  unsure (1)..(250): unsure at all Xaa locations
  Clone ID: PAT_MRT3847_119587C.1.pep
MVKITLGTFDDSFGVASLKAYLAEFHATLIFVFAGVGSAIAYNELTKDAALDPTGLVAVAVAHAFALFVGVSVAANISGGHLNPAVTFGLAIGGNITLITGFLYWIAQLLGSIVACLLLNFITAKSIPSHAPATGVNDFQAVVFEIVITFGLFYTVYATAADPKKGSLGIIAPIAIGFVVGANILAAGPFXGGSMNPARSFGPAVVSGDLAANWIYWVGPXLIGGGLAGLIYGDVFIGSYAPVPASETYP

SEQ ID NO: 164529 - protein, 73 aa, Glycine max
  Clone ID: PAT_MRT3847_119588C.1.pep
GRTEVGSIGITVSSMQSAFPSSFVLQSRTLRKWVHEMVGSCESIVLNVVVVLYGVSVVTCSRRGQSCVLDGLG

SEQ ID NO: 164530 - protein, 145 aa, Glycine max
  Clone ID: PAT_MRT3847_119589C.1.pep
MEVYGNSMVAAPSNVIYLSSILGQDSPITGHRCNWKCENEHVCGNMYRCKITGLTHICDKNCNQRILYDNHSSLCLASGQIFPLTPEEEQAVRGVRRKLDTENSPSDSCGFKRRRDAQFHPSPFERSFSAVSPICSQVGDGMDMK

SEQ ID NO: 164531 - protein, 47 aa, Glycine max
  Clone ID: PAT_MRT3847_11958C.1.pep
PYYLICSQSYLLFSPNSNHNSKFDISPTLSYSLAKILSHSLNIYYML

SEQ ID NO: 164532 - protein, 67 aa, Glycine max
  Clone ID: PAT_MRT3847_119590C.1.pep
QFCWGAAFNRACPRAEYIGPPFFWNKFAIFQRLWFSFVAKGWHKQNPEANCQKLKNPVNFPLMENEN

SEQ ID NO: 164533 - protein, 145 aa, Glycine max
  Clone ID: PAT_MRT3847_119591C.1.pep
MEVYGNSMVAAPSNVIYLSSILGQGGPIPGHRCNWKCENEHVCGNMYRCKLTGLTHICDKNCNQRILYDNHSSLCLASGQIFPLTPEEEQAVRGVRRKLDMGESPSDSCGFKRRRDAQFHPSPFERSFSAVSPICSQVGDGMDMK

SEQ ID NO: 164534 - protein, 134 aa, Glycine max
  unsure (1)..(134): unsure at all Xaa locations
  Clone ID: PAT_MRT3847_119592C.1.pep
YTSINNLPTGKAYATRTILSSKYHGSLNPLALELITPHPYGNXKMPKIIWVHHSAACDYISTSLLAKAHVIANNSGYYXLLSHCCYTDPVIEPLTLATNKYVTVYNTINMIRYTTYRDHISIIRLARQSQINAD

SEQ ID NO: 164535 - protein, 132 aa, Glycine max
  Clone ID: PAT_MRT3847_119593C.1.pep
TGHFRFLIILIFITSRNNNNTAKHARTHPQAQVSPTQLLPLSLMALTNAFLAPSFAVHGVGRVSDPRSIPLFSLPSDAFFRSPTSLSRDKNFLKASAYDLNAVGSASLQSGDNPDSVPMPIVLIDQESDSEA

SEQ ID NO: 164536 - protein, 68 aa, Glycine max
  Clone ID: PAT_MRT3847_119594C.1.pep
SSRYDSGFNKPSCESAGGGYEGGYNRTSDSKDEPVTGEGFKRGIFKSGEKFEGKYYQLLIFNFPYFGL

SEQ ID NO: 164537 - protein, 55 aa, Glycine max
  Clone ID: PAT_MRT3847_119595C.1.pep
DGKTSLWSMQARVIYLRVCWGLFGGAKCDARPIVSIHVRVMKTLVDKKKKGPGDL

SEQ ID NO: 164538 - protein, 60 aa, Glycine max
  Clone ID: PAT_MRT3847_119596C.1.pep
ALGKSPLPELFPCDPNLCVFTIVKVGTPKDTKTVASQLDKGVRCYKVKKERPRQGAYVFQ

SEQ ID NO: 164539 - protein, 91 aa, Glycine max
  Clone ID: PAT_MRT3847_119597C.1.pep
HYIDAHAYLLTGINLLLIDIILQVLLRITIGTINLLLIDIILHVLFHITKFIISLFLNDIILQGFLHITKANINFSPFCRLLAARADSLEH

SEQ ID NO: 164540 - protein, 274 aa, Glycine max
  unsure (1)..(274): unsure at all Xaa locations
  Clone ID: PAT_MRT3847_119598C.1.pep
SNNALDFDGVICDSCGESSLSALKAAKVRWPGLFDGVDSTTEDWIIDQMHTVRPVVETGYENXLLVRLLLESRTPSIRKSXEGLTVEGILENWSKLKPIIMEEWDEKRNDLIDLFGKVRDEWLEQDFATWIGANRLYPGVSDALKFASSRVYIVTTKQYPNPLFLLFQSHFADALLQELAGVTIAPERLYGLGTGPKVEVLKKLQKMPEHQGLTLHFVEDRLATLKNVIKEPELDNWNLYLVNWGFNTQKEREEAQANPRIQVIELSDFSSKLK

SEQ ID NO: 164541 - protein, 91 aa, Glycine max
  Clone ID: PAT_MRT3847_119599C.1.pep
KLTIRNANTIVYTINRKNETPHCWPWNLPPKGTTRTPLYLLILSRGTKNKGVFAPKNPWIIWEKPNFELCRRVFNTTPPYSSGAGNFFIPW

SEQ ID NO: 164542 - protein, 59 aa, Glycine max
  unsure (1)..(59): unsure at all Xaa locations
  Clone ID: PAT_MRT3847_11959C.1.pep
MTNMKNTLAFMDLSIHGDPAERMVFELFYAGAPKTAXNFCALSTGKKGLNSTTAETLHY

SEQ ID NO: 164543 - protein, 105 aa, Glycine max
  Clone ID: PAT_MRT3847_1195C.1.pep
MGNDAGSPQGPVTCGSWIRRPENLNLVVLGRSRRGSSCPSLLEIFSFDPKTTSLSTSPLTTYVLEADEGDPVAITVHPSGDDFVCALSNGSCKLFELYGRETNMK

SEQ ID NO: 164544 - protein, 76 aa, Glycine max
  Clone ID: PAT_MRT3847_119600C.1.pep
KKKKKKKKKKKKKKKKKKKKKKKKKKEKKKKKKKKKKKKKEKKKKKKKRKKKKIKKKENKKGRVKGKPCFDPSKLA

SEQ ID NO: 164545 - protein, 71 aa, Glycine max
  Clone ID: PAT_MRT3847_119601C.1.pep
STPNKTLKLLVPSILSSAYTNRIQTNTHHDRIQPLQKLFHQLKRLPIHANLHYTVHSVFYRHYNPSVYPTF

SEQ ID NO: 164546 - protein, 119 aa, Glycine max
  unsure (1)..(119): unsure at all Xaa locations
  Clone ID: PAT_MRT3847_119602C.1.pep
NHTCQPPWQIQFHLKNIILPGNYXFQVPCASTTNARLEVRFNDLNAKLPHFSTGLKGDDNAIARHGIHGLYRLHTIAVGSNHLVNGKNTIYLTQSKGISPFMGVMYDYVRLESPPIKST

SEQ ID NO: 164547 - protein, 47 aa, Glycine max
  unsure (1)..(47): unsure at all Xaa locations
  Clone ID: PAT_MRT3847_119603C.1.pep
QIRHPLPPTADLWSPTEPNTLLPVLCNRNDXAAAKFLKKNYNLPKKF

SEQ ID NO: 164548 - protein, 84 aa, Glycine max
  Clone ID: PAT_MRT3847_119604C.1.pep
DELAECKLPRPRNSDQIGISGSKPFRLVLKNELPDTIYTNSKIKARGNTPLEVVLFDIESKSIVAEGSLSSIKIEIGVLDGEFC

SEQ ID NO: 164549 - protein, 105 aa, Glycine max
  unsure (1)..(105): unsure at all Xaa locations
  Clone ID: PAT_MRT3847_119605C.1.pep
MADASDDTVSEKAASTRASLERSQAITDHVPSILGSXDHRLSDLETDMLCTQIRTHSIPKAHENIDRTRKYADAILAHSDQYHQAEAKIVNGPHEDVKNYPEAID

SEQ ID NO: 164550 - protein, 37 aa, Glycine max
  Clone ID: PAT_MRT3847_119606C.1.pep
AMVSSSKSSDPIFSRYLVGVDSWNWYEVPGLCLIDFH

SEQ ID NO: 164551 - protein, 180 aa, Glycine max
  Clone ID: PAT_MRT3847_119607C.1.pep
MLDEGIFPNVSTYNCLIAGLCRNQNVRAAKKLLNEMENYELKADVVTYNILIGGWCKDGEPSKAEKLLGEMLNVGVKPNHVTYNTLMDGYCMEGNLKAALKVRTQMEKEGKRANVVTYNVLIKGFCKTGKLEDANRLLNEMLEKGLNPNRTTYDVVRLEMLEKGFIPDIEGHLYNISSMS

SEQ ID NO: 164552 - protein, 111 aa, Glycine max
  Clone ID: PAT_MRT3847_119608C.1.pep
KKPPQPRKAERRDQESDQRGRKRDEHWRKPRNQTTEPEGWEAHESKQLEGEARDNTEGGNRKQQGRKKGKENPRREQTRAPKKKKEASTQNRRNLSKARTRGAERRTGGEQ

SEQ ID NO: 164553 - protein, 51 aa, Glycine max
  Clone ID: PAT_MRT3847_119609C.1.pep
HLRSIMKLDCKIWNESQPTKIHNFPIHEGTQKPSMTSLFPTFEYMTLFLLN

SEQ ID NO: 164554 - protein, 101 aa, Glycine max
  Clone ID: PAT_MRT3847_11960C.1.pep
VRTLHFSGLYIIDIGVHIIELALCCPNSGAVDLGGSYHRRSRFSPRTMFDYLVDSICLSRSAPSPWSGSKCGRQSSHPSPQVATAMASTIDLTHILVRSFP

SEQ ID NO: 164555 - protein, 178 aa, Glycine max
  unsure (1)..(178): unsure at all Xaa locations
  Clone ID: PAT_MRT3847_119610C.1.pep
MERGANNKKLSPLSSEQFISLTTPLVFLEKEAEASSTGVSQERVIEDAEKDEFQVDDCPIEQVRLTVPITDDPTQPALTFRTWVLGLASCVFLAFVNQFFGYRTNPLKISSVSAQIITLPLGKLMAATLSTKPIRVPFTKWSXSLNXGPFSLKEHVLITIFATSGSSGVYAISIITIV

SEQ ID NO: 164556 - protein, 170 aa, Glycine max
  Clone ID: PAT_MRT3847_119611C.1.pep
THAWYYFLLTFRLEDEMFGEVMLPGSLAHVSSVAVVVKVVGGGNGKTLTVYHVSACYPCSCEIWVMKEYGVVESWNKVFSFSMNAFCLVIPSLEMTIIEVAVPPAALCVTHSGEVLLLVDVAGRRCLYSLDMERTSFTELQIEVDTEFVYSGYYAESLVLLNNASGVVSY

SEQ ID NO: 164557 - protein, 62 aa, Glycine max
  Clone ID: PAT_MRT3847_119612C.1.pep
MGKVHGSLARAGKVRGQTPKVAKQDKKKKPRGRAHKRMQYNRRFVTAVVGFGKKRGPNSSEK

SEQ ID NO: 164558 - protein, 128 aa, Glycine max
  Clone ID: PAT_MRT3847_119613C.1.pep
KFEFINQIKTSDTFHKLRKTMIFNTPPSLLRGVWSTLLSESHHGGDESAVVLHSLVSASAWLFLLVLLRHFGSLSSHFTRTCERSVNLTHCDESLLLSLLFLSLSLSSSLSPAVVFSQPYGRVGGRVG

SEQ ID NO: 164559 - protein, 99 aa, Glycine max
  Clone ID: PAT_MRT3847_119614C.1.pep
ENGQPQVCNFAHLSLDNVTICSFLVVMCIGVGIRCSYIHLCSNAHPCCSYANMCPYIPGHWYPYGICCIDNAIWRKHLFIQTFLSVLVAFGGETEEIIY

SEQ ID NO: 164560 - protein, 51 aa, Glycine max
  Clone ID: PAT_MRT3847_119615C.1.pep
VRVEYEKPQPVIFYYCSSCRRWGFLILELIRCERFGLAFLGPRILKTPSFF

SEQ ID NO: 164561 - protein, 52 aa, Glycine max
  Clone ID: PAT_MRT3847_119616C.1.pep
SQKISSKQNFIQFWGKKTHFFFFFFFPVNPTWGKGFSGFEQQPPALKNSVQL

SEQ ID NO: 164562 - protein, 98 aa, Glycine max
  unsure (1)..(98): unsure at all Xaa locations
  Clone ID: PAT_MRT3847_119617C.1.pep
QRKKNSATKAQVGRGKTAKKDIIGAGTQATEEHPEKEDQEKPKKTEARLGQRKDPQNNEEQAQMETNXAKKAPEDGENSKGSTEEQKNTQTKKAPTNK

SEQ ID NO: 164563 - protein, 94 aa, Glycine max
  unsure (1)..(94): unsure at all Xaa locations
  Clone ID: PAT_MRT3847_119618C.1.pep
LGIRSPKXSKXQATAMQEGXXETTTXRXARPDRNTDXATPPRDTHHTXPENARRRNTDAPPRGGRPTREETHPNTXXQTEPDTKPRHQPQEDHH

SEQ ID NO: 164564 - protein, 55 aa, Glycine max
  Clone ID: PAT_MRT3847_119619C.1.pep
LVSFKFSVRYTSLLLNISFLLFIQSFLQDAFSIFVFPFPPFIKPYSHCSSNTLLF

SEQ ID NO: 164565 - protein, 45 aa, Glycine max
  Clone ID: PAT_MRT3847_11961C.1.pep
ILLREKGAWTLLTLNNSDRRGPATILTKEPLRKYNTTLLGIYTLQ

SEQ ID NO: 164566 - protein, 106 aa, Glycine max
  unsure (1)..(106): unsure at all Xaa locations
  Clone ID: PAT_MRT3847_119620C.1.pep
VHHEWAFPVLGDLLACIKNCAVKELNEMVDHDKNHWAYDDDSEGNLEGLITLXDIIXRLVHEPRGSSVHGFDGVLPMPPHSTVRHAYMKNNFYSIRNKLLCVSHQS

SEQ ID NO: 164567 - protein, 131 aa, Glycine max
  Clone ID: PAT_MRT3847_119621C.1.pep
DGRADARAGTFPFFSFVLLLLSLQKPFSFSDLSAISYEPQMEDSEKFDAGSDQGNALVTPYYTPYPKHLLPKSGLQPVNIEFSPSSGGDNSVASMKEGPGSSSSSSSSSTDSEQERKIVGEEKTDNVSLEK

SEQ ID NO: 164568 - protein, 56 aa, Glycine max
  Clone ID: PAT_MRT3847_119622C.1.pep
GYFPTGRLGIVKKHLHKLKGGDFKIFCFRGVWALTKKRFFQKVRSFKNRVSGKGLT

SEQ ID NO: 164569 - protein, 265 aa, Glycine max
  Clone ID: PAT_MRT3847_119623C.1.pep
MKIHCDVCNKHQASFFCTADEAALCDGCDHRVHHANKLASKHQRFSLTHPSAKHFPLCDVCQERRAFVFCQQDRAILCKECDVPIHSANDLTKNHSRFLLTGIKFSASATPYDYSSPPPPPPPPPKRNPVLDSPSTPSPPKPGGNSLTNEEEPGFTGSSISEYLINSIPGMKFEDFLDSHSLPFACSKNSDDMLSLFGEGNMVSFSPGGFWVPQAPPSSVQMDRQSGYRETREGSIRSSFGDDNFIVPQMSPPSNVSNKRSRLLW

SEQ ID NO: 164570 - protein, 95 aa, Glycine max
  unsure (1)..(95): unsure at all Xaa locations
  Clone ID: PAT_MRT3847_119624C.1.pep
SKSXPPKRDEXERKRRSPSPKPTKVHIGRLTRNVTKDHIMEIFSTYGKIKMIDMPVERMHPHLSKGYAYVEFENPDEAEKALKHMDGGQIDGQEI

SEQ ID NO: 164571 - protein, 245 aa, Glycine max
  Clone ID: PAT_MRT3847_119625C.1.pep
MKIQCDVCNKQQASLFCTADEAALCDGCDHRVHHANKLASKHQRFSLSHPSAKHFPLCDVCQERRAFVFCQQDRAILCKECDVPVHSANDLTKNHNRFLLTGIKFSALDSPSTPPKPAGGNSLTNQQPQQQTGFTGSSISEYLINTIPGMEFEDFLDSHSLPFACSKNSDDMMLSMFGEGNMVSFSAGGIWVPQAPSSVQMDQQSGYKDTWETSIRSSFGDDSLLVPQMTPPSNVFNNKRSRLLW

SEQ ID NO: 164572 - protein, 82 aa, Glycine max
  unsure (1)..(82): unsure at all Xaa locations
  Clone ID: PAT_MRT3847_119626C.1.pep
KTRXLVTKVXXPEAWTGTXATSVRXCWPLXVXTXFSEGRVGEAYNSWMPFXDXGXTNVXPQXQLPHGCLXLKFALYXMSLCW

SEQ ID NO: 164573 - protein, 106 aa, Glycine max
  unsure (1)..(106): unsure at all Xaa locations
  Clone ID: PAT_MRT3847_119627C.1.pep
ISSPTITRCXHSQAGMRTPFTVLKYMASFPTIKTNNDITSITTNGGRVQPMHVMTPLLMNKFKTTXYLPNLDDAQLAKEVXYLLKKVCIPCLEFELDHRFLFLEPN

SEQ ID NO: 164574 - protein, 66 aa, Glycine max
  Clone ID: PAT_MRT3847_119628C.1.pep
FFFFFFFFFTLFFFLLGFFIFFFFLFIFGAPHPKKKKGGHKKTWPKKKFFYKKLRVFPPQKIFFNF

SEQ ID NO: 164575 - protein, 163 aa, Glycine max
  unsure (1)..(163): unsure at all Xaa locations
  Clone ID: PAT_MRT3847_119629C.1.pep
RRVDFPPDVGPYGSXPPEIALARKPGEALLLWNEVKKRCEVGKEGGKSDSSVPPLKPDGALLDTIADICVRAAFFRKALEIVACMEENGIPPNKTKFTRIYVEMHSRMFTSKHASRARQDRRVERKRAAEAFKFWLGLPNSYYDGSEWRLEPMEGYGNTSDSV

SEQ ID NO: 164576 - protein, 91 aa, Glycine max
  Clone ID: PAT_MRT3847_11962C.1.pep
GLVMSLLRGNTTRPIVGWEMRTGDGIGVAIRSCRPLCVCVQSLERLVLCMLSGIEVMPSSEYRLYAKPFEWHPMERIDTVCGSRYEPVGKD

SEQ ID NO: 164577 - protein, 162 aa, Glycine max
  Clone ID: PAT_MRT3847_119630C.1.pep
MKTFTIATIVALASVGAAQLDNIPSCALNCFVGPLTSDGCSSLTDFACHCKKGAQLLSQVQPCVQGACGPSDQAAAIAAVESTCSAAGAPISIPDASAPAASSAVASATSAAASAASSMASSMASEASSVLSEASSAVASAASSMSSEKSMYETMCMTVTPT

SEQ ID NO: 164578 - protein, 105 aa, Glycine max
  Clone ID: PAT_MRT3847_119631C.1.pep
MIFSLCGGDEKLMPGRAHLLVGWWLKVGILKKEFWRSERGIPSGFPVTGIWHSLFNEKLIKYSFEKLLCQAKAPSMCFQSFKKFVSLCVGVGGNFISVHEYVEPF

SEQ ID NO: 164579 - protein, 112 aa, Glycine max
  Clone ID: PAT_MRT3847_119632C.1.pep
GNTECDGVGILGIAWAFGGMIFILVYCTAGISGGHLGGAETFFFFLGRMVSLARASLYMIAQCPRAICGAGSAKGFPNSSYNTSGGGVNLVPDGYTKGTCLRPDILGSFASF

SEQ ID NO: 164580 - protein, 148 aa, Glycine max
  unsure (1)..(148): unsure at all Xaa locations
  Clone ID: PAT_MRT3847_119633C.1.pep
ARTKILKICEAFGADCYPVPEDINKQREITREVSSRLADLEATLEAGIRHRNKALASVADHLTKWIDMVRREKAVYDTLNMLNFDVTKXCLVGEGWCPIFAKTQIQEALERATFDSSSQVGIIFHSMDALESPPTYFRTNSFTNPYQE

SEQ ID NO: 164581 - protein, 48 aa, Glycine max
  Clone ID: PAT_MRT3847_119634C.1.pep
INISAHTKISITTFYISRSLKTYNQFYTTSYTHSIYHYNIPYPFFKLS

SEQ ID NO: 164582 - protein, 44 aa, Glycine max
  Clone ID: PAT_MRT3847_119635C.1.pep
QKWQRKLAWKWNYTHMRIFCLSKHEIDQIFVSYKRIYNNTLFLK

SEQ ID NO: 164583 - protein, 139 aa, Glycine max
  Clone ID: PAT_MRT3847_119636C.1.pep
MGSSSGFTWDMVLRLVRALAISGFNCKGADAAHAFFVIGDTGIDNGNNNYLSTTARAYASPYGIDYPTRIPTVRFSDGLNIPDCISHELASESTSSYLSPELNGERLLVGTNFASAVIGILNDTGDQLVNIIRITRQLE

SEQ ID NO: 164584 - protein, 340 aa, Glycine max
  unsure (1)..(340): unsure at all Xaa locations
  Clone ID: PAT_MRT3847_119637C.1.pep
MAVVLKDMCFFNNKDILVIKPQKKSPLLLRMSVLIFSMVCGVFICSVCLKQISTHARTMLMELQIEKPSRSSSSRLNLKNDVPLLHYPKPVSFNRSECAGNPVRFFAILSNQRSGSGWFETLLNSHINVSSNGEIFSVRERRVNVSTIVQTLDKVYNLDWLSSASKNECSAAIGSKWMLNQXYFNSRSVSVIFLFRRNLLRRMVSMLANSYDRYAKLFSGTHKSHVHSKEEADTLSKYKPTINSTSLLADLKDMEMRTAKALEYFNTTRHMIPYYEDLIQNRTKLKDVQEFLGLPQMELTSRQVKIHRGPLSDHIKNWDDVNRTLAGTIYESFLHADYSS

SEQ ID NO: 164585 - protein, 206 aa, Glycine max
  unsure (1)..(206): unsure at all Xaa locations
  Clone ID: PAT_MRT3847_119638C.1.pep
RVVSRIRRAGLGPEENLTESGSSYKPQIFTFRELATATKNFRDETFIGQGGFGIVYKGTIGKINQVVAVKRLDTTGVQGEKEFLVEVLMPFPFYAHXNLVNMIGYCAEGDQRLLVYEYMALGSLESHLHDVSPDEEPLDWNTXMMIACGAAKGLNYLHHEAKPSVIXRDLKSSNILLDEGFHPKLSDFGLAKFGPTGEQSYVATRV

SEQ ID NO: 164586 - protein, 64 aa, Glycine max
  Clone ID: PAT_MRT3847_119639C.1.pep
TTRPFHTQKLNFRSQECLFLGYSSSHKGYKCLSSIGRIYISKDVLFNEIRFPYSDLFASSSNSI

SEQ ID NO: 164587 - protein, 62 aa, Glycine max
  Clone ID: PAT_MRT3847_11963C.1.pep
QPIHKNLTSDAQELVGAGSAHHSVCAPGLLVVRTAALLDLNHGSNSPSVQSWLPSLPRGPDP

SEQ ID NO: 164588 - protein, 292 aa, Glycine max
  Clone ID: PAT_MRT3847_119640C.1.pep
GGITYRPYASQRFGEIAFCAITADEQVKGYGTRLMNHLKQFARDMDGLTHFLTYADNNAVGYFIKQGFTKEIHLEKDRWQGYIKDYDGGILMECKIDPKLPYTDLSTMIRRQRQAIDEKIRELSNCHIVYAGIDFQKKEAGIPKKIIDDIPGLREAGWTPDQWGHSRFRTLNVSSDNATNQKHLNGFMRSLLKSMFDHADAWPFKEPVDARDVPDYYDIIKDPMDLKTMSKRVDSEQYYVTFEMFVADARRMFANARTYNSPETIYYKCSTRLEAHFQSKVQAGLQPGTKIQ

SEQ ID NO: 164589 - protein, 150 aa, Glycine max
  unsure (1)..(150): unsure at all Xaa locations
  Clone ID: PAT_MRT3847_119641C.1.pep
MLKLIASSSRIHRVHPTVLRPAHDSASPLLRVLSSLGGLSWRNTNVGGRYFFCSGSSDSSDRVVDAGVQAADESESKASAIVPTYPRPEDYLTVLALPLIHRPLFPGFYMPVFVKDPRXLAAIQESRERQAPCAGAMLLKDEDKADPSGV

SEQ ID NO: 164590 - protein, 103 aa, Glycine max
  unsure (1)..(103): unsure at all Xaa locations
  Clone ID: PAT_MRT3847_119642C.1.pep
RQIXVXXXRXXXXXXXXXXXXXXXXXXXXXQXXXXXXXXXXXXXXXXXXLXXGXGXXXLRXXXXLXSXXDGKRXVSXXWGXXXGQKPXVWXXLSPXGDRPXGX

SEQ ID NO: 164591 - protein, 59 aa, Glycine max
  unsure (1)..(59): unsure at all Xaa locations
  Clone ID: PAT_MRT3847_119643C.1.pep
NVIPKFYSYKNNSSAPRVVIKARERFPKQRERFPVVPASSFTSSXGMNPCLNKRGRIPE

SEQ ID NO: 164592 - protein, 41 aa, Glycine max
  Clone ID: PAT_MRT3847_119644C.1.pep
PLHNLAGYYLSLGRNRRPDRGSRFTYTSIGRPPTTNAGHVS

SEQ ID NO: 164593 - protein, 86 aa, Glycine max
  unsure (1)..(86): unsure at all Xaa locations
  Clone ID: PAT_MRT3847_119645C.1.pep
DSLLYCYGMEKNRFDGKACGMWHVACGMWFSASGEHVKADPLSQNWLTATSFLYYYDPPSIMLFCASCMAXHVNVCFTFTYVISSL

SEQ ID NO: 164594 - protein, 66 aa, Glycine max
  Clone ID: PAT_MRT3847_119646C.1.pep
HLLQGSPLTYLNHCRPSLELNSTNPSCILCSFSSSDVMYFLLSALHDVIMRSLTLQRLMQHKSNLL

SEQ ID NO: 164595 - protein, 184 aa, Glycine max
  Clone ID: PAT_MRT3847_119647C.1.pep
KHKNTEGTHQEPAKKQNQKPTKKTRERQKGKKNRRRGTKNKKPPPQKKKKRPKQPLHQQQKKKKRGGKKKSTPAKNKKKKGQKKPKKKKGNKTNAEEKTNSIPPQKKRKTLLKKRETPNSKNEKNTKKRKQEHKQKQRIRTQNGNKKKNHSIQNKEQKRGTEQRKKKKHEHTRKKKKKPQYVPE

SEQ ID NO: 164596 - protein, 93 aa, Glycine max
  unsure (1)..(93): unsure at all Xaa locations
  Clone ID: PAT_MRT3847_119648C.1.pep
PXPGTKXPLNGKWKPCXXXPGXXMXXGSLXXQAEEXXPRLVPIXHCPPGIWHMQXXIXTAAFAIGTXTACSRSTXIIRGTQYGHPFSCKQTAN

SEQ ID NO: 164597 - protein, 54 aa, Glycine max
  Clone ID: PAT_MRT3847_119649C.1.pep
LIDDAEEQGYREVRTVRVVRTRLTTRSDSCCSRSDGQDYAHVLRMLMNGLYEAM

SEQ ID NO: 164598 - protein, 46 aa, Glycine max
  unsure (1)..(46): unsure at all Xaa locations
  Clone ID: PAT_MRT3847_11964C.1.pep
CKLKSPLKSFKAGSKWPSLKESCKLFAXHPRHMXNKKNLXIFLKWP

SEQ ID NO: 164599 - protein, 136 aa, Glycine max
  Clone ID: PAT_MRT3847_119650C.1.pep
GGVQNPPKKNGGKKKGKGPHITGKPPKPWGLPQPLFWGVPLKKKFFIKGLGAQRGRKLGPKNPKKPPGVYWAPAKKKGPGKKLKNPLIGEPPPEGGPQRGGPPRKKEPLWGPGKNPERPFKPPPKKRGLNFPGPGI

SEQ ID NO: 164600 - protein, 57 aa, Glycine max
  Clone ID: PAT_MRT3847_119651C.1.pep
KNYNENETNISLQYVPLSVGLKIIIIIIIIIIKLYLNGYKVVNVKLLEYVRNTSIVD

SEQ ID NO: 164601 - protein, 130 aa, Glycine max
  Clone ID: PAT_MRT3847_119652C.1.pep
MTFCVLLSFNNPKPSSFLSSTFVLGQTTPLSFSINEKLKPCNYLNSVLVSISCSSIKLVRDRSLDRHVVTKNKTRFVQKLKTLLLSKPKHYIPLHILSKCRTYLCLSKPRSILSMIHRYPSIFELFNVPW

SEQ ID NO: 164602 - protein, 28 aa, Glycine max
  Clone ID: PAT_MRT3847_119653C.1.pep
NIRIPNLLDLPLSSNSMIMSIVQTIVQM

SEQ ID NO: 164603 - protein, 91 aa, Glycine max
  Clone ID: PAT_MRT3847_119654C.1.pep
KTLDGNPRFSYASQTTQGSGKQRLGRCKPTMAHSLCRISLQLQPQDPLLSNNGLCYSSSPTFNHDFFPSSFYKFNFRLTDGLLNPLAPPSD

SEQ ID NO: 164604 - protein, 53 aa, Glycine max
  unsure (1)..(53): unsure at all Xaa locations
  Clone ID: PAT_MRT3847_119655C.1.pep
XHXXWKNNXXNINXQXXVPVXLTTXXFXAILSWXXPLFLXFVWRCPQEPTTEK

SEQ ID NO: 164605 - protein, 92 aa, Glycine max
  Clone ID: PAT_MRT3847_119656C.1.pep
QSKQTKSHGSTVHTHHKSLWIHQMLLFLSHPLPNRHPHLHPNVRSNSPQTLNTSENALWILQHLFELLPCFMNNGCIEHSGYHYQMLLYLAF

SEQ ID NO: 164606 - protein, 33 aa, Glycine max
  Clone ID: PAT_MRT3847_119657C.1.pep
LKRILFKLTAGSGWRPKEYDFKSTWFTFYNRLI

SEQ ID NO: 164607 - protein, 81 aa, Glycine max
  unsure (1)..(81): unsure at all Xaa locations
  Clone ID: PAT_MRT3847_119658C.1.pep
FNYGTAFSLSLCSLCLLLLSSACFASSSSXLIECRPINLNALEPDHRVESDVXVIQRWCSQHPELKCAGVTAYRLDLNRNG

SEQ ID NO: 164608 - protein, 42 aa, Glycine max
  Clone ID: PAT_MRT3847_119659C.1.pep
GTPTSYRASSIAHDHIFIANSRWVISPVLLPRALSSGSLLGS

SEQ ID NO: 164609 - protein, 31 aa, Glycine max
  Clone ID: PAT_MRT3847_11965C.1.pep
LIEVLDPLRIVTMIKGSSTSINQLYSISELL

SEQ ID NO: 164610 - protein, 303 aa, Glycine max
  unsure (1)..(303): unsure at all Xaa locations
  Clone ID: PAT_MRT3847_119660C.1.pep
MKERLQRLTLTSXYFHGKDNVEAYLDWEIRVEQKLKRKFTLKSYDSHSYPKKDQGLGILGAAPSMPNDDKGKKIEKQPPKASVATCPFAGERGEAHGCVFQRRKFAESPPTFICGKRQKKTKGNRSKRIFQLRELYLCLRKVDKSGALAPTYPPSKRKSDLRSSFLRVNQAILFTWKTEEQQRMNDECRRTVENLRVITHGNVTETLWKHLGLDFLHGNNFPQQFQQNRGGACHPARPGEPGCFLQKQPPSGGRIWKAQGNYANSARQSIHGSPNKISRVEDRRTALGNQFAGLQTRWWRMHE

SEQ ID NO: 164611 - protein, 52 aa, Glycine max
  unsure (1)..(52): unsure at all Xaa locations
  Clone ID: PAT_MRT3847_119661C.1.pep
VYHERXRLQFCLVPLSTPSFRCXSLXLALILXFKPYQRYPPCFIFQFXFFCP

SEQ ID NO: 164612 - protein, 77 aa, Glycine max
  unsure (1)..(77): unsure at all Xaa locations
  Clone ID: PAT_MRT3847_119662C.1.pep
VKNDVQGQFXNAMYMDDVPLRVKSLXKVGHLPFAYITASVHGLPDAAQRLAADLANNXPSLRCGNAPXLLMPPSPLT

SEQ ID NO: 164613 - protein, 107 aa, Glycine max
  Clone ID: PAT_MRT3847_119663C.1.pep
KKKKKKKKKKRNLFKFKNTTFRGQKVNRGPHFMKNFPSIFGPLEGLVFPEIARASLFFYGKKNKIFCIRKPNANSGAFYSPIIYPKFKKRRVRCLFFRSNKVLIFFM

SEQ ID NO: 164614 - protein, 229 aa, Glycine max
  unsure (1)..(229): unsure at all Xaa locations
  Clone ID: PAT_MRT3847_119664C.1.pep
SNYRVPEPFQGQIVVVIGFASSAFDISREIAKVAKEVHIATRSPDVKVMKLANHDNMWQHKMVKCVSEDRLVAFDDGSSVYADVLFHCTGYKYHFPFLETNGIVTIEDNRVGPLYKHVFPPALAPWLSFIGIPEKEVIFQMTELQCKWVARVLSGKVLLPTEKEMMAYVEEYYQQMEKDGFPKHMTHYLHXKEIGYCNWLAAKARLPPIEHWEDEMYLESIKPVLLGLQ

SEQ ID NO: 164615 - protein, 42 aa, Glycine max
  Clone ID: PAT_MRT3847_119665C.1.pep
AKGSKFFSKKKKTFKALVNKKKFVYPWVLEKKIGFFFKILLF

SEQ ID NO: 164616 - protein, 34 aa, Glycine max
  Clone ID: PAT_MRT3847_119666C.1.pep
IDVFMSEAICLRMLDFKVRFERHGSLAESDLVVC

SEQ ID NO: 164617 - protein, 478 aa, Glycine max
  Clone ID: PAT_MRT3847_119667C.1.pep
THAATTRPGKKKTTNCLLFLFLSLTLSLSLSAALQLQTQTLPLHSLPHPPAISWPESESEPDPEEEALSLHLHHIDALSSNKTPEQLFQLRLQRDAKRVEGVVALAALNQSHARRSGSSFSSSIISGLAQGSGEYFTRIGVGTPARYVYMVLDTGSDVVWLQCAPCRKCYTQADPVFDPTKSRTYAGIPCGAPLCRRLDSPGCNNKNKVCQYQVSYGDGSFTFGDFSTETLTFRRTRVTRVALGCGHDNEGLFIGAAGLLGLGRGRLSFPVQTGRRFNQKFSYCLVDRSASAKPSSVVFGDSAVSRTARFTPLIKNPKLDTFYYLELLGISVGGSPVRGLSASLFRLDAAGNGGVIIDSGTSVTRLTRPAYIALRDAFRVGASHLKRAAEFSLFDTCFDLSGLTEVKVPTVVLHFRGADVSLPATNYLIPVDNSGSFCFAFAGTMSGLSIIGNIQQQGFRVSFDLAGSRVGFAPRGCV

SEQ ID NO: 164618 - protein, 214 aa, Glycine max
  unsure (1)..(214): unsure at all Xaa locations
  Clone ID: PAT_MRT3847_119668C.1.pep
DSPIEPGNWVLFLTLAISLCVSGAFQIQTETLPLHTLPEPHILSETLSEPQETLSLSLHLHLHHIDALSSNKTPEQLFHLRLQRDAKRVEALLNQIHARRSAGSSFSSSIISGLAQGSGEYFTRIGVGTPARYVYMVLDTGSDVVWLQCAPCRKCYTQTDHVFDPTKSRTYAGIPCGAPLCRRLDSXGCSNKNKGCQYQXSYGDGVLDIGGCGA

SEQ ID NO: 164619 - protein, 59 aa, Glycine max
  Clone ID: PAT_MRT3847_119669C.1.pep
ERYSFLSYSSDIFFNLFLEDTNDLHKMCFYGVFGCCSKVKLHMHVAWFWSLPFCCCMLM

SEQ ID NO: 164620 - protein, 985 aa, Glycine max
  unsure (1)..(985): unsure at all Xaa locations
  Clone ID: PAT_MRT3847_11966C.1.pep
SVFVRMNARDDLDECAPKELLEEIYDSIVKEEIKMKDDTSLIGKSSRQKPEGEEGRLVSILNLALPKRKSSGDAKSESEAIIKKTLAIIMNKGVKRGVFYTAQQIELVRPMVEAVGWPLLATFSVTMEEGDNKPRVVLLMEGLKAGIHITYVLGMDTMRYAFLTSQVGITFLHAPDDMRSKNVEALRTLPVKCEEKPNARIVPWNAVLEAPSIVKVLQSIPFMNNKIFRRHLRDFYPLLTKLVCCDQMDVRGALGXFIPSTTETSFTITXSYKPLLGFSDINFRALRISVLAGLERRNMVAFFCINLMMWILFWSXLLNSFISAGSHHFHLTSQYAIDSQTKLLSNYWTIGESSDSGFETSGSASVFMIFTASADDEMESIVDSAFENVEQVILEHFDQVVGDCFMDCVNCLIRFANNKTSHRISLKAIALLRICEDRLAEGLIPGGALMPIDATLDATFDVTEHYWFPMLAGLSDLTSDQRPEVRSCALEVLFDLLNERGSKFSTAFWESIFHRVLFPIFDHVRHAGKEGFISPDDDWFRETSIHSLQLLCNNFNTFYLXVCFMLPPLLGLLLDCAKKTDQTVVSISLGALVHLIEVGGHQFSESDWDTLLKSIRDASYTTQPLELLNVLSFENLRNHGSIISDSEGNAGDSGTTRSIDNEVIGDRQLDVNSNGKLSPLASSNTNADGVEDSISQTNVDQSEGLPSPSGRTPKAADGEGFQRSQTLGQRIMGNMENLFLRNLTKSKSHISDASQSSSPIKVADAVEPDTKNEESPLLVTVRGKCITQLLLLGAIDGIQKKYWTKLKSQQKVSIMDILLSLLEFAASYNSSTNLRTRMHQIPDERPPINLLRQELAGTGIYLDILQKATYGFETKKEKNSDAEVKFERLAEEKLVSFCEQVLREASDLQSITGETTNMDIHRVLELRAPIIVKVLQSMCFMNNKIFRRHLREFYPLLTKLVCCDQMDVRGALGDLFQAQLKPLLP

SEQ ID NO: 164621 - protein, 140 aa, Glycine max
  Clone ID: PAT_MRT3847_119670C.1.pep
GFVLFLSCLFFFLFFFCFFLFFFLLFNKKGDLFFWVFSLNQTPGFQKKGGFPARPGKLALPFYWIRGGARIPGFRPRGGKVIFFFWGPPNSIPGPGFNTGGGGKPRGFPKLIAWEHTPFSPGGEKRKGPPPSPLPKGGPP

SEQ ID NO: 164622 - protein, 104 aa, Glycine max
  Clone ID: PAT_MRT3847_119671C.1.pep
PVGGEVGCGVASCEVNLNVCCPSALEVKRNGKVVGCKSACLAMQSAKYCCTGSYSDPKTCKPTLFVHLFKAICPKAYSYAYDDSSSLNRCRAPRYVITFCPPPV

SEQ ID NO: 164623 - protein, 52 aa, Glycine max
  Clone ID: PAT_MRT3847_119672C.1.pep
ITPARSFGPAIIFNKALGWEDPWFFWVAPFMGGALSALFPQFVIRAIPLKSK

SEQ ID NO: 164624 - protein, 296 aa, Glycine max
  Clone ID: PAT_MRT3847_119673C.1.pep
MAEATKGYAVVTGANKGIGFAICKQLASNGITVVLTARDEKRGLQAVEKLQELGLSGHVGFHQLDVTDPAGIRSLADFIRNKFGKLDILVNNAGIPGAQLDGEALAAAGIMENAGRIDWSKIVTDTYELAEAGVKTNYYGAKELTKALIPLLQFSDSPKIVNVSSSMGRLEHIPNGWPKEVLSDVENLTEEKIDDILNEFLKDFKEGSLETKGWPLAMPAYSVSKAALNAFTRILAKNYPSFYINALCPGYVKTDINSNTGFLTPDEGAEAAVRLALLPDGSPSGQFFFRGEEKPF

SEQ ID NO: 164625 - protein, 77 aa, Glycine max
  Clone ID: PAT_MRT3847_119674C.1.pep
IIVTMHRYLIGRCNSCINRHVLLPFIDCYVLSYPVIFFLREKIPVCSSGRGNSYNAQFLDWKILRVHQVNLTGRVRA

SEQ ID NO: 164626 - protein, 138 aa, Glycine max
  Clone ID: PAT_MRT3847_119675C.1.pep
MGLGLKMKSLRHHPMALKIHEQAGSKRKYTFIQAHRAWLSKFLMLWILLMALIGCFIFSKMDADTKVRRKEVLGSLCDQRAKMLQDQFSVSVNHVHALAILVLTFHYYRTPSAIDHETFAEYTARTAFERPLLTGVAY

SEQ ID NO: 164627 - protein, 296 aa, Glycine max
  Clone ID: PAT_MRT3847_119676C.1.pep
RPLNPRFLRSFHFVQDSRHSLFRIQSSPPTEKGSGSVLSISELAACNLVTEPKLERLKLEYIVRGEKRNIFELISKIASSQGLRGFWKGNLVNILRTAPFKAVNFCAYDTYRKQLLRFSGNEETTNFERFIAGAAAGITATIPSEGFFSLYKGLVPSIISMAPSGAVFYGVYDILKSAYLHSPEGMKRIQNMHKQDRELSAFDQLELGPVRTLLNGAIAGACAEAATYPFEVVRRQLQLQVQATKLSSFATFAKIVEQGGIPALYAGLIPSLLQVLPSASISFFVYEFMKIVLKVE

SEQ ID NO: 164628 - protein, 95 aa, Glycine max
  Clone ID: PAT_MRT3847_119677C.1.pep
PPRGGSLGCLPRGGPPPNVTPVLTVFPPFHPQPLGFFFDPPHNKVGLPRGVCTHRVGPLFFFLFIKRAPGLSCLANWVGVFRGVQNRYGVGGGPR

SEQ ID NO: 164629 - protein, 203 aa, Glycine max
  unsure (1)..(203): unsure at all Xaa locations
  Clone ID: PAT_MRT3847_119678C.1.pep
KYFSHDLSFFLSSKGILHXSTCPHTPQQNGIAERKNRHLLETAHSLMLNSNVPTHHWGDAVLTACFLINRMPFSSLENQIPHSIIFPHDPLFHVSPREFGCTCFVHDLSLDLDKLLAKSVKCVFLGYFRLQKGYKXCYSPITRRYFMSGDVTFFEDTPFLLILWRTFFLFLQGSTGQFPCPLRELPTKKVKGSLQSFSYPNLN

SEQ ID NO: 164630 - protein, 82 aa, Glycine max
  unsure (1)..(82): unsure at all Xaa locations
  Clone ID: PAT_MRT3847_119679C.1.pep
WAERDIDLIGGDAYVMPTPYGLKTESYVTGHEHTLSVGLDKPSPALLHREXLIETFXKRNVMPMATVEGLAPEDKTSMWHTA

SEQ ID NO: 164631 - protein, 60 aa, Glycine max
  unsure (1)..(60): unsure at all Xaa locations
  Clone ID: PAT_MRT3847_11967C.1.pep
XANXKDNIKEHQLFPGHXGSPAPERKPWLGDSPVREPKAVNFFMVKDLNYPGSCGLGWVD

SEQ ID NO: 164632 - protein, 191 aa, Glycine max
  Clone ID: PAT_MRT3847_119680C.1.pep
GGQGEALVACLREVPALYFKEDFRLEDGATFRAACPFANVAENLALQEKLSHYLDVVELHLVKEISLRSSSFFEAQGQLQDLDAKILQGCEQIRHLKDTIRLLDADLVHDARRIQELNGTRTNLLALLQKLRLIFYVNQALSALKLLVASADCAGALDVTDDLQHLLDGDELSGLHCFRHLRDHVIGFIES

SEQ ID NO: 164633 - protein, 150 aa, Glycine max
  unsure (1)..(150): unsure at all Xaa locations
  Clone ID: PAT_MRT3847_119681C.1.pep
PLAGIQILLSQRPNAHKLFHGTIHATIMEVAXPTTGGGRGIAKSMRRGHVQATVTGGEGAATVKARKMLQAAXETVGSAYADSDDPIAIQDTLKXSPRDNKAKKRARLXEMMTTTXQHELGGXLGSAAFGNDAPSNYLTGDSLYEPLKPI

SEQ ID NO: 164634 - protein, 63 aa, Glycine max
  Clone ID: PAT_MRT3847_119682C.1.pep
LLKNIKEGNTTYLFIGGEETNQSHLFLPGTYVFFGDLYHDMIIILTNGSPFLIYIALELGLQD

SEQ ID NO: 164635 - protein, 139 aa, Glycine max
  Clone ID: PAT_MRT3847_119683C.1.pep
RATYRSIFLCAVFQQPLGNGLNRGNQCVFFKLGSGSSSCSLRNYIRTVWRLLASPIRGMLELNIIVILIHYILCQAPFRVFCLPRGDVLISPMSHPLEHPSLPHAHLNHSPGPGRPHRLPTPPPHPHPPPHPPPPKQVV

SEQ ID NO: 164636 - protein, 148 aa, Glycine max
  Clone ID: PAT_MRT3847_119684C.1.pep
FACVHDDNPCVAFIPYFGFIEEIWELNYVKFTVCVFKCKWVDSNTGVRTDDVGFTLVDLNKLAYQNDPFIMAEQAKQVFYVEDPCDQRWSVVLHGKTIGVNVEDDYSYIDTYVSPLSTQLSPNVIGEETDDVHANRNDHDEGELINIV

SEQ ID NO: 164637 - protein, 132 aa, Glycine max
  unsure (1)..(132): unsure at all Xaa locations
  Clone ID: PAT_MRT3847_119685C.1.pep
GGFTIFFGKCPPPWGPLEIRAFPGVGGPKAVVSPPRGGPVSVPPPFGGVLFFGGSPGGFSPPFQVFFLGPPXKKPPRGVPHVFGPPPQFFWGSNPFVVXGPRVFFLGGPPGGEGILNSCLGFFWPIPRAFSF

SEQ ID NO: 164638 - protein, 57 aa, Glycine max
  Clone ID: PAT_MRT3847_119686C.1.pep
KTVGICVFSAEVGRPSPSEGEWEGSKFFLDENCEFQLTGVVARNKIVNRVRKPLRGW

SEQ ID NO: 164639 - protein, 65 aa, Glycine max
  Clone ID: PAT_MRT3847_119687C.1.pep
PTRPKKKKKKKKNFKKKKKKRGKRKKKKGKKKKKKKKKKKKKKKKKKKKKKGGAVLKNQIFFPRV

SEQ ID NO: 164640 - protein, 82 aa, Glycine max
  unsure (1)..(82): unsure at all Xaa locations
  Clone ID: PAT_MRT3847_119688C.1.pep
EQPYSDQDSELLESSASKCSVIAHEMTPMEVLVRNNTNDLIKMSINITCXRDVIGENFVNGTKATVILTGDLNDFNLEISPF

SEQ ID NO: 164641 - protein, 146 aa, Glycine max
  Clone ID: PAT_MRT3847_119689C.1.pep
LLVNLGDPERPVCKVGDFGLSRIKRNTLVSGGVRGTLPWMAPELLDGNSCRVSEKVDIFSFGIAMWEMLTGEEPYANMHCGAIIGGIVNNTLRPPIPKRCDSEWKKLMEECWSPDPAARPTFTDIKNRLRNMSDSVPKKRHNIARR

SEQ ID NO: 164642 - protein, 50 aa, Glycine max
  Clone ID: PAT_MRT3847_11968C.1.pep
MTAKSYKYIPAHYLHPTKKKKKKKKKKKKKKKKKKKKKKKKKKKKGRPLK

SEQ ID NO: 164643 - protein, 41 aa, Glycine max
  unsure (1)..(41): unsure at all Xaa locations
  Clone ID: PAT_MRT3847_119690C.1.pep
NSLFFFFFFFFFFFFFFXFFCFFFFFFWQTLDKKANPYPKA

SEQ ID NO: 164644 - protein, 114 aa, Glycine max
  unsure (1)..(114): unsure at all Xaa locations
  Clone ID: PAT_MRT3847_119691C.1.pep
KVDSVLTLTYHFGGANIRSIAAATIRPDHRAILCKGEKVTIKVXQRPSLEKLHDIDEKNSKTNAEYFQRRDTSRGTLIDCIGIHEEXETIFFQELDSLNEGKNADRLRRYCINI

SEQ ID NO: 164645 - protein, 199 aa, Glycine max
  Clone ID: PAT_MRT3847_119692C.1.pep
ARNPAIRLDEANNSLARNEPLLKRQQTLGEMTLEDFLVKAGVVQESSSLFKSSLLYQNQIGNIASNGPLSASYRFRHVIGTGSSVSCNGLETQNMLAQNNNLVIKDVTTNGAVEKCPSLGESSGKGNRKRIIDGPPEVVVERRQRRMLKNRESAARSRARRQAYTVELEAELNLLKEENEKLKQTLADAERKRKHEISQ

SEQ ID NO: 164646 - protein, 101 aa, Glycine max
  Clone ID: PAT_MRT3847_119693C.1.pep
PGGARFATGLWPVGARLFMSVGSLGIPPGLRAVSSPLLLCVSSLIRPPRLHASALPLVSSGYLSPHYSFTRYASRPRFALCCSTPASGHAWTQEKDQATIQ

SEQ ID NO: 164647 - protein, 105 aa, Glycine max
  Clone ID: PAT_MRT3847_119694C.1.pep
MTTEKVKYGVHSEAGKLRKVLVCSPGLAHQRLTPNNCDELLFDDVIWVAQAKRDHFDFVTKMRERDIDVLEMHNLLTDIVAQKEALDWILERKITANQVGLGLVH

SEQ ID NO: 164648 - protein, 251 aa, Glycine max
  Clone ID: PAT_MRT3847_119695C.1.pep
SDATIVRVRNDAVNLEGVRKIISNDESFLLGLACAEFSESLRVAANSVTRLIARCEDSALRSFHLAFLEFADSGRDPNGWALSGPKETDSKLKKMERYVTFTATLYREMEELTVLENSLRKALNHADGNSVGSKDQQKLYELQQKIFWQKQEVKDLKERSLWSRSFDNVVVLLVRFSFTVLARIKVVFGIGHHMPCLSRTLSASATVYPSDQNPNGFVYESLEEEDSKLEEEAVNGFFEANSKLLRPPEST

SEQ ID NO: 164649 - protein, 58 aa, Glycine max
  Clone ID: PAT_MRT3847_119696C.1.pep
ISCRNQQTARIQSDIKKRKLKKFKPLKKCIERIKMGRPPFTELSEPAINPGPVPKGVP

SEQ ID NO: 164650 - protein, 116 aa, Glycine max
  Clone ID: PAT_MRT3847_119697C.1.pep
QIFVETLTGKTITLEVESSDTIYNVKGKIQDKERIPPDQHRLIFAGKQLEDSRTLSDYNIQKESTLHLVLHLRGGMQIFVTTLTGETTTLYIKALTPLQRKAKILDIEGFPQTSTR

SEQ ID NO: 164651 - protein, 181 aa, Glycine max
  unsure (1)..(181): unsure at all Xaa locations
  Clone ID: PAT_MRT3847_119698C.1.pep
MISNSDPVEPVTATATAGADDATVSTTASSSNEDQPAPPAAPNIVMSSKDHDSLFSGGGISFLSGSRNGRFSYGYSSFKGKRSSMEDFFXTKISEVDGQTVAFFGVFDGHGGSRTAEYLKNNLFKNLSSHPNFIKDTKTAIVEAFKQTDVDYLNEEKXHQRDAGSTASTAMLLGDWCGDAP

SEQ ID NO: 164652 - protein, 57 aa, Glycine max
  Clone ID: PAT_MRT3847_119699C.1.pep
RSSKTLGAATPTNEYHKTMISLAVFFYRNINFVRYKMNLVREKIKRFNLMMHFQVIF

SEQ ID NO: 164653 - protein, 101 aa, Glycine max
  Clone ID: PAT_MRT3847_11969C.1.pep
PLALNSGGLASAHFAKCPAIGVYPSQCTAGLLRSTLPVNNLNHVVLSRRHQTFLYRRGYLLPGLFSFNLLTGWFMVLSGLLFYSGWLHFLFPRPKRIRFRP

SEQ ID NO: 164654 - protein, 395 aa, Glycine max
  Clone ID: PAT_MRT3847_1196C.1.pep
MGNDAGSPQGPVTCGSWIRRPENLNLVVLGRSRRGNSCPSLLEIFSFDPKTTSLSTCPLTTYVLEAEEGDPVAIAVHPSGDDFVCALSNGSCKLFELYGRETNMKLLAKELAPLQGIGPQKCIAFSVDGSKFAAGGLDGHLRIMEWPSMRVILDEPRAHKSVRDMDFSLDSEFLASTSTDGSARIWKIEDGVPLTTLSRNSDEKIELCRFSKDGTKPFLFCSVQKAGDTSVTAVYEISTWNKIGHKRLIRKSASVMSISHDGKYLSLGSKDGDICVVEVKKMQIYHYSKRLHLGTNIAYLEFCPGERVLLTTSVEWGALVTKLTVPKDWKEWQIYLVLLGLFLASAVAFYIFFENSDSFWNFPMGKDQPARPRFKPVLKDPQSYDDQNIWGPVDM

SEQ ID NO: 164655 - protein, 175 aa, Glycine max
  unsure (1)..(175): unsure at all Xaa locations
  Clone ID: PAT_MRT3847_119700C.1.pep
MSSLLNSSLNGSASNLPDGAGRSFATSFSGSIQGLHNIHGNFNVPNMPSTLTSRNSTINSVPTGGGVQQPSASLSSGRFASNNLPVALSQLSHGSSHGHSGVNSRGGLGVSPILGNAGPRITSSMGNMVGGGXTIGRISSGGLSVPGLASRLNLSGNTGSGXLGVQGQNRLMSGV

SEQ ID NO: 164656 - protein, 58 aa, Glycine max
  Clone ID: PAT_MRT3847_119701C.1.pep
CPEARNAIAIAFYVTCPRCPPQPTNGQSDSFESPSITNSMPISRPCNISEHIFSQFWT

SEQ ID NO: 164657 - protein, 154 aa, Glycine max
  unsure (1)..(154): unsure at all Xaa locations
  Clone ID: PAT_MRT3847_119702C.1.pep
SSRWCWAIFCYVFLWSVWCSLPSFSSHWXIQGLHNIHGSFNVPNMPSTLTSRNSTINSVPTGGGVQQPSASLSSGRFASNNLPVALSQLSHGSSHGHSGVNNRGGLGVSPILGNAGPRITSSMGNMVGGGNIGRISPGGLSVPGLASRLNLSGN

SEQ ID NO: 164658 - protein, 52 aa, Glycine max
  Clone ID: PAT_MRT3847_119703C.1.pep
SPEEYAVALETGTVAAVVDERPYVELFLSNHCQFSIRGQEFTKSGWGFVSVF

SEQ ID NO: 164659 - protein, 112 aa, Glycine max
  Clone ID: PAT_MRT3847_119704C.1.pep
SPGGCAFYPRCAPFSGKGPPPCSFFFLPFFCGALPRVPQLFFRAPPPLWDLISCFLSPPPQYFPLGCWPRCPLLGSVYVFFALCPPKYLFLGVGSLFGAFTPHLTRFFRPFF

SEQ ID NO: 164660 - protein, 54 aa, Glycine max
  Clone ID: PAT_MRT3847_119705C.1.pep
ARKSQSSSTNKPNHQTLQLFTFTYHVGMLAYPFVFYSYFNRKLVLELHFPPLRA

SEQ ID NO: 164661 - protein, 69 aa, Glycine max
  Clone ID: PAT_MRT3847_119706C.1.pep
QLWLTGVFSCGYGSTRSKAYRIEPILPVNDVNSELCISNQHSKFCVNLLSFFNCWFPLSYLLTNFLFTM

SEQ ID NO: 164662 - protein, 46 aa, Glycine max
  Clone ID: PAT_MRT3847_119707C.1.pep
CALNALCGIRIFLVMVFEWRLVGYDLKYIVKNIVKEKKRSDGGWLV

SEQ ID NO: 164663 - protein, 128 aa, Glycine max
  Clone ID: PAT_MRT3847_119708C.1.pep
PPGENFFYPGGQGFFPFFKGAFSPPPMYVAWLVYWGPRVFFFMDRVCLFCEFLSTSPFPPENSFSIVFANLLWLPLYAKFVSLQGSLPLFRGPPKSSVFFKGPAPFSFYFQLLPIFHSFSSFLKIFYL

SEQ ID NO: 164664 - protein, 67 aa, Glycine max
  Clone ID: PAT_MRT3847_119709C.1.pep
MNVFVKTRNGTHFEIEVKPSDTLSEVKNNIETVQGEHVYPAAQHMLSHQGKVQKDGTTLAQNILAEN

SEQ ID NO: 164665 - protein, 63 aa, Glycine max
  Clone ID: PAT_MRT3847_11970C.1.pep
QTSVEYSGHVFPFSKFNCFGLVMGVLSSWLLLFFFNVSHCVASAQSSANLNYQSLLIRLNPSA

SEQ ID NO: 164666 - protein, 57 aa, Glycine max
  Clone ID: PAT_MRT3847_119710C.1.pep
LNSLNKSRSDLYVLTMSVTSPHSPLTFFYMMEGPALRLSLILRKKTIFKYNSSSHKA

SEQ ID NO: 164667 - protein, 69 aa, Glycine max
  Clone ID: PAT_MRT3847_119711C.1.pep
MFGNKFWVMELINFVDALFFYIIVYFFFYFFFFFFFFFFIFFFNKKIIIPFRIAYPKFLWDKPNPVIKK

SEQ ID NO: 164668 - protein, 111 aa, Glycine max
  Clone ID: PAT_MRT3847_119712C.1.pep
PRAEFFGAILGHDGSVWAKSANLNISGPEAQAVARNAFSPSVQGTGLTVAGKKYLTLKTDERSFYGKQGTGGIVAVKTTQSVLVGIYETQQPGAATTTVEKLADYLINSGY

SEQ ID NO: 164669 - protein, 455 aa, Glycine max
  Clone ID: PAT_MRT3847_119713C.1.pep
MDADAAPLHIAMYPWFAMGHLTPFLHLANKLAKRGHKISFFIPRRTQAKLEDLNLHPNLITFVPINVPHVDGLPYDAETTSDVPSSLFPLIATAMDLTEKNIELLLLDLKPHIVLFDFSTYWLPNLARRIGIKSLQYWIISPATVGYMASPARQREDDMRKPPSGFPDCSIKLHAHEVRFLAAARKLEFGNGVLFYDRISVGADLSDAIGFKGCREIEGPYVDYLETQFGKPVLLTGPLVPEPSNSTLDAKWGEWLGRFKAGSVIYIAFGSEHSLQQNQLNELLLGLELTGMPFFAALKPPIEFESIEKALPKGFKERVQERGVVYGGWVQQQLILAHPSVGCFITHCGGASLTEALVNRCQLVLLPRLGSDFIINARTMGGKLRVGVEVEKGEEDGLFTKESVCKAVKTVMDDEIDQLGREVRANHNKVRSLLLSNNFETSCVDAFSHRLQDLV

SEQ ID NO: 164670 - protein, 50 aa, Glycine max
  Clone ID: PAT_MRT3847_119714C.1.pep
IAGPRKCKKPFKLRQIRWIKGITTNDNRSLNPLKIKIPYKRNRRERPVHR

SEQ ID NO: 164671 - protein, 191 aa, Glycine max
  Clone ID: PAT_MRT3847_119715C.1.pep
MAVTVKLMALIVSFFGLLSFILGVIAENKKPPAGMPVPVKDGVTCKFSADLTLALGYLSVIFLIASTVVGYLSLFYPYKGKAVPQRVLFKSTTFMVFFNVALFSTGLALTMLLWPTITEHLHLKRNVHHDLTYTCPTAKTGLLGGGAFLSLDSSLFWLVALMLADNAREDFLDEDKDVELPSHVNHADMII

SEQ ID NO: 164672 - protein, 81 aa, Glycine max
  Clone ID: PAT_MRT3847_119716C.1.pep
TKHHNMGGHRQKKSSSGFFSIFNIFSSRKPRGGYYDASDSGRKVWPSDYDKGNWGVAEPNIDMKAEAFIAEYQKRVSESAL

SEQ ID NO: 164673 - protein, 37 aa, Glycine max
  Clone ID: PAT_MRT3847_119717C.1.pep
LFKLLFSCRLRLNAWDIQDFLHCRSTLEDPRVQSSNS

SEQ ID NO: 164674 - protein, 54 aa, Glycine max
  Clone ID: PAT_MRT3847_119718C.1.pep
YISHDTLIVQGSKKSQITLLAKDMMMPTELISIQTMPDAMFEGSSPLDKNCSLC

SEQ ID NO: 164675 - protein, 175 aa, Glycine max
  Clone ID: PAT_MRT3847_119719C.1.pep
EADMAEEVHSKAKEIGTVCSIKYPLSGKDLEQHGLLQDGCTLDASAVLYTSVKSARASVATLHKKEIGGGNVWARQLGGEGSKTQKWKLIIRNLPFKAKDNEIRDMFSSAGYVWDVFIPQKPDTGLSKGFAFVKFTCKQDAEKAIQKLNGSKFAKRLIAVDWAVSKKIFSSDTNN

SEQ ID NO: 164676 - protein, 56 aa, Glycine max
  unsure (1)..(56): unsure at all Xaa locations
  Clone ID: PAT_MRT3847_11971C.1.pep
EXRXXIIXIKMXPYLSAIFXLXXSYLXRXEXXXXIDRTTXTXFWXXVTDATIKNFQ

SEQ ID NO: 164677 - protein, 70 aa, Glycine max
  Clone ID: PAT_MRT3847_119720C.1.pep
PTRPTACGLIPSRKINQLADRRFYTKSFVLSSLFCDELHHFLMVGHLSLEAEKIQTLAFFFYRESWVKGR

SEQ ID NO: 164678 - protein, 58 aa, Glycine max
  Clone ID: PAT_MRT3847_119721C.1.pep
LAKGELSLAYGEIYFIFFLLIFSPRSVSRENLPKQVLSPLLNSHNLFPNSRGPLVVTA

SEQ ID NO: 164679 - protein, 120 aa, Glycine max
  Clone ID: PAT_MRT3847_119723C.1.pep
TILIQNILRVTFTLPRITSPTNAPIRVRPPVFLTTRLCTVGQIPPATHDTTLPSTPTSARTLADLLHFQPATLTRFVRFTPLPPHRPIVFRRHVISLLSVSSPSAFSFPPPPPKKEDVIQ

SEQ ID NO: 164680 - protein, 77 aa, Glycine max
  Clone ID: PAT_MRT3847_119724C.1.pep
RLHSIRSLHPALQVRYFSFSWVCFKVSLIRRYEEHQHQECCRSLDPESEKCRTGCIRDVQPYRVFQSVNGKQAFRRE

SEQ ID NO: 164681 - protein, 54 aa, Glycine max
  Clone ID: PAT_MRT3847_119725C.1.pep
VETKGKTLCESKPKGRNSSASENQKGEETPGKKRGGDGEPTHQCGPNFEKTFPT

SEQ ID NO: 164682 - protein, 98 aa, Glycine max
  Clone ID: PAT_MRT3847_119726C.1.pep
TDHKIGYGLSTLSSYVYLTGCRYCKREIRYAFVLKVNLITQSNVLNICPSRELSLHIPFLIQNISFWTLSLYKIHSQMCVCAYAHRSCLNAKLTVPNL

SEQ ID NO: 164683 - protein, 662 aa, Glycine max
  Clone ID: PAT_MRT3847_119727C.1.pep
MAPKAKPAPSQPAPPPALEDLFTTLNRHIQASAYDNAVKLTDQILAIAPGDEDALRCKVVALIKNDRVEDTLSAIHSSKKQLDDFHFLKAYCLYRQNKLDEALESLKRQESNDETMLLECQILYRLGKMDACLDIYRKFQNSKIDNMEINSVAALVMAGRSSEVQGMLDSLRVKATSSFELAYNTACSLIARNEYTDAEQLLLSGRTIGQEVLMEDNLADDEIEIELSPIAVQLAYVQQLLGRKQDAIEAYTDVIKRDMADESSIAVAVNNLVSLKGPKDVSDSLRKLDRLKDKENQSFRLAPGLDLKLSAKEKEAIYANRVVLLLHANKNEQARELVSALPDMFPESVIPIFLQAALLVRENKAGRAEEILAQFASKFPEKSKVVHLARAQVAAAAGHPHIAADSLAKISDIQHMPATVATLVSLKERAGDIDGAAAVLDAAIKWWSNAMTEDNKLNTITQEAASFKLRHGKEEDAAQLYEQLVKSQGSIEALVGLVTTVARMDVVKAELYEKQLKALPGLKGIDVDSLERTSGVKQVDAPRVGVPETYEEGKNKTKSKKKRKRKPRYPKGFDPANPGPAPDPERWLPKRERSTYRPKRKDKRAAQVRGSQGAVVRDKHDTGASSNNSNPKSNQGTSKGAAQNAVSEQTKPSSKSRKKSRN

SEQ ID NO: 164684 - protein, 108 aa, Glycine max
  Clone ID: PAT_MRT3847_119728C.1.pep
MDEQLLGRKQDAFEAYTDVIKRDMADESSIAGAGNNLVSLKGPKDVSDSLRKLDRLKDKENQSFRLAPGLNLKLSAKEKEAFFANRVGLLLHANKIEQVFLLSLACPS

SEQ ID NO: 164685 - protein, 64 aa, Glycine max
  Clone ID: PAT_MRT3847_119729C.1.pep
RALNHNRSCRNENCQLEPQNILRCRDGGITTAYVFARAGHKAHSINEMKISDYDSYVDPASYRL

SEQ ID NO: 164686 - protein, 64 aa, Glycine max
  unsure (1)..(64): unsure at all Xaa locations
  Clone ID: PAT_MRT3847_11972C.1.pep
LYVNMQGCVCCAIHSHVVRVRSRTDWRKRXPSHKFMRRGDDAPRPGQPGQGPLPAGTAAAPVRT

SEQ ID NO: 164687 - protein, 101 aa, Glycine max
  unsure (1)..(101): unsure at all Xaa locations
  Clone ID: PAT_MRT3847_119730C.1.pep
RLELEPIRLEERLKKKVYEFLFMVDAIDEYAGGQXKEYHGKKLVSATKEGLKLDDXTEEEKKNKEEMKKLFDELCKVIKDILGDKLDKXIVFNRIVDSPCC

SEQ ID NO: 164688 - protein, 250 aa, Glycine max
  Clone ID: PAT_MRT3847_119731C.1.pep
MEDNNEECIAGLCLGLGLGLGSGHVPKKNKQKENKAVVCLDLAFELCPKGEKAVNNVNHHHDKVERISLERIHDYPNEKSTDSDNSNNNGCRKKLRLSKDQSSMLENSFKQHSTLNPVLIHALAARLNLKTRQVEVWFQNRRARTKLKQTEVDRELLKKHCQNLSDENKRLKKELQELRATKGWTVATMHSTIQTGDPDNVGFFLRSRVMSCRFCSCPWGVGRRCVCGWFWVPSGRSQDLTRASSTGYNT

SEQ ID NO: 164689 - protein, 64 aa, Glycine max
  Clone ID: PAT_MRT3847_119732C.1.pep
MAIHAPRPGAVLLNPHSNCPLPQLVPFFDPPMSLPDGRLPPHRAERLVPEPGQSQCRRLHVPIL

SEQ ID NO: 164690 - protein, 98 aa, Glycine max
  Clone ID: PAT_MRT3847_119733C.1.pep
ALDPNFNKLSMDHIFSAYKLTATIAILLDYDGTLMPQSSTIDNIPSIKSIEILNSLCIDKNIIVFLVSAINPKILFQWFFFLVKILLISSYHFYFLNN

SEQ ID NO: 164691 - protein, 123 aa, Glycine max
  Clone ID: PAT_MRT3847_119734C.1.pep
TSVFCDMPEFLSPSAARYPREPLIVVTQINCWAINSSESPLIVYLSLRPDPCKQNVSLGCEVTDGIISLYTLPLCKVTNVQRPCSKRHIEPLIPLQTAFTTERGFGQGSPGSGTHEPTNGVLD

SEQ ID NO: 164692 - protein, 46 aa, Glycine max
  Clone ID: PAT_MRT3847_119735C.1.pep
RGIIRRGMWNFFRVENEHLNNVGNYRAFKSVPHPFSYYDDKNDKDA

SEQ ID NO: 164693 - protein, 85 aa, Glycine max
  unsure (1)..(85): unsure at all Xaa locations
  Clone ID: PAT_MRT3847_119736C.1.pep
LQQPVISIQHLVSFGLNIVIQSYVFQDDGFAKMLVYASGXRGGHVKLQEKNLSVMNTDPWYSAYHYSHPPLVDRLAVLHDPDKKE

SEQ ID NO: 164694 - protein, 101 aa, Glycine max
  Clone ID: PAT_MRT3847_119737C.1.pep
PKKNLRPKPLMVALFKNLPLVQLPWEVAPPKRVFSLFKKMGGLTCGGEFSGPLKQKRPTFLRRMVWFKGEKAFARGFGPLKPLDPVRWVPPWPCLGPPMGF

SEQ ID NO: 164695 - protein, 67 aa, Glycine max
  Clone ID: PAT_MRT3847_119738C.1.pep
SDWLNQGISNIQRANFIQVINPQWQSKSATKQFIKRTDINAKKTTGPSAVHKLCLDIPSQALHGRVG

SEQ ID NO: 164696 - protein, 97 aa, Glycine max
  Clone ID: PAT_MRT3847_119739C.1.pep
LLVLYCLHHFKLATNLSPSKLLQLHIYKDIYWNSPIEFTSFSSCILLIDKKKKKNGSYYSTWSLSSTSFPHSKRSPPPPPTATTPVPLLTRRRAKWK

SEQ ID NO: 164697 - protein, 55 aa, Glycine max
  unsure (1)..(55): unsure at all Xaa locations
  Clone ID: PAT_MRT3847_11973C.1.pep
SYLYFGCRAEYDPKSDLLDQEFMLKGKWYQRKDVEIKTVGXDGSQCSHYLPIVSP

SEQ ID NO: 164698 - protein, 106 aa, Glycine max
  Clone ID: PAT_MRT3847_119740C.1.pep
YLTAHATATTGRGIQSRAPRHRRQERTKRTGLHRESIRATGRTATPTQDAQDTRDRHTPSQESAPRTECARNPQKPSETNRRTGKPTIPQGTTRSEKRRPPSKGGG

SEQ ID NO: 164699 - protein, 330 aa, Glycine max
  Clone ID: PAT_MRT3847_119741C.1.pep
YTVPMATTEGCLVASTNRGCKAIHVSGGASSMLLRDAMTRAPVVRFNSAKRASQLKFYLEDPLNFDSLAVVFNKSSRFARLQDIKAAIAGKNLYIRFSCTTGDAMGMNMVSKGVQNVLTFLQSDFPDMDVIGISGNFCSDKKAAAVNWIEGRGKSVVCEAVIKEEVVKKVLKTSVEALVELNMLKNLTGSAMAGALGGFNAHASNIVSAVYLATGQDPAQNVESSHCITMMEAVNDGKDLHISVTMPSLEVGTVGGGTQLASQSACLNLLGVKGASKESPGANSRLLATIVAGSVLAGELSLMSAIAAGQLVNSHMKYNRSSKDITKIGS

SEQ ID NO: 164700 - protein, 105 aa, Glycine max
  unsure (1)..(105): unsure at all Xaa locations
  Clone ID: PAT_MRT3847_119742C.1.pep
CITMMEAVNDGKDLHISVTMPSIEGGYSWRGAXQLASQSACLNLLGVKGASKESPGANSRLLATIVAGSVLAGELSLMSAIAAGQLVNSHMKYNRSSKDITKIAS

SEQ ID NO: 164701 - protein, 33 aa, Glycine max
  Clone ID: PAT_MRT3847_119743C.1.pep
MALVGFINKLLLGVTPALYFNCVGSGQIHIDGC

SEQ ID NO: 164702 - protein, 356 aa, Glycine max
  Clone ID: PAT_MRT3847_119744C.1.pep
GEVKKNGGVGMILANGVFDGPGLVADCHVLPATAVGATGGDEIRSYIGNSRTPATATIVFKGTRLGVRPAPVVASFSARGPNPESPEILKPDVIAPGLNILAAWPDHVGPSGVPSDGRRTEFNILSGTSMACPHVSGLAALLKAAHPDWSPAAIRSALMTTAYTVDNKGDPMLDESTGNVSSVFDYGAGHVHPVKAMNPGLVYDISTSDYVNFLCNSNYTTNTIHVITRRNADCSGAKRAGHSGNLNYPSLSAVFQLYGKKRMATHFIRTVTNVGDPNSVYKVTIKPPRGTVVTVKPDTLNFRRVGQKLNFLVRVQIRAVKLSPGGSSVKSGSIVWSDGKHTVTSPLVVTMQQPLD

SEQ ID NO: 164703 - protein, 58 aa, Glycine max
  Clone ID: PAT_MRT3847_119745C.1.pep
KEQEDSMDDPVASDADEDDDDADSAGHYTDAESKSEAGGHTTAHGVHDWLDEVCTAAT

SEQ ID NO: 164704 - protein, 93 aa, Glycine max
  Clone ID: PAT_MRT3847_119746C.1.pep
CCLIQDEDWDRNSHLGSWLSEQCLYGLQRCKTKKAPDIQLGQVAYLDLLAAASLAILAGMLVLDIGLMAPSHQGASNTSNIWYNIISHECPLY

SEQ ID NO: 164705 - protein, 110 aa, Glycine max
  unsure (1)..(110): unsure at all Xaa locations
  Clone ID: PAT_MRT3847_119747C.1.pep
XGXXXSPLXAXSAXXXXXSXXXXNXXXXMXLFVXXXXXXXXSLAXXXTXXAEAQXXXXRPXXTSAXLXXVTXXNXSXQXVXYXCXXXMDQXXXVXXXXXEXNSVHAYXXX

SEQ ID NO: 164706 - protein, 69 aa, Glycine max
  Clone ID: PAT_MRT3847_119748C.1.pep
GKIKEALNLGWGAPVQNFNIFFPPLGKNFHFPRLKFIGGKLRPPKEIQPPKKSRGSFSVPPRKKDFRIF

SEQ ID NO: 164707 - protein, 70 aa, Glycine max
  Clone ID: PAT_MRT3847_119749C.1.pep
ALIFHYLNTTPALFLLLVLHLYILQHEYNSGSWTTLFSFFPFFHDKGCSLLAWYAKNYNLTIFWSTITLI

SEQ ID NO: 164708 - protein, 89 aa, Glycine max
  unsure (1)..(89): unsure at all Xaa locations
  Clone ID: PAT_MRT3847_11974C.1.pep
VXKIDLCLNAQGCTFQSRSFLPSINAXFXXLSQSXFLSMPFPLPLPLFXCLXLLXTLXIXFPXXCGMXLXITHXQCXFLPXRXGXXNXH

SEQ ID NO: 164709 - protein, 114 aa, Glycine max
  Clone ID: PAT_MRT3847_119750C.1.pep
KGAFYKKAHKATFFKKLPSKKGFSNKGGQFAKKKNPRGREAKKQNSGGGGGNFNPKRGGTNKLGKKGVRPLGKMNQTRPELKHLGSLGSLEDIKPSLGQGQQMGGPRGKLETRG

SEQ ID NO: 164710 - protein, 79 aa, Glycine max
  Clone ID: PAT_MRT3847_119751C.1.pep
WGCFCFQRLWPFGGVFLGVSNYVWFHGLGKRQSCFFFFSPFYKSVFVLLRVCVSFIIYSRCISNLDMDLLLVFRGAPFL

SEQ ID NO: 164711 - protein, 166 aa, Glycine max
  unsure (1)..(166): unsure at all Xaa locations
  Clone ID: PAT_MRT3847_119752C.1.pep
LSPDPDTFVMNRELEVIHSRWAMLGALGCTFPQILDKNGVXFGXAEWFNAGAQIFXQGGLDYXGHPNLNHAHSILAICAVHVVLMGIDEGYTVGGGPLVERLDRIYHGWCFDPRGLADDADAFAESNANDFRISRLAVVYTSGCSSEVIVTGMGTIQRRYDHISCT

SEQ ID NO: 164712 - protein, 114 aa, Glycine max
  unsure (1)..(114): unsure at all Xaa locations
  Clone ID: PAT_MRT3847_119753C.1.pep
YPNRRQPHTGGIYRGPTRPTAEKKHKRNLSNTHNCRLXHHGRHKTWTKHEKNPAPTEEEKTEAIRNKGIPAEALATRAHEFEKHAAHESHKDQTPAGDKPYPTKVKKLAKTTNP

SEQ ID NO: 164713 - protein, 82 aa, Glycine max
  unsure (1)..(82): unsure at all Xaa locations
  Clone ID: PAT_MRT3847_119754C.1.pep
KAGKRSVLLPTKRFKCKDLXQGEKDIFMASLICNMDVDCKTYLVCKTDLDCVKTLHFDTKVDLGFKSINLLLHQFYFFLFPR

SEQ ID NO: 164714 - protein, 103 aa, Glycine max
  unsure (1)..(103): unsure at all Xaa locations
  Clone ID: PAT_MRT3847_119755C.1.pep
MSKFEGVIVSDQWLQSQFTQVELRSLKSKFVSLKNQNGKVTFGDLPPLMVKLNAFRDMYAEDEIXGSLGESGTDFTNDIDFEAFLKVRYLNLVSSLLSSSRSR

SEQ ID NO: 164715 - protein, 62 aa, Glycine max
  Clone ID: PAT_MRT3847_119756C.1.pep
YTIFVTKDIGFSQKQLQEEKKLLHNLKGASYLINFGLKRNPPPRGCFFTAAVSILVGNPQIL

SEQ ID NO: 164716 - protein, 47 aa, Glycine max
  Clone ID: PAT_MRT3847_119757C.1.pep
NSPPTHASAHASAHVSLRLMFIYPARSSPLLPGSVCIRLWVHGGNDG

SEQ ID NO: 164717 - protein, 65 aa, Glycine max
  Clone ID: PAT_MRT3847_119758C.1.pep
APPFNFLCFFFFFYFRVVSFFFFFFFFFFFFFFFFLLMLYLINYGSNTLIITTGEFQELKSEQNL

SEQ ID NO: 164718 - protein, 87 aa, Glycine max
  Clone ID: PAT_MRT3847_119759C.1.pep
HHNRNNNKQHLLRSNVGTLSLRVFAVSGNSAFKMNLSEYLVTLEKPLGIRFALTSDGRIIVHSLTKGGNAERSRIIMVGDTLKKAGD

SEQ ID NO: 164719 - protein, 108 aa, Glycine max
  unsure (1)..(108): unsure at all Xaa locations
  Clone ID: PAT_MRT3847_11975C.1.pep
LLNYREFVATAVHLEEMRNEXHVRKAFQSFDQNKSEFIETEELXPPLSDDLDTTPXEGANAPIADRDTYNAWWRSYDEFPTIMKAGTHWGQASQQDSPEMIASLSSYR

SEQ ID NO: 164720 - protein, 85 aa, Glycine max
  Clone ID: PAT_MRT3847_119760C.1.pep
SKCQLTGSGLEEKRLRGDNAHEFEERSAIPSTGIASFCSGPDDILQAQCGPWKNRRPLIWNSAASRLLRERQPRRRSRTIYLDCS

SEQ ID NO: 164721 - protein, 44 aa, Glycine max
  Clone ID: PAT_MRT3847_119761C.1.pep
PSTCLSSRLTPYWTIMMLYDITYLLTNGKINSSTIRRRPVKSFL

SEQ ID NO: 164722 - protein, 51 aa, Glycine max
  Clone ID: PAT_MRT3847_119762C.1.pep
GAFYCKRTLQVWIICTFLKGGLLPVVRLWQLKLCHPRLLPPPPFVSIEQAM

SEQ ID NO: 164723 - protein, 127 aa, Glycine max
  Clone ID: PAT_MRT3847_119763C.1.pep
VFLFFFFFFFFFFFFFFFGVFLVFLFFFFKKKCKKALIIKIFARPREIIKNSGPGAPKKRHLSLGGAKNKKAPPGNVAKKKLHPPHSWGLGGKKTRSFCRTPQCGNWENPQREGKLQHLGWPTLLFL

SEQ ID NO: 164724 - protein, 255 aa, Glycine max
  unsure (1)..(255): unsure at all Xaa locations
  Clone ID: PAT_MRT3847_119764C.1.pep
MATLSDIGVAAGLNILSAFIFFVAFAILRLQPFNDRVYFPKWYLKGLRTDPVHGGAFVRKFVNLDWRSYLRFLNWMPAALRMPEPELIDHAALHSAVYLKMPGLDRCGLPWGGYXVDFKIFVPIAFLAWAVLVPVNATSXGLESAGLDNITSSDIDKLSISNVHSTSEIRFWAHILVAYAFTFWTCYILLKEYEKVASMRLQFLAAEKRRPDQFTARRVDFSPFXMMSFSMEHFFLVYCAAFYLPHSFFISFWQL

SEQ ID NO: 164725 - protein, 48 aa, Glycine max
  Clone ID: PAT_MRT3847_119765C.1.pep
GGKSKLILLKRGGVSQFQDDRPFAIALKTFFFTFFEIAYVRRKIQTFK

SEQ ID NO: 164726 - protein, 54 aa, Glycine max
  Clone ID: PAT_MRT3847_119766C.1.pep
CHASVHASRRTVRTSHIRALHALKSFSRNSCYIYRRKTHHKIDITIPFHHYSQN

SEQ ID NO: 164727 - protein, 122 aa, Glycine max
  Clone ID: PAT_MRT3847_119767C.1.pep
FFNGVYPTRLKNIFLILLSKCGEINNNTRKVKEDILQWGVPNKIDMIALSFVRKGSDLVNVRKVLGPHAKTIQLMSKVENQEGVLNFDEILRETDAFMVARGDLGMEIPVEKIFLAQKMMIY

SEQ ID NO: 164728 - protein, 125 aa, Glycine max
  unsure (1)..(125): unsure at all Xaa locations
  Clone ID: PAT_MRT3847_119768C.1.pep
FLPRTSKASLLLGVFLLKNLVVIPWWSTGADIIVVSTRIXTDXDKAAAHLKGGATKVFISAPNKDALMLVVVVNEHEYKPELDMILYACCTTNCFGPLAXVMIDRLGLGQGLMTTVFFFTCSHKT

SEQ ID NO: 164729 - protein, 33 aa, Glycine max
  Clone ID: PAT_MRT3847_119769C.1.pep
KRRRARPEETAHISLTSSCDEAIWVVVHSSSYL

SEQ ID NO: 164730 - protein, 485 aa, Glycine max
  Clone ID: PAT_MRT3847_11976C.1.pep
MSWLRHLSSKFSSTTITSTRRFTSLSRFSTSTAPARHAGLGPTQAHEKPRVVVLGSGWAGCRLMKGLDTAIYDVVCVSPRNHMVFTPLLASTCVGTLEFRTVAEPIARIQPAISREPGSYFFLANCTAIDADNYVVHCESVTEGAQAPDPWRFTVSYDKLVIALGAQPTTFGIHGVYEHAIFLREVYHAQEIRRKLLLNLMMSDVPGIEEEEKQRLLHCVVVGGGPTGVEFSGELSDFIVRDVRQRYAHVKDYIHVTLIEANEILSSFDVRLRQYATNQLTKSGVRLVRGIVKDVEEKKIILNDGTEVPYGLLVWSTGVGPSAIIRSLDLPKAPGGRIGIDEWLRVPTVEDIFSIGDCSGFVESTGKTPLPALAQVAERQGKYLGILLNKIGKANGGRANSAKDVDFGDQFVYKHMGSMASIGSYKALVDLRQNKEGKGLSLAGFVSWFIWRSAYLTRVISWRNRFYVAINWATTLVFGRDISRI

SEQ ID NO: 164731 - protein, 49 aa, Glycine max
  Clone ID: PAT_MRT3847_119770C.1.pep
IWLASIYPAYTSHRYEIHHHLFQFRGLISELFGSSVIIERDNQATPVEA

SEQ ID NO: 164732 - protein, 79 aa, Glycine max
  Clone ID: PAT_MRT3847_119771C.1.pep
TWPSTATSAGPSGNNSGTSSSSSSTTKSGISDSNTELHGHHLQLQKLGTQRKQHLPIPLNAHSKRTHLQKTTQKKAGRM

SEQ ID NO: 164733 - protein, 80 aa, Glycine max
  Clone ID: PAT_MRT3847_119772C.1.pep
YPSPFLKDLLKPHNISDLVRFLWRIHGGKWNPLYYGGLGLFQLAIYQYHKGLLLEELMVMGLRPGFLFGWLAPIYRRLML

SEQ ID NO: 164734 - protein, 175 aa, Glycine max
  unsure (1)..(175): unsure at all Xaa locations
  Clone ID: PAT_MRT3847_119773C.1.pep
RQTDPVCTCSDPTPYRISLDDKLEKGKEISPSLVRAMEESFISLIIFXPDYASSRLCLEELVTILECRDKYGQTVIPVFCKMEPADIGHQLESXINAFAEHGRKYETNVVQLWRDMLRRKLLRYPGLCRQIGSSVCPLNKAHPQSQCVRSATPHSPRQPRCVPISNFGCAPSPGC

SEQ ID NO: 164735 - protein, 119 aa, Glycine max
  Clone ID: PAT_MRT3847_119774C.1.pep
CLPHAVADTKLVSRTEEHSHYSTKGGNNGILSGTATSNSKNDLKTSVLKVSGQLIGSRLSKPFPSAVGSYITGKYSDKGLFPYDLIVKLYNWNREELEPFGLINCGNSCYANAVLQCLA

SEQ ID NO: 164736 - protein, 99 aa, Glycine max
  Clone ID: PAT_MRT3847_119775C.1.pep
KGQSTEGVNCWQGKRVGVHSIGDHTAIELIGRDRPGLLSEISAVLASLQFNVIAAEVWTHNRRMACALYVNDAPNQAMDDSKRLSIMEEQLNHILRGCE

SEQ ID NO: 164737 - protein, 174 aa, Glycine max
  unsure (1)..(174): unsure at all Xaa locations
  Clone ID: PAT_MRT3847_119776C.1.pep
ARNSARARRGSITSVQAXYXPXXDLTDPXXGTXFXSXXXHNSXMTXGXRXWXLXXLXXPLESTSRMLSPLILGADHYETARGVQKVLQNYKNLQDIIAILGMDDLSEDDKLTVARARKIQRLLSQSFHVAEPFPGAPLNPPEPEGEPLPAPPGVLHGQFRCPFQSPPLSMVGGI

SEQ ID NO: 164738 - protein, 129 aa, Glycine max
  Clone ID: PAT_MRT3847_119777C.1.pep
TIPLSFRPATLGALFFYSFCLPSVLNPALYFPGGPQLGHTIVFVGLAIRSQSGWCAPFVGVFWRAFCVFVGPNSVLIWLGRALFCLCSSAPSWCQCSLISPLSRCILVFFFVPFGSFVFFLGNVKKECK

SEQ ID NO: 164739 - protein, 126 aa, Glycine max
  Clone ID: PAT_MRT3847_119778C.1.pep
SGAQPNNADVSRLLTNVTLLQLLRPPQVGCLHVEFYNALPSVYCHYSIKPHTRRCTPYGTSRYLLRCSISSRANFRPSLLTPHCRTTCMWLLLSTLGLLIFYLLLFPPLLATVFLFLIPHQFSALF

SEQ ID NO: 164740 - protein, 67 aa, Glycine max
  unsure (1)..(67): unsure at all Xaa locations
  Clone ID: PAT_MRT3847_119779C.1.pep
HFPFXMSASENGASVWALSHSLPLRNLHVMLTALSCVSTCVFASHFAQKPRSSPCVILHAHYTTPNT

SEQ ID NO: 164741 - protein, 48 aa, Glycine max
  Clone ID: PAT_MRT3847_11977C.1.pep
AEQQGTVLVLDINYAFNLSETVGTKKRLLGSWLEGEGNKLNLAASALL

SEQ ID NO: 164742 - protein, 268 aa, Glycine max
  unsure (1)..(268): unsure at all Xaa locations
  Clone ID: PAT_MRT3847_119780C.1.pep
PQFPPRGDKAITKNDGVSRSWFSCFXELSGGFRGLKRPMWLLMLVTAISWVAWFPYVLFDTDWMGREVYGGKVGDKAYDSGVHVGALGLMLNSVVLALMSLAVEPLGRLVGGVKWLWGIVNVILAVCMAMTVLITRAAEHERXNAVSAVGHPSVGVQAAALTFFSVLGVPLAITYSVPFALASIYSSTSGAGQGLSLGVLNVAIVVPQMIVSAISGQWDKWFGGGNLPAFVLGAVAAAVSAVLAVVLLPTPKPADVAKVTSVTAGSFH

SEQ ID NO: 164743 - protein, 44 aa, Glycine max
  Clone ID: PAT_MRT3847_119781C.1.pep
ALGYINAGYMYKTNVAFLPSEMIFQIVIWHLKYDLSVCLRPTHT

SEQ ID NO: 164744 - protein, 60 aa, Glycine max
  unsure (1)..(60): unsure at all Xaa locations
  Clone ID: PAT_MRT3847_119782C.1.pep
TESCKSTTPSCLIIRARSYAPQLRQTXKTLASSKKGLVAIHKSKATCLHLKPSTCLANTE

SEQ ID NO: 164745 - protein, 88 aa, Glycine max
  unsure (1)..(88): unsure at all Xaa locations
  Clone ID: PAT_MRT3847_119783C.1.pep
RLEQVDKSAWMTDEEFACXTFAGVNPNGIKSLEEGGPRIKLYTQAYGDHTCIITYQHLVPNWGGLTVYQSIHSKKLFILDHHDYLIPY

SEQ ID NO: 164746 - protein, 164 aa, Glycine max
  Clone ID: PAT_MRT3847_119784C.1.pep
RLCVNNCGFFGSTASMNLCSKCYSAIRLKEQEEASTKSTIETALSSASSAKPSSSTSPPPSAVDVLMESPPPSAAEVEVAVTVTVAVASSSISINSGSVAQPNRCATCRKRVGLTGFKCRCGVTFCGAHTYPEEHACGFDFKTVGREEIARANPVIKAEKLRRI

SEQ ID NO: 164747 - protein, 136 aa, Glycine max
  unsure (1)..(136): unsure at all Xaa locations
  Clone ID: PAT_MRT3847_119785C.1.pep
MFPWLAFGHMIPNLELAKLIAQKGHHVSFVSXPRNIERLPKPSLNTLDINFVNLPLPKVQNLPENAEANTDIPYDVFEHLKEAYDVLQEPLKRFLESSKPDXVFYDFAPFWVGSMASKLGIKALFSAFALHPSRGS

SEQ ID NO: 164748 - protein, 193 aa, Glycine max
  Clone ID: PAT_MRT3847_119786C.1.pep
MAEEHRCEPPEGHRLCVNNCGFFGSTATMNLCSKCYSAIRLKEQEEASTKSTIETALSSASSAKPSSSTSPPPSAVDVLMESPPPSAAEVEVAVTVTVAVASSSISINSGSVAQPNRCATCRKRVGLTGFKCRCGVTFCGAHRYPEEHACGFDFKTVGREEIARANPRDQSGEAAEDLMISIWAVRWDRSLVI

SEQ ID NO: 164749 - protein, 92 aa, Glycine max
  Clone ID: PAT_MRT3847_119787C.1.pep
NDIIVIDLSIVLNFDINFYVCANLQIMVRIRGLGRTLGRVIGRALEREKIIVIQMMLLSGKGPQHPHVGNGKSLLLLRMLLTWIVKQVASIT

SEQ ID NO: 164750 - protein, 83 aa, Glycine max
  Clone ID: PAT_MRT3847_119788C.1.pep
WIYRILRLLACHSIIDCTVVADQHALPIHLQRLYGMNAVAKYFASIDDGAGSLGPFMMLAQDKAALQTWSVFPFLYSTLLSGE

SEQ ID NO: 164751 - protein, 153 aa, Glycine max
  unsure (1)..(153): unsure at all Xaa locations
  Clone ID: PAT_MRT3847_119789C.1.pep
WIPRAARIRHELHKDLHRHSLXSRMSDVXMVDSELQDHLDYLDDWAKPEKVXXSLTTLPGSSFIQPEPLGVVCIISTWNYPXATXLQPLVGALXAGNXVLLRLRRRHWTRSFRLFAKVRWTKRFRLVGGVGLHQKHGWERFRTSSFQQGGDFF

SEQ ID NO: 164752 - protein, 127 aa, Glycine max
  unsure (1)..(127): unsure at all Xaa locations
  Clone ID: PAT_MRT3847_11978C.1.pep
DRNRPGRARRPHRIANRTERERGGREQKAPTEATKXRGRQSKDRDGEENPPRPPRETRRQKGATGGTHSQEGQRNPTARSQSRRRGRKTEHEEGRGRGPRPAQNQQSRQEQEGKQGERAEKEDRGNK

SEQ ID NO: 164753 - protein, 87 aa, Glycine max
  unsure (1)..(87): unsure at all Xaa locations
  Clone ID: PAT_MRT3847_119790C.1.pep
MXSTXXXMXVQEXXVXXLKEGSXGEXGLGXXVYWMFRDQXVTDNWAXIXXVXEXNKAXVXVXVVFNXFHTFLGXKXXXLGFMLRGAN

SEQ ID NO: 164754 - protein, 65 aa, Glycine max
  Clone ID: PAT_MRT3847_119791C.1.pep
YMGIMKSHDAKLVAIFPPSLSQCNQSKQPLPQKIQTNMDQKLSLGEGIMNHHQVGYMKNGRVSLV

SEQ ID NO: 164755 - protein, 74 aa, Glycine max
  Clone ID: PAT_MRT3847_119792C.1.pep
RIEPGTSRTLSENNHTTRPMPTLVEVNCYNIVKHFLNGICATFAKFTIVILKMNNAWFVIASSTTHLIYIYVRW

SEQ ID NO: 164756 - protein, 104 aa, Glycine max
  Clone ID: PAT_MRT3847_119793C.1.pep
DTVMCTTGTVSGLHSNTDAIRQNDIENWWIVYNWRTHSAPFQCSCDPKYLNMPSERAKKSLRQCLGSVTRLMRPFMCDATRKMKSTHGSNTMVDNSKGSIIVNT

SEQ ID NO: 164757 - protein, 57 aa, Glycine max
  Clone ID: PAT_MRT3847_119794C.1.pep
TTHRSLGMGCIQPKPSPPAPIMIFNYHTSAAGIPMSEECFTRHVDGQAKASVPAANA

SEQ ID NO: 164758 - protein, 364 aa, Glycine max
  Clone ID: PAT_MRT3847_119795C.1.pep
PRVRSSLFPSLERLKFYDMEAWEKWECEAVTGAFPCLQYLDISKCPKLKGDLPEQLLPLRRLGIRKCRQLEASAPRALELELQDFGKLQLDWATLKKLSMGGHSMEALLLEKSDTLEELEIFCCPLLSEMFVIFCNCRMRDYGCDSLKTFPLDFFPTLRTLHLSGFRNLRMITQDHTHNHLRFLKIRKCPQLESLPGSMHMQPSLKELRIDDCPRVESFPEEGLPSNLKQMRLYKCSCGLMASLKGALGENPSLEWLLISNLDEESFPDEGLLPLSLTYLWIHDFPNLEKLEYKGLCQLSSLKGLNLDDCPNLQQLPEEGLPKSISHLKISGNCPLLKQRCQNSGGQDWSKIVHIQTVDIINTW

SEQ ID NO: 164759 - protein, 53 aa, Glycine max
  unsure (1)..(53): unsure at all Xaa locations
  Clone ID: PAT_MRT3847_119796C.1.pep
RTRAFQPKPFVAGVVAXALDATVFKREAAILKDRCKHPWLKDDPFRGDTRADG

SEQ ID NO: 164760 - protein, 487 aa, Glycine max
  Clone ID: PAT_MRT3847_119797C.1.pep
NSAGVTRVKVPDTSKARVAATIGMRECKERCLRDCSCVAYTSANESSGSGCVTWHGNMEDTRTYMQVGQSLFVRVDKLELAKYAKHPYGSLGKKGMVAVLTAAIFLFLLLAITFVYWFVKTRRQGIRRDRKYSFRLTFDDSTDLQEFDTTKNSDLPFFELSSIAAATDNFSDANKLGQGGFGSVYKGLLINGMEIAVKRLSKYSGQGIEEFKNEVVLISKLQHRNLVRILGCCIQGEEKMLIYEYLSNKSLDSLIFDESKRSQLDWKKRFDIICGVARGMLYLHQDSRLRIIHRDLKASNVLMDSSLNPKIADFGMARIFGGDQIAANTNRVVGTYGYMSPEYAMEGQFSVKSDVYSFGVLLLEIVTGRKNSGLYEDITATNLVGHIWDLWREGKTMEIVDQSLGESCSDHEVQRCIQIGLLCVQDYAADRPSMSAVVFMLGNDSTLPDPKQPAFVFKKTNYESSNPSTSEGIYSVNDVSITMIEAR

SEQ ID NO: 164761 - protein, 34 aa, Glycine max
  Clone ID: PAT_MRT3847_119798C.1.pep
PNGFKIFSHRERFWVRFLAFYPLLIKHGTTPVVV

SEQ ID NO: 164762 - protein, 101 aa, Glycine max
  Clone ID: PAT_MRT3847_119799C.1.pep
RNKHSRGHVKFIRCSNCSICCAKDKAITMLLVTNIVEQAATTDVHDACVYKQYTLPNLYVKMQTSVDCTIHSHVVRVRSHTDWIQHEPPHPYIRRTDDAPR

SEQ ID NO: 164763 - protein, 86 aa, Glycine max
  unsure (1)..(86): unsure at all Xaa locations
  Clone ID: PAT_MRT3847_11979C.1.pep
MEPRVANKFRLGRKIGSGSFGEIYLGTNTQTNEEVAXKLENVKTKHPQLLYESKLYKILQGGTGIPNVRWFGVERDYNVLVMDLLG

SEQ ID NO: 164764 - protein, 87 aa, Glycine max
  Clone ID: PAT_MRT3847_1197C.1.pep
RSIYACVKIQKMAITFEPLNRDNGVHQNKLRLFGDSILEDQPHDHHSSSQQQYRFFMDSEFYFQGNVCKFNLLIHYYPHGRALNIIN

SEQ ID NO: 164765 - protein, 36 aa, Glycine max
  Clone ID: PAT_MRT3847_119800C.1.pep
NGTWPRKSRKEPPHLVIGECSSNQVLGEQRKDEENS

SEQ ID NO: 164766 - protein, 114 aa, Glycine max
  unsure (1)..(114): unsure at all Xaa locations
  Clone ID: PAT_MRT3847_119801C.1.pep
EHTDLFAWSMADMPDINPSFHYHKLAICNDVKLVTQRKRKIREERCQTVXQEVVKLAIASFIRDINYSTXLFSVVMVKKPNGKWRICTDYIDLNXACPKDAYPLPNIDHMTDGL

SEQ ID NO: 164767 - protein, 134 aa, Glycine max
  unsure (1)..(134): unsure at all Xaa locations
  Clone ID: PAT_MRT3847_119802C.1.pep
DITSIVGNGGGVQGMQGGPPVGRKKLGTFSYLPDLEEAQWAKEVEYLFRRGGIPGWEFKWGNGFWSRGPTRXPGYYEGRSWTMWKLPMLGGTEAFKGWKELKEAKTDYPNGLIRIIGFDNVGQGQGISLMASKP

SEQ ID NO: 164768 - protein, 77 aa, Glycine max
  Clone ID: PAT_MRT3847_119803C.1.pep
GAIDLHLHLQTGHCRNCEIGALRSDHDIVPRNPDDEEDAIDDPARRVQPRSNSFSRLYPCRYSARSPQSAPRATMKK

SEQ ID NO: 164769 - protein, 131 aa, Glycine max
  Clone ID: PAT_MRT3847_119804C.1.pep
QILSTVTVLSSSESTCQIQIRFISFLIYTNSARGKYGGYLSSLRKEFLKKRKKGKLPKDARMILMDWWNTHYRWPYPTEEEKVQLSEMTGLDQKQINNWFINQRKRHWKPTEDMRFAIMDGVSGSGLGGPM

SEQ ID NO: 164770 - protein, 87 aa, Glycine max
  Clone ID: PAT_MRT3847_119805C.1.pep
LLVVSYVLESVGWQLCNRSIYLIVDCVIGQCEVICSLWTENTLCRRLLSLGQQVYCCIVCDSSVLYDILLCYQLVFYHLGRLSLKCA

SEQ ID NO: 164771 - protein, 87 aa, Glycine max
  Clone ID: PAT_MRT3847_119806C.1.pep
QLGQRASRHIVVQCVGNSSACALRPEYILGTRCSLSSLSPVVLSPPPRRIPQMRRRPRCPRSHSHFRRASHVFKATQVRMTPTRNGC

SEQ ID NO: 164772 - protein, 175 aa, Glycine max
  unsure (1)..(175): unsure at all Xaa locations
  Clone ID: PAT_MRT3847_119807C.1.pep
SRHGIVYQLGISDHNTSSAVSWLSWFSGFLVSRIHAVVXLASRSSYPAKEHIYYRLVQFLVIILAILVIVGLLEFTKFKFMDIFTSLLAFIPTGWGLISIAQVFRPFLQSTIIWDGVVSVARIYDIMFGVIIMSPVALLSWLPGFQNMQTRILFNEAFSRGLRIFQIVTGKKSQS

SEQ ID NO: 164773 - protein, 39 aa, Glycine max
  Clone ID: PAT_MRT3847_119808C.1.pep
SDMDLNSGFSHITKSRIWDYYICPKFGPVSQLKIFRIFI

SEQ ID NO: 164774 - protein, 60 aa, Glycine max
  Clone ID: PAT_MRT3847_119809C.1.pep
SPLSTKQTKYNHSHQLNQQQPSHTQMKIWNTESLISHLLWPCAYHFSVNPGSKHNTDLIS

SEQ ID NO: 164775 - protein, 178 aa, Glycine max
  Clone ID: PAT_MRT3847_11980C.1.pep
MMGLSKLGTAIMTITAVTLVALFAEIVYVLWQRRQRLRPRVRVEPQEASLQCSSTSSSPSNDDDVELELEQHVMKWQQCLNGNGPSRMLFTIKEEEREEVESDNGNGLSEECKKSARACLDNERVAVVDEVVVAVEELLLLDETTTPFSTPCASPPYYTPYASPSREECRKDSNDGNG

SEQ ID NO: 164776 - protein, 135 aa, Glycine max
  Clone ID: PAT_MRT3847_119810C.1.pep
MARNKYAAKEHIYYRLVQFLVIILAILVIVGLLEFTKFKFMDIFTSLLAFIPTGWGLISIAQVFRPFLQSTIIWDGVVSVARIYDIMFGVIIMAPVALLSWLPGFQNMQTRILFNEAFSRGLRIFQIVTGKKSQS

SEQ ID NO: 164777 - protein, 96 aa, Glycine max
  unsure (1)..(96): unsure at all Xaa locations
  Clone ID: PAT_MRT3847_119811C.1.pep
MAMPETIPPTTPSAQVVGNAFVEQYYHILHQSPELVHRFYQDSSFLTRSDSNGVMTTVATVQDIHEKIISLEYEDYTAEIKTADAXESHXGSVIVL

SEQ ID NO: 164778 - protein, 308 aa, Glycine max
  Clone ID: PAT_MRT3847_119812C.1.pep
MAMPETIPPTTPSAQVVGNAFVEQYYHILHQSPELVHRFYQDSSFLTRSDSNGVMTTVTTVQEIHEKIISLKYEDYTAEIKTADAQESHKGGVIVLVTGCLTGKDNVRRKFSQTFFLAPQEKGYYVLNDVFRFIEENDTPQINSSSVSVINENAEAVHEPESEDLHAPKHLVEDNATLAEGENLNNGAEVYHPQDEEEGSVIDEEVAEPPTDLSQNDIVTVDDSTSAVLDDAPRRSYAAIVMKSHVASGHVYVPSRAARIASAKSSEQWPTTAKSTPVPEALAPSSDSAPGSSDVHEEAEGHSIYIRN

SEQ ID NO: 164779 - protein, 104 aa, Glycine max
  Clone ID: PAT_MRT3847_119813C.1.pep
SHPQGGLLWFGTSPSAPFGGGGTPKNGPVAPWVQRSGGPGFLEIKRPPPPGIFPVRGSFNGGPGFPGPGAKFQPGCPKKFPFFFPPPQGVWVPNQKGPPPPPPF

SEQ ID NO: 164780 - protein, 39 aa, Glycine max
  Clone ID: PAT_MRT3847_119814C.1.pep
LRFIQLNLLPIQSNTHVCPLKSVILSFNAISTDIQTHHK

SEQ ID NO: 164781 - protein, 62 aa, Glycine max
  Clone ID: PAT_MRT3847_119815C.1.pep
IPELIEGIHKDYSSSGYGGDMAGAAAANSLNKELGPKLREHMQSCADHPDEISTSTEVTSLV

SEQ ID NO: 164782 - protein, 114 aa, Glycine max
  unsure (1)..(114): unsure at all Xaa locations
  Clone ID: PAT_MRT3847_119816C.1.pep
MAMPETIPPTTPSAQVVGNAFVEQYYHILHQSPELVHRFYQDSSFLTRSDSNGVMTTVTTVQEIHEKIISLKYEDYTAEIKTADAQESHKGGVIVLVTGCXTXXDNVRGNSHRH

SEQ ID NO: 164783 - protein, 233 aa, Glycine max
  Clone ID: PAT_MRT3847_119817C.1.pep
REEGGFAGVPPTVMVKCLDKGLRPIEDYQNDSANVKIGSLQMFMRNIGSCEDMGPSAFPVEEVHKISVLDIRLVNADRHAGNILIARDGEDGQTILIPIDHGYCLPESFEDCTFDWLYWPQAKEPYSPDTIDYIKSLDAEEDIKLLKFHGWDLPPKCAQILRISTMLLLKGAERGLTPFALGSIMCRETLKKKSVIEQIVEEAEEAAFPGASEAAFLDLVSVVMDSHLDELFP

SEQ ID NO: 164784 - protein, 72 aa, Glycine max
  Clone ID: PAT_MRT3847_119818C.1.pep
VRSINEATLALPMRLFSLLISASSSHCFDFPLPRISILICYFFSPAQSHFLSSWWNKHFQLWPFTEPPYPSM

SEQ ID NO: 164785 - protein, 72 aa, Glycine max
  Clone ID: PAT_MRT3847_119819C.1.pep
LYFPYILHYKYTIIILHIIILTLIIIYIFQLSFFLLCSYFLIIFPTVFFFIYFYYLFFSFNFFKFFIYFFSI

SEQ ID NO: 164786 - protein, 131 aa, Glycine max
  Clone ID: PAT_MRT3847_11981C.1.pep
FFFISFGIAADDTIDDAVFSHELAHMVEIQEKIELKVAQEELLTDWFTDGRTTAPLTAAVWAYGCALVHDMAQDTIPGAFAIDVVMAAIITTIAYGLTPGIKGGSLWGTISETISQYTVWNTVGTVRTPVR

SEQ ID NO: 164787 - protein, 154 aa, Glycine max
  unsure (1)..(154): unsure at all Xaa locations
  Clone ID: PAT_MRT3847_119820C.1.pep
KETKLGARSCGSNFTSVVLQTFSYFIGSLKFNQLAILLQPLYWEIPGVTHFIRFVKHPHFPTCRNXSEKVRTDGLSKHLPILIGXWNAPCTGPLSATVAVVTPIVTATFAIALAPAPSAFFFSFFATFAGFPRGFLIRGLLLGFPLSVYWGLDP

SEQ ID NO: 164788 - protein, 65 aa, Glycine max
  Clone ID: PAT_MRT3847_119821C.1.pep
CPQSNMAMEYFIETKNYQTNISETLHDHLPYLNTYPSQTQTKFTSQMQLNRHGIKNTAFQGIIHL

SEQ ID NO: 164789 - protein, 57 aa, Glycine max
  Clone ID: PAT_MRT3847_119822C.1.pep
FELVTRGSSRVDLQEYILTALADKTVIFVTHQVEFLPAADLILVWLYGFSSHSSIMQ

SEQ ID NO: 164790 - protein, 76 aa, Glycine max
  Clone ID: PAT_MRT3847_119823C.1.pep
FFAWFGRKMISWFFSILSFYVMYLISPLVCGSDGPKNCIFLCFSGLFDWLTIVLPLQHKNFNFFASSAFVLCYDFS

SEQ ID NO: 164791 - protein, 67 aa, Glycine max
  Clone ID: PAT_MRT3847_119824C.1.pep
GFKFMTASTLHTISLPLIPYNSSFHPYALYSLSPKPTYFNPHPIFHHTMHASHIQDSDGRTLDLVQS

SEQ ID NO: 164792 - protein, 41 aa, Glycine max
  Clone ID: PAT_MRT3847_119825C.1.pep
KSVSVLLADMLESSCQPKHFEQNKVIKKSHSRLNTYMYLTL

SEQ ID NO: 164793 - protein, 328 aa, Glycine max
  unsure (1)..(328): unsure at all Xaa locations
  Clone ID: PAT_MRT3847_119826C.1.pep
MVLLSKATTEQYSYIKNYMPTAFSSTIPIVDLSKPDAKTLIVKACEEFGFFKVINHGVPIEAISQLEYEAFKXFFSMPLNEKKVGPPNPFVGCSKKIGHNGDVGWMEYLLLNTXNQEHNFSVYGKNAEKFRCLLNSYMSSVRKMACEILELMAEGLKIQQKDVFSKLLMDKQSDSIFRVNHYAACPEMTLNDQNLIGFGEHTDPQIISLLRSNNTSGLQIYLRDGNWISVPPARAAFFINVGDSLQVMTNGRFRSVRHRVLANGFKSRLSMIYFGGPPLSEKIAPLSSLMKGKESLYKEFTWFEYKKSIYGSRLSKNRLEHFERIAAS

SEQ ID NO: 164794 - protein, 41 aa, Glycine max
  Clone ID: PAT_MRT3847_119827C.1.pep
PSLYRSLYSFFHRAFMSVNQYFNHGNPADKHSLPGLDCLEP

SEQ ID NO: 164795 - protein, 46 aa, Glycine max
  Clone ID: PAT_MRT3847_119828C.1.pep
QPRPEFGIHYSITFKSFQLLVRFKRDLIIPATGKFNFMCIAEPRAE

SEQ ID NO: 164796 - protein, 345 aa, Glycine max
  Clone ID: PAT_MRT3847_119829C.1.pep
KSWARADLEASKYQMAEYRISVYGRKQSEWGQLASWFVNNALYSKNAVWLIQLPRLYNVYKNMGIVTSFQNILDNVFIPLFEVTVDPNSHPQLHLFLKQVVGFDLVDDESKPERRPTKHMPTPAEWTNEFNPAYSYYLYYCYANLYTLNKLRESKGMTTIKLRPHCGEAGDSDHLAAAFLLCHNISHGINLRKTPVLQYLYYLAQVGLAMSPLSNNSLFLDYKRNPLPMFFQRGLNVSLSTDDPLQIHLTKEPLLEEYSVPAKVWKLSACDLCEIARKSVYQSGFSHQAKSHWLGDKYLLRGSEGNDIHKTNVPNLRISFRYETWKEEMQFIYAGQAVFLEDVDP

SEQ ID NO: 164797 - protein, 69 aa, Glycine max
  Clone ID: PAT_MRT3847_11982C.1.pep
QAASKIHQVPYSLFPFIRIRAFYRGEGYSATPTCKPFLKSFCKTCLLRSVCCMHACHVGTFIASSNDDV

SEQ ID NO: 164798 - protein, 23 aa, Glycine max
  Clone ID: PAT_MRT3847_119830C.1.pep
ASSSTYSLSMCNNFAPIQDKGLV

SEQ ID NO: 164799 - protein, 56 aa, Glycine max
  Clone ID: PAT_MRT3847_119831C.1.pep
WYGCCARSGRPGMTHATHASVHASRRPIAACQKHRIRILSDILTRRRVLLQHGSGC

SEQ ID NO: 164800 - protein, 252 aa, Glycine max
  unsure (1)..(252): unsure at all Xaa locations
  Clone ID: PAT_MRT3847_119832C.1.pep
KRVEGDDSXSRKWKDVEVRMDLTDDLLHMVFSFLDHPNLCKAARVCKQWRGASAHEDFWKSLNFEDRNISVEQFEDMCSRYPNATAVSLSGSAIYLLVMKAICSLRADCSMLRRLTINDSILGSGIQEISVNHDRLCHLQLTKCRVMRIAVRCPQLETMSLKRSNMAQTALNCPLLQELDIGSCHKLPDSAIRSAVTSCSQLVSLDMSNCSSVSDETLREISMNCANLSFLDASYCPNLFLETVRLPMLTVL

SEQ ID NO: 164801 - protein, 55 aa, Glycine max
  Clone ID: PAT_MRT3847_119833C.1.pep
HVNTEGKPLYQKQNENQTIRNWTALFRGLPVHLALPNLVPLRSTYCNKGEYESEI

SEQ ID NO: 164802 - protein, 45 aa, Glycine max
  Clone ID: PAT_MRT3847_119834C.1.pep
AKAKPPPVGDNILLEPVYLFKYFYFCKISSVSDASFFISHFLRTT

SEQ ID NO: 164803 - protein, 422 aa, Glycine max
  unsure (1)..(422): unsure at all Xaa locations
  Clone ID: PAT_MRT3847_119835C.1.pep
MGFLVPLFFHIVAFICTIAAIALAVLHIYRHLLNYTEPTYQRYIVRIIFMVPVYALMSFLSLVIPESSIYFNSIREVYEAWVIYNFLSLCLEWVGGPGAVVLSLTGRVLKPSWFLMTCCLPPLALDGRFIRKCKQGCLQFVILKPILVVVTLILYAKGKYKDGNFSPKQSYLYLTIIYTFSYTMALYALVLFYVACKDLLQPFNPVPKFIIIKSVVFLTYWQGVLVFLAAKSEFIKDADEAALLQDFFICVEMLVAAVGHFYAFPHXEYSGANIGGSRGLTASLAHALKLNDFYHDTVHQFAPTYHDYVLYNHGGEGEEGTRKYRXRTFVPIGPEMDTVRRNKHLFGNKTDDVQLSSFPSNSSSPSNSDPISDVPHSGAMKSSLLVDVSNSLSVPYDMTLIXDLDASSYPEKVPAADKAGSR

SEQ ID NO: 164804 - protein, 61 aa, Glycine max
  Clone ID: PAT_MRT3847_119836C.1.pep
FGSRLAKKKRQKGSPQKLVKMKHMLGVLYKTGKAKTLGQTNHNQAIVLSCALNNAYLLFCF

SEQ ID NO: 164805 - protein, 102 aa, Glycine max
  Clone ID: PAT_MRT3847_119837C.1.pep
DSDNEAENASTMVNEEHLMGKMNKGLPPVDLEEPFCWQAYNYAKVSFKIVGASVSGVAVDPKSVSIYPAVKAPMEFSTQVTSGDYILWNTLGKCPHVATIKR

SEQ ID NO: 164806 - protein, 74 aa, Glycine max
  Clone ID: PAT_MRT3847_119838C.1.pep
VDLEEPFCWQAYNYAKVSFKIVGASVSGVAVDPKSVSIYPAVKAPMEFSTQVTSGDYILWNTLGKCPHVATIKR

SEQ ID NO: 164807 - protein, 249 aa, Glycine max
  Clone ID: PAT_MRT3847_119839C.1.pep
PSLLLSRQSRPRRLRLPIFLLLQFFTMDRVSHRGSRFLLDASPLLELEFQPTMDPVINWVSNFLHSLQHCMDPVINWVLNFLHSLQHCMDPVINWLMSLISCLATKINQILEKFTGHQFNVKTDACDEISLGGEWLLYVAIAVVVALAAIPVVWLLWKVVFGVVWLLWKLISGVVLLLWNVISIFVLGLWNVMRKIFCCCCERGKTMKAPGRNIRIYRDDFERSPKNYFRNLRRDQRNWRNNQPHTILV

SEQ ID NO: 164808 - protein, 114 aa, Glycine max
  Clone ID: PAT_MRT3847_11983C.1.pep
RQKGPVTYDSTGSKDAMLSSSNFFWSSGTAKRGAVSGNRDVVGSETEASRSLILDSSQGALRKIPAPGAQRSSAIMSSEHNRTSSGRNTSNIKNLETTLRGIESLHFNDERVHY

SEQ ID NO: 164809 - protein, 154 aa, Glycine max
  Clone ID: PAT_MRT3847_119840C.1.pep
FFFFFRDSPFLLLQFFTMDRVSHRGSRFLLDASPLLEFEFQPTMDPVINWVSNFLHSLQHCMDPVIKWFMSLISCLAAKINQILEKFTGHQFNVKTDACDEISLGGEWLLYVAIAVVVALAAIPVVWLLWKVVFGVVWLLWKLISGVGLLLWNV

SEQ ID NO: 164810 - protein, 44 aa, Glycine max
  Clone ID: PAT_MRT3847_119841C.1.pep
SLVRSMRSDGASARGIWRAVMVGGYKLMGVENEVGCRGTLLLAM

SEQ ID NO: 164811 - protein, 43 aa, Glycine max
  unsure (1)..(43): unsure at all Xaa locations
  Clone ID: PAT_MRT3847_119842C.1.pep
MYAMVHDISLSTVPGDYGIGVKXTSIYTVMAYRLNPGIAEHRS

SEQ ID NO: 164812 - protein, 40 aa, Glycine max
  Clone ID: PAT_MRT3847_119843C.1.pep
ATHMNMLFVANTTHGHLHPDTKTGIHQCSGLTPGVLIWQF

SEQ ID NO: 164813 - protein, 100 aa, Glycine max
  Clone ID: PAT_MRT3847_119844C.1.pep
RSRGPPFFFFFWLGFLFSLPLLFCFLWGNKKKGSIYRESPNTGVPKENCAENFLPRPNNTSFLSPAKTSYRVFPNPSPTEAVAKNLPPQRIKSLPPPPVH

SEQ ID NO: 164814 - protein, 80 aa, Glycine max
  Clone ID: PAT_MRT3847_119845C.1.pep
QEKRVRSLSTTHPLSAITPMTLLLIVTRHSSTTQQSAWFLVVKPWRSHTLCIYLTPFFHVLGSFIGGPLTASYSTFASFC

SEQ ID NO: 164815 - protein, 50 aa, Glycine max
  Clone ID: PAT_MRT3847_119846C.1.pep
DASFRLCYKNYKFQGCCLEGFYMITGCILWADIQAFIDNWYCILSMDTGL

SEQ ID NO: 164816 - protein, 54 aa, Glycine max
  Clone ID: PAT_MRT3847_119847C.1.pep
WRTSLSAIESKIPFFNLKNTNPEELLIKKFYKEGCSDMASLLCLKTTHAPREGT

SEQ ID NO: 164817 - protein, 259 aa, Glycine max
  Clone ID: PAT_MRT3847_119848C.1.pep
NKLGLSHNNFTAPLLECFENLLNLRAIDLSHNRFHGGIPDSFMRLRHLTELVFSGNPGLGGPLPAWIGNFSANLEKLHLGFCSFSGGIPESLLYMKSLKYLDLENNLLFGNLVDFQQPLVLLNLASNQFAGTLPCFAASVQSLTVLNLSQQILIAGGLPACIASFQALTHLNLSGNHLKYRIYPRLVFSEKLLVLDLSNNALSGPIPSKIAETTDKLGLVLLDLSHNQFSGEIPVKITELKSLQALFLSHNLLSGEIPA

SEQ ID NO: 164818 - protein, 242 aa, Glycine max
  Clone ID: PAT_MRT3847_119849C.1.pep
HASGLSRFTDVLRLIDQSSLKPNAMLLDEDDASSLTRIALGIDCFLALKMTVLLPYKTLQLQCLGAVEDSTRQGIPQTRSKDYELLILILSSGILTSIMIDSTYGTIFSYICYLVGNLCNQCQQALVSGRGTNNNEDHENQLLLFTRILFPNFISELVKADQHILAGFLVTKFMHSNESLSLVNIAGASLNRYLEMQLHILQVKEFPVEKTCKTLKNTVGRMRGQLSSLIQSILPLLSASVS

SEQ ID NO: 164819 - protein, 71 aa, Glycine max
  unsure (1)..(71): unsure at all Xaa locations
  Clone ID: PAT_MRT3847_11984C.1.pep
MEPRVANKFRLGRKIGSGSFGEIYLGTNTQTNEEVAIKLENVKTKHPQLLYESKLYKILQGGTXGIPNVRW

SEQ ID NO: 164820 - protein, 213 aa, Glycine max
  unsure (1)..(213): unsure at all Xaa locations
  Clone ID: PAT_MRT3847_119850C.1.pep
TWLDKQQVGSVLFVSFGSGGTLSQEQITELACGLDLSNHKFLWAVRAPSNVANATYIGEQKHVDPLEFMPCGFLERTKEKGMVFPSWAPQIQILSHSSVGGFLTHCGWNSILESVLKGVPFITWPLFAEQKMNAILLCECLKVGVRPRVGENGLVERAEIVTVIKCLMEEEEXGKKMRERMNELKEAAINAIKQDGASTRTLSQLALKWKSLA

SEQ ID NO: 164821 - protein, 78 aa, Glycine max
  Clone ID: PAT_MRT3847_119851C.1.pep
RTRCIPLGPGLSFATTGIFANKCVPGKYNGELCIVVILLILQKNNSSYTNPSNWKLKIKTIPCNAILQSYSLDIWIWV

SEQ ID NO: 164822 - protein, 73 aa, Glycine max
  Clone ID: PAT_MRT3847_119852C.1.pep
TTRPEFLCALGLVVKMDGHTKGSCNVIQRSDGNRMDLVVDKSASPTMVTCELVPKILSRLTKPCYAAVTSWDR

SEQ ID NO: 164823 - protein, 85 aa, Glycine max
  Clone ID: PAT_MRT3847_119853C.1.pep
MTIPIRYDNPSAINLSKNLVQHSRTKHIEIRHHFLGDHVLKGDCVLEFVDAKNQLADIFTKPLPKETFFSIRRELGLLYISDLDK

SEQ ID NO: 164824 - protein, 75 aa, Glycine max
  Clone ID: PAT_MRT3847_119854C.1.pep
RKRESNSQPFFPPFSLYYQTNFITSFSFFRPLLFLVESSLNRSTHDTTRIGTNVPTHKKHFVLLITTFKKVEQNK

SEQ ID NO: 164825 - protein, 402 aa, Glycine max
  Clone ID: PAT_MRT3847_119855C.1.pep
MKPKPKPYSFLPLNRFLRALQSRPLMAQTPTSLDAEHPSDNDQHMGFRARSLSGESRAEQAWAHWTKLGRPRFIVAPMVDNSELPFRMLCRKYGAQGAYTPMLHSRIFTETEKYRNEEFTTCKEDRPLFVQFCANDPDVLLEAARKVERFCDYVDINLGCPQRIAKRGYYGAFLMDNLPLVKSLVEKLAVNLQVPVSCKIRLFPNLEDTLKYARMLEEAGCMLLAVHGRTRDEKDGKKFRADWKAIRAVKNAVRIPVLANGNIRHIDDVRDCLEETGVEGVLSAETLLENPALFAGFRTAEWVSESEGTNVDGKLDQADLLIEYLKLCEKYPVPWRMIRSHVHKLLGDWFSLQPHIREELNKQSKLTFEFLYDMVDRLRATGIRIPLYKDTQVELTAGSYPD

SEQ ID NO: 164826 - protein, 135 aa, Glycine max
  unsure (1)..(135): unsure at all Xaa locations
  Clone ID: PAT_MRT3847_119856C.1.pep
RVRLQRVAEGLPPYTLDQLTHSCIKIVELERVYYYILRNTEKSLILKLTSLRRFFQGQALGGDGNGNGNNNNYPQFPELFHPGFHPQYRFKNKHKVVDNVVFINNPDSFYIRIEDVERFKRLSGVXGVACGQRCC

SEQ ID NO: 164827 - protein, 57 aa, Glycine max
  Clone ID: PAT_MRT3847_119857C.1.pep
LSAIAFHLGYTIEVLLSRMREYVSLVHIKGPHSFFFWCDILLQGIDMLNLRWPPRLT

SEQ ID NO: 164828 - protein, 68 aa, Glycine max
  Clone ID: PAT_MRT3847_119858C.1.pep
SGSDSSIFSGSLRFLKRFLCFVRISSVREKEKGLEPQFHCLRVWDISLSTDIISQISTARMCENEFRG

SEQ ID NO: 164829 - protein, 88 aa, Glycine max
  unsure (1)..(88): unsure at all Xaa locations
  Clone ID: PAT_MRT3847_119859C.1.pep
DVVVAGGMESMSNVPNFLPEAWKGSPLGHHSLVDGMPKDGXRDAYNDVGMGVXAELYADNHALTLHHQNIYAISIMNCGIVSKKEAPF

SEQ ID NO: 164830 - protein, 392 aa, Glycine max
  unsure (1)..(392): unsure at all Xaa locations
  Clone ID: PAT_MRT3847_11985C.1.pep
TAAKTTEGSLEDLFNFCSRKLPLKTVLMLADQMLNRVEFVHSKSFLHRDIKPDNFLMGLGRRANQVYIIDFGLAKKYRDTTTHQHIPYRENKNLTGTARYASMNTHLGIEQSRRDDLESLGYVLMYFLRGSLPWQGLKAGTKKQKYEKISEKKVSTSIESLCRGYPSEFASYFHYCRSLRFDDKPDYAYLKRLFRDLFIREGFQFDYVFDWTILKYQQSQIATPVRVIVPAAGQSSGLPPAVVNADRQTGGVNSRHTGWSSSDPARRRNSRPIANDGMSSRQKAPVPSDSTGSKDVMLSSSNFRSSGSTRRGAVSSSRDAAVGNETEPSHPLTMDASPGALRKISXAQRSSPIMSFEHNRTSSGRNTSNMKNYESTIRGIETLNFNDERLQY

SEQ ID NO: 164831 - protein, 233 aa, Glycine max
  Clone ID: PAT_MRT3847_119860C.1.pep
KLDRGKLNKEQSAYMPQIPDIAKCPEHLLPLKEWEDAFLAEFSALRTNFSCLDGSSAIHSGNLHVHSSQIVGNNCGEFSSVMSRDVLLNNHLRIGNANDQPTNLTAEDKDRTLSSENPEAKTSADQSSSSSSHTPPLLSVILAMDSVARVSSLLKRIRLLEAADTMTRNDCMWLFALCATVDAPLDADTCAALRSLLRKCASIRAGKAELDEEVVMLNILATIFGRYFGQSEN

SEQ ID NO: 164832 - protein, 57 aa, Glycine max
  Clone ID: PAT_MRT3847_119861C.1.pep
IRVAFLRPRRRRAGSNNCKSKIQPIVCAETSYNHCKIKFQLVIYFASPLLMCLKVTK

SEQ ID NO: 164833 - protein, 120 aa, Glycine max
  Clone ID: PAT_MRT3847_119862C.1.pep
HVLTTKLILLHFSGFSSRLPRPGLGIFGVIKCLQRVCGNILHGLWCSCRLLVSGLVCLRVTANWLLCQLSSRLSRAGWRLELHSRPNILGLPCMRCFCLSAVVPEVTGPWYIASHRSTAS

SEQ ID NO: 164834 - protein, 234 aa, Glycine max
  Clone ID: PAT_MRT3847_119863C.1.pep
SEGDDFVDISEKNAVTLSKTKKKGRDHKETIVNGIKDAAEKYGCVYVFSFENMRNQKLKEFREQLKSNSRFFLGSNKVMQVALGRSASDEIRPGLHKVSKLLRGDSGMFFTNLSKEEVERLFKEFEEYDFARTGSIATEKVDLKEGPLEQFTHEMEPFLRKQGMPVRLNKGVVELVSDFVVCEEGKPLSPEASRILRLMGIKMATFRLSLICRWSPDEFELYIDGPDESDIECS

SEQ ID NO: 164835 - protein, 327 aa, Glycine max
  unsure (1)..(327): unsure at all Xaa locations
  Clone ID: PAT_MRT3847_119864C.1.pep
MGNCLGKSEKKLTAEIVPRDGAKVYPTVRLHGSPKSILAAYIRFALLHKSVSLDLVETETERVGDGGGGAVTLQVGSEVVSGSRETLLRFIDARFPGPSLGSGREDETTPLLASLTRAHHTSMLWHVERMVKWAEDLTTRGGKKIVDPSVGTPRMEIRKFAKSYSELLELMMEHAQMEETILFPLFDKADRGLAKVAKEEHARDLPLMNGIKPVIKSVGVLDSGSPDYHEALYSLSSRLKSLQGQCKQHFAEEEVELLPLMEALELSKEQXVSALEQCFDVMQGTHGRLLKFLLEGLPPHDAMKYLDLISKCRDKEKMESMLQKIVK

SEQ ID NO: 164836 - protein, 126 aa, Glycine max
  unsure (1)..(126): unsure at all Xaa locations
  Clone ID: PAT_MRT3847_119865C.1.pep
AKVAKEEHARDLPLMNGIKEVIKSVGVLDSGSPDYHEALCSLSTRLKSLQXEEVELLPLMKALELSKEQEVSALEQCFEVMQGTHNRLLKFFLEGLPPHDAMKYLDLISKCRDKEKMESILQKIVK

SEQ ID NO: 164837 - protein, 55 aa, Glycine max
  Clone ID: PAT_MRT3847_119866C.1.pep
LVGITLLYAPEKQALGGVLLGSMMWHCTLMTLIHPTYRGEKLKDIGDPGHPSYVI

SEQ ID NO: 164838 - protein, 188 aa, Glycine max
  Clone ID: PAT_MRT3847_119867C.1.pep
MDMCNVVHALKPILLMVLVQVANAWVNVLYKLALNDGMNLSIIVAYRYVFATAFIAPLAFIVERKTRTKMTWTILFQAFLCGLIGGALPQNLNMEAIALTSVTFTTAISNLIPAITFIISLSFGLERLNLRRAGGKAKIIGTITGISGAMLLTFIKGPFFFALSLLLLLLLLLAFWSWLGFTLWLFQC

SEQ ID NO: 164839 - protein, 38 aa, Glycine max
  Clone ID: PAT_MRT3847_119868C.1.pep
SLKKISLIRVVTHMNTMGGGPSFGAIDSFDDCFLKLFA

SEQ ID NO: 164840 - protein, 82 aa, Glycine max
  Clone ID: PAT_MRT3847_119869C.1.pep
MAAGANSANTNLCVNVSNNGALRAKDPLNRPATTEARAGSHLDQVKRTPQEDRRPVFKLREETPTISEGAAIEAQHQRVTGE

SEQ ID NO: 164841 - protein, 474 aa, Glycine max
  unsure (1)..(474): unsure at all Xaa locations
  Clone ID: PAT_MRT3847_11986C.1.pep
MEPRVANKFRLGRKIGSGSFGEIYLGTNTQTNEEVAVKLENVKTKHPQLLYESKLYKILQGGTGIPNVRWFGVEGDYNVLVMDLLGPSLEDLFNFCTRKLSLKTVLMLADQMINRVEFIHSKSFLHRDIKPDNFLMGLGRRANQVYIIDFGLAKKYRDTTTHQHIPYRENKNLTGTARYASMHTHLGIEQSRRDDLESLGYVLMYFLRGSLPWQGLKAGTKKQKYEKISEKKVSTSIESLCRGYPSEFASYFHYCRSLRFDDKPDYAYLKRLLRDLFIREGFQFDYVFDWTLLKYQQSSSATAPARAIGPAAGPSSGVPPLVANGDGQLGGEDGRPNNWSSSDPTRRRNSGPXVNDGILSRQKGPVTYDSNGSKDAMLSSSNFFRPSGSARRGAVSGNRDVVGSETEASRSLTLDSSQGAFRKIPFPGALRSSAIMTSEHNRTSSGRNTSNIKNLETTLRGIESLHFNDERVHY

SEQ ID NO: 164842 - protein, 155 aa, Glycine max
  unsure (1)..(155): unsure at all Xaa locations
  Clone ID: PAT_MRT3847_119870C.1.pep
MKSTIFFALFLFGALTTSYLPSGIGEFAPHNEGNPLEKGGTYYIXSDITAFGGIRAAPTGNERCPLTVVQSRNELDKRIGTIISSPYRMQFIAESHPLSLKFDSFAGIMLGGGMPTEWTGGEDLPKRPAAKIDENKDTLRGMVRLERVPDDEFKN

SEQ ID NO: 164843 - protein, 140 aa, Glycine max
  Clone ID: PAT_MRT3847_119871C.1.pep
QEIFPIRASHFIITKGIKGSEMKRFREQCYLLLGQGFALHELRNLLIEVSMRIRRHRIHVLVLHLLTLLVEVVLSISSLRIDGNPRSHSENPFRLFGLCLLFLVFRKREKEERGGGGEETKAFWRLRFIPDAWHNYTRRS

SEQ ID NO: 164844 - protein, 198 aa, Glycine max
  Clone ID: PAT_MRT3847_119872C.1.pep
MAESQGEGGGDSGASGSRRRGIASRRAMAAQTQDEAMVESSPATPCGACKFLRRRCIEGCIFAPHFGNDQGAAKFAAVHKVFGASNVSKLLSNISVNRRNEAVTTISYEAQARLSDPVYGCVSTILALQQQVATLQAELAMLQTQLMNSRFAYASALQTTQLQQPNMNAGALQPAYSNNSCASTNLLNLSSFNNNTGL

SEQ ID NO: 164845 - protein, 105 aa, Glycine max
  Clone ID: PAT_MRT3847_119873C.1.pep
MATCYTPSNVRNSPGVLAVVGGRTISENHVGNRSCFLRIQESKTVFGSNRKCGSFQVKCSAISRNDPFLDLHPEVSMLRGEGGSALNQPRPRKDVSGGKRAESLK

SEQ ID NO: 164846 - protein, 71 aa, Glycine max
  Clone ID: PAT_MRT3847_119874C.1.pep
RHLGYCIVWLDGSPIVPRLFQHSIRASNRAVSSRNVRLCEYNSSQGFHGLNKRLMQRNGMFLCPITEKKKK

SEQ ID NO: 164847 - protein, 99 aa, Glycine max
  unsure (1)..(99): unsure at all Xaa locations
  Clone ID: PAT_MRT3847_119875C.1.pep
ATATPFVCRVHIALKLKAVEYQYVEENLRNNNELLLKSHPLHKNAPVSIRNEXPIAQSLAIREYSGETSNNNPILTSKPYPRPLARFWTXXIHDKRSWR

SEQ ID NO: 164848 - protein, 105 aa, Glycine max
  unsure (1)..(105): unsure at all Xaa locations
  Clone ID: PAT_MRT3847_119876C.1.pep
RRTSNILPFLIGSCQNHIPIGDFSGDQDSCCPLLXHKHLIFELSHDSQSKITAPTGSXIHKXHVGGCVTDYGKHMTLTTVRGAAHMVPYAQPLRALPLFRSLVRG

SEQ ID NO: 164849 - protein, 52 aa, Glycine max
  Clone ID: PAT_MRT3847_119877C.1.pep
TGIVTPILIKECIGLNLFIPNFLLISLAHPKFTKVFYLSFPVGGNSKLHADT

SEQ ID NO: 164850 - protein, 45 aa, Glycine max
  Clone ID: PAT_MRT3847_119878C.1.pep
LPMEPLSLNIQRRDKQYFCTPTIAYNRAQDVCKYGDALLPTRDIL

SEQ ID NO: 164851 - protein, 234 aa, Glycine max
  Clone ID: PAT_MRT3847_119879C.1.pep
PPDFPLPLFLFLSLPLSCLCDTCPLNFTILGSTKPSSFDTSRCQVISQSLRLVLSDYLRRSGFFLPPLNASDTCWTHFQSYVNNFDPTYNITSSCGFQTSWISQGCNNVTTKQDFESLVPQPSLQNIRNNCNQSLENNSPCALCTSSFSPLPPLGDSVGNLTHCTDYAFIYAAAFANRFGPSDPGTAKCLFSLQFSSTTTIPPPEKKVIIAVVSVVCVLVVLLLALWVWVYCKL

SEQ ID NO: 164852 - protein, 81 aa, Glycine max
  unsure (1)..(81): unsure at all Xaa locations
  Clone ID: PAT_MRT3847_11987C.1.pep
DSVGDLLXXLEADVGIVIGSSSSLRSVGTQFGISFVPLYSGLVKLRLLVVVCVSRTQIHARLKERNIYIVKYKYTSRWLIL

SEQ ID NO: 164853 - protein, 53 aa, Glycine max
  unsure (1)..(53): unsure at all Xaa locations
  Clone ID: PAT_MRT3847_119880C.1.pep
GQTMAKGNPCPRAYYRCTMAVGCSVSIPVLRCADDRTIXVTTYDGSHNHPLPP

SEQ ID NO: 164854 - protein, 81 aa, Glycine max
  Clone ID: PAT_MRT3847_119881C.1.pep
YPLSTYHWSVAHMYGTVESYPSATRHLTLITCSLSSSIHKIHQTSPMRLFNHDISWLSQIHQSHKLRQESHIDHRADKRLL

SEQ ID NO: 164855 - protein, 73 aa, Glycine max
  Clone ID: PAT_MRT3847_119882C.1.pep
PLGGEDATELFSNYYHLVHIPLIYVGEDLCRRTICHDRRMLFPVSSCYDRVTLLHSHSHSLSLIAINHVLSLS

SEQ ID NO: 164856 - protein, 155 aa, Glycine max
  Clone ID: PAT_MRT3847_119883C.1.pep
MTETEALEDAKEVVVLEEEECAEKMVYMWGYLPGASPEKSPILSPAPVNLSDRSLAGDSWKDVCGGGCGFAMAISEKGKLITWGSADDEGQSYLISGKHGEIPGLYQLPTEASVVKAAAGWAHCASVNEEGEVYAWGWKECVPSGKSITDFITVG

SEQ ID NO: 164857 - protein, 98 aa, Glycine max
  unsure (1)..(98): unsure at all Xaa locations
  Clone ID: PAT_MRT3847_119884C.1.pep
FWGSPFVLRVKWVLELKGIQYQYVEDLGNKSAMLLQYNPVHKKLPALVHDGKPLAESLVILEYIDETWKQDPSLLPHDPYEKAXRFWSEFVDEKVVKN

SEQ ID NO: 164858 - protein, 202 aa, Glycine max
  Clone ID: PAT_MRT3847_119885C.1.pep
MGNPSKLFPFFFAFIVFLMPLVSLSHNDFSTFAIKTVSYLVSFSENPNHNGHITTSSNERDKSRLWRKAFIGLKNTHEPSSNISRAISLNARECFPVELPSDAITSTRCCPPRPSPSNIIDFKDFASPNATLRVRKPAHMVDEEYIAKLEKGIALMKALPDDDPRNFIQQAKVHCAYCNGAYHLRHPFQDTKLTFTGLWFFF

SEQ ID NO: 164859 - protein, 100 aa, Glycine max
  unsure (1)..(100): unsure at all Xaa locations
  Clone ID: PAT_MRT3847_119886C.1.pep
MGGLSSLVLVVAAIILSPQVLANYENPPVCKPPTVKPPGYEPAVGKAPVFKAAAENPPLYNAAAEKPPMHXPPLEKPPVCTPPXKNHPSAKTPDVKPPHV

SEQ ID NO: 164860 - protein, 601 aa, Glycine max
  Clone ID: PAT_MRT3847_119887C.1.pep
MSTPSKLLSLFFVLIVLLMPLVSLLNNDFSIFTIKTISYLVSFSEKPNHYSNFSIIPYKAQNSKQNGHITTNSNGRDKPRLWRKAFIGFKNTHEPSSNISRAISLNVSKCFPVELPSFAITNSHCCPPRPPPSKIIDFKDFASPNATLRVRKPAHMVDEEYIAKLEKGIALMKALPDDDPRNFIQQAKVHCAYCNGAYHLPHPFQNTKLNIHRSWFFFPFHRWYIYFFERILGSLLGDPNFALPFWNWDAVEGMQMPPYFANPNSSLYHKLRNPKHLPPQVVDLNYDPFDFNDDSPSHQQASYNLAFMCKQMVLASTKELFMGSPFRLGDNPTPGIGSIEAAPHNTVHKWVGAADKPHRSSRIGSSTAARDPVFYPHHTNSDRLWGIWKKLGEGRKDYSDDPDWLDSDFYFYDENANFVRVKVRDCFDTKRLGYVYEDVDLPWLRTPPTSRKSKLLREAKKGSLLSSKPWKFPLVLDSITSIVVKRPKKWRSKEEKEQEEEVLVIEGIEFGSDKYVKFDVHIDDDEDNLSGPDDTEFVGSFVNVQHGHGHNVKTSFKVGISKVLESVEAEEDDEVLVSLVPKVGKGDAIIGGIKIEFIPKY

SEQ ID NO: 164861 - protein, 147 aa, Glycine max
  Clone ID: PAT_MRT3847_119888C.1.pep
MAVEESEPVIGELEREENLIAAVRHIVKALGPNKTLTSDAKKILADLGTRLSSMSVPSEKEEGKQGQGKDDGDNHDALVLEQDRVDEDEKEADTAKAAWVCRVCLSSEVDITIVPCGHVLCRRCFSAVSRCPFCRLQVTKAIRIFRP

SEQ ID NO: 164862 - protein, 77 aa, Glycine max
  unsure (1)..(77): unsure at all Xaa locations
  Clone ID: PAT_MRT3847_119889C.1.pep
QIKVCGPNKGFTMXKXEWANQTSWHMSFFIDITKQSAVFDILLAISQAFYNAGTXLIPAFYVPRIKIRYSKNSESSA

SEQ ID NO: 164863 - protein, 69 aa, Glycine max
  unsure (1)..(69): unsure at all Xaa locations
  Clone ID: PAT_MRT3847_11988C.1.pep
YGCTRKVGLRVLHGRCGQILLGELHYSDRHYXRYYYARGRREVMVRENPETRAETNANGCHNTWHKEDT

SEQ ID NO: 164864 - protein, 244 aa, Glycine max
  Clone ID: PAT_MRT3847_119890C.1.pep
MVGKEILPQDARLVQFHPLRPFYSGEIVAWRSQHGEKLKYGKVSEDVRPSAGQALYRLKIEVSPGDTQSFLSSHVFSFKSVSASSPLKESLVHESPVLGSNRPHVDFPESSGRGESYSQVQPVRDQSGKVSAAELVQAVNEILSAAGIKMDVEKQALLQRTVNLQENLKESQAALVLEQERVQKATKEADTAKAAWICRVCLSSEVDITIVPCGHVLCRRCSSAVSRCPFCRLQVTKAIRIFRP

SEQ ID NO: 164865 - protein, 34 aa, Glycine max
  Clone ID: PAT_MRT3847_119891C.1.pep
SRVRKRKHQIFSHIEQTFMRSSCILEYEWTLTRS

SEQ ID NO: 164866 - protein, 46 aa, Glycine max
  unsure (1)..(46): unsure at all Xaa locations
  Clone ID: PAT_MRT3847_119892C.1.pep
GPKQYDWRAYRSWLELGQECGLTLGAMMSFHPCGGNVGDVXNIPIP

SEQ ID NO: 164867 - protein, 70 aa, Glycine max
  Clone ID: PAT_MRT3847_119893C.1.pep
VHFGAGSPGVRNKRGGGGAVSKRKQGTSLSLTINLPRDFPQNIFRIIRGNLKGAFHINTETNWGGIGYFH

SEQ ID NO: 164868 - protein, 142 aa, Glycine max
  unsure (1)..(142): unsure at all Xaa locations
  Clone ID: PAT_MRT3847_119894C.1.pep
ASRNNKKASSSQANRIRALSNLNRACGDSNSDSEYPQKYYTGDEKSKMLIQDPSKGNDGDEIFNQAKQLKAIEKPLNQLQEPPKSTSCTGTNKLLSKKTAQSTNNQRPEAIIHNIIFXSNSCTINNGPLRSLNDPQNASLVE

SEQ ID NO: 164869 - protein, 39 aa, Glycine max
  unsure (1)..(39): unsure at all Xaa locations
  Clone ID: PAT_MRT3847_119895C.1.pep
VSIMMFXGXETAKRNYIXWREFIRXSNXYSXMVFPSLXK

SEQ ID NO: 164870 - protein, 74 aa, Glycine max
  Clone ID: PAT_MRT3847_119896C.1.pep
YSYAHACETEREFIRWRKLCAALQADAQKNMAEGKTLGAALDLYRNTKSAMKCARENRSYGGDNTRGTDNYPHH

SEQ ID NO: 164871 - protein, 589 aa, Glycine max
  unsure (1)..(589): unsure at all Xaa locations
  Clone ID: PAT_MRT3847_119897C.1.pep
MNHLPRIFGNRKKQASDMDPTKKKKKSKGKKHQQPKLERRNAAKHFEYDAGSLCSSRDEYDASTSSSSSLHCTRSMELFDRKSFRIEGVEGEFDQICRSLGLSGPEDFSIPAAAWEAMKLRCSSDLLPRRPKHGGEEEEFDEEPKEKEKEEVEIAVLESEDRARVLDECVVPAESSGCCGGIKGFRPPMLKPPPGVRVSVVDDATCSTWDLMRDFAPKGEGGGKDSYVELNSSDDEPTQKEEEEEEEEEEGEVGGVRVESVEEENAAAIAEIVGDFSGFSTSNEDDSSSTSTGPRSNNISPNGRIKRVITAGNWQKGELLGRGSFGSVYEGISEDGFFFAVKEVSLLDQGNQGRQSVYQLEQEIALLSQFEHENIVQYIGTEMDASNLYIFIELCNQXGPFLNLYQRYNLRDSQVSAYTRQXILHGLKYLHDRNIVHRDIKXCANILVDANXCLXLVYFGLTKSTKFNDVXSCKGTAFWMAPEVVKGKNTGYGLPAXIWSLGCTVLEMLTGQIPYSHLECMQALFRIGRGEPPHVPDSLSRDARDFILQCLKVDPDERPSAAQLLNHTFVQRPLHSQSSGSASPYIRRG

SEQ ID NO: 164872 - protein, 154 aa, Glycine max
  Clone ID: PAT_MRT3847_119898C.1.pep
SVHRDIKCANILVDANGSVKLADFGLAKATKLNDVKSCKGTAFWMAPEVVKGKSRGYGLPADIWSLGCTVLEMLTGEFPYSHLECMQALLRIGRGEPPPVPDSLSRDAQDFIMQCLKVNPDERPGAAQLLNHTFVQRPLHSQSSGSTSPYIRRG

SEQ ID NO: 164873 - protein, 101 aa, Glycine max
  Clone ID: PAT_MRT3847_119899C.1.pep
MASLHSITSSTNTALNVNALAYYIAASDGNFYQDFDVTRGDGRATILNNGDPLTLSLDTACGSALHAKNQYLFGKIDMQLMPVPGNSERTGTRYHLSSHGS

SEQ ID NO: 164874 - protein, 164 aa, Glycine max
  unsure (1)..(164): unsure at all Xaa locations
  Clone ID: PAT_MRT3847_11989C.1.pep
PEQVKQNCSIGRNSSXNVCSAFSHPSNFAYPPKQLPVVPSTDYGLYYSDTQGLKTIQMNGEKFSWTETVSVHSEFQDNNSGNRKEGDSADKPTEIQYTNGTLGSPEIPTIDPYEPLSKYLVLPQDTSQFGSHTNYSQPSLNHHIVGQKSLESESREFTNSLNLA

SEQ ID NO: 164875 - protein, 50 aa, Glycine max
  Clone ID: PAT_MRT3847_1198C.1.pep
PNPHFLFYSSNIFDSIQKSVIHVNVSYLVPSRNMFRCNQGFNKKRFALCK

SEQ ID NO: 164876 - protein, 66 aa, Glycine max
  Clone ID: PAT_MRT3847_119900C.1.pep
PTSNSVSLYKLKYPTQWLQKMITLSHRHFSLNKMTLFHNLSSHTLSSCVVSPLILVSIYSEDCYQL

SEQ ID NO: 164877 - protein, 249 aa, Glycine max
  unsure (1)..(249): unsure at all Xaa locations
  Clone ID: PAT_MRT3847_119901C.1.pep
QKKYSNSALKKGDIYNEALKSGAKGLPFLKVLDDGNIEGISALVSSMDPTTRGNLLRRCSSGPSDLILFAVGHHASVNKTLDRLRVYVAHDLGLIDLGRHSILWITDFPMFEWNDPEQRLEALHHPFTAPNPEDMNDLASARALAYDMVYNGVEIGGGSLXXYXXDIQXKVIEIVGISMGEAEAKIGYLLAALDMRASPHXGIAYGEYRMVMLSAGGYCITDVIAFAGQSTAQCAXLDHHLSDSEQLEE

SEQ ID NO: 164878 - protein, 41 aa, Glycine max
  Clone ID: PAT_MRT3847_119902C.1.pep
ASVLFLKSYDVACKVTEPYILCNYSFFSFQNVTETHGLCHC

SEQ ID NO: 164879 - protein, 129 aa, Glycine max
  Clone ID: PAT_MRT3847_119903C.1.pep
SDRPDTRFDLELKDVSDIFSGSSFKVFSDSLESGGVIKVLCVPSGTKKYSNSALKKGDIYNEALKSGAKGLPFLKVLDDGNIEGISALVSSMDPTTRGNLLRRCSSGPSDLILFAVGHHASVNKTLDRL

SEQ ID NO: 164880 - protein, 59 aa, Glycine max
  unsure (1)..(59): unsure at all Xaa locations
  Clone ID: PAT_MRT3847_119904C.1.pep
IMTCGISSSLEAXVASLPSWYLIRVASKRCFILFLTLFHTVSYIDCQSSHNNICGFCNL

SEQ ID NO: 164881 - protein, 120 aa, Glycine max
  Clone ID: PAT_MRT3847_119905C.1.pep
MIPLKTHPHSPFIFSVSKTNPLYFSLLPTSISLLSLKQPPPSLSSNLLRVSNVGVSVCRTEHHEEEEDKGVSLELHDLSPNGEVYQKTLQLVECSMFAALTGLVYFLSNSLAIENYFSCF

SEQ ID NO: 164882 - protein, 210 aa, Glycine max
  unsure (1)..(210): unsure at all Xaa locations
  Clone ID: PAT_MRT3847_119906C.1.pep
MACIERASPALKQILLKLCWXAEKPLEIDHHLYEFGSVEYHIQSQASNPQVAYLSISMPPLCHGVIQNELSSYTIEMVKGLCPNVVGIAEPAKEGYQLTLKLNLNQIPQNKDYDKVIKEISTVHSVILSSQLKEILWNVNFDDALQGMYKPIKLVYHPKDHFFLIRQPQRIIAVFPIRFREKSDVIIATAFFQELVDCGSSDKWAKVPPC

SEQ ID NO: 164883 - protein, 47 aa, Glycine max
  Clone ID: PAT_MRT3847_119907C.1.pep
MKYLVVLAVFALAFAAEEKKENDAPKTFQRLIPADVLRDFPGVCFAS

SEQ ID NO: 164884 - protein, 84 aa, Glycine max
  Clone ID: PAT_MRT3847_119908C.1.pep
LYKSKGLARSSNHCNYVQSHQTLQLICTVSDRKVTKVALWWVYTIITTPASNEKRLHKFSSQKPGAHIHSIKAGDKHKTCKSPV

SEQ ID NO: 164885 - protein, 66 aa, Glycine max
  Clone ID: PAT_MRT3847_119909C.1.pep
MVPVCSRKLALFTENMTWCLLLSRAINQYPRCEIQTRKCPTKKLPWFGCQGKIRVRGKKASRIEPP

SEQ ID NO: 164886 - protein, 56 aa, Glycine max
  unsure (1)..(56): unsure at all Xaa locations
  Clone ID: PAT_MRT3847_11990C.1.pep
GNCHXXVXSHPSFLYIPSXXGXHQPSLQLXXVXAXPTXXXXXTXLRRXXAXXPXPX

SEQ ID NO: 164887 - protein, 152 aa, Glycine max
  Clone ID: PAT_MRT3847_119910C.1.pep
MATLADSFLADLDELSDNEAEIPEDNDVDAADMEEDVDGDLADLENLNYDDLDSVSKLQKTQRYTDVIQKVEEALNKKESEVLFQVVDIEDDPEYQLIVDCNALSVDIENEIVIIHNFIRDKYRLKFPELESLVHHPIDYARVVKKIGNEMD

SEQ ID NO: 164888 - protein, 331 aa, Glycine max
  Clone ID: PAT_MRT3847_119911C.1.pep
SDASTTLTGISLVALQFKALLKKNLLLSWRNKRASLLQLLSPLIFIFLIFAIDKAIKAQTSTSSSYKSVTDPPMEPSPPITPCEDKFFIKLPCYDFVWSGHASPTFQTIVARIMNNNPGRPIPPSKVKSFKEKSEVDAWLLSNPMRCPGALHFSERNDTVISYGLQTNSTSLQRRGKYEDPTASFQLPLQLAAEREIARYLIGDADFSWNVFLREFAHPSMNPFSAVASIGPAFFLAIAMFNFVLQISSLVTEKELKLRQAMNMMGLYDFASIFSWLICLLVVTILSSLVIVLFGIKIKFLVIVWYSPNTCSRCANVAVPRCFNENMEREV

SEQ ID NO: 164889 - protein, 80 aa, Glycine max
  unsure (1)..(80): unsure at all Xaa locations
  Clone ID: PAT_MRT3847_119912C.1.pep
AVVIKLKNYMHSALHRPSFFFSSVFCLYFCCLVCFHNIFLLVRXXXXXXXXXXXXXXXXXXXXXXXXXXXXXXXXXXXXX

SEQ ID NO: 164890 - protein, 121 aa, Glycine max
  unsure (1)..(121): unsure at all Xaa locations
  Clone ID: PAT_MRT3847_119913C.1.pep
QIFVKTLTGQTITLEADSSDFFFYGKAKTQAQEGISPDQQRLIAGGKXLEDRPTLADYSIQKESTLHLVLRPRAGLQISVKTPPPETLTLDVQSSHPTDNXKVKIQDKERNLIGPPAGLFF

SEQ ID NO: 164891 - protein, 67 aa, Glycine max
  unsure (1)..(67): unsure at all Xaa locations
  Clone ID: PAT_MRT3847_119914C.1.pep
VSAVISISVGEMMRLHQVRLVFFSPSCSYLSADHLCDFSLTEPPCILHRPKVFSVLFEVLSYCRXRV

SEQ ID NO: 164892 - protein, 90 aa, Glycine max
  Clone ID: PAT_MRT3847_119915C.1.pep
RISNLGELLQQNLLIFYIAILHRIDSVKWLILSSSAVIEKYPPIDHSSSLTQSNDINLLSFVISLFYILVPFQMKMPPYVIKFPQQQAMH

SEQ ID NO: 164893 - protein, 65 aa, Glycine max
  Clone ID: PAT_MRT3847_119916C.1.pep
NKLNCFVVIKTQCLQIYLLNIVLEFEKTKFFFPDQTEFLISKNLFRVLFNLKNPHFLTYRNLKCQ

SEQ ID NO: 164894 - protein, 104 aa, Glycine max
  Clone ID: PAT_MRT3847_119917C.1.pep
FLVNHGLPTIYTSPLESGGSPAQFCPLFRELPTTSYARAIPPWRGITDMNSGSGMCHDVRRRLPYDWSDITDPYTYRTVASTDLTDLVKEGSFPFSSAPTVPPL

SEQ ID NO: 164895 - protein, 138 aa, Glycine max
  Clone ID: PAT_MRT3847_119918C.1.pep
MAALGDQSEEQAMAAQPKPQNRPISNIVIVVGTLRLLWFPQGVPWVRYQGTYKDLNISLIWPGKDPTLGVDSVGTISSALVTYAAIQALQPDLIINAGTAGGFKAKGASIGDVFVVSECAFHDRRIPIPVSVIPLGSS

SEQ ID NO: 164896 - protein, 97 aa, Glycine max
  Clone ID: PAT_MRT3847_119919C.1.pep
GNLKIKTFFFYKKNLFSFLLKGEKRTLWEFEERLETYLGTLKLLFVYKQQGGLSFLKKKPTLGLEKFWNRSLQGKICLGCYTLVELIPPWFENGSQI

SEQ ID NO: 164897 - protein, 110 aa, Glycine max
  Clone ID: PAT_MRT3847_11991C.1.pep
HASEEAFATFLKMLDEGVEPTNVSMMGALHACANLGDLERGRYVHRLLDEKKIGFDVSVMNSLISMGSKCKRVDIAASVFGNLKHKTVVTWNAMILGYAQNGCVNEALNV

SEQ ID NO: 164898 - protein, 266 aa, Glycine max
  Clone ID: PAT_MRT3847_119920C.1.pep
MAALGEQSEEQAMAAQPKPQNRRPISNIVIVVAMQTEALPIVNRFQLTEDPDSPFPRGVPWVRYQGTYKDLNISLIWPGKDPTLGVDSVGTISSALVTYAAIQALQPDLIINAGTAGGFKAKGASIGDVFIVSDCAFHDRRIPIPVFDLYGVGVRKTFEAPNLVKELNLKVGKLSTGDSLDMTQQDESSIIANDATVKDMEGAAIAYVSDLLKVPAMFVKAVTDIIDGDKPTAEEFLQNLAAVTAALDLAVEQVINFINGKCVSEL

SEQ ID NO: 164899 - protein, 61 aa, Glycine max
  Clone ID: PAT_MRT3847_119921C.1.pep
NVVASISSDLPSSQDKFFVRIPPFPCSSPKNICPLLAQNVKSLITYWLPQACKSSYLILKA

SEQ ID NO: 164900 - protein, 122 aa, Glycine max
  Clone ID: PAT_MRT3847_119922C.1.pep
MKKVVLQLDLHGDRIKQKAMKTASGLSGVESVSVDMKDMKMIVLGDIDPVSAVSKLRKCCHTEIVSVGPAKEEKKENVEPAKVPVPLKLHEAYPLYYQMTPHYGQSHYVTSYEEDPSGCVIC

SEQ ID NO: 164901 - protein, 64 aa, Glycine max
  Clone ID: PAT_MRT3847_119923C.1.pep
LLKLNPNVYVSVLAARDPRTVDSVAIIMDLEDKDSDPMVRARAIHQKAMHFRAASMGSLYIQTF

SEQ ID NO: 164902 - protein, 122 aa, Glycine max
  Clone ID: PAT_MRT3847_119924C.1.pep
MKKVVLKLDLHGDRIKQKAMKTASGLSGVESVSVDMKDMKMIVLGDIDPVSAVSKLRKCCHTELVSVGQAEENKKENVEPAKVPVPLKLHEPYPLYYHMTSQYTQSYYVSSYEENPRGCVIC

SEQ ID NO: 164903 - protein, 50 aa, Glycine max
  Clone ID: PAT_MRT3847_119925C.1.pep
LGQPLLPHQCHLLRTLCIQLNIIASSCLLRMHSNSTLEAHYLPDTELCLR

SEQ ID NO: 164904 - protein, 181 aa, Glycine max
  unsure (1)..(181): unsure at all Xaa locations
  Clone ID: PAT_MRT3847_119926C.1.pep
MSVSFMDLSVHRRAAVVSVLILLLGLVFGLALDANAHIPKPWNRISSIIGWIYFFCWSVSFYPQVFLNHQRQSVEGLSLDYTVLNMLGFTCYSIFNVAFYYSKSVQQQYMRRHDGHRNAVELNDVFFSLHAXVLVAVSLFQCTIYPRGGQTCRQPTLLWARGTLVAAVLFTLAAPARAITD

SEQ ID NO: 164905 - protein, 43 aa, Glycine max
  Clone ID: PAT_MRT3847_119927C.1.pep
SSQRNLSLMMASPTYRKRTLTQFSSSAYLMVFMVTLTMAMARC

SEQ ID NO: 164906 - protein, 65 aa, Glycine max
  Clone ID: PAT_MRT3847_119928C.1.pep
QKKTESDITNPCPTLDNSILHIKYSREPRSTIKVLQVETSKAKFSNNFLMSRWFGELKVQLSAIS

SEQ ID NO: 164907 - protein, 265 aa, Glycine max
  Clone ID: PAT_MRT3847_119929C.1.pep
MKAVPLPFQEFRGNGVLDFASVAAVSDSLLLPQQEQFLQRWNPQRENFCYVGIEPAVSGLDLKRKTSSPPTSSSTLSSSRASSGGCGGWGSADSTTEVVGQARCGLGMEDWESVLSESPGEDHSILKLIMGDIEDPSVGLTKLLQGGSASQDVELNGLGVGFGLVNQSSVLDPIPSVNFVSSSIDPSGPGNCADFPFNSHSNVSPNVPSVGSGLNPNPTGFPTSASNLSQVSLPQGVFQPQQQQHQPIEPLDEKLQVLNPQFILY

SEQ ID NO: 164908 - protein, 64 aa, Glycine max
  Clone ID: PAT_MRT3847_11992C.1.pep
FGFGHYFVLTTGAVILFLGQHFLGWKKFAKKQGKFVFFAPGLYQNFLLGLLKTGKKQGGKGGKG

SEQ ID NO: 164909 - protein, 52 aa, Glycine max
  Clone ID: PAT_MRT3847_119930C.1.pep
IPGVGRKEERNLFKFKTGLGLVRLFPFCIQITTLGIKWTPFNWLKKKKLFFS

SEQ ID NO: 164910 - protein, 84 aa, Glycine max
  Clone ID: PAT_MRT3847_119931C.1.pep
RNSEISIFPKAPRNNLLSPLGPNSPLRRSSVSSHCPNFLKFGANTVQVFFLITPPSGKKGVLFHSQKEQQTLHISSPLKILSRT

SEQ ID NO: 164911 - protein, 112 aa, Glycine max
  Clone ID: PAT_MRT3847_119932C.1.pep
MVASGVQMLEMSLRDHEDVRDSEPDIIDGLGAETGHVIRTSVGGRNGQSKQNVSYISEHVVGTGSFGVVFQAKCRETGDIVAIKKVLQDKRYKNRELQIMQMLDHPNIVALR

SEQ ID NO: 164912 - protein, 316 aa, Glycine max
  unsure (1)..(316): unsure at all Xaa locations
  Clone ID: PAT_MRT3847_119933C.1.pep
MASASLGSGGVGSSRSVNGGFRGSSSSVDWLGREMLEMSLRDHEDDRDSEPDIIDGLGAETGHVIRTSVGGRNGQSKQNVSYISEHVVGTGSFGVVFQAKCRETGEIVAIKKVLQDKRYKNRELQIMQMLDHPNIVALRHCFFSTTDKEEVYLNLVLEYVPETVNRIARSYSRINQRMPLIYVKLYTYQICRALAYIHNCIGICHRDIKPQNLLVNPHTHQLKLCDFGSAKVLVKGEPNVSYICSRYYRAPELIFGATEYTTAIDIWSTGCVMAELLLGQPLFPGESGVDQLVEIIKVXLGTPTREEIKCMNPIIL

SEQ ID NO: 164913 - protein, 198 aa, Glycine max
  Clone ID: PAT_MRT3847_119934C.1.pep
IDCSLDLTGQRNMRRERGEEEEPKDPSKKDEEEGNKNSKVTLSGLLNFIDGIWSACGGERIIIFTTNFVDKLDPALIRTGRMDKHIELSYCRFEAFKVLAKNYLDVDSHYLFARIANLLEVTNVTPADIAENLMPKCLNEDVESCLLNLIQSLDKKVAEEEEEEAGLNEEKVKGEPTQQENKNNGHSVEDVKENGFVL

SEQ ID NO: 164914 - protein, 43 aa, Glycine max
  Clone ID: PAT_MRT3847_119935C.1.pep
MLPLAKGSSHRLDEFFTFHCQGNIHSHVFLKALSHLTDGFHPV

SEQ ID NO: 164915 - protein, 36 aa, Glycine max
  Clone ID: PAT_MRT3847_119936C.1.pep
IIKNYLMENLDILKYQDSQKHNMSPLNIFSNKRTNG

SEQ ID NO: 164916 - protein, 91 aa, Glycine max
  Clone ID: PAT_MRT3847_119937C.1.pep
MASASLGSGGVGSSRSVNGGFRGSSSSVDWLGGEMLEMRLRDHEDDRDSEPDIIDGVGAETGHVIRTSIGGRNGQSKQNVNYIAEHVVGTG

SEQ ID NO: 164917 - protein, 380 aa, Glycine max
  unsure (1)..(380): unsure at all Xaa locations
  Clone ID: PAT_MRT3847_119938C.1.pep
ETTKNDRDSEPDIIDGVGAETGHVIRTSIGGRNGQSKQXVSYIAEHVVGTGSFGVVFQEKFRETGEIVAVKQVLKVKRYNNRELQNMHMLDHPNIVCLMHXIXSPTHNNGLPFYPVLEFEPETDFRGATPDVINRLIPXMRVNRTYLWLCTPSNSRTLLSCRHLLAGCKLSGLSEKNSTERVTRIILLLYNMKVNGEPNVSYISARYYRAPELIFGATEYTTAIDIWSTGCVMAELLLGQPLFPGESGVDQLVEIIKVLGTPTREEIKCMNPNYTEFKFPQIKPHPWHKVFQKRLPPEAVDLVCRFFQYSPNLRCTALEACIHPFFDELRDPNTRLPNARPLPPLFNFKPQELSGVPPDVINRLIPEHARKQNLFMALHT

SEQ ID NO: 164918 - protein, 55 aa, Glycine max
  unsure (1)..(55): unsure at all Xaa locations
  Clone ID: PAT_MRT3847_119939C.1.pep
KVNRQQKNENFVTDKYNPYVNFYTINLLDKNYVITCLATSLLLKQIXNHLLLHHS

SEQ ID NO: 164919 - protein, 72 aa, Glycine max
  Clone ID: PAT_MRT3847_11993C.1.pep
LEETCRDYTTFSHFRYQPPEKGGGCTDTKPPALNVRYLSILSPLSVVRICTNPERTLLLDNLELTLHWRTKH

SEQ ID NO: 164920 - protein, 45 aa, Glycine max
  Clone ID: PAT_MRT3847_119940C.1.pep
AALVLILSLISSKRHPKTRFTDSLKELQDKSSWIYQDVRLCRHLM

SEQ ID NO: 164921 - protein, 153 aa, Glycine max
  Clone ID: PAT_MRT3847_119941C.1.pep
MSWLLIILFLSLTHGSFSETSHDKKLPYAVVVGTVYCDTCSQQEFSIGSHFISGASVVAECKDGNSIQSFKKEVKTNEHGEFKVQLPFRVRKHVRRIKGCTFKLLSSSEPHCSVASVSTSSVSLKTRKPGGHTFSAGGVLFKPFQKPNVWYQN

SEQ ID NO: 164922 - protein, 330 aa, Glycine max
  Clone ID: PAT_MRT3847_119942C.1.pep
MKGKESGEAKGYAFVTFMTKELASKAIEELNNSEFKGKRIKCSTSQVKHKLFIGNVPKYWTEGDMKKVVAEIGPGVICVELLKDPQNSSRNRGYAFIEYYNHACAEYSRQKMSNSNFKLGSNAPTVSWADPRNSESSAISLVKSVYVKNLPENITQDRLKELFEHHGKITKVVLPSAKSGQEKSRFGFVHFAERSSAMKALKNTEKYEIDGQLLECSLAKPQANSQKPALLPTYPPHLGYGMVGGAIGAGYGAAGFAQPLMYGPGPTPGGMAMMPMMLSDGRIAYIVQQPGFQQPAPVSRHGRSGGSSSSGGKCSNDDNRNRGHGRYHPY

SEQ ID NO: 164923 - protein, 65 aa, Glycine max
  unsure (1)..(65): unsure at all Xaa locations
  Clone ID: PAT_MRT3847_119943C.1.pep
XXXXXXLXFGEISGLXXVGGXSXXXRXXLXLDCFXXHXARGEGXMKXPRXXAXHSSXXKQXVEEX

SEQ ID NO: 164924 - protein, 88 aa, Glycine max
  unsure (1)..(88): unsure at all Xaa locations
  Clone ID: PAT_MRT3847_119944C.1.pep
NPFFSHLVLFSICSTSYPRWTPXDFTDPDWLESAFFFYDETXNLVRVKVKDSLDTXXLGYVYQDVDIPWLKNKPKPKRSKAKKLALAQ

SEQ ID NO: 164925 - protein, 67 aa, Glycine max
  Clone ID: PAT_MRT3847_119945C.1.pep
KQCVNRFVIHILQLKKYFGIHYYHTSTELGGTTLTWWLVLEKLLYICCKAFIKLFLGCIKVIGYSLF

SEQ ID NO: 164926 - protein, 38 aa, Glycine max
  Clone ID: PAT_MRT3847_119946C.1.pep
DRIGIFPVSEYNRLHQPIDDHLQGDAGDEKIRVLMRWV

SEQ ID NO: 164927 - protein, 82 aa, Glycine max
  Clone ID: PAT_MRT3847_119947C.1.pep
TNSQDYFLRGTLNILILPPVCQTGVLFSRVPCPHFEAPSLARNSRCPRGGTKRCPFTKIFLRKRLCLRGAPFPSGQVCAGGV

SEQ ID NO: 164928 - protein, 67 aa, Glycine max
  Clone ID: PAT_MRT3847_119948C.1.pep
YGCEKTTEGEESTICRKWKFIIFFNALVNKVFVVDVMANLLCLSFVLWFVHKTFQSNTFIEFFLEIH

SEQ ID NO: 164929 - protein, 138 aa, Glycine max
  Clone ID: PAT_MRT3847_119949C.1.pep
VLSRNQFSGHIPQNIGNISKLRQLDLSLNNLSGEIPVAFDNLRSLSFFNVSHNNLSGPVPTLLAQKFNSSSFVGNIQLCGYSPSTTCPSLAPSGSPPEISEHRHHKKLGTKDIILIVAGVLLVVLVTICCILLFCLIK

SEQ ID NO: 164930 - protein, 106 aa, Glycine max
  unsure (1)..(106): unsure at all Xaa locations
  Clone ID: PAT_MRT3847_11994C.1.pep
PRVRTRPLMAATSSGTLTATASLGQGTGTKANALRDDDSMETATYTMGKDLXNGPDXEKYLXPFSAQTPSYXKGQCPRDYRWDTAGLSADPETFDKNRAHEDIHRR

SEQ ID NO: 164931 - protein, 245 aa, Glycine max
  unsure (1)..(245): unsure at all Xaa locations
  Clone ID: PAT_MRT3847_119950C.1.pep
MSSQFEQGHNPPTQDQQPPGLQSELKGPKPQDENLPTEDGGYQIYKAAGKLEGKKALITGGDSGIGRAVAILFAMEGADSFIAYLPQEESDAQETKKKVEEKGRKCHLFATDLTDKKNCKAVADKALETMGAVNILVNNAAYQMMVNDIQELSEEQWEHTFNVNIHPYFYLSKYIIPHMKXGDTIINNASINAYIGRPDLLDYTSTKGAIVFSTRGLSXQYVSKGFRVNAVAPGPVWTPLIPCTM

SEQ ID NO: 164932 - protein, 49 aa, Glycine max
  unsure (1)..(49): unsure at all Xaa locations
  Clone ID: PAT_MRT3847_119951C.1.pep
GPLKPAGPXISTSIFPLKRTSFGIYSFSFFXSSLSSYNNHLFSDRSPQS

SEQ ID NO: 164933 - protein, 69 aa, Glycine max
  Clone ID: PAT_MRT3847_119952C.1.pep
CSGEAERESNQLRIPGDEARVRVGVALGSLAAVFISRLFVCSDYLDWFLMVVASLAATAHNTVIEREKM

SEQ ID NO: 164934 - protein, 150 aa, Glycine max
  unsure (1)..(150): unsure at all Xaa locations
  Clone ID: PAT_MRT3847_119953C.1.pep
AKRKDPTGRSSAAVLCFSTLSLTRCLAEDNALVINLYXESCPQARXIIKEQRQLLYLRHKNTVLSWLIYIFHDCAVHSCDDXLLLNSTRTSLXSENDTXRSCGLKKFMDPVTLPDALETACPXVAYCAKNLVLSDKDSIVSLRGPPIPLK

SEQ ID NO: 164935 - protein, 78 aa, Glycine max
  Clone ID: PAT_MRT3847_119954C.1.pep
LGSFIIVWRLEKKNTHLPNLKSLFNSSLWGIPDLQPRVQAPPSSGSIEMAQPISVSGPPSSSVRSHRLFWSGLELLYS

SEQ ID NO: 164936 - protein, 101 aa, Glycine max
  Clone ID: PAT_MRT3847_119955C.1.pep
SRVDRTRSRHSPRSPYTGLLGRTLVAPWGEPRTHGNRLKHISRRLIILLTTVQVVALKPEYSTYAKLNAVAVETAKILVNELKSTHITVTCIAPGPIDTDM

SEQ ID NO: 164937 - protein, 60 aa, Glycine max
  Clone ID: PAT_MRT3847_119956C.1.pep
LLSWLVRTRDIRPSNLASMLPTIPLSMLLCLITLLRIHLIALSICANFAVIIVDVHYQLP

SEQ ID NO: 164938 - protein, 170 aa, Glycine max
  unsure (1)..(170): unsure at all Xaa locations
  Clone ID: PAT_MRT3847_119957C.1.pep
MGSLMAYATLTLVLAIIVSLSLPSQTSADDKYDYSSPPPPEKPYKYKSPPPPVYKYKSPPPPPPEKPYKYPSPPPPPVYKYKSPPPPYKYPSPPPPPKKPYKYPSPPPPVYKSTPPPPYKYPSPPPPPYKYPSXPPVYKYKSPPPPYKYPSPPPPPKKYKYSSPPPPYHY

SEQ ID NO: 164939 - protein, 67 aa, Glycine max
  Clone ID: PAT_MRT3847_119958C.1.pep
TNRPSRLFITSCIQRWNHSRMKDSLPIMKVIPKQDILSKFMPAAGLIDDHNQPSAFSFIEIMAAVLI

SEQ ID NO: 164940 - protein, 79 aa, Glycine max
  Clone ID: PAT_MRT3847_119959C.1.pep
MISILTQERLLGASLGVVLTGVVVFEQRRYIYASISDSQSQVKEPIFGKKSRSEFAHVWNKTVDQTFGPLIKSLSSRGW

SEQ ID NO: 164941 - protein, 558 aa, Glycine max
  unsure (1)..(558): unsure at all Xaa locations
  Clone ID: PAT_MRT3847_11995C.1.pep
KDLLEAETVFKEMPQRNVVAESAMIDGYAKVGRLDDARKVFDNMTQRNAFSWTSLISGYFSCGKIEEALHLFDQMPERNVVSWTMVVLGFARNGLMDHAGRFFYLMPEKNIIAWTAMVKAYLDNGCFSEAYKLFLEMPERNVRSWNIMISGCLRVNRMNEAIGLFESMPDRNHVSWTAMVSGLAQKKRLGLLGSIFDLMPCKDMAAWTAMITACVDDGLMDEVCELFNLMPQKNVGSWNTMIDGYARNDDVGEALRLFVLMLRSCFRPNQTTMTSVVTSCDGMVELMHAHAMVIQLGFEHNTWLTNALIKLYSKSGDLCSARLVFELLKSKDVVSWTAMIVAYSNHGHGHHALQVFTRMLVSGIKPDEITFVGLLSACSHVGLVNQGRRLFVSIKGTYNLNPKAEHYSCLVDILGRAGLVDEAMDVVSTIPPSERDEAVLVALLGVCRLHGDVAIANSIGENLLEMEPSSSGGYVLLANTYATEGQWDEFXKRKRMRERNVKRIPGYSQIQIKGKNHVFVVGDRSHPQIEEIYVLLKQNLQPLMREMGCTPENLLLVD

SEQ ID NO: 164942 - protein, 45 aa, Glycine max
  Clone ID: PAT_MRT3847_119960C.1.pep
MMMKILIYCQFKTNKLKFYIPCSVMCYMNQSGQWPCVSKYKRSDF

SEQ ID NO: 164943 - protein, 160 aa, Glycine max
  Clone ID: PAT_MRT3847_119961C.1.pep
MENKYSLNRQRSGIWNCLRDGDFEEEEVWAVFKEKPDYNISGVHKTREKGTSSGNSSASSSHETKVLQQSAPLNIPDWSQIYRNKPNKTTPKSVSSDDEEEEENEYDTKLPPHEFIARRLARSQISSFSVFEGVGRTLKGRDLSEVRNAVLSKTGFLESL

SEQ ID NO: 164944 - protein, 78 aa, Glycine max
  Clone ID: PAT_MRT3847_119962C.1.pep
NLVLQVIFMNCRFWRPDGMKMFIQFHFTYEQESHPEEFFIPYVWQLVLSRCGFEFNAGAIHLFPADVPTKPNCTSHSF

SEQ ID NO: 164945 - protein, 44 aa, Glycine max
  Clone ID: PAT_MRT3847_119963C.1.pep
GVREDNRWGNCEVYWSLTYLGRVFKVEPLNPFGFRILYLRLCCY

SEQ ID NO: 164946 - protein, 101 aa, Glycine max
  Clone ID: PAT_MRT3847_119964C.1.pep
LRPGNGELSTEGIAGTSPVLLGGSKGEGVHVGRGIGNAVPGGRNLDSTSAGLVGNGNVGVAATLAELRSVHDLARPPVLLLVDRKADTVLETRHVGLFLFV

SEQ ID NO: 164947 - protein, 135 aa, Glycine max
  Clone ID: PAT_MRT3847_119965C.1.pep
QHNGIAERENRTILNMARNMLKTKNLPKKFWVEAVSTSVYLLNRCPIKRLEDKTPEEVWSGTRPSVSHLRIFGSICYKHIPDAIKRKLDDKSEKLIFLGYHSTGAYRVFNPQTQKLVLSRDLKFDEGQSWNWSDK

SEQ ID NO: 164948 - protein, 68 aa, Glycine max
  unsure (1)..(68): unsure at all Xaa locations
  Clone ID: PAT_MRT3847_119966C.1.pep
FLFFFFFFFFGAFDFINLNFLQGLTKLKDFRKSASIKVSRFYFLGKSFFFILKKKKKKKKKKKXPGPG

SEQ ID NO: 164949 - protein, 70 aa, Glycine max
  Clone ID: PAT_MRT3847_119967C.1.pep
MDSASASLLKSSLVLDKSEWVKGQTLRQPSASVVRCKLTTPSGLSIRAGSYADELGKIATTVASPWKGML

SEQ ID NO: 164950 - protein, 122 aa, Glycine max
  unsure (1)..(122): unsure at all Xaa locations
  Clone ID: PAT_MRT3847_119968C.1.pep
MGTRAARQAPQTGRTAGGPATIIHCDEFRGYFPXTTKVKCLTDARLFIDATDVYRGHTXRNFFSGDQRLQGEQKNLPHIKPSDLXPTSCFYPQNLIAGTRTPIFILNTAXDSWQDQSSLASS

SEQ ID NO: 164951 - protein, 97 aa, Glycine max
  Clone ID: PAT_MRT3847_119969C.1.pep
LVAARYYHYRGVFLRKNTAETTNKSHTQETGDQKLNAQIRKGRPNKTEKKQKINQQAFKRGEKRKTPKEDHQTPQKTKATTRVKSNPTQKSGRRGTE

SEQ ID NO: 164952 - protein, 44 aa, Glycine max
  Clone ID: PAT_MRT3847_11996C.1.pep
HAQLRSILPFKKSGFQSVRSVYASFKPIIARSVHPITAISSLAQ

SEQ ID NO: 164953 - protein, 125 aa, Glycine max
  Clone ID: PAT_MRT3847_119970C.1.pep
LPPDFSKKGGGLLNGNMGWFLPSENAPLSKNDGVLDLETGAMPQIGDLLGLDPSPKKDFVMDPYKWSSQQRKGQLSNFGKGNIPHQFGCFLLPNWHDSANPGGGLDVLLVTPFSLGFAYGLPPLY

SEQ ID NO: 164954 - protein, 65 aa, Glycine max
  Clone ID: PAT_MRT3847_119971C.1.pep
FLIYKTHNLIIYINLHFLYLGFLLRFYIISLLQMLDNIIIFLRKVNILIEDGHFQAQDVPEKKVR

SEQ ID NO: 164955 - protein, 187 aa, Glycine max
  Clone ID: PAT_MRT3847_119972C.1.pep
MVFSQSAILREEVEEAMSIQELIKKPLTSVPQRYIQLHNNEPSLLAGETFSHALPTINLKKLIHGEDIELELEKLTSACRDWGFFQLVEHGISSVVMKTLEDEVEGFFMLPMEEKMKYKVRPGDVEGYGTVIGSEDQKLDWGDRLFMKINPRSIRNPHLFPELPSSLRNILELYIEELQNLAMILMG

SEQ ID NO: 164956 - protein, 83 aa, Glycine max
  Clone ID: PAT_MRT3847_119973C.1.pep
VLVLLFKNIVELFLFSMQVSFFLLSMHSKINSLICFMSGILSLMRPMSRCSSVSSPLDRWPISPMLPLGFPAQTRIWQVRPIC

SEQ ID NO: 164957 - protein, 48 aa, Glycine max
  Clone ID: PAT_MRT3847_119974C.1.pep
QKLSCSYFTNICLFPHVRILALGYYNTKALLLWVVSSAPKILGILFEL

SEQ ID NO: 164958 - protein, 58 aa, Glycine max
  Clone ID: PAT_MRT3847_119975C.1.pep
ARGVLRICGWSLHIWARSSGFVIVHCPNESVLATLVVQACSSDSPLLILSPHQCFQML

SEQ ID NO: 164959 - protein, 75 aa, Glycine max
  Clone ID: PAT_MRT3847_119976C.1.pep
DDPPTRPAAALLNRFCFYTINAPQTKGETLGRTQGPRNRKKQPDKKQKHQPQSKPKQRNARHTRNPPETRRQQGP

SEQ ID NO: 164960 - protein, 38 aa, Glycine max
  Clone ID: PAT_MRT3847_119977C.1.pep
SVHYKNLISVIRKLDWSKSWTYNNLKSSNNFSIYMRSS

SEQ ID NO: 164961 - protein, 274 aa, Glycine max
  Clone ID: PAT_MRT3847_119978C.1.pep
TRPTILYSRGDEYEFVGKSVEGEKTKLLVQGNSNVKGNSEALVHVTSGNGSNKINNVEGEGGKGESVMFSFGLTAGGSVPLRVPGSYTGSIGFNSNGSLYLDGMKLVSESEKAEWVGTDRVIGCGFDPRQKKVFFTLDSELMHVIHCQTEEFGTPLFPILAANIDILVLVNFGQSAFKYAPANAQRTPNPCFIAPLVNSPAATIGYDDSKELFSIGRIDSQWLNRSTTKGSHNNGNNNNNNNNNNRTLDFDEESEADLFEIVLDGSGKSPNTAS

SEQ ID NO: 164962 - protein, 246 aa, Glycine max
  Clone ID: PAT_MRT3847_119979C.1.pep
MPTSMYPFIFLSILISIPLTGGTQLILVNNCQESVWPGILGSGGHPTPKDGGFHLCSGDEVVLEVPEGWSGRIWGRQGCCFDTKTGKGTCETGDCGGLLKCGGMGGVPPATLVEMTLGTPQSALHFYDVSLVDGFNLPVSMKPVGGGIGCGVAACEANLNVCCPFALVMKRQGKVVGCKSACLAAKSDRYCCTGEFATPKSCKPSAFSRLFKTICPKAYSYAYDDSTGLKICKAHRYVITFCPPKG

SEQ ID NO: 164963 - protein, 50 aa, Glycine max
  Clone ID: PAT_MRT3847_11997C.1.pep
APNRRLEAYKSGFMTLLNSFLTHFNKFHGETYQKKHLINKRLILCLPNVP

SEQ ID NO: 164964 - protein, 315 aa, Glycine max
  unsure (1)..(315): unsure at all Xaa locations
  Clone ID: PAT_MRT3847_119980C.1.pep
MASSNSSLSLLLPSLTTLILLQIQTCVSSSQLTQKPLLLPLKTQTQTPSRKLSFHHNVTLTVSLTVGSPPQNVTMVLDTGSELSWLHCKKLPNLNSTFNPLLSSSYTPTPCNSSICTTRTRDLTIPASCDPNNKLCHVIVXYADASSAEGTLAAETFSLARAAQPGTYXCMDSAGYTSDINEDSKTTGLMGMNRGSLSLVTQMSLPKFSYCISGEDALGVLLLGDGTDAPSPLQYTPLVTATTSSPYFNRVAYTVQLEGIKVSEKLLQLPKSVFVPDHTGAGQTMVDSGTQFTFLLGSVYSSLEDEFLEQTKGVL

SEQ ID NO: 164965 - protein, 85 aa, Glycine max
  unsure (1)..(85): unsure at all Xaa locations
  Clone ID: PAT_MRT3847_119981C.1.pep
MAAGGVTGAGLTLRIGLAIPLSFPTPFGTVTMAVSFDPKNGNKLTLTKTEEAFLAAKELMLGRVNSPIXAFKTVGGQPIVIDSIK

SEQ ID NO: 164966 - protein, 68 aa, Glycine max
  Clone ID: PAT_MRT3847_119982C.1.pep
TRPGELKRLVQEGKIRYIGLSEASPDTIRRAHAVHPITAVQLEWSLWTREIEQDIVPLCRYIKRVSIM

SEQ ID NO: 164967 - protein, 128 aa, Glycine max
  Clone ID: PAT_MRT3847_119983C.1.pep
EVTGVCFASAGSGIDDLTAQIQGVLSLPTQLGMFREYIGKLTALVGQQRAANIISNSVYLVSAGNNDIAITYSQILATTQPFPLYATRLIDTTSNFLKVHHLQTSIYFIINIDTKNKHILTHTKIISE

SEQ ID NO: 164968 - protein, 78 aa, Glycine max
  Clone ID: PAT_MRT3847_119984C.1.pep
MARTKQIARTSTGGIAPRKQIATNAAMKSAPETVRMNTPQRFRTERVPLTDNLEDHKFIELDIRTHLFQKHVRDITQD

SEQ ID NO: 164969 - protein, 58 aa, Glycine max
  unsure (1)..(58): unsure at all Xaa locations
  Clone ID: PAT_MRT3847_119985C.1.pep
QSMVAPPPIVIPDAGCTLQDLTSILCVGSDVGSRNSFVCCVEPPIFFKIPXYGEPLSI

SEQ ID NO: 164970 - protein, 82 aa, Glycine max
  unsure (1)..(82): unsure at all Xaa locations
  Clone ID: PAT_MRT3847_119986C.1.pep
RCCYQEGHTPPRFXXRTDKKKTAHKISSXETTAXRXRLTDFPXTSSVLVFXSPFQXXTQGSRGLCAASQVPREXXWARXSGR

SEQ ID NO: 164971 - protein, 117 aa, Glycine max
  Clone ID: PAT_MRT3847_119987C.1.pep
TWSLSFPRGGKKKLFLPPPPGGVWAFTRGSKFLATSPGISFQQTRGGLWSHKNTPFWKTSPEERPHFQTLHQNKNSFYSKRTAFGFFFLPHFFWKGGPHKNLLNKGGFQHPPKKKNK

SEQ ID NO: 164972 - protein, 167 aa, Glycine max
  Clone ID: PAT_MRT3847_119988C.1.pep
VSYKAAYYKPTRLTKKSSFGTMQTVYLKEHEGNAHNFVGTLSSAASAPWWSAFGSQSVHQGESCGQVKPFSLELPNCIDQLAATKPLARGADQVLGKGHITQFTIFPDDCKMSDDAQKLQTTMSLQSSLTDPQSRFEKRVKLATICAKYPYTDQFMDSSSLCTSISG

SEQ ID NO: 164973 - protein, 177 aa, Glycine max
  unsure (1)..(177): unsure at all Xaa locations
  Clone ID: PAT_MRT3847_119989C.1.pep
MAMQTVYLKKHEGNAHNFVGTLSSAASAPWWSAFGSQSVHQGESCGQMKPFALELPNCIDQLAATKLSARGAEQVLGEGHTTQFTIFPDGCKMSDDAQKLQTTISLQSSLTDPHSRFEIGFSQPMLCAKYPYTDQFYGLFSAYAPQISGRIMLPLNMSSDDGPXYVILKQYHGIIRR

SEQ ID NO: 164974 - protein, 113 aa, Glycine max
  unsure (1)..(113): unsure at all Xaa locations
  Clone ID: PAT_MRT3847_11998C.1.pep
PWGCACCSRMAFCKNHSGDIXCALPSGFPLTAFCFTIANGPLFTYFFELLLLQARGASMGLQAFKTYNFFVDAXDTPLITAGEGATPYLKTFFLPCPLAGQNFSVTAGVALAT

SEQ ID NO: 164975 - protein, 328 aa, Glycine max
  Clone ID: PAT_MRT3847_119990C.1.pep
MQTVYLKEHEGNAHNFVGTLSSAASAPWWSAFGSQSVHQGESCGQVKPFSLELPNCIDQLAATKPLARGADQVLGKGHITQFTIFPDDCKMSDDAQKLQTTMSLQSSLTDPQSRFEIGFSLPTICAKYPYTDQFYGLFSAYAPQISGRIMLPLNMTSDDEPIYVNAKQYHGIIRRRQSRAKAVLDHKLTKRRKPYMHESRHLHAMRRPRGCGGRFLNTKNSVDGNGKIGNEVHKTVGEQLQSSGSQSSEFLQSEVGTFNSSKETNGSSPNISGSEVTSMYSRGGLDSFSLNHLGSAVHSFADMIDGGRGMIIPTKWVAAAGNCCNLKV

SEQ ID NO: 164976 - protein, 110 aa, Glycine max
  Clone ID: PAT_MRT3847_119991C.1.pep
LHGVSCNVGKEPPIGPLSIENLSREAQGVLLKFSPDKAFLHVLFFLRSLSVWRLNIGLCLGTCFPLQGRKKKPPQFWERDHPFVCCSDSGVIYPVFKHEFGGVSSLQLKR

SEQ ID NO: 164977 - protein, 56 aa, Glycine max
  Clone ID: PAT_MRT3847_119992C.1.pep
INIHLNCQILLINLYHFIITIYYNNQSNIFNNVQNQSKSIILPLQLLNKLLIMFSP

SEQ ID NO: 164978 - protein, 57 aa, Glycine max
  Clone ID: PAT_MRT3847_119993C.1.pep
SEPCQISKLACSARGRLLGEDSVLKYHEIVHIVAVLPIPSTIYPRTYLGDGRSEWKS

SEQ ID NO: 164979 - protein, 78 aa, Glycine max
  Clone ID: PAT_MRT3847_119994C.1.pep
EDYNNNQSTYLADIDNINHTANAARNIHILGLPLRPKQKRLRYKAHNILLQRSSLTISKNATATKWMHPRDLQMDNPT

SEQ ID NO: 164980 - protein, 162 aa, Glycine max
  unsure (1)..(162): unsure at all Xaa locations
  Clone ID: PAT_MRT3847_119995C.1.pep
MVKSSSVAIIGAGSVGATIAYALVLRKVCSELYLVDIDDKICEGQVLDLSDGTFLTQTKVNKGSYEDAGQCDIIIFSAGAKQHPEESRNQHIERNYKILISVFNSMRPLNPHAIVLLVANPVDILTYFAQQISGLPKSQVFGAGTXLDSRRLRSEIAENLGG

SEQ ID NO: 164981 - protein, 57 aa, Glycine max
  Clone ID: PAT_MRT3847_119996C.1.pep
EENEVTTVCRSTPVVQLLMEKQDTHRECRRLPGNRCELLSTMQQILRSKDNAEFKFS

SEQ ID NO: 164982 - protein, 46 aa, Glycine max
  Clone ID: PAT_MRT3847_119997C.1.pep
SRFGGRDFRKEGSFNKATDYYGGGTGGGYCGNYGGGYGQGVPSAWD

SEQ ID NO: 164983 - protein, 37 aa, Glycine max
  Clone ID: PAT_MRT3847_119998C.1.pep
SEAQMRSPNLMRSSLIFITSFFQMLQLLTESSFSNLL

SEQ ID NO: 164984 - protein, 57 aa, Glycine max
  unsure (1)..(57): unsure at all Xaa locations
  Clone ID: PAT_MRT3847_119999C.1.pep
ALLCFMLQVIFQLCSPVCSILFWFCVLPWFVVFVPLLSGMFILRFNDNYNLAIKVKX

SEQ ID NO: 164985 - protein, 63 aa, Glycine max
  Clone ID: PAT_MRT3847_11999C.1.pep
LISVSGACLRRLSSHMVPSSSIFVFSRRAWLIFLDMANGMDEPHNAFIKIPPLSLRAAAVFEL

SEQ ID NO: 164986 - protein, 67 aa, Glycine max
  Clone ID: PAT_MRT3847_1199C.1.pep
IVSCMRVSIFSYINISPGWSHVERIPLMAQVVLVSSWTCDLCPALVSINGWPVQNTPPVGAFETINA

SEQ ID NO: 164987 - protein, 124 aa, Glycine max
  Clone ID: PAT_MRT3847_119C.1.pep
SRLALFGGLYLSAYNTMVVAMALSWLDSTHQLRGLPLRWGSSMEHTDGFFLFNRGNVWPFYIKTSYWNWSMGNKVGPFILRITHLSCPVCQKHKRPFYDDYSCSPSYIMLQGQTIKQVGSLLEM

SEQ ID NO: 164988 - protein, 73 aa, Glycine max
  unsure (1)..(73): unsure at all Xaa locations
  Clone ID: PAT_MRT3847_11C.1.pep
DDATLLRQIRRLESGMDQEVNNNNTVSDVSVKEEMIATLQDSSPLCGSAIPGSDSXELSYECLNNSDEVGGGS

SEQ ID NO: 164989 - protein, 90 aa, Glycine max
  Clone ID: PAT_MRT3847_120000C.1.pep
AANNGQQRRGEAGRSATRSPQEATKRPPPRRPPRKRGQAGLKKKVFNGVLTVASRTQPAGWETGASMEPKRRAGIRAGRSTEATGPPRAT

SEQ ID NO: 164990 - protein, 204 aa, Glycine max
  Clone ID: PAT_MRT3847_120001C.1.pep
PPKTPSPIYAPPIAPSPGNHPPYVPTPPKTPSPSYSPPNVPTPPKTPSPSSQPPFTPTPPKTPSPTSQPPYVPTPPSPISQPPSIATPPNTLSPTSQPPYPSTIPPSTSLSPSYPPSPSPSSAPTYPPSYLAPATSPPSPSTSATTPTISPAATTPSPSSSSSSGASNETTPARPNGASSVAPSRLGLYSLTILAGAALSTILG

SEQ ID NO: 164991 - protein, 122 aa, Glycine max
  Clone ID: PAT_MRT3847_120002C.1.pep
TDLYGSHPVYMDLRNEGGKPYAHGVLLLNSNGMDVFYRGTSLTYKIIGGVLDFYFFAGPTPLNVVDQYTSLIGRPAPMPYWAFGFHQCRWGYHNLSVVEDVVENYKKAKIPVDVIWNDDDHM

SEQ ID NO: 164992 - protein, 72 aa, Glycine max
  Clone ID: PAT_MRT3847_120003C.1.pep
VQQPILELAHPWPEWVQLMKCLLDKGYFCREEGKMLCNAGMGMKDFNVIRTVCLNFGRDHFHLLRFGRDLEL

SEQ ID NO: 164993 - protein, 95 aa, Glycine max
  Clone ID: PAT_MRT3847_120004C.1.pep
KLMSDHLGEAAYAEAMHNSIGATPVSMFCYGERDRMTNPDTPELTSTVSFTLLKRHPSLPGLAESVPRIPVGVSTRTLMGILTAADLALNPKVLL

SEQ ID NO: 164994 - protein, 103 aa, Glycine max
  Clone ID: PAT_MRT3847_120005C.1.pep
KSFSPPQKDNARYFSFLKVLAEGNNWKRKCRVVEQMRLFLRDDQEASIFMGTHGFVEALMQFLQSAVLKANVMALENGAMALFNLAVNNNRCVLNCNVKLLFI

SEQ ID NO: 164995 - protein, 62 aa, Glycine max
  Clone ID: PAT_MRT3847_120006C.1.pep
SIHSSLLIQHTTTLTSLLTIIPPICLYNFNHFFLGSTIHSTLSHYHSFSPFTHISPSSHFPL

SEQ ID NO: 164996 - protein, 537 aa, Glycine max
  Clone ID: PAT_MRT3847_120007C.1.pep
MGRKHDAVLASEPVAEEAPCSPELDSEKKKKKKKKNKNKDKHQTESSPKRKLDEHDPQNGTESKKKKKKHHESKGNAEETNGDSNNNNGDGANREETATDGSVVVTGNNAGEAKYAAVKSFADSGLPENVLECCKGFEKPSPIQSRAWPFLLDGRDLIGIAATGSGKTLAFGIPAVMHVLGKRKGKSSKGRNPLGLVLSPTRELAQQISDVMCDAGRSCGVQSICLYGGTSKGPQISSLKSGIDIVIGTPGRIQDLIEMGICCLKEVSFVVLDEADRMLDMGFEQIVRSILGQTCSDRQMVMFSATWPLPVHYLAQEFMDPNPVKVVVGSEDLAANHDVMQIVEVLDDRSRDKRLVALLEKYHKSQRNRVLVFVLYKLEAKRVENMLQEGGWKVVSIHGDKAQHDRTKALSLFKNASCPLMIATDVAARGLDIPDVEVVINYSFPLTTEDYVHRIGRTGRAGKKGVAHTFFMQQNKGLAGELVNVLREAGQIVPDALLKFGTHVKKKESKLYGAHFKEIPVDAPKSQKKTFDDSDED

SEQ ID NO: 164997 - protein, 46 aa, Glycine max
  Clone ID: PAT_MRT3847_120008C.1.pep
MVDYDPGRTVERRRFSNFMLFSSKIGEQGKENIFLDWSYLHVVFYL

SEQ ID NO: 164998 - protein, 171 aa, Glycine max
  Clone ID: PAT_MRT3847_120009C.1.pep
TSLNPSLTIAFAAFRHFPWTHVPAYIAAQVSASICACYALKGVYHPFLSGGVTVPTVSVAQAFATEFIITFILLFVVTAVATDTRAVGELAGIAVGATVLLNILISGPTSGGSMNPVRTLGPAVAAGNYKHIWIYLVAPTLGALAGAGVYTLVKLRDEEAEPPRQVRSFRR

SEQ ID NO: 164999 - protein, 70 aa, Glycine max
  Clone ID: PAT_MRT3847_12000C.1.pep
LPVVPAVSLSPISKLLIRQTIRSFVCVCVCVCVCVCVFGFWVWYTVFLHTPRPHTPLYISVITPSHSLHV

SEQ ID NO: 165000 - protein, 37 aa, Glycine max
  Clone ID: PAT_MRT3847_120010C.1.pep
FINKVFIQPHCETYSYLIERDHELFIMLQCTPHNSVS

SEQ ID NO: 165001 - protein, 53 aa, Glycine max
  Clone ID: PAT_MRT3847_120011C.1.pep
LEHDKTQTKLCYEYIRSSHVFQDFQSLLELLQVKDKRQVGLKQRWKRCRKFVF

SEQ ID NO: 165002 - protein, 207 aa, Glycine max
  unsure (1)..(207): unsure at all Xaa locations
  Clone ID: PAT_MRT3847_120012C.1.pep
SKFARGDEADLYLQAVDEIQRSLSSVSVSVYDLRCIAERMVSSGYLRECIQVYGSVRKSSVDASFRKLQIEKLSIGDVQRLEWEQLENKIRRWIRAAKVCVRTLFASEKKLCEQIFDGVGTSIDDACFMETVKGPAIQLFNFAEAISISRRSPEKLFKILDLHDALTDLMPDIDVVFDSKSSESIRVQAAXILSRLVEAARGILFDS

SEQ ID NO: 165003 - protein, 393 aa, Glycine max
  unsure (1)..(393): unsure at all Xaa locations
  Clone ID: PAT_MRT3847_120013C.1.pep
MESLPLETAEKIILRWDSTASEEARDKMIFSGGGDRDEADLYLQAVDEIQRSLSSVSVSVSSDKVNSAIQIAMARLEDEFRNILISHTNPFDPSSEDEPSQTLDSLSTTSSPKHPLTNEETTEEESDSNHNTXLLLFSVSTVTGAASSVHSSVSSVNSVNSSSYRSTSSIREIDLIPSDAVYDLRCIAERMLSSGYLRECIQVYGSVRKSSVDASFRKLHIEKLSIGDVQRLEWEQLENKIRRWIKAAKVCVRTLFASEKKLCEQIFDGVGTSIDDACFMETVKGPAIQLFNFAEAISISRRSPEKLFKILDLHDALTDLMPDIDVVFDSKSSESIRVQAAEILSRLGEAARGILSEFXNAVLKEPSRVAVPGGTIHPLTRYVMNYISVISDY

SEQ ID NO: 165004 - protein, 82 aa, Glycine max
  Clone ID: PAT_MRT3847_120014C.1.pep
TFHSDVCLHKLNSAGPKVNRVKTTGELINFLQQLNGITQGSKQSSTFTPGLKPLILLHLTNGLARTYKPEVNLGQLTYLHIW

SEQ ID NO: 165005 - protein, 42 aa, Glycine max
  Clone ID: PAT_MRT3847_120015C.1.pep
CWISTSSSPTRVGMSAPPILGGSSTHPDPRRGRTDLSLLDID

SEQ ID NO: 165006 - protein, 81 aa, Glycine max
  unsure (1)..(81): unsure at all Xaa locations
  Clone ID: PAT_MRT3847_120016C.1.pep
CDYMKLVAVNEHMIWTEYVTYVLMNESAYRHWMHEHVSVEDEMTTIWRDMLLTDLRHMIMGXIPWMATGADVDVEFTIVIR

SEQ ID NO: 165007 - protein, 32 aa, Glycine max
  Clone ID: PAT_MRT3847_120017C.1.pep
QNYSCLANKTIAKSGTTCLCRLDKGSNELNSY

SEQ ID NO: 165008 - protein, 79 aa, Glycine max
  Clone ID: PAT_MRT3847_120018C.1.pep
KTVLKVKNTFFFRFKLNGRYMFQNNLPFTISITLIISPTRFIHLIGLLQTKMETNFLAFPATDIIPRTFKETSTSIHYL

SEQ ID NO: 165009 - protein, 76 aa, Glycine max
  Clone ID: PAT_MRT3847_120019C.1.pep
PRVRFFLITISCTFVILTSNLLLLLFFGRKLIFILSSICFFLHHFSTLVFIILKTIKHGLREISFCCFRSLYVYVC

SEQ ID NO: 165010 - protein, 90 aa, Glycine max
  unsure (1)..(90): unsure at all Xaa locations
  Clone ID: PAT_MRT3847_12001C.1.pep
XTCISCKIMXSAIAXXXTXXXWXXXHXPXAPPLASXGCSGLILTSLQLPHXIXKFXYTHRXILXRTSLMSWLIDXKFXXLRYDDPIYGPP

SEQ ID NO: 165011 - protein, 92 aa, Glycine max
  Clone ID: PAT_MRT3847_120020C.1.pep
EAIASILLQHLRRRGTAFNWYGSFEKNCIHYLKGPRKLRALLFSNYLMNWNLNLCMCRVVSRYFRPQSSRKIKMWFLDVTYGYTVQQCSSML

SEQ ID NO: 165012 - protein, 127 aa, Glycine max
  unsure (1)..(127): unsure at all Xaa locations
  Clone ID: PAT_MRT3847_120021C.1.pep
KTRGIFYPECGPCPPETLGGAPHFAAPYYFMGKVGNPIXILKYGPQLRGEKLGIPNPXFKIXKRCLAQLFKKAGQPRGQKTKFLETLFFPGSKRPKKEGAKRGPGLGFKIYPHFCSFIKILKAPFVP

SEQ ID NO: 165013 - protein, 63 aa, Glycine max
  unsure (1)..(63): unsure at all Xaa locations
  Clone ID: PAT_MRT3847_120022C.1.pep
LYAKFLINDKIKNVLDSVVPVHRSRGSIKIQNSFLFKKKKKGRQRRTPLSELSSIXXRIRLRI

SEQ ID NO: 165014 - protein, 144 aa, Glycine max
  unsure (1)..(144): unsure at all Xaa locations
  Clone ID: PAT_MRT3847_120023C.1.pep
HLLLFFMPFLLIFFFDHFDLQVTALFALHVHXYNSNYPKGMILRFFVHFFDMEGPEENAPLGWKQHITHEGPGKGXAMCQVNHRLTWFVTEEQEHSHEEADLKTCQSLTLCKRYSCCDVTASDLPLRKLLRCRAPQCVKQNRAT

SEQ ID NO: 165015 - protein, 62 aa, Glycine max
  Clone ID: PAT_MRT3847_120024C.1.pep
FFFFFFFFFFFFFFFFFFFFFFFLGGGGPHSVYFSEPSIFGKCFIFSSKGTFFFFILGWGKN

SEQ ID NO: 165016 - protein, 53 aa, Glycine max
  unsure (1)..(53): unsure at all Xaa locations
  Clone ID: PAT_MRT3847_120025C.1.pep
TLNIXPNKLQGLNLTYIITIILEGNVIHIYNKILISTLNSKQPTASTNSQQNI

SEQ ID NO: 165017 - protein, 79 aa, Glycine max
  Clone ID: PAT_MRT3847_120026C.1.pep
MLSSFKAVQNMGVFTKYIVSSRAKVSTVLASATCIQLSNSYTSGLPIQNQRVNLTVSPRYTHPQKYTKLIQGAVHSTVR

SEQ ID NO: 165018 - protein, 60 aa, Glycine max
  unsure (1)..(60): unsure at all Xaa locations
  Clone ID: PAT_MRT3847_120027C.1.pep
TEMKQKDTPKIKHQIGISTMNHNKTATSLLTTNTAXYKYHTRLKNFQIFKQTIYTLYCII

SEQ ID NO: 165019 - protein, 186 aa, Glycine max
  Clone ID: PAT_MRT3847_120028C.1.pep
DAITAPTFGAHFCSKSRNKGIFGVVKCVATTGTSKFQTTTRPLMAAQLIHDRVEMECLEGAWEALEGNARCRFRGTIRFTATSLVHPDEPARTLQRTVGGDDPRATPYRLVEPVQVIEVTSSEEDPEEDLEELPPEPAVDALDFLEGDEDPLLEVDSPEEVMSASEADSTEDSGPGEMAISGGSSS

SEQ ID NO: 165020 - protein, 81 aa, Glycine max
  Clone ID: PAT_MRT3847_120029C.1.pep
TSSAAEDNLSLRYISKLLATIIFEEATMTWKRQRLQSFQAGRKKIYAHTKLCLVKIKSCHCVVCFYLSVPLFVLRRHRARD

SEQ ID NO: 165021 - protein, 163 aa, Glycine max
  Clone ID: PAT_MRT3847_12002C.1.pep
MTGMHQPSWGLSPPMTGPHPGSSPNTGQPYHPNASEHHPHVSRVAPQMTAQHYTPSGPSPQMAGHQPYGTPRGPQQWAERQYPPSGLSPPMAGQHHPLAGPTPPMSGWSIPSNGASAKMSPPYHISAGPSSQVTGPYHPSSSTPPHFEESHQQQSEVPEQVAA

SEQ ID NO: 165022 - protein, 59 aa, Glycine max
  Clone ID: PAT_MRT3847_120030C.1.pep
NTNQKYSVFMHGQYTNNLTDLTQETSFKQGGKKVWRNHPTLLHTYYRSEQLAAEGGKHA

SEQ ID NO: 165023 - protein, 159 aa, Glycine max
  Clone ID: PAT_MRT3847_120031C.1.pep
ARVRSRVFESIKKLEELCKLLEEATTRNHTEENGDLTDSEKDYDLLPKVVEFSEENGLVGEDISKVELSVNQEELKQNNMQEDSILSNDKAEKIESPKHEEVSGKRKEDETKEKEESKEKDDSVEVEYKMWESCKIEKKEFSPEREAEPESFEEEVNSK

SEQ ID NO: 165024 - protein, 143 aa, Glycine max
  Clone ID: PAT_MRT3847_120032C.1.pep
KKLDRYKNPWLELKIQYGQNKGKLYNEECDRFMICMVHKLGYGNWDELKAAFRTSPLFRFDWFVKSRTTQELARRCDTLIRLVEKENQEYDERERQARKEKKLAKSMTPSKRALARQTESPSSLKKRKQLTMDDYASTGKRRK

SEQ ID NO: 165025 - protein, 120 aa, Glycine max
  Clone ID: PAT_MRT3847_120033C.1.pep
PLYEAPALKVYRVMPVSLVKRKATMGTNGHTASPQGLGHSLRNPAPPVFLLASGGGAPFPFWEVPSLLRAPGLALFAFSPFVVRDFYSKTIYLGTPGFFLSPSFYTTPHKLNLGAPKKRF

SEQ ID NO: 165026 - protein, 129 aa, Glycine max
  Clone ID: PAT_MRT3847_120034C.1.pep
FGSRPLFKKIFAPISKKWGLFYGGVQVWGPPPLPPRVGEETGSPRLPKKPPFSFFLFPRPGFVFWLPQWERGAPPSLKKKAFFFLLGVGKARNPILGPLGALGVLEPPALSGVFFFRGGVCFFPFILGK

SEQ ID NO: 165027 - protein, 34 aa, Glycine max
  Clone ID: PAT_MRT3847_120035C.1.pep
SKSYGSSLTSGSITEFSGSLNHTRRLLTCPTRPR

SEQ ID NO: 165028 - protein, 63 aa, Glycine max
  unsure (1)..(63): unsure at all Xaa locations
  Clone ID: PAT_MRT3847_120036C.1.pep
VVSCADLVVLAARDAVSLSGGRIFAVXWEGVDGLSFSIDGTGYLPRPSSRNGQLLGRFGGRDF

SEQ ID NO: 165029 - protein, 50 aa, Glycine max
  Clone ID: PAT_MRT3847_120037C.1.pep
SFIDWHRCMVNLERPNLCGQISGMRRADPAPGIHCPRLSVSAPWCARTSG

SEQ ID NO: 165030 - protein, 110 aa, Glycine max
  Clone ID: PAT_MRT3847_120038C.1.pep
IILSPQDADENIPDYLSGLWENVFLNIDGGILCPGPNVILRCRCYLHLQVLEEVIFPTLVQITGALHIKWALPLVGVSWAHTPCIFIKLRFFYKKPLKSLTHPGYPFTVA

SEQ ID NO: 165031 - protein, 92 aa, Glycine max
  Clone ID: PAT_MRT3847_120039C.1.pep
MSRFMNAPSSPGLSPLFGVGHKRAREDDTGAGASVGLGVVAAASSQTQGNESGGGERRRRYRRVRQRPWGKWAAEIRDPHKAARVWLGTFDT

SEQ ID NO: 165032 - protein, 79 aa, Glycine max
  Clone ID: PAT_MRT3847_12003C.1.pep
GIGIYHSTGSYTFFPGPNNYCTVKNALFPNLTSHLPGYKFTAIRYPLSPLCQITSYPLPLTFHFYHCPKTTPKTPSQQP

SEQ ID NO: 165033 - protein, 246 aa, Glycine max
  Clone ID: PAT_MRT3847_120040C.1.pep
MEKEKEKESKLKNKIFKILPKAAAAAVSMTFQNPPFSPGRDHKFKHHGGKGFFSGPMIPVEARRKSKDGCVETQEPTSPKISCMGQIKHKKKKNQIKKAAKTMSMPTEEKKQASKFQRMMSFHSGKPKRPAARKQQSDADLESERSPAPPLGHMRRFASGRETFSNFDWKAQIAPEERDCYSYYDDRLESDAEDEIIIPFSAPLTVGGAASALNPNVQPRKEINLWKRRTMAPPRPLQLNPVLTAK

SEQ ID NO: 165034 - protein, 184 aa, Glycine max
  unsure (1)..(184): unsure at all Xaa locations
  Clone ID: PAT_MRT3847_120041C.1.pep
SSSRIRSSKNSPPSPPRLPLLGNLHQLGLFPHRTLQTLAQNYGPLMLLHFGKVPVLVVSSADAACEVMKTHDLIFSDRPQRKMNDILMYGSKDLASSTYGEYWRQMRSLTVSQLLNTKRVQSFRGSREEEIARMMEDIKRCCSDSLHVNLTDMFAALTNDVACRVVFGRXYGGGEGTQFQSLLL

SEQ ID NO: 165035 - protein, 68 aa, Glycine max
  Clone ID: PAT_MRT3847_120042C.1.pep
RTPSESDDRDNFEQCGDNERTRNVRGYNVGTMAIPCVRYAYYTNDHWLYSPYCGRDMHEKYACWRITQ

SEQ ID NO: 165036 - protein, 47 aa, Glycine max
  Clone ID: PAT_MRT3847_120043C.1.pep
ESIPPRMMLAYPGGSKNNILSKFAELIDPTRVNHVRLWQQQFSESVP

SEQ ID NO: 165037 - protein, 54 aa, Glycine max
  Clone ID: PAT_MRT3847_120044C.1.pep
IPYSYVATSPKLMIQRKKSIILLCLSLLFSFFLPRCYLQYNKIHIPFCRLLAAV

SEQ ID NO: 165038 - protein, 180 aa, Glycine max
  Clone ID: PAT_MRT3847_120045C.1.pep
SGGVTEQGMHMVPLSDSARVRCVEVLDKAISGVLLATAEIAFFQGCLTWLLFRLYRIHFLYVSTVIAFLSPLLPIFPSWLATIPAAIQLVLEGRYVVAIFLSVAHLSLMDYGATEILQDVPGHSAYLAGLSIIGGMALFPSALEGAILGPLITTVMIALKDLYAEFVLDEPDDKVKEKAN

SEQ ID NO: 165039 - protein, 85 aa, Glycine max
  unsure (1)..(85): unsure at all Xaa locations
  Clone ID: PAT_MRT3847_120046C.1.pep
TXXGXXTLXAXEXLTXTIGLXNHWNDIVNXLXXIQXDPVPSSIARRXTSXTSRAAXCASXXYNALXIIXQAVXWYRNIPHAXFXP

SEQ ID NO: 165040 - protein, 106 aa, Glycine max
  unsure (1)..(106): unsure at all Xaa locations
  Clone ID: PAT_MRT3847_120047C.1.pep
GNFPVDSWLPIFVNCLYPVSQLPSEAVVANVTCGSGRGGLPTLVXLVLQITIRSSDIIIRIRSALXDGKKIDNLTRVDPFTVALLAGLFVVKIEILSSTATDPMLT

SEQ ID NO: 165041 - protein, 70 aa, Glycine max
  Clone ID: PAT_MRT3847_120048C.1.pep
PTLPPTRPVLLGGLTPEKPTGFTFQRVLLGRFRSQRLRLEKGWVGEGEGGPRGWFRFKGVPIRGGLRFKI

SEQ ID NO: 165042 - protein, 72 aa, Glycine max
  Clone ID: PAT_MRT3847_120049C.1.pep
LCRSNCPRSCHCGERSSTCGVCTNLKPTLSTASIAIRIRLRVHLRASHHPLTIIPVRLPRRFSTPPPHARST

SEQ ID NO: 165043 - protein, 55 aa, Glycine max
  unsure (1)..(55): unsure at all Xaa locations
  Clone ID: PAT_MRT3847_12004C.1.pep
LGVSWXVLFLAXRFPRPPPXLRLXXALFRXVLWFPRFSARLPRGLSXGAPCLLLG

SEQ ID NO: 165044 - protein, 153 aa, Glycine max
  unsure (1)..(153): unsure at all Xaa locations
  Clone ID: PAT_MRT3847_120050C.1.pep
MTAELGQQTVELSTLVTRAANDSYASLKELVDKCKSSELSDTDKKISILKFLSKTQQRMIRLNVLSKWCQQVPLIHHCQQLASTVSNHDMCFTQAADSLFFMHEGLQQARAPVYDVPSAIDILLTGSYQRLPKCIEDVGTQYALTXEQQKPAL

SEQ ID NO: 165045 - protein, 188 aa, Glycine max
  unsure (1)..(188): unsure at all Xaa locations
  Clone ID: PAT_MRT3847_120051C.1.pep
MKALILVGGFGTRLRPLTLSFPKPLVDFANKPMILHQIEALKAIGVTEVVLAINYQPEVMLNFLKDFETKLGIKITCSQETEPLGTAGPLALARDKLIDDSGEPFFVLNSDVISEYPLKEMIEFHKNHGGEASIMVTKVDEPSKYGVVVMEESTGRLIKFVENRNWLFGNKIMLXIYLLTPLFLDRID

SEQ ID NO: 165046 - protein, 49 aa, Glycine max
  Clone ID: PAT_MRT3847_120052C.1.pep
LVMQVANRLLIKGLAGMLDGSCELLAVGNVQYLLFMADCRRPYLFQSLD

SEQ ID NO: 165047 - protein, 361 aa, Glycine max
  Clone ID: PAT_MRT3847_120053C.1.pep
MKALILVGGFGTRLRPLTLSFPKPLVDFANKPMILHQIEALKAIGVTEVVLAINYQPEVMLNFLKDFESKLGIKITCSQETEPLGTAGPLALARDKLIDDSGEPFFVLNSDVISEYPLKEMIEFHKSHGGEASIMVTKVDEPSKYGVVVMEESTGQVDKFVEKPKLFVGNKINAGIYLLNPSVLDRIELRPTSIEKEVFPKIAAEKKLFAMVLPGFWMDIGQPRDYISGLRLYLDSLKKKSSSKLASGSQFVGNVIVDETAKIGEGCLIGPDVAIGPGCIIEQGVRLKSCTIMRGVRVKKHACVSSSIVGWHSTVGQWARVDNMTILGEDVHVCDEIYSNGGVVLPHKEIKSNILKPEIVM

SEQ ID NO: 165048 - protein, 61 aa, Glycine max
  Clone ID: PAT_MRT3847_120054C.1.pep
TLEYCDIYRAPSLAKESKQHKKPLSQAQRFLWNSETKLFLYIDLCALHLRTWRTVVPGIRP

SEQ ID NO: 165049 - protein, 64 aa, Glycine max
  Clone ID: PAT_MRT3847_120055C.1.pep
DPLQNLNPSFLGFMILPFNLYSIRSQIIKISKHDSTMLYVVDGCDGTIVPLILVSMLFFPLFWI

SEQ ID NO: 165050 - protein, 61 aa, Glycine max
  Clone ID: PAT_MRT3847_120056C.1.pep
VSYMPIYTPSCKSALDRDSWDASRIRSVINLVLYQLICRRQPLVFFFSSIISILFNAAVLQ

SEQ ID NO: 165051 - protein, 61 aa, Glycine max
  Clone ID: PAT_MRT3847_120057C.1.pep
LRVHDISRPTFRGPFLKSFLAGLKLPIPGGFAKTGAPLHFKKLANWDFFKRNFNQMSNVLG

SEQ ID NO: 165052 - protein, 67 aa, Glycine max
  unsure (1)..(67): unsure at all Xaa locations
  Clone ID: PAT_MRT3847_120058C.1.pep
RVGGFLVHVFSTHLGNRDHKGRVRGISLKLQYDERVRRMDFFLDFSAINTDHIXVYKDTLYMLQSLG

SEQ ID NO: 165053 - protein, 50 aa, Glycine max
  Clone ID: PAT_MRT3847_120059C.1.pep
VQYKLKRYVQVRCRQKNRKPRQGAPDLDDPILHSPTCHMLHIIYFHLNSV

SEQ ID NO: 165054 - protein, 154 aa, Glycine max
  unsure (1)..(154): unsure at all Xaa locations
  Clone ID: PAT_MRT3847_12005C.1.pep
LKSGGCGGCGGGCGGCGGGCANRLESTGCGGRCGDPLVGDCDIHELRTETLHQLYELADDRSISGHSYSGSLLMQFCDLLLISDALLHFSHSYPAYANYTFEYAYYLWSPSXLSTQRDADLILCWDICLSAPACSFMLTASHKQFMQPMSHLMH

SEQ ID NO: 165055 - protein, 163 aa, Glycine max
  Clone ID: PAT_MRT3847_120060C.1.pep
PNLESLCLNKLTNIEMICRSPVTVDSFAKLKTIKVMGCTCLKNLFSFYKDKFVSSLETIDVSDCDSLKEIFEILVNPDKVEFLKLHSLTLQSLPLFTSFYNYRVEGPSESQLTKAQTVERDEKEITIAQDERSGMAPPLFGELVYDIAYFSFNFNLFVISFFF

SEQ ID NO: 165056 - protein, 346 aa, Glycine max
  Clone ID: PAT_MRT3847_120061C.1.pep
MSKDSTNSHTNPSSPLLSVSAVTSASQFPTKNAKKVVLFYCAETKALAEKIAAETDAIELRSISWGKFPDGFPNIFIPNAQGIRGMHVAFLASFSSPAVIFEQIPVIYALPKLFIASFTLVLPFFPTGTSERMEDEGDIATAFTLARLLSNIPISRGGPTSLVTFDIHALQERFYFGDNILPCFESGIPLLKRRLQDLPDSDNISVAFPDDGAWKRFHKQLQHFPTIVCAKVREGDQRIVRIKEGDPRGRHIVIVDDLVQSGGTLIECQKVLAAHGATKISAYVTHGIFPNKSWARFGHDNGGHPESAFTYFWITDSCPLTVKDVMNRPPFEILSLASSISASLQI

SEQ ID NO: 165057 - protein, 174 aa, Glycine max
  unsure (1)..(174): unsure at all Xaa locations
  Clone ID: PAT_MRT3847_120062C.1.pep
MARTRNKSLQAKLVLLGDMGAGKTSLVLRFVKGEFSEYQESTIGAAFFTHVLSLNEATVKFDIWDTAGQERYHSLAPMYYRGAAAAIVVYDITSMDSFVRAKKWVREVLRQGGRXYAKENGLSFLETSAKTAQNVNELFYEIAKRLAKANPSRQSGMKLHNRAGETRRGFFCCT

SEQ ID NO: 165058 - protein, 63 aa, Glycine max
  Clone ID: PAT_MRT3847_120063C.1.pep
KLELLQHFFVGIHSQVRKCFRLSKFLKRVDYLFPIILSRAIKLEFVCNINPYFREFAPFHVHY

SEQ ID NO: 165059 - protein, 97 aa, Glycine max
  unsure (1)..(97): unsure at all Xaa locations
  Clone ID: PAT_MRT3847_120064C.1.pep
SMAEDTVQATPPRNSXYLVNNPAXLQSNFAFGALAPTGVSPFHFATQQNIAPQNPSPFQASGSLEFNAGGSFSLGTGGADKAGRKYVKVRHNRPRKK

SEQ ID NO: 165060 - protein, 39 aa, Glycine max
  Clone ID: PAT_MRT3847_120065C.1.pep
RSATKIPGNTECDGVGILGIVWAFGGMILILVYWTAGIF

SEQ ID NO: 165061 - protein, 61 aa, Glycine max
  Clone ID: PAT_MRT3847_120066C.1.pep
KIYYLTMSNTMGKWEHDSLKMNSISIIPIPPYTYIINVFLITFTFFKEKMETTRVYIKLNS

SEQ ID NO: 165062 - protein, 55 aa, Glycine max
  unsure (1)..(55): unsure at all Xaa locations
  Clone ID: PAT_MRT3847_120067C.1.pep
KNGIKMWSYEWGNRNXWHVSFIIENIKQWKVFEIVMGIYEDFEIGGKNNKRGFFV

SEQ ID NO: 165063 - protein, 98 aa, Glycine max
  Clone ID: PAT_MRT3847_120068C.1.pep
GGGVITCGQLLCSITAFWFQPFLFHNTISQLDRNLVTGGKVICVYSKDVNCQLFYLTHGGHPENSGPLLVGSHIYPLVGRFKWGRVHILNLLRGQNFF

SEQ ID NO: 165064 - protein, 44 aa, Glycine max
  Clone ID: PAT_MRT3847_120069C.1.pep
CKFILKNFGIHLNSNLNFGYKVIYEINHGYLLIFYIFKNYYIFF

SEQ ID NO: 165065 - protein, 163 aa, Glycine max
  Clone ID: PAT_MRT3847_12006C.1.pep
NSARASMSNILLQSSSSEEDLQLLMEQRKKKRKQSNRESARRSRMRKQKHLDDLIAQVDHLKKQKSLTLMKVDITTKHYLEVKAENSILWAQKTELTQSLQSLNDIIDLINTTNGVYHTDCYDINNHNNHNNYYNNNNNFMNPMHMAYLNQPIVATADNMFLW

SEQ ID NO: 165066 - protein, 105 aa, Glycine max
  Clone ID: PAT_MRT3847_120070C.1.pep
CRTTQKWDVYSFGVVLLEILTGRSPESSPPPSTSMEVPDLVRWVRKGFDQESPLSEMVDPSLLQKVRVKKKVLAVFHVALSCPEEDPEARPRMKTVCENFYKIGT

SEQ ID NO: 165067 - protein, 59 aa, Glycine max
  Clone ID: PAT_MRT3847_120071C.1.pep
SGLMRSTAYSLGGLRLWRLMLASVDKSAHHSLYHCREDRSNGRTFTATKDPSSSFPLKL

SEQ ID NO: 165068 - protein, 106 aa, Glycine max
  Clone ID: PAT_MRT3847_120072C.1.pep
SPEGAAYPKFSALYPRGSPVALFSLAASRFPFRSNPGRIPNRRLGLNPPPCSFFSGGVHHSKSKLANGALAAFLRRDAPHCGAHVRRINHPAPSGDPAGNFLRAET

SEQ ID NO: 165069 - protein, 76 aa, Glycine max
  Clone ID: PAT_MRT3847_120073C.1.pep
RIMDNPKQTLGSFAVVTLLFAGVILLYNWSTSFSNELVLSQKEPLCEQSNSTTTNVEAYGDSLDYALAKASWETKR

SEQ ID NO: 165070 - protein, 94 aa, Glycine max
  unsure (1)..(94): unsure at all Xaa locations
  Clone ID: PAT_MRT3847_120074C.1.pep
XXXHFPSPVLYXKVSGXXXXSAMSXXTXXCXTTEXXCSALLGMXSPGLIXAXTKXXAXAMHGXXXXGXLAXWXXXXKXXVGRSHSXCSXXDLGS

SEQ ID NO: 165071 - protein, 48 aa, Glycine max
  Clone ID: PAT_MRT3847_120075C.1.pep
APSSDLNLGDCLEDLCRRMYAYVSLDPLEGPLFYVCLVDMVCIKITLC

SEQ ID NO: 165072 - protein, 208 aa, Glycine max
  Clone ID: PAT_MRT3847_120076C.1.pep
MQVAAELQRAHHHHQRHKQDTPMCRQIQLTISDHTTAGDDDGEDLFIPPLNFAMVDNGIFRSGFPEPANFSFLQTLGLRSIIYLCPEPYPEANMEFLKSNGIKLFQFGIEGHKEPFVNIPEDTIREALKVVLDVRNHPVIIHCKRGKHRTGCLVGCYRKLQKWCLSSVFDEYQRFAAAKARVSDQRFVELFDISSLKHFPIPFSCLKR

SEQ ID NO: 165073 - protein, 177 aa, Glycine max
  Clone ID: PAT_MRT3847_120077C.1.pep
MLGVIRARTWLRYSKALLQPWKVGFSSLSAIDGRKHHLLNLQEIETVLTDVKADDVKVIPVPKHCDWADFMVLATGRSTWHVKNIAQALIYKAKQKQRGVERMMLPSVEGQAGGKWIVIDSGKVIVHALDEKARAYYNLEGLWTPGGIQNERDEDLQKALVKVRRKNNSKKPAQKNA

SEQ ID NO: 165074 - protein, 83 aa, Glycine max
  unsure (1)..(83): unsure at all Xaa locations
  Clone ID: PAT_MRT3847_120078C.1.pep
GSLFKRHSDYHTVVDEIGMKLDFMWAPYVTNLTSLVAGFKRNRVYPDLLVMGSGLWHMLHFTNASDYGFSLGVLRSSXNSLLP

SEQ ID NO: 165075 - protein, 75 aa, Glycine max
  unsure (1)..(75): unsure at all Xaa locations
  Clone ID: PAT_MRT3847_120079C.1.pep
MRHGTEPLXRSFTSYEGNFELILVMGXERELNSMSSNFPLFLSSSVVERSAVNXLVVGSNPTWGDFIDSEICNSE

SEQ ID NO: 165076 - protein, 134 aa, Glycine max
  Clone ID: PAT_MRT3847_12007C.1.pep
QQESTICKSNTKFSAIDNSLSSHNLYKSLCINFSRSSWCLWIMPVVCSCPWIIITLQINPSLYHELFCHIKHFFSIFQFLNTLKTIDTKIVFSWTLCGMQIEELLNFGIYCKDYIRLNYVHEGLNYNLIRCNLG

SEQ ID NO: 165077 - protein, 63 aa, Glycine max
  Clone ID: PAT_MRT3847_120080C.1.pep
SSWVIKPNTFFSEHRVSLKVLKFMRLIFSTIFFHAHRFRDYLSKYQLCHTILVQVKCQYNCSI

SEQ ID NO: 165078 - protein, 50 aa, Glycine max
  Clone ID: PAT_MRT3847_120081C.1.pep
AQERWVIARQWPHGVWASFCVGQSSTVPRVGSQVFFLFKPVFGCSGGGPS

SEQ ID NO: 165079 - protein, 91 aa, Glycine max
  Clone ID: PAT_MRT3847_120082C.1.pep
TTFLSSSLTSFSDSLSHPLKFYQFYFRFSILILNLLLFLVHWVQIQAQFWFSLLGFPIGVISIWRGIFWFQENFGFSILGTSSCSCKSLKP

SEQ ID NO: 165080 - protein, 118 aa, Glycine max
  unsure (1)..(118): unsure at all Xaa locations
  Clone ID: PAT_MRT3847_120083C.1.pep
RVHEQPNLELQEKNKDGSKKFSNVKPPKTTRSWINTSVTLAKCKKKCTXDCSCTTYANSDIRGEGSDCTIWYGDLLDIRLIPEAGQDRYIRLAVSETGMNFKFWRCLGEKNMKVNYIS

SEQ ID NO: 165081 - protein, 125 aa, Glycine max
  unsure (1)..(125): unsure at all Xaa locations
  Clone ID: PAT_MRT3847_120084C.1.pep
STTVRTPLDVHTGTQSFCQVAMLLREGRILLVKTGLGCTHQILLLSLVGSREWRQGXPMVQIGTSRKAPLKRIERAQLVQVLFTYTTTAEAXRGMKDAEFXPHPTSVTSPMHVCGPNNGYKILGP

SEQ ID NO: 165082 - protein, 59 aa, Glycine max
  Clone ID: PAT_MRT3847_120085C.1.pep
TRVFLRCGLHYHLRCGCRFKKLACFARTYLVYVNVDNHFLWKPPVFKRKPLIKKKGGGE

SEQ ID NO: 165083 - protein, 112 aa, Glycine max
  Clone ID: PAT_MRT3847_120086C.1.pep
FKMSDEGEGSPGFFLKGQTLVIGAHHILGAKSLKGDFFFSKKPHGFSFEQVFPSAFQTPFKKKFLKEWVFVFFCALGDQKVITRVYNIRFWWGFILTFFPEGPLGFKGAQTN

SEQ ID NO: 165084 - protein, 42 aa, Glycine max
  Clone ID: PAT_MRT3847_120087C.1.pep
MSKAILMAISCLCLAGKEEKMCPSGLDVGRVSMTKTGTNQGH

SEQ ID NO: 165085 - protein, 54 aa, Glycine max
  Clone ID: PAT_MRT3847_120088C.1.pep
YCNAYRLCVDNRYSKGVALIMLTCASMIALIRSLLLVSGLGALELQWGRSYLHS

SEQ ID NO: 165086 - protein, 60 aa, Glycine max
  Clone ID: PAT_MRT3847_120089C.1.pep
HDQSTFLGKIYYCSLLRFKICSNILIFQYKLDLQIQSKILQISYLTKVRTEMVGCGRPKV

SEQ ID NO: 165087 - protein, 89 aa, Glycine max
  Clone ID: PAT_MRT3847_12008C.1.pep
ESSLLICLATIIKRFAFAPQNSRSDCHSACRRMKHCNFLCLRDGNQVTPAPLKPQHQHYPINLVPTLFCCIVSAHSKVLQNLPFFFLSS

SEQ ID NO: 165088 - protein, 187 aa, Glycine max
  unsure (1)..(187): unsure at all Xaa locations
  Clone ID: PAT_MRT3847_120090C.1.pep
EELVEALVQRGEAKLLTEDWEGAVEDLRSAAQKLPQDMNIREAVMRAEKALKISKRKDYYKILGISKTASAADIKRAYKKLALQWHPDKNVDKREEAEAKFREIAAAYEVLXDEDKRVRYDRGEDLEEMGTGGGGGGGGFNPFGGGGYTYTFEGGFPGGGFGGGFPGGGFGGGFPGGGGGGGFEFHF

SEQ ID NO: 165089 - protein, 66 aa, Glycine max
  Clone ID: PAT_MRT3847_120091C.1.pep
GKENFPPGLRAIISFPKLRFFLNGVKSGGNPPPKKFKAFPPPAFLNSPGFATLYKKWGNDFYFFGN

SEQ ID NO: 165090 - protein, 100 aa, Glycine max
  Clone ID: PAT_MRT3847_120092C.1.pep
GGEPFSNKAPRALGGGCPTWAFQGNLLNPNVFLYLPVFVGRLLEKWFPKKPVLFLHIKAPFLRPSLWAAPGEGKFTPLVLNPGVKKIKFAPLAGLFFWAF

SEQ ID NO: 165091 - protein, 87 aa, Glycine max
  unsure (1)..(87): unsure at all Xaa locations
  Clone ID: PAT_MRT3847_120093C.1.pep
YLEKLEKFMGFLAYSEPVKSLMFHXIYKSIGXRLADSLNRAILAHLNLPSYTAMERLIQQATVVRQCLSQEAGKDGPPFSLKDFLKS

SEQ ID NO: 165092 - protein, 181 aa, Glycine max
  unsure (1)..(181): unsure at all Xaa locations
  Clone ID: PAT_MRT3847_120094C.1.pep
MFVKLQLLYPHTPLLANANANANAFLLPEKTEQVSPTRRKQRLPLHNGTVKQETHSKKRRPEKNPEEGVPRKSKPEKSHTKCSTKRVSYGGCIPAILEALDAVLGVDEALGPWEERLSNKERSIILKEQLRWDRALEIFEWFNKKGHELXTIHYNIMLRSLGRARQWRRVESLWNEMNARG

SEQ ID NO: 165093 - protein, 38 aa, Glycine max
  Clone ID: PAT_MRT3847_120095C.1.pep
PHRRDEPSDVVPTFCWREVRYGLYSGNDRCVMEDRIVE

SEQ ID NO: 165094 - protein, 103 aa, Glycine max
  Clone ID: PAT_MRT3847_120096C.1.pep
IISHNIWIAMGIAEVLGDFFGDLLQALKCSPQSSDHHLDHKPQNVLKLNDKMVGNLVSAFGMETNGRIKKENARQVVEKLGLMYDKSSSSSGFELTKGGLLDD

SEQ ID NO: 165095 - protein, 56 aa, Glycine max
  Clone ID: PAT_MRT3847_120097C.1.pep
RVGIFIWLMKLIFMCWVSNQSIRLVCLVSFIFLIGFSDSSSVANQSFSVFWFFSFN

SEQ ID NO: 165096 - protein, 50 aa, Glycine max
  Clone ID: PAT_MRT3847_120098C.1.pep
SSGGVRESEKTALSAFTSGTHSNPMSHSALPPPSSTMDSVPSRESPYTPL

SEQ ID NO: 165097 - protein, 74 aa, Glycine max
  Clone ID: PAT_MRT3847_120099C.1.pep
HLYCSFSQLPKTEETVPKNKRATKFTRLPSPNYWGLGMVNAHSLTLTSGKSVSRIATHDPPVRILYPKENSKNL

SEQ ID NO: 165098 - protein, 82 aa, Glycine max
  unsure (1)..(82): unsure at all Xaa locations
  Clone ID: PAT_MRT3847_12009C.1.pep
SEFSFSFPPELVLRXGSCIPEHFTXSSFNLAIASFSXXMQXRKLAFESSTFVNSSSNLCXKPSSXTTLFALXSLXRNVAXKX

SEQ ID NO: 165099 - protein, 75 aa, Glycine max
  Clone ID: PAT_MRT3847_1200C.1.pep
FLISSTSFLLLSSGCFCGFLQVFVAFLYSSFALEPPVFFSLILHLVLRFLAPIHHQLLPSIPLALGFPIELHLHN

SEQ ID NO: 165100 - protein, 43 aa, Glycine max
  Clone ID: PAT_MRT3847_120100C.1.pep
TSSQAGLPAGFKHKKKKKKKKKNAVFLEDPILRTPACHVITFL

SEQ ID NO: 165101 - protein, 44 aa, Glycine max
  Clone ID: PAT_MRT3847_120101C.1.pep
IGPALFTLTRGKEGKKIFPSQFLRRPQTIYQFSSFINRSYLNSS

SEQ ID NO: 165102 - protein, 122 aa, Glycine max
  Clone ID: PAT_MRT3847_120102C.1.pep
IRRFQNLSSTTTSSRGSGSKGKSKSSSKKMQYKNLGRSGLKVSQLSYRAWGSSGNQLDPKEAKALLQCWPDHRVKLFDNPQGYTNRRAQGNKGQGNPELGWKRSHNGVFTKNLWGGQGPNDK

SEQ ID NO: 165103 - protein, 101 aa, Glycine max
  Clone ID: PAT_MRT3847_120103C.1.pep
SHFMANILFKLIYKVVIDYHNHVINYQCFKMLDFKFQESKLVIKHFQIISNFCNRLHNTCNRLLPFCRLLAAVFKHEESHLLMCNCLHHDGNRLPVTDFKK

SEQ ID NO: 165104 - protein, 76 aa, Glycine max
  Clone ID: PAT_MRT3847_120104C.1.pep
SLSALCRSFASLAVAIRVQMSVRMVEWVRVLACSIMYQGCLDSVYLHMQRTIVHSTVPSPLVHLARLWSLSTCRCV

SEQ ID NO: 165105 - protein, 80 aa, Glycine max
  Clone ID: PAT_MRT3847_120105C.1.pep
VIRLNLYSGVVVKVTCSLCMCYLRSSCFLSFRKFFGVSRPARAWQFIESVCIAPLLGGGTGSFFTHSFLLFFDLLVTCFV

SEQ ID NO: 165106 - protein, 88 aa, Glycine max
  Clone ID: PAT_MRT3847_120106C.1.pep
RRMCILTDIENPFCSSEKGKRLQNLRSNHLQSSSSMLMQKNFRMGKTSLTQGTIASCKIMNVIGMILALLRAGLLPQVIIYASTTHEN

SEQ ID NO: 165107 - protein, 168 aa, Glycine max
  Clone ID: PAT_MRT3847_120107C.1.pep
CPRVRPRVRGPIRSKNELQNLPPVPPVDAILEPHHQTVPVGIVMSTLGAQVIVEGVEKHDPLNEGSILWLTESQKPLGLIDEIFGPVKNPYYVVRYNSESEVPTGIHEGTLISFVPEFADHVLNNKDLYRKGYDASGADDEELSDEMEFSDDEKEAEYKRMQKPPKRG

SEQ ID NO: 165108 - protein, 49 aa, Glycine max
  Clone ID: PAT_MRT3847_120108C.1.pep
PQLQRQPCLFDKHSATLFSHSHIRIVSIYYYIYCWRLNSIKYNNTTEPL

SEQ ID NO: 165109 - protein, 174 aa, Glycine max
  Clone ID: PAT_MRT3847_120109C.1.pep
LLAAGQSSTITGTYAGQFIMGGFLNLRLKKWLRALITRSFAIVPTIIVAIVFNRSEGSLDVLNEWLNVLQSMQIPFALIPLLTLVSKEQIMGTFRVGPVLERVAWTVAGLIIIINGYLLLDFFVSEVNGILLGLLACSCTTAYIAFIVYLVSQSGILPSAWVNRLPKGFSSCGN

SEQ ID NO: 165110 - protein, 81 aa, Glycine max
  Clone ID: PAT_MRT3847_12010C.1.pep
STCHLVHDCLNMSGRVCYFPFISNGYEYYVIKSTISPNIRNKIRVALQCHLNNRIYIKFRERIRTSVFVKSLRKIYAGTLL

SEQ ID NO: 165111 - protein, 67 aa, Glycine max
  Clone ID: PAT_MRT3847_120110C.1.pep
KCLGVEIINRCRLKRKKKLGVCFKLLGQRDLTLQNFGRQSLVKKKYFVGELVTNERAHFPQLTFGLL

SEQ ID NO: 165112 - protein, 112 aa, Glycine max
  Clone ID: PAT_MRT3847_120111C.1.pep
EFGTSKPPVYKPPIEKPPVYKPPVYKPPVEKPPVYKPPVYKPPVYKPPVYKPPVEKPPIYKPPVYKPPIEKPPVYKPPVYKPPVYKPPVYKPPVKKPPIYKPPYPKYPPGSN

SEQ ID NO: 165113 - protein, 192 aa, Glycine max
  unsure (1)..(192): unsure at all Xaa locations
  Clone ID: PAT_MRT3847_120112C.1.pep
TRASLSSSLVLLLAALILSPQVLADYEKPPIYKPPVYTPPVYKPPVEKPPVYKPXVYKPPVEKPPVYKPPVYKPPIYKPPVYKPPVEKPPVYKPPVYKPPVYKPPVYKPPIEKPPVYKPPVYKPPVYKPPVEKPPVYKPPVYKPPVYKPPVYKPPVEKPPMYKPPVYKPPIEKPPVYKPPVYRPPVYKPPVY

SEQ ID NO: 165114 - protein, 246 aa, Glycine max
  Clone ID: PAT_MRT3847_120113C.1.pep
MTPPLFGELVEIPNLENLNLISMNKIQKIWSDQPPSNFCFQNLIKLDVNGCHNLRSVCSLSVASSLRKLKGLFVRNCKMMEKIFSTEGNSADKVYVFPKLEEIHLNKMDELTDIWQAEVSADSFSSVTSVNIDSCNKLDKIFPSHMEGWFASLNSLKVYYCQSVKVIFEIKDSQQADASGGIDTNLQVVDVRGLPKLEQVWSRDPGGILNFKKLQSIEMSLLEDWRNVFPAFCGQKMFQSLKHCRS

SEQ ID NO: 165115 - protein, 231 aa, Glycine max
  Clone ID: PAT_MRT3847_120114C.1.pep
MRNMASLSSSLVLLLAALILSPQVLADYEKPPIYKPPVYTPPVYKPPVEKPPVYKPPVYKPPVEKPPVYKPPVYKPPIYKPPVYKPPVEKPPVYKPPVYKPPVYKPPVYKPPIEKPPVYKPPVYKPPVYKPPVYKPPVYKPPVYKPPVYKPPVYKPPVYKPPVYKPPVYKPPPQQQRRPRHPPGPGPGLPGLNFGPGLLDRGPKRLRHPLPLHQPPLLRATRRNRNAAGEG

SEQ ID NO: 165116 - protein, 92 aa, Glycine max
  Clone ID: PAT_MRT3847_120115C.1.pep
MLMVRYCSSGLNAVSGFHSLICLRSAFSYAMFKAFPGSISRGVSSHPHVLIGVEPLTAILSLSLSNMQCLSYPLYLPIAFCVLPPPPPPLPS

SEQ ID NO: 165117 - protein, 106 aa, Glycine max
  unsure (1)..(106): unsure at all Xaa locations
  Clone ID: PAT_MRT3847_120116C.1.pep
RVRPPIYNEPPETLNKKLEWGNGGLFTGGRAVCGTHLYTIGNIVKKAGEKKDAXDHLREIAFNXGGHLMIRTECEQTDILEPSTELSMPRAHGLRKEAQAKGSLSQ

SEQ ID NO: 165118 - protein, 60 aa, Glycine max
  Clone ID: PAT_MRT3847_120117C.1.pep
TLEKKNVETCKHWLTMFYLWHKRLLISWFLSNYQHRLVTIEYTRTDVNAAGLNCLTEIKN

SEQ ID NO: 165119 - protein, 77 aa, Glycine max
  Clone ID: PAT_MRT3847_120118C.1.pep
TYQFESLFANATSSVAHAVGFWEYSTFSTAAALYQSLGLGTTGGWTRGQKELSPCRSHRSSRSSRCYGVPTGCHKSS

SEQ ID NO: 165120 - protein, 175 aa, Glycine max
  Clone ID: PAT_MRT3847_120119C.1.pep
GSRELLRTVISEHRTRKRLQELKEARAAGCRNSAEADRYLAQKRRREAEESGCRTKESAQGGPSNQGVPNALMSPDSAGKDLSGRPAGPATSSSVNEMDVTGYYGADLLSEPEKRLCCELRLPPAMYLKMQEQLSLQILAGTVTAKSDAHQLFKMDAMKIDRVYDMLIKKGIGSP

SEQ ID NO: 165121 - protein, 51 aa, Glycine max
  Clone ID: PAT_MRT3847_12011C.1.pep
LEQFESFDFLMERSHMIRLPDEDLKSNEQCSDQGLEAYAEDQFKNSSCIDT

SEQ ID NO: 165122 - protein, 84 aa, Glycine max
  unsure (1)..(84): unsure at all Xaa locations
  Clone ID: PAT_MRT3847_120120C.1.pep
XXXYXXLXXXLXXXXXXIXHLSFXLXFIIXXXIXCXXXXXQXXEXXXXXXSIYXXXXXVIXXTXXSXXXSXXHIXXSYXXXXXT

SEQ ID NO: 165123 - protein, 55 aa, Glycine max
  Clone ID: PAT_MRT3847_120121C.1.pep
KIKQSSLHWQERSDVQGFQNHTSPHRIVCYYVLWCLICFRGRETTFMGYQKSFSE

SEQ ID NO: 165124 - protein, 50 aa, Glycine max
  Clone ID: PAT_MRT3847_120122C.1.pep
KNPNVTGYLRASTFYSGLCLPRNRNSIMDQPTLFNLESKTLKTCPSAHAC

SEQ ID NO: 165125 - protein, 74 aa, Glycine max
  unsure (1)..(74): unsure at all Xaa locations
  Clone ID: PAT_MRT3847_120123C.1.pep
DWTHLSSKEVDPSTGELQSLQMPESEGPSSLDPSQEGPTGLKEAALYPHLPQXADPRLIESLSQMLSMGFSDEG

SEQ ID NO: 165126 - protein, 82 aa, Glycine max
  Clone ID: PAT_MRT3847_120124C.1.pep
FRLGVCHHHSALSLSHLPSDGDRALDARMTSKDTCGPIDTRWVTEKSIDITYLSRRVGFTVALDLTSWFPQSCMYSEDAFSH

SEQ ID NO: 165127 - protein, 61 aa, Glycine max
  unsure (1)..(61): unsure at all Xaa locations
  Clone ID: PAT_MRT3847_120125C.1.pep
VLSTLNASPFLGHSXGANAIALKDVVSIKTGIYTMSSDLSYAPYTMWYLGHFSAHNPSYLK

SEQ ID NO: 165128 - protein, 201 aa, Glycine max
  Clone ID: PAT_MRT3847_120126C.1.pep
MEDGSVNLPPGFFFSPTDEELVLHFLYCKASLIPCHPNIIPDLHPSQLAPWELNGKALLSGNQYYFFTKVNENRARENGYWKDTGVTEPILSTFDKKVGMKKYLVFHIGEAPQGTETSWVMQEYYICSSGFDTASYRSARRRRKHDQSWSKWVLCKVYEKIRSQQGVNCYSDDDDSGSELSWLDEVYLSLDDDLEEIGMPI

SEQ ID NO: 165129 - protein, 44 aa, Glycine max
  Clone ID: PAT_MRT3847_120127C.1.pep
LGPASSSTSWTSHLHLMRHGLTSFPYFFLFILHEWSYLCDRHAC

SEQ ID NO: 165130 - protein, 58 aa, Glycine max
  Clone ID: PAT_MRT3847_120128C.1.pep
GLMFPILKGEGVFANFNINAIKGHFLQKNPNEFQFNPFTKNLFNRKGFIGCYFPALNF

SEQ ID NO: 165131 - protein, 118 aa, Glycine max
  unsure (1)..(118): unsure at all Xaa locations
  Clone ID: PAT_MRT3847_120129C.1.pep
MLQLLLFEQQAFFPDNFTVLGRAMIEPNLLSASKLYTNISFYELGPLLGIPPPKAEKIASRIIFXDRMRGFIDQVEAVIHFSDAPEKLHRWGPQIVGLCQALHHVLDSMAKKGFPVPV

SEQ ID NO: 165132 - protein, 42 aa, Glycine max
  Clone ID: PAT_MRT3847_12012C.1.pep
CLPDFSKVQTCLSLREPINGENESGTNYSISLKIGAAVGKQA

SEQ ID NO: 165133 - protein, 108 aa, Glycine max
  Clone ID: PAT_MRT3847_120130C.1.pep
REKKLQKTWGGLSLGNIHLETNEAGLDQVLVKHKSRLEQEKMVVAQQPNNSVSFSMTPREAREKKLQEAWGGQGLGNSIKPCLFKLEREKAAWIKAEEEERKQAKKAI

SEQ ID NO: 165134 - protein, 100 aa, Glycine max
  unsure (1)..(100): unsure at all Xaa locations
  Clone ID: PAT_MRT3847_120131C.1.pep
MVTDGVLALGGFLNEHGAVLIKLRVQRVEIRKPEKFNTRSSVIITVGESPTLAKRKTNHNXLPALLYFVPKGKPLWTTSTGLIYLANKSMGQKNGGQYLA

SEQ ID NO: 165135 - protein, 252 aa, Glycine max
  Clone ID: PAT_MRT3847_120132C.1.pep
MMSRFMHAPSPVLSSSHPHLGVGHKREREDDTGAGASGGVAIAAASSQTQTQEIESAGGDRRRRYRGVRQRPWGKWAAEIRDPHKAARVWLGTFDTAEAAARAYDEAALRFRGNRAKLNFPENVVPVPPPPPVPDLPASAVAGSDSISDYWGYSQLLRSTGDFHGLDQWFFDSQMAAFQSSSSSLLPSPPPPSFSPSSASYPLFSSSQQMGIFRPPGEQGHGGEDGGSGSEFSELPPSTWSDTSGYPPPPPG

SEQ ID NO: 165136 - protein, 252 aa, Glycine max
  Clone ID: PAT_MRT3847_120133C.1.pep
MMSRFMYAPSPVLSSSHPHLGVGHKREREDDTGAGASGGVAIAAASSQTQTQEIESAGGDRRRRYRGVRQRPWGKWAAEIRDPHKAARVWLGTFDTAEAAARAYDEAALRFRGNRAKLNFPENVVPVPPPPPVPDLPASAVAGSDSISDYWGYSQLLRSTGDFHGLDQWFFDSQMAAFQSSSSSLLPSPPPPSFSPSSASYPLFSSSQQMGIFRPPGEQGHGGEDGGSGSEFSELPPSTWSDTSGYPPPPPG

SEQ ID NO: 165137 - protein, 36 aa, Glycine max
  Clone ID: PAT_MRT3847_120134C.1.pep
LEVCKCCTTPLVDALFLYKEIGAPCYVDLELASAST

SEQ ID NO: 165138 - protein, 62 aa, Glycine max
  Clone ID: PAT_MRT3847_120135C.1.pep
NRFDDDPPAAVPHDATTPDDHPQRTRRCRRHSTYEDISAKLVMHISPPTLLHGMCLHFMDVS

SEQ ID NO: 165139 - protein, 226 aa, Glycine max
  Clone ID: PAT_MRT3847_120136C.1.pep
MEQGQCWTKRKKYSLSSSTGSPTNPSYGDSWEEQAFAEDAANSLGGCIWPPRSYSCSFCRREFRSAQALGGHMNVHRRDRARLKQQPTSPHNEILCHDLETQRHKPVQSPFASLGGYLYPSPLCGLACKKTNPNCDPDFVASPSSSPSPSKALLAPSANIGTFREETMIPLYDSSILHKISPASNSSESWPNSAEDHRLYSCKFHPQADTTKPSKGIMDFRCRGNK

SEQ ID NO: 165140 - protein, 115 aa, Glycine max
  Clone ID: PAT_MRT3847_120137C.1.pep
PPAFQIWITEPQKFPPVPFKWGYKTKRNCSPLRESFKRDLTPVKNAGQILICMGLLLFAPPLMLPALFFALWKREGPFQKGGIFGVPKRQKPPGKKVGPFAAPNFINFQNFPFVS

SEQ ID NO: 165141 - protein, 102 aa, Glycine max
  unsure (1)..(102): unsure at all Xaa locations
  Clone ID: PAT_MRT3847_120138C.1.pep
MAVPDSPYSRISLILFFIYFTISITLPELHTLNFISDIATYHPPDNLHAPSHVLMISLSQLVTHHXMYSCAYYYCXTDQGILNCGLTHMVGTPTDLGHCDIH

SEQ ID NO: 165142 - protein, 176 aa, Glycine max
  unsure (1)..(176): unsure at all Xaa locations
  Clone ID: PAT_MRT3847_120139C.1.pep
GSSGPPKSSHRSGLTSTNTSNKGRHSSPLPSPPDHFAASSSPMGAVNMSKSFEDAVPAQMTGKQDTNAVSEKEIPTRTNNAMRNTPGGKGKNGSKPVDLQGMLISLLKDKPNGMTLKALEKAAGDPLPNSMKKIEPIIKKIAXYQAPGWYILKPGWDLESXNKPQTESGSSPDDYH

SEQ ID NO: 165143 - protein, 86 aa, Glycine max
  Clone ID: PAT_MRT3847_12013C.1.pep
NNYASCVKFQLASPKSMFNAFLSLISPIWCSPKKSSGYFQQKVSLFLAFHKILGPHLIDPSRIYLNAINLKEKKVFILIIGDPMLA

SEQ ID NO: 165144 - protein, 184 aa, Glycine max
  unsure (1)..(184): unsure at all Xaa locations
  Clone ID: PAT_MRT3847_120140C.1.pep
KPLYPSYLSEISSNKGKEAARFAQLWNQIITSFRDEDLINDREMNLLLVPYWADTQLDLIQWPPFLLASKIPIALDMAKDSNGKDRELKKRIAADNYMSCAVRECYASFKSIIKHLVQGEREIPVIEYMFDEVDKNIETDKLISEFRMSALXSLYAQFVELTXYLXDYDPKDRDNVVILFQDML

SEQ ID NO: 165145 - protein, 624 aa, Glycine max
  Clone ID: PAT_MRT3847_120141C.1.pep
MSGPLDRFARPCFEGFSGSDEKKERRSDFENSEDERRTRIGSLKKKALNASSKFKHTLRKKSSRRKSDGRVSSVSIEDVRDFEELQAVDAFRQSLIMDELLPEAFDDYHMMLRFLKARKFDIEKAKHMWTDMLQWRKEFGADTIVQDFEFKELDEVVKYYPHGHHGVDKEGRPVYIERLGKVDPNKLMQVTTLDRYVKYHVQEFEKAFAIKFPACSIAAKRHIDSSTTILDVHGVGLKNFTKSARELITRLQKIDGDNYPETLCQMFIINAGPGFRLLWNTVKSFLDPKTTSKIHVLGNKYQSKLLEVIDASELPEFLGGTCTCEDQGGCLRSDKGPWKNPDIFKMVLNGGAWRSKQVVKVLNNERKVIVYAKPGYPMVKGSETSTAESRSEAEDISSPKAMKSYSHLTLTPVHEEAKIVGKTSYASNLSGYDEYVPMVDIPVDAGWKKQASLQRSYTSKGAPPPDTQKTPEGIQARMWVALSIFFLTVLTLLRQVAYPVTKKFPALSSNDDKSTSKPPPDTTNMEVLPPSSTPSCTEENLLPSMLKRLGELEEKVDTLQSKPSEMPYEKEELLNAAVCRVDALEAELIATKKALYDALMRQEELLAYIDRQEEAKLRKKKFCW

SEQ ID NO: 165146 - protein, 91 aa, Glycine max
  unsure (1)..(91): unsure at all Xaa locations
  Clone ID: PAT_MRT3847_120142C.1.pep
MAATSFSGMQFAMSRSCIPASQKIADAGAVVLGGKSKIGSWNKLASACHIASVQPFRRGFTSSSIKSVKSDTXALFEFSAXSADSXLSIDL

SEQ ID NO: 165147 - protein, 392 aa, Glycine max
  unsure (1)..(392): unsure at all Xaa locations
  Clone ID: PAT_MRT3847_120143C.1.pep
MTTTSFSGLQFAMSRSCIPSSQKIADAGAVVLGGKSKIGSWNKLASACHIASVQPFXRGFTSSSIKSVKSVTKALTESSAQSAVSGLSIDLKGKRAFIAGVADDNGYGWAIAKSLAAAGAEILVGTWVPALNIFESSLRRGKFDISRVLPDGSLMEITKVYPLDAVFDNLDDVPEDIKANKRYAGSSKWTVQEVAESVKEDFGSIDILVHSLANGPEVTKPLLETSRKGYLAAISASSYSYVSLLKHFLPILNPGGSSISLTYIASERIIPGYGGGMSSAKAALESDTRVLAFEAGRKKRIRVNTISAGPLGSRAAKAIGFIDMMIDYSFTNAPLQKELHAEEVGNTAAFLSSPLASAITGAVIYVDNGLNAMGVGVDSPIFKELDIPKEHH

SEQ ID NO: 165148 - protein, 307 aa, Glycine max
  Clone ID: PAT_MRT3847_120144C.1.pep
MDLIKAWRLSPSVSAIPSPFCAAPICVRTFSFQFSTSPYTRPKPLVPIPRGKSRDSDSEPLLESSIVQEVSFDDDDEEEFLDEFEYDEAADGDEYYEEEEEYEEEAGVPYAGDGGAGGGISLAGTWWDKKALAIAKEVTLSFDGELQIYAFRTLVNCTIQVHIENLSKKSGSPSMEDIEAFSTTYRAKLDEAEIAKVVPDNICLEVSSPGVERIVRIPDDLDRFKDRPMYVKYAINDDLNNPAAEGDGVFRLESFDMETKCCTWGLADVKVNRQKAGKGRPLNKKQREWRLSTPFDSLRFVRLHSDI

SEQ ID NO: 165149 - protein, 58 aa, Glycine max
  Clone ID: PAT_MRT3847_120145C.1.pep
QHHYDHNYILLYNIKDKIHYDIHDKCYKNNNKDKNNMDHLHHHHRHSIIIDIDYILYV

SEQ ID NO: 165150 - protein, 57 aa, Glycine max
  Clone ID: PAT_MRT3847_120146C.1.pep
KRQLYISNWIVFCGDFNSGRNKIHYNDFFFHIWGLVFCCLGSLLVSMFCLSSWDLFI

SEQ ID NO: 165151 - protein, 51 aa, Glycine max
  Clone ID: PAT_MRT3847_120147C.1.pep
PRMRNFLVAKFLTNLKTRMFTFLPMEFNSLWTRQKASSILVWVIIEEKGHA

SEQ ID NO: 165152 - protein, 80 aa, Glycine max
  Clone ID: PAT_MRT3847_120148C.1.pep
ATSTGLLHSCGMFAVGIAYVTCQLCSLGYCQGRDVVAHPRRNGLLVTYAAEVRVTTAIFNTADSRLALTRILASASHASY

SEQ ID NO: 165153 - protein, 60 aa, Glycine max
  Clone ID: PAT_MRT3847_120149C.1.pep
PMGCFEEHYHSNIGVVYNSYFTFFILASHIKKNGFIFASLKPPNSKYTMWALGVSPLYTW

SEQ ID NO: 165154 - protein, 162 aa, Glycine max
  unsure (1)..(162): unsure at all Xaa locations
  Clone ID: PAT_MRT3847_12014C.1.pep
GRYIYRRGHFISNIFHSLCVFPYLSLEEHIFVKTLSGKTITLREETSDTVTLRTRPIIHDKVIELPVDHXRIIHTGKKIEDGRTLAGYNIDXESTLHLVLRLPGGMQISAKTLTGXTIALHVESSNSIYNLKAEIQDKEGMPPDQPRIIFTGKQLEDGRTLP

SEQ ID NO: 165155 - protein, 85 aa, Glycine max
  Clone ID: PAT_MRT3847_120150C.1.pep
VNVFKCSHNLNFPVAQLFTILFRHLASKICTFFVKHQCISFSVGSGLNLYSSCNLFIMNMMIMKLCPFTNSGNWVTFIFWMIMKL

SEQ ID NO: 165156 - protein, 137 aa, Glycine max
  unsure (1)..(137): unsure at all Xaa locations
  Clone ID: PAT_MRT3847_120151C.1.pep
HFSPPPALSFKAGNGGSSTXGPGPVKFIRGPQWGKSGPRDKPLPGFLVRHLFEPAPVINVQEACVHDQYPLPPLFVRIQACVSCAIPPLVVRVRSPPARGKREPPQKFIRRRDNAPRPGQPGGQGPCPVGPAAPVRT

SEQ ID NO: 165157 - protein, 69 aa, Glycine max
  Clone ID: PAT_MRT3847_120152C.1.pep
VSSSPRSAFLNYRDLDIGTNSFGKNSYAEGAVYGVKYFNDNFERLVKIKTEVDPENFFRNEQSIPVHPS

SEQ ID NO: 165158 - protein, 58 aa, Glycine max
  Clone ID: PAT_MRT3847_120153C.1.pep
PRPQNALASKPEPSGCHTSSHYAPPLLLAQEFCYIVLTPSVCSCRHALTPTRTSMLSA

SEQ ID NO: 165159 - protein, 60 aa, Glycine max
  Clone ID: PAT_MRT3847_120154C.1.pep
RPPKRSAELQVKVLTTGLLATLLIYGFCGHALVTRKGPLDNHDDHLADPMNNNAWAYTTN

SEQ ID NO: 165160 - protein, 66 aa, Glycine max
  unsure (1)..(66): unsure at all Xaa locations
  Clone ID: PAT_MRT3847_120155C.1.pep
TISNHVXXTFYKIILNIWQKLRKGLNIVEQCFQINKSSCYYLLQEPEXXXLQSSSISRXSRCPLIT

SEQ ID NO: 165161 - protein, 91 aa, Glycine max
  unsure (1)..(91): unsure at all Xaa locations
  Clone ID: PAT_MRT3847_120156C.1.pep
APLAVQGQITPIYTGTDGVPDSLEIAQVRXFHVQVRASLITNPPQGKEIISFRKTFTGEAEVLFKVATQEEMGPLLLQGSGKQRGLNHLIT

SEQ ID NO: 165162 - protein, 197 aa, Glycine max
  unsure (1)..(197): unsure at all Xaa locations
  Clone ID: PAT_MRT3847_120157C.1.pep
FWGLTLYDLYVPKNRYESEIAKLHANLKSLEELSDNSSSAIAKRKKEKERIQESLDXLIGARHKHEENVASVRRRLSHEKDKWLSSCPDTLKINMEFLQRCIFPRCTFSMPDAVYCAMFVHTLHSLGTPFFNTVNHIDVLICKTLQPIICCCTEYEAGRLGRFLYETLKIAYYWKSDESIYERECGNMPXFAGYYRY

SEQ ID NO: 165163 - protein, 72 aa, Glycine max
  Clone ID: PAT_MRT3847_120158C.1.pep
CFHELPVPNTNTIPFRNLAFYPFLLNLGVLHSIESWRSCLSILHGHPLQHTKNPLAAFSPLRHKAVRLFLPY

SEQ ID NO: 165164 - protein, 136 aa, Glycine max
  unsure (1)..(136): unsure at all Xaa locations
  Clone ID: PAT_MRT3847_120159C.1.pep
THRHNRPSCTPAHIGAQWTLCPLNRSKECQGTAKKHPVYHGVRKKNWGQGXSEIREPXKKARIWLGTLSTPKMAVRAHDEAALTIKGQTTILNFPKTAHQIPRPVTCSPRDIQTAHTAVASMVKIDTVTQYSDSET

SEQ ID NO: 165165 - protein, 93 aa, Glycine max
  Clone ID: PAT_MRT3847_12015C.1.pep
PRLVVGLFALFFCWLFVLGRRFPRCSPGGGVSGGSVLSFLLLGFCLWAAPFAFACSGVVLVLPSSLCRRSVPCCQSCEAFAVGRPGSSGRCLL

SEQ ID NO: 165166 - protein, 42 aa, Glycine max
  unsure (1)..(42): unsure at all Xaa locations
  Clone ID: PAT_MRT3847_120160C.1.pep
PQLVYFRLATFCIMAVNFXKRNVVETKGKSLQEIEIALLPQD

SEQ ID NO: 165167 - protein, 70 aa, Glycine max
  Clone ID: PAT_MRT3847_120161C.1.pep
GNDIGGYTLAYNLETAISGCTEGISFYVASVSLRLNADIIDSRIASTTTKSYSLSIDIVKLFKIQFFLQN

SEQ ID NO: 165168 - protein, 67 aa, Glycine max
  Clone ID: PAT_MRT3847_120162C.1.pep
VVVSHSSVIRFRRFNEDIRLQSDICHISQRHCSTPHSEHRVEPLYVPPRHSKHHKYALALSDNITAD

SEQ ID NO: 165169 - protein, 541 aa, Glycine max
  unsure (1)..(541): unsure at all Xaa locations
  Clone ID: PAT_MRT3847_120163C.1.pep
MKRKRGHKKGKAKGSTNHGSSGADANKEETSGLEVDTPSSTGTGMDQQQHYNLANINPDGSVDKAIGRVKVKLKTPKILDSQPTSFDAPSPTQSDTERMEDSANSLPDMKLSTLFKRAASIKIKSSSNHTLSASTEITLPKERKNKQELDASLVVLRKVMKMDAAEPFNVPVNPEALGIPDYFDIINTPMDFGTICNNLEKNEKYMNSEDVFKDVQYVWDNCYKYNNKGDYILDLMRRVKKNFMKYWTAAGLYSEQSKGTKERTSAEDIALSGDGKAGKGGQLKQKTKKRHGRHHKHDCLCAICVLKRRRKEREENARIARSNFGSGGDKHANEFKHEESIQVESPGGEDSSSNIDESMGTDGDVDEDKGEVAKMEIAEKEXSPSERKHVSIDVDNDDDNDDHGLEEGEEEENGEEEDEEEIEMNSQKGEMNETLKHGGTLEEKSNVGDATALHDEYRTKQQEGQSAAVQQQKKHKGSQDKQQKAKLLESLYSENHKLSSLCGILFPQNSQSVWSGPHSLIQKRNSARTSSIHAAIRTFMG

SEQ ID NO: 165170 - protein, 38 aa, Glycine max
  Clone ID: PAT_MRT3847_120164C.1.pep
PSPECTDQLVPYGGDALLSLTDQLTPAQLMLSKQPKRV

SEQ ID NO: 165171 - protein, 440 aa, Glycine max
  unsure (1)..(440): unsure at all Xaa locations
  Clone ID: PAT_MRT3847_120165C.1.pep
MAWRELGKKRIYMNFTRALTTTPFRYAAGSNFASIFTVQSVCASARCVPDFTNQSSQGVAGCGRETKECEIRCFHASSQVWARSDGPLGLQTPKRVYVKRGGRNQLPVGAPYACRNVPATKSNPDKTIEIFEGMTLVELAKRTGRSASSLQDILTNVGEKVQSEFELLSMDIAELVTMEAGINVKRLHSAEGAEILPRPAVVTVMGHVDHGKTSLLDALRQTSVAAKEAGGITQHIGAFVVVMPSGASITFLDTPGHAAFSAMRARGAAVTDIVVLVVAADDGVMPQTLEAMSHAKAANVPIVVAINKCDKPGANSEKVKMQLASEGLLLEEMGGDVQVVEVSATEKIGLDNLEEALLLQADMMDLKARIDGPAQAYVVEARLDKGPGPLVTTIVKAGTLLRRHHVVVGSQWRRIRAIKHIXGKLTRRATPAMPVEIEGL

SEQ ID NO: 165172 - protein, 487 aa, Glycine max
  Clone ID: PAT_MRT3847_120166C.1.pep
IRLEAGSSITVVGTPHYAHKEYAPMLARSRKGDGLALVSVSQFVVELQGLKSVEGEDPPKILHLNPRLRGDWSKRPVIEHNTCYRMHWGTAQRCDGLPSEIRLRKDDRRDRRCEKWMRNDIVDSKESKTTSWFKRFIGRKQKPEVTWPFPFAEGRMFVLTLRTGVDGYHINVGGRHMTSFPYRTGFTLEDATGLVVKGDLDVHSVFATSLPTSHPSFSPQRVLEMSETWKASALPKHAVKLFIGVLSASNHFAERMAVRKTWMQAAAVKSSDVVVRFFVALNPRKEVNVVLRKEAAYFGDIVILPFMHRYELVVLKTMAICPTRPPTRPAAYVLKCDDDTFIRVDTVLKEIEAVPEQKPLYMGNLNLLHRPLRNGKWAVTFEEWPESVYPPYANGPAYIISRDIVTFIISQHKERRLRLFKMEDVSMGMWVERFNNTVAAVQYSHNWKFCQYGCMEGYFTAHYQSPRQMVCLWDKLTRGRARCCNFR

SEQ ID NO: 165173 - protein, 45 aa, Glycine max
  Clone ID: PAT_MRT3847_120167C.1.pep
IIFFFFEARCLFHSQNKQLQENLNKDQGKGRHPLRIIIMILLIIT

SEQ ID NO: 165174 - protein, 131 aa, Glycine max
  Clone ID: PAT_MRT3847_120168C.1.pep
SIPDGVSLPRVGHTATLVLGGRLLIYGGENSYRHRKDDFWVLDISAIPYPPCSITQQITVSSKKVLTRMWKRWKSSGHAANSRSFHRACADRSGCYLYVFGGMVDGFLQPAEPSGLRFDGELFLVELVLQL

SEQ ID NO: 165175 - protein, 152 aa, Glycine max
  unsure (1)..(152): unsure at all Xaa locations
  Clone ID: PAT_MRT3847_120169C.1.pep
ETLVRCQKCRYGAVGHSMPGXSLISRCREFLKLXGXFVSFGRTPRNLLVEHLRPLNTKDFQQLXRPPGPSLAPAEVTTTELLLDHIADLHTMEHMLGDSDXVLTMKLQESTCRSHFRHTWEAGDQSMLFGTQNAHCERFFQTLECASHCRGS

SEQ ID NO: 165176 - protein, 69 aa, Glycine max
  Clone ID: PAT_MRT3847_12016C.1.pep
ESVFVSPCPPRTRLVLTKHNIVVRQLMTGGLDPGPDPPIGAVLKLHLVNIRFNPSRFWDPLGTIWVLKT

SEQ ID NO: 165177 - protein, 189 aa, Glycine max
  unsure (1)..(189): unsure at all Xaa locations
  Clone ID: PAT_MRT3847_120170C.1.pep
PGKEKRXKRISKRKDGFXKGXIDXXXNGKXXXNNMIDXXXGXXXXXXEYXXDXXXKGIXXVMVXGGIFLXXVXLEWXMXNLLXXXEILKKGKNELEXXIGXDXXVDEXXIXKXXXXXXIVYEKXXLDXGGXMLVXXLXLEDWXIGEYNXXKKXILLVNVWXIXRDXKLWSXXXXFKXERVENESEEKKV

SEQ ID NO: 165178 - protein, 80 aa, Glycine max
  unsure (1)..(80): unsure at all Xaa locations
  Clone ID: PAT_MRT3847_120171C.1.pep
VLYHCMDFDFFSSSNKMEEFREGDILRAIVSSGLQYNHQCIVFSLGQESIAXHGTKFCRLLPKRVPRDVVGATPGNFRPP

SEQ ID NO: 165179 - protein, 87 aa, Glycine max
  Clone ID: PAT_MRT3847_120172C.1.pep
KRQTTVCSQQHNTQHPHLHISINNMVSRAVSMGLRAWQLICAILVTAFMGNNIARAYSGVHSIDNYSLYVGDWWMFTLLYFLPTYGI

SEQ ID NO: 165180 - protein, 212 aa, Glycine max
  Clone ID: PAT_MRT3847_120173C.1.pep
MGSVKWETLIQQAYAQPVNLSASSFYVPGNNSIRYINYGAAVSEVEIDLLTGETRCLQTDIIYDCGQSLNPAVDLGQIEGSFIQGLGFFMLEEYETNLDGLILVDGTWNYKIPTLDTIPQKFNVQILNSEHHQQRVLSSKASGEPPLLLAASVHCATRAAAKEAKKQLLSWSNLDGPDSTFQLKVPATMPVVKELCGLDIVQTYLKWKMGNR

SEQ ID NO: 165181 - protein, 162 aa, Glycine max
  unsure (1)..(162): unsure at all Xaa locations
  Clone ID: PAT_MRT3847_120174C.1.pep
GESPGEKVAIIHHHLGRREMTDVIIEXMKSNPGELKTTVEERKSSKASPTAQRSKDHSKECINAAPDSPSKQLPDQISFFSGNPSVEIVHGIMHLYKTNKMTSLKEDVRRSAMLCILTVPAAMTSHDLMKFVAPFNEVIEQMKNIRDSTPNQYMVLIKFVHT

SEQ ID NO: 165182 - protein, 113 aa, Glycine max
  unsure (1)..(113): unsure at all Xaa locations
  Clone ID: PAT_MRT3847_120175C.1.pep
LFPPNDFKPPRGDLSEKRLHYLPKLVEESQXTLDQLLDKLREKQNQDEDMLQELEGLQRSLRAAKQSLAQATNDRDKLRPLCDEKDKALHAVILEKRNMEAKMAELSILATEN

SEQ ID NO: 165183 - protein, 85 aa, Glycine max
  Clone ID: PAT_MRT3847_120176C.1.pep
FFFFFFFFFFFFFFFFWGWAYWLIFQKTLEQGTTTGCHRFLKHPGNYPEILKKNKKIFFLRYGLLNRGWQKPGELNLNHDQQGPE

SEQ ID NO: 165184 - protein, 54 aa, Glycine max
  Clone ID: PAT_MRT3847_120177C.1.pep
SFLGDLVTCSLPLPNDIFCRNRTQVFLDKLSVCYQLNYTHWIIEQTIVVVSTNP

SEQ ID NO: 165185 - protein, 384 aa, Glycine max
  Clone ID: PAT_MRT3847_120178C.1.pep
MVPWNRILTITKWKDKTQHLATNNERHKIMIKSPKEADFPLKQEGHSQSITDPEKAKASASSVAQWPRLKDPRIVRVSRAFGGKDRHSKVFTIRGLRDRRVRLSVPTAIQLYDLQDRLGLSQPSKVVDWLLDAAKHEIDELPPLPVVPSVNNFTLGHPSAVTSNEATTSNSQPNEQLLNINRSIQWEGSNQNSTWKLKPKEVSREMISTDKPNWISRSEEDKQGSNNEGPSTRVIPNINLLPRANLNHPSFLGLLNTMPHGYQWEPSAGDVSHQLGNNGFANQTDMHSINVVPFPTSTLSLSTGNSQILLCPPGTAQPYFPSHVTMDMDPRQINHYQMLSSGSQNPLANYLNHSFSLAMMTHKPLHSPNSSKSPSHKDQDFPSN

SEQ ID NO: 165186 - protein, 297 aa, Glycine max
  unsure (1)..(297): unsure at all Xaa locations
  Clone ID: PAT_MRT3847_120179C.1.pep
MHQKKSEVQIGKESVGVSSDFNPQFQKHPYHRHQQFYPQIEIDISPQSPPQPTTPPPPPPPPSLSKQKHIFKPQNAAFFSVSVAAKSAAFRALRRVRRQRALLLLAVPFLYLYFLISRSFLLDLLSAIAFSAALVFSLNLAFPLPLRSVRLKAAKNSASRPAPALPVFWTIGSRPKTEKRAAASGCWVQVFGNGDVYEGEFHRGKCSGSGVYYYSRSGRYEXGDWVDGKYDGYGVETWARGSRYRGCYWQGLRHGFGVYRFYTRDVYAGEWSNGQSHGSGVHTCQDGSRYGWGSLVG

SEQ ID NO: 165187 - protein, 120 aa, Glycine max
  Clone ID: PAT_MRT3847_12017C.1.pep
MHMMKRRWQTYNLTWIIWIIQENLVVNNFYLNKMAKEAYRSYILAYNSHSMKDIFNIHHLDLQAVASSFCFSNPPNVSLNINSSKQRNKMRKVDGSRHGFSGDNPYGKRNADDKRQFVRY

SEQ ID NO: 165188 - protein, 44 aa, Glycine max
  unsure (1)..(44): unsure at all Xaa locations
  Clone ID: PAT_MRT3847_120180C.1.pep
LVVWGRXXPPPLCSCXXMXCXELHPIFSAPPQLKLPQKMRVKNS

SEQ ID NO: 165189 - protein, 648 aa, Glycine max
  Clone ID: PAT_MRT3847_120181C.1.pep
MAQVQVPPQNAIPGPNGGGAAGNQFVTTSLYVGDLDPNVTDAQLYDLFNQLGQVVSVRVCRDLTSRRSLGYGYVNFSNPQDAARALDVLNFTPLNNRPIRIMYSHRDPSIRKSGQGNIFIKNLDRAIDHKALHDTFSTFGNILSCKVATDSSGQSKGYGFVQFDNEESAQKAIEKLNGMLLNDKQVYVGPFLRKQERESTADKAKFNNVFVKNLSESTTDDELKNVFGEFGTITSAVVMRDGDGKSKCFGFVNFENADDAARAVEALNGKKFDDKEWYVGKAQKKSERENELKQRFEQSMKEAADKYQGANLYVKNLDDSLGDDKLKELFSPFGTITSCKVMRDPNGISRGSGFVAFSTPDEASRALLEMNGKMVVSKPLYVTLAQRKEDRRARLQAQFAQMRPVGMPPSVGPRVPMYPPGGPGIGQQIFYAQGPPAIIPSQPGFGYQQQLVPGMRPGAAPVPNFFVPMVQQGQQGQRPGGRRTGAVQQSQQPVPMMPQQMLPRGRVYRYPPGRGMPDVSMPGVAGGMFSVPYDVGGMPLRDASISQQIPVGALATALANASPEQQRTMLGENLYPLVEQLEPDNAAKVTGMLLEMDQTEVLHLLESPEALKAKVAEAMDVLRNVAQQQAGGTADQLASLSLNDNLVS

SEQ ID NO: 165190 - protein, 71 aa, Glycine max
  Clone ID: PAT_MRT3847_120182C.1.pep
KLCNNIRVSLKSCSRVWNYVMEEIRGIFHVWSSLLKVSVSFFKKLFSPIFFLNLILIKCVTFDLKILSNSV

SEQ ID NO: 165191 - protein, 651 aa, Glycine max
  unsure (1)..(651): unsure at all Xaa locations
  Clone ID: PAT_MRT3847_120183C.1.pep
MAQVQVPPQNAMPGPNGGGGAGGAGNQFVTTSLYVGDLDPNVTDAQLYDLFNQLGQVVSVRVCRDLTSRRSLGYGYVNFSNPQDAARALDVLNFTPLNNRPIRIMYSHRDPSIRKSGQGNIFIKNLDRAIDHKALHDTFSTFGNILSCKVATDSSGQSKGYGFVQFDNEESAQKAIEKLNGMLLNDKQVYVGPFLRKQERESAADKAKFNNVFVKNLSESTTDDELKNTFGEFGTITSAVVMRDGDGKSKCFGFVNFENADDAARAVEALNGKNFDDKEWYVGKAQKKSERENELKQRFEQSMKEAADKYQGANLYVKNLDDSIGDEKLKELFSPFGTITSCKVMRDPNGLSRGSGFVAFSTPEEASRALLEMNGKMVVSKPLYVTLAQRKEDRRARLQAQFAQMRPVGMPPSVGPRVPMYPPGGPGIGQQLFYSQGPPAIIPSQPGFGYQQQLMPGMRPGAAPVPNFFVPMVQQGQQGQRPGGRRPGAVQQSQQPVPMMPQQMLPRGRVYRYPPGRGIPDVPIPGVAGGMFSVPYDVGGMPLRDAXSPSKYPVGALATALANASPEQQRTMLGENLYPLVEQLEPDNAAKVTGMLLEMDQTEVLHLLESPEALKAKVAEAMDVLRNVAQQQAGGTADQLASLSLNDNLVS

SEQ ID NO: 165192 - protein, 135 aa, Glycine max
  unsure (1)..(135): unsure at all Xaa locations
  Clone ID: PAT_MRT3847_120184C.1.pep
PPLTDAGLTPIQADFLFTISLRPVVECMTVNYGRPAINHIINSASXSNYMCSGQISVPIVFSGPTGAAAAVDAYPSQCXASRYGSCPELTDLXPYSSEDARGXLKADITDPEPVDYLENESIYGETFPVYAKVLI

SEQ ID NO: 165193 - protein, 53 aa, Glycine max
  Clone ID: PAT_MRT3847_120185C.1.pep
CERAYTFVAEMHNGFLLIVAALGIFFRRCKRNPSPNHGESVGQSIHRIIIGES

SEQ ID NO: 165194 - protein, 51 aa, Glycine max
  Clone ID: PAT_MRT3847_120186C.1.pep
NYHIKTLFSCLASSQITALNCFHARSLKFCTLEDKIDAKSHKKPRAWLRVA

SEQ ID NO: 165195 - protein, 74 aa, Glycine max
  unsure (1)..(74): unsure at all Xaa locations
  Clone ID: PAT_MRT3847_120187C.1.pep
KSLYSLIYLKGLLXCHSKDTGAQFFYNPFSLIQTRPLSSSAPSTRTLFFYATPSLARKLMLHLLDDLQHNKPFV

SEQ ID NO: 165196 - protein, 74 aa, Glycine max
  Clone ID: PAT_MRT3847_120188C.1.pep
STEKPKLVALREAVESLGIKGSNHHWHEIGKNQSWTGGINDNVNTGNYGVSVLHVKIKTLQWTSMSFSIKKPFF

SEQ ID NO: 165197 - protein, 164 aa, Glycine max
  Clone ID: PAT_MRT3847_120189C.1.pep
VILIFRSNKAGKLLAEVLLKGLQGNRPVTLIGYSLGARVIFKCLQYLAKTENGAELVEKVVLLGAPIPIMDENWEATRKMVAGRFVNAYSRTDWMLGVAFRASLLTKGLAGIQPVDIPGIQNVDVTEHIEGHSSYLWATQKILDQLQLDTYYPVYNYISCIQIQ

SEQ ID NO: 165198 - protein, 58 aa, Glycine max
  Clone ID: PAT_MRT3847_12018C.1.pep
KKGLIFLKNGHFKTIKHLDMEGLHKRPLVYMRKMTPQKNIGARWEKRGAPRRRLRKKN

SEQ ID NO: 165199 - protein, 87 aa, Glycine max
  Clone ID: PAT_MRT3847_120190C.1.pep
LAKTENGVELVEKVVLLGAPIPIKDENWEAARKMVAGRFVNAYSRNDWMLGVAFRASLLTKGLAGIQPVDIPGIQNVRCFFILFANV

SEQ ID NO: 165200 - protein, 74 aa, Glycine max
  Clone ID: PAT_MRT3847_120191C.1.pep
CLKLDLICFTFQNPKSWSKCLTRTEYSYNTTLLFILVRASLQLKWFMEETSHPANNKQYHPLGFLHSLLLLLLH

SEQ ID NO: 165201 - protein, 80 aa, Glycine max
  unsure (1)..(80): unsure at all Xaa locations
  Clone ID: PAT_MRT3847_120192C.1.pep
RLDIGLGALYGNAILHEXDRRRMIYRDMKAYLILLDVEYDANHVDXALAADGRSXDHTDVSTRDSXTYRYTAPEHEMNGH

SEQ ID NO: 165202 - protein, 62 aa, Glycine max
  Clone ID: PAT_MRT3847_120193C.1.pep
HLFQTFDRIAKKDIEKLLASFYENYTCYSHNKERVMTSDAAHPPPNQRGEESWRKCKTDSQK

SEQ ID NO: 165203 - protein, 80 aa, Glycine max
  Clone ID: PAT_MRT3847_120194C.1.pep
KIFSFHPRVGKLGIWFGLNPLKPIWFGLNPQIFFPPLFGGGGICLAFFQKQGGPKYEGGAIFPPTPSFLGVPNPIFPPNF

SEQ ID NO: 165204 - protein, 83 aa, Glycine max
  Clone ID: PAT_MRT3847_120195C.1.pep
YSVSLHFDNHRDLLITVAPISAAITVPSLSRATLVQKRVSSPVLGLPSLLNVVIVHCSIEESPYSVNESSSSILSYYASLMVP

SEQ ID NO: 165205 - protein, 41 aa, Glycine max
  Clone ID: PAT_MRT3847_120196C.1.pep
ARTTSTLFIHLTQMTTFHINILFLPPMKKQLLTLLKLYHLW

SEQ ID NO: 165206 - protein, 42 aa, Glycine max
  unsure (1)..(42): unsure at all Xaa locations
  Clone ID: PAT_MRT3847_120197C.1.pep
XSCXCPSLHXSGSXXKTXPSXVHXYPPXTXWXXGENPXXNXA

SEQ ID NO: 165207 - protein, 119 aa, Glycine max
  unsure (1)..(119): unsure at all Xaa locations
  Clone ID: PAT_MRT3847_120198C.1.pep
TRPDLIGPIQCSFVLGRQRRDNIIIIXKKKEKGDKGWMTIKIDLEKAYQRMRREFIKDTSIDVGLPNSFANMVWFCISTLSIKVLWNGEVLDDSFRPTRGICQGWIVREKISDAFPTYE

SEQ ID NO: 165208 - protein, 197 aa, Glycine max
  unsure (1)..(197): unsure at all Xaa locations
  Clone ID: PAT_MRT3847_120199C.1.pep
RQVRIIKQEEMEEEKSFTYAMQLVNSSVLSMAMHSAIELGIFDIIAKAGEGAKLSAKDIAAKLPCKNSEGATMLDRILRLLVCHSIIDCTVVADQQHGPPPHLQRFYAMNPVAKYFASIDGAGSLGPLMVLTQDKALLHSWYQLKDAILEGGIPFNRVHGXHVFEYCDMNXSFNQLVMAAMTNRATLMMKKXVEGMK

SEQ ID NO: 165209 - protein, 53 aa, Glycine max
  Clone ID: PAT_MRT3847_12019C.1.pep
PGTTSFIFWVWEHGMVIACELQVIFYELSLIISFFCEFNFTIWIYGLYYHYKP

SEQ ID NO: 165210 - protein, 150 aa, Glycine max
  unsure (1)..(150): unsure at all Xaa locations
  Clone ID: PAT_MRT3847_1201C.1.pep
VFDFSENFLPDSISWEYSIDDSTISLRLNHRPCFLAFVYIVISSMLKSYPSVGDSALYLGLLGLFAYELXDMQFSFFLFSGYIGVSLLXSPVMHNLWIWRGTGNANFYFATAIAYVCLQIILVVESVSAMLNHDRKLTKLYTAKLQNIKS

SEQ ID NO: 165211 - protein, 82 aa, Glycine max
  Clone ID: PAT_MRT3847_120200C.1.pep
SFSIFSLEPSFPHQSSPPLHTTLNPTQNQKKHTHSETPREGTCFFFFSFLFSVLFCHNLVLHILCFVIFFTCCFCCLSCPLS

SEQ ID NO: 165212 - protein, 130 aa, Glycine max
  Clone ID: PAT_MRT3847_120201C.1.pep
EQDKAHCPFHLKSGACCFGIRCSRVHFYPDKSSTFLIKNMYNGPGLACDRDQDEGLEYKDEEVERCFEEFYEDVHTEFLKFGEVVNFKVCKNGSFHWRGNVYVQYKSLDSGLLAYNSGNGRYFAGKQVSW

SEQ ID NO: 165213 - protein, 48 aa, Glycine max
  Clone ID: PAT_MRT3847_120202C.1.pep
PSKASRNYFHGKGVIIKKNNHKLVLLPSNKLHANALVVIISYNNNTKS

SEQ ID NO: 165214 - protein, 89 aa, Glycine max
  unsure (1)..(89): unsure at all Xaa locations
  Clone ID: PAT_MRT3847_120203C.1.pep
LTNNASIKAVSSTRSTTFKSLACAFQNLRTDRDTFGHLQLPSXSLLGAQTQPSLQNFYILRPRERMPYPLIRAFRVFKKENPFFTPFFP

SEQ ID NO: 165215 - protein, 75 aa, Glycine max
  Clone ID: PAT_MRT3847_120204C.1.pep
TTLLKLLRGGSNNKKFYVPFLISGGIFMNIYYLALTSCIKNKLLCPTKKKKNKTALLTKGGNLNLWGARGPPLGN

SEQ ID NO: 165216 - protein, 112 aa, Glycine max
  Clone ID: PAT_MRT3847_120205C.1.pep
ASRMQHMFSTKAGRDGIRRLQSQDCSAGVPQPLRVMLQSHAKQPSSSVLSAKTKVVVVTMSVHPCICFSGHEIIRSCQQAPGMLMYQLCSVSSGWELVWENLCPCHLQGVRE

SEQ ID NO: 165217 - protein, 225 aa, Glycine max
  Clone ID: PAT_MRT3847_120206C.1.pep
MASSDKANAMRRFQRKRNLESIFQLFKLFAVILLFSHLFSFFPNITLQTFPHLYHFFIPLFRNSFYAFLLLNAIILLLFALSNKHNNNVGASEDVYHEFLNHNKSRLIVTASQDQLSRTVDSSDKKITTTNFDPSSSPVFEETVRAVTETVSVSEKRCYRRVQSERYERRMVVAPLQGQLRSVEQLSKDEFNRAVEEFIAMHKRMQKEEHIGSLETGYLACTPSN

SEQ ID NO: 165218 - protein, 60 aa, Glycine max
  Clone ID: PAT_MRT3847_120207C.1.pep
SRPASFKTVALFSKKKAAPPSKGAAVAPVNDELAKRYGPHRRISLSDGLLEPINIPHHLH

SEQ ID NO: 165219 - protein, 140 aa, Glycine max
  Clone ID: PAT_MRT3847_120208C.1.pep
MGSPTYLESIASSAVRAAIKVKASVIIGFTASGRAARLIAKYRPTMPVLSVVIPRLKSNQLKWSFSGAFEARQSLIVRGLFPMLADPRHPAESTSATNESILKVALDHGKASGVIKSHDRVVVCQKVGDASVVKIIELED

SEQ ID NO: 165220 - protein, 63 aa, Glycine max
  Clone ID: PAT_MRT3847_120209C.1.pep
VFVLRILFLPVVYFRCYFHLVYFLFCDAKIGKYNRFLGIVLIQIHRYMMPTADKAKFVLFFFF

SEQ ID NO: 165221 - protein, 90 aa, Glycine max
  Clone ID: PAT_MRT3847_12020C.1.pep
SVRFSAVSAIGSSGVSLFKDLKSPFTMKGLVLVNPLADVIEKLQKADEVYDFVREDYLFMTVGEAVTSLSSLMKGQSPHHGRRGGTENCD

SEQ ID NO: 165222 - protein, 305 aa, Glycine max
  Clone ID: PAT_MRT3847_120210C.1.pep
MKDCWFFDNNFNGLSDESLDDVMDMELLDLPLDFEDVETDAVEEQDWDAQLKLLEDPPPPLGVFPLQQSSAFCGQTRNENAKLGSKSFSASLAKTVRPAYGKTIPVQKVSLKGKDLLQFQTNSPVSVFESSSSSPSVENSNFELPVIPTKRPRTKRRRLSNISLLYSIPFILTSPAFQKFQRMDFSKSDIQTQPSGELLCKFKKKQRKKDIPLPTNKIEMKRSSSQESVAPRKCLHCEVTKTPQWREGPMGPKTLCNACGVRYRSGRLFAEYRPASSPTFVASLHSNSHKKVLEIRNRATQVTVR

SEQ ID NO: 165223 - protein, 77 aa, Glycine max
  Clone ID: PAT_MRT3847_120211C.1.pep
YGYYGDSCILLGPASSRLMKTSSVFVKQLQVSNEDNNQVILHAFNEEPELSSQTNWTVSNFFLDEAYKSKVISLWLN

SEQ ID NO: 165224 - protein, 102 aa, Glycine max
  Clone ID: PAT_MRT3847_120212C.1.pep
KINQRYKNTNIQKKFQNPINIYKKLKKKGGPPKGSNFTYPLIQISYPSKFSPKFISLPFLLKLLHGKTLVLPNLNPFQKIPLSPIGLIPKRPHTFSLPNIFP

SEQ ID NO: 165225 - protein, 405 aa, Glycine max
  unsure (1)..(405): unsure at all Xaa locations
  Clone ID: PAT_MRT3847_120213C.1.pep
MGNCWGPPPHNPTPTTTGNLSSSTGTTGTSQAISSISYTTTTTTNSSGSGSSSINSKFSVSSGDQPYPNGQILPTSNLRIFTFAELKAATRNFKADTVLGEGGFGKVFKGWLEEKATSKGGSGTVIAVKKLNSESLQGLEEWQSEVNFLGRLSHTNLVKLLGYCLEESELLLVYEFMQKGSLENHLFGRGSAGQPLPWDIRLQIAIGAARGRAVFXFRVAILGPSASQSHVTTRVMATHRYAAPESGASARQSHGQQGGGRIRFAANAYGPPGLDIYRPCVRHKLTLGVKPYLHDRRKLKGIMDSRLEGKFPSKAAFRIAQLSMKCLASEPKHRPSMKDVLENLERIQAANPKHRPSMKEVLENLERIQAANEKPVEPKFRSTHAASRQGHQAVHHRSPRQDGSN

SEQ ID NO: 165226 - protein, 412 aa, Glycine max
  Clone ID: PAT_MRT3847_120214C.1.pep
MGNCWGSPPHNPTPTTTGNLSTGTTGTSQAISSGSYTTTTTTTTTSSGSGSSSINSKFSVSSGGQPYPNGQILPTSNLRIFTFAELKAATRNFKADTVLGEGGFGKVFKGWLEEKATSKGGSGTVIAVKKLNSESLQGLEEWQSEVNFLGRLSHTNLVKLLGYCLEESELLLVYEFMQKGSLENHLFGRGSAVQPLPWDIRLKIAIGAARGLAFLHTSEKVVYRDFKASNILLDGSYNAKISDFGLAKLGPSASQSHVTTRVMGTYGYAAPEYVATGHLYVKSDVYGFGVVLVEILTGLRALDSNRPSGLHRLTEWVKPYLHDRRKLKGIMDPRLEGKFPSKAAFRIAQLSLKCLASEPKHRPSMKDVLENLERIQAANEKPVEPKFRSTHAASRQGHQAVHHRSPRQDGSY

SEQ ID NO: 165227 - protein, 118 aa, Glycine max
  Clone ID: PAT_MRT3847_120215C.1.pep
VMFFMPQSSRWFFIVCSLLLFIKWLLTVHSLRFVVILTTVSLVSCRFLRQRYNYLLKHPILKPQPKQQVVKPQKLKIQAPIISKGKNYNKKEPNLRPHHPASHLNSNGRISNVADVPL

SEQ ID NO: 165228 - protein, 109 aa, Glycine max
  Clone ID: PAT_MRT3847_120216C.1.pep
NSHPSNIISIYQTKNSLYEMLCIESAQVQYNTLGFLFLRIIVLSSCMPPKMADKVEVLEAKALCIRCGDNFHPLHKFSEKHLSLLVLEDDDDNKNMLLECLQTMEECGG

SEQ ID NO: 165229 - protein, 57 aa, Glycine max
  Clone ID: PAT_MRT3847_120217C.1.pep
PVVYDRDIHSATYYPVLIKVFSFKWGGSMTQVLCGFMGMGELGDYVSLSRDVNAAHH

SEQ ID NO: 165230 - protein, 69 aa, Glycine max
  Clone ID: PAT_MRT3847_120218C.1.pep
SFQKRISKSIFNLPKSIQDLFSKGRQADMLFPSSKQLLCVLKYKTNHLSVLTCRRHAHMQNLQLKEQFP

SEQ ID NO: 165231 - protein, 93 aa, Glycine max
  Clone ID: PAT_MRT3847_120219C.1.pep
LKISIKIMRIPKFSTLFLLLIVLMSSIQDSDSTSRLESHVELERRLSERKVSSMFIQSYSAILSSLNSRKSKFKQIHAVSHRLVPSGPNPLHN

SEQ ID NO: 165232 - protein, 65 aa, Glycine max
  Clone ID: PAT_MRT3847_12021C.1.pep
ELDFWTPKFKFAGSVGGDYATNNLAGPVVWPGSLISADPIGWKMPTGTEPLKGAIPTNPAFGNFL

SEQ ID NO: 165233 - protein, 49 aa, Glycine max
  Clone ID: PAT_MRT3847_120220C.1.pep
QLSYSKFPFSNSTNSKLNIIKKKLHCKFHKPLSLPLLQIFPSKKLKQIC

SEQ ID NO: 165234 - protein, 65 aa, Glycine max
  Clone ID: PAT_MRT3847_120221C.1.pep
TSLKILQQNLTSVYRTEMETSFRFINKTGSRIYRLYYIKGGPQVLEAGNMVQQIRNLSFLRRYLG

SEQ ID NO: 165235 - protein, 78 aa, Glycine max
  unsure (1)..(78): unsure at all Xaa locations
  Clone ID: PAT_MRT3847_120222C.1.pep
YNGSIRSIFMHADSLDWFLKVXGVFGAMGDGFTTPISVYIMSGIVNNVGGVLKMTPRTFIHNVNKYSLALTYLACACF

SEQ ID NO: 165236 - protein, 45 aa, Glycine max
  Clone ID: PAT_MRT3847_120223C.1.pep
LELLFVLTVQPQRWPFGKQIQRGIRIKLRNESERLERCVNETERN

SEQ ID NO: 165237 - protein, 157 aa, Glycine max
  Clone ID: PAT_MRT3847_120224C.1.pep
MSRNLLLVLFAVATFLHGSEAQTRHVVGDATGWIIPPGGAATYTTWACNKTFTVGDTLVFNFTTGQHDVAKVTKSAYDACNGGNAVLTLTCGPATVTLNETGEQYYICSFGSHCSGGQKLAINVNRASSSTPCPAPEAQAPAPEATSPISPPRVYTS

SEQ ID NO: 165238 - protein, 50 aa, Glycine max
  Clone ID: PAT_MRT3847_120225C.1.pep
SRVKPSHIKTLPTLLENILFTSVIYDFLYRFLTDVKSIIINIGFLKSMLT

SEQ ID NO: 165239 - protein, 225 aa, Glycine max
  Clone ID: PAT_MRT3847_120226C.1.pep
NPTGATSPPRTHSHVKKLASCSFCSSHLPPWLRSTTPSPAPEAQAPAPKATSPISPPRSTPAPGPSSGSVTYTVGETAGWIVPGNASFYPAWASAKNFKVGDILVFNYPSNAHNVEEVTKANYDSCSSASPIATFTTPPARVPLSKSGEHYYICGIPGHCLGGQKLSINVTGGSTATAPTTPSSPSPSGAVSPPPQNSAAASLGLVGVSATLLSVAAAFFYYSIY

SEQ ID NO: 165240 - protein, 298 aa, Glycine max
  Clone ID: PAT_MRT3847_120227C.1.pep
IGLINHGYILCCIACAACRLKSFGFLSFFFFFFFFAVFNFTTGQHDVAKVTKSAYDACNGGNAVLTLTSGPATVTLNETGEQYYICSFGSHCSGGQKLAINVNRASSSTPSPAPEAQAPAPKATSPISPPRSTPAPGPSSGSVTYTVGETAGWIVPGNASFYPAWASAKNFKVGDILVFNYPSNAHNVEEVTKANYDSCSSASPIATLTTPPARVPLSKSGEHYYICGIPGHCLGGQKLSINVTGGSTGTGPTTPSSPSSSGAVSPPPQNSAAASLGLVGVSATLFSVARAFFYYSIY

SEQ ID NO: 165241 - protein, 92 aa, Glycine max
  unsure (1)..(92): unsure at all Xaa locations
  Clone ID: PAT_MRT3847_120228C.1.pep
HXLXTSKNYSSSQHLGVLQYLKHPTFSLNLQIPTKLLQLFLFLFFDLKQNKFSNHLTNSHFQFVNQILKPPSMLSSLLHIIFYHPPLTFKNY

SEQ ID NO: 165242 - protein, 77 aa, Glycine max
  unsure (1)..(77): unsure at all Xaa locations
  Clone ID: PAT_MRT3847_120229C.1.pep
FAPNIRYIGLCPKNIRENIVKETVIDWNGLPITVKITVHNRQAKVTVVLSDSXLVIKALNEPERDRXKSKNIKHIGY

SEQ ID NO: 165243 - protein, 67 aa, Glycine max
  Clone ID: PAT_MRT3847_12022C.1.pep
SRYFSNPSRNPTYGKHSSNHLDNKNWSKRLKPIHLLNCILLLMLILILLYHLNRGCQLVMHPRVKYQ

SEQ ID NO: 165244 - protein, 45 aa, Glycine max
  Clone ID: PAT_MRT3847_120230C.1.pep
SWAPVSITIGCVALHKTYKLLTVSLRINAGIYICITVLITTWVAH

SEQ ID NO: 165245 - protein, 75 aa, Glycine max
  Clone ID: PAT_MRT3847_120231C.1.pep
SCFAVLGSNCCTCSKSNSTIVFEKHEFQKWYNQIIIPCLLPMLKSKRWIIILSKCTTFLFNLCLCLSFFLIEVKY

SEQ ID NO: 165246 - protein, 83 aa, Glycine max
  unsure (1)..(83): unsure at all Xaa locations
  Clone ID: PAT_MRT3847_120232C.1.pep
LENTVVCGGTSSMTGFDERYQKVSSFGSSAVQPTLVMPPAYMPENVVLYSAXLEVSIVGKVVFPHNQHMPDADYVETGASIVH

SEQ ID NO: 165247 - protein, 56 aa, Glycine max
  Clone ID: PAT_MRT3847_120233C.1.pep
MGTPRGIALLSFTSFLFWSSANALLSPKGVNFEVQALMGIKYSLEDSHGVLDNWDG

SEQ ID NO: 165248 - protein, 60 aa, Glycine max
  Clone ID: PAT_MRT3847_120234C.1.pep
LTTRSRNRSSHTMVFARSYPYSAPDIAAQTNTRSSCSGSCLLCPMKRVILRQGYKFSAQN

SEQ ID NO: 165249 - protein, 45 aa, Glycine max
  unsure (1)..(45): unsure at all Xaa locations
  Clone ID: PAT_MRT3847_120235C.1.pep
HGIVXXXICCXXXXAIXXXLMXXPXVRSSXSSSXIPSLLXCXHXS

SEQ ID NO: 165250 - protein, 40 aa, Glycine max
  Clone ID: PAT_MRT3847_120236C.1.pep
QGPSTPSRFSSDLRLWGICFHLLSLIKTSFAVKPTAASPI

SEQ ID NO: 165251 - protein, 75 aa, Glycine max
  Clone ID: PAT_MRT3847_120237C.1.pep
VSEHSSGYPPLFFCLLVKITPYCINVDRIPLYISKISRQTRCQNMSDSDISLHVHKVRCRLVNKCKIKYMPPPQH

SEQ ID NO: 165252 - protein, 97 aa, Glycine max
  Clone ID: PAT_MRT3847_120238C.1.pep
LEAPMRQVRVLSHFDVYYACNDNHKQMGETLFLKKLTFTTGTLTLLTRFLLNHVMASAHTVGDQEEWSSRTNYALWAERYNHSHSDVLGFIVRERAT

SEQ ID NO: 165253 - protein, 42 aa, Glycine max
  unsure (1)..(42): unsure at all Xaa locations
  Clone ID: PAT_MRT3847_120239C.1.pep
RXGSWCHALERDLVPKFQGWLDLGILKTSSLIFQNLIPGLNW

SEQ ID NO: 165254 - protein, 100 aa, Glycine max
  Clone ID: PAT_MRT3847_12023C.1.pep
SLFPVLLQVLVPCPGSGSLLLGVFQRPFLVGPPLVLIILHTAPVSPCFLSFKCLCFTGLSPGPSLSLLGVFLPFSLIFGLVSCPSFPLPASFYYFLLFLI

SEQ ID NO: 165255 - protein, 141 aa, Glycine max
  Clone ID: PAT_MRT3847_120240C.1.pep
LRTNNRGDGLLTAIRKECLRVMDYKELLLNDCGDRVAQLLHVQSATPFVQNPKGSVPQEFLIVNTHLLFPHDSSLCVVRLNQVYQILQYVELYQRENRLKPMPIILCGDWNGSKRGHVYKFLRSQGFVSSYDIANQYSDSY

SEQ ID NO: 165256 - protein, 53 aa, Glycine max
  unsure (1)..(53): unsure at all Xaa locations
  Clone ID: PAT_MRT3847_120241C.1.pep
IXXXXXCXXXGSCTPTLGXPPRXXCSNASSSXSXSNXXLFGEGXFXXNLRHFV

SEQ ID NO: 165257 - protein, 532 aa, Glycine max
  Clone ID: PAT_MRT3847_120242C.1.pep
MVVGQLVPSNLFLNRSAATRHRHLLCVSANDTTSTNNTDNGSPFSSFGRLKAQKVKTLLVHRRGKDQSHRRPVHLEDDDDYVATPRPRRSQSRTRGGERWDMIPNYTPPAQSKSVSDTKFFSLKSFKEIGCSEYMIESLQKLLFSRPSHVQAMAFTPVISGKTCVIADQSGSGKTFAYLAPIIQRLRQQELEGLISKSSSQAPSPRVLVLAPTAELASQVLDNCRSLSKSGVPFKSMVVTGGFRQKTQLENLQQGVDVLIATPGRFLFLIHEGFLQLTNLRCAILDEVDILFGDEDFEVALQSLINSSPVDTQYLFVTATLPKNVYTKLELVEVFPDCEMIMGPGMHRISSRLQEIIVDCSGEDGQEKTPDTAFLNKKTALLQLVEESPVPRTIVFCNKIETCRKVENLLKRFDRKGNCVQVLPFHAAMTQESRLASMEEFTRSPSKGVSQFMVCTDRASRGIDFARVDHVILFDFPRDPSEYVRRVGRTARGAKGVGKAFIFVVGKQVSLARKIMERNQKGHPLHDVPSAY

SEQ ID NO: 165258 - protein, 108 aa, Glycine max
  Clone ID: PAT_MRT3847_120243C.1.pep
FHAAMTQESRLASMEEFTRSPSKGVSQFMVCTDRASRGIDFTRVDHVILFDFPRDPSEYVRRVGRTARGAKGVGKAFIFVVGKQVSLARKIMERNQKGHPLHDVPSAY

SEQ ID NO: 165259 - protein, 85 aa, Glycine max
  Clone ID: PAT_MRT3847_120244C.1.pep
TLRFLLLHLFQVQFSQWFGRNGSLCSSSGSFSDMVNDVALVVIGPSSRDQSDVVQEERVLDDDVRWDAQGLRILRCRSRPSKISL

SEQ ID NO: 165260 - protein, 89 aa, Glycine max
  unsure (1)..(89): unsure at all Xaa locations
  Clone ID: PAT_MRT3847_120245C.1.pep
XXLXXXXXPXEKRYPVAXRSXKRKLRSRSNRXPRHIPRRQXSLQRFSNRFLSSTPLLFRSLRWXVLPXRALSTPSLYSPQMRXCGYILN

SEQ ID NO: 165261 - protein, 59 aa, Glycine max
  Clone ID: PAT_MRT3847_120246C.1.pep
LCGCIGIRFISPLFPFFYLIFVPPQICVIVSSHSVFVNIFVIRSGSILISLCFSFIVSS

SEQ ID NO: 165262 - protein, 65 aa, Glycine max
  unsure (1)..(65): unsure at all Xaa locations
  Clone ID: PAT_MRT3847_120247C.1.pep
HKLKIAALEAVNXYHAPYNWCPYGGPLLDCQCDVFKSSYLEYHNLKPSLLSVLTILVAFIRLCKG

SEQ ID NO: 165263 - protein, 59 aa, Glycine max
  Clone ID: PAT_MRT3847_120248C.1.pep
GKKIIFQKIHCENYMIKGSRVYVIMRVSRCNFKGIRKLRSMKKYEVTKVIVVAVNLSKV

SEQ ID NO: 165264 - protein, 81 aa, Glycine max
  Clone ID: PAT_MRT3847_120249C.1.pep
FPELCMMENQFLQTKCYLVLLVCIIEFKAGFFSQTKSKPQRGGKQIHSYTNLVSQKSQAQIPHSADQFFHFSNNKFPMQDL

SEQ ID NO: 165265 - protein, 63 aa, Glycine max
  Clone ID: PAT_MRT3847_12024C.1.pep
VGPTMQCIICKINICIVLVQRCVILVQLNLLTKLVWHDGQIKVIHRSPVLWYSVGYNKKKGCA

SEQ ID NO: 165266 - protein, 55 aa, Glycine max
  Clone ID: PAT_MRT3847_120250C.1.pep
WKELTVEEEDRVIDDPRRKNEVEAYKLKNEYPKILNKKEYEVKYEFQTNKKKEKK

SEQ ID NO: 165267 - protein, 163 aa, Glycine max
  Clone ID: PAT_MRT3847_120251C.1.pep
AIECPQYYVVWNMNMNTHIYPEFVVSFKVSSDAEGHFCGSEGKNVSGVNTACDGPHGLLNSESSTVDNGKAPSMVSSTPKVPKSPWMPFPVLLDAIRDQVPPTGMDVIKTYYEQFRSKHISRDDFVKMLRLIVGDGLLRTTITNLQYKIPSGGELKDSIKKED

SEQ ID NO: 165268 - protein, 72 aa, Glycine max
  Clone ID: PAT_MRT3847_120252C.1.pep
LFIHAHTARYTNHWYRSYSNILDPFGIWHLHIHVNHLRQWHGYHLNDAVTETYPGQGLPRFRMEQVQQADFP

SEQ ID NO: 165269 - protein, 583 aa, Glycine max
  Clone ID: PAT_MRT3847_120253C.1.pep
MEAKIAKALDRVALNLKRKRATRYAAHLSGASQPMLGHWSSFTSQTSRAVKRMRLGGYRNRLTNAGPHIGRSLARRFLNYKKSGRLERLMFYENGEWLDFPKDVVDLVKKDLEVKKAAVEIESNGYHLLFDFLHLHKVDLKTGLQQPIALIDEAGCCFFPEIYAASDEKPYNLSKQECGRSPDSYASNEIKLHLEVEINGVDQSRLSECSGESNALVKGIQIDTKQNCCQYDVEVEDSINKKDCGNVGEDIQQHQDIGLDAYTESVYGKLDLNSVQKMFLKGMCSFGSTDSDIVEIYHCSGASMQARWELFQKQAEITKKNHGEANIRYAWLASSKGELSTMMNYGLSHYGLSGSKCTYGIGVHLAAVTCPDASVRYCDVDENGVRHLALCRVIMGNMEILQPGTDQFHPSSCEYDNGVDSIECPRYYVVWNMNMNTHIYPEFVVSFKVSSDAEGHFCGSEGKNVSGVNSACQGPHGLLHSESSTVDNGKAPSMVASTPKVPKSPWMPFPLLLDAIRNQVPPKGMDVIKIYYEQFRSKHISRDDFVKMLRLIVGDGLLRTTITNLQFKIPSGGELKGSIKKEV

SEQ ID NO: 165270 - protein, 86 aa, Glycine max
  unsure (1)..(86): unsure at all Xaa locations
  Clone ID: PAT_MRT3847_120254C.1.pep
ELTIEERILLSVPYNNVIRARRASWRIIFSIXHKEESRGHXDHLFLILYYRFKIYSYLCNICHRMLKLLHCFLIPSTSSGYFKVLY

SEQ ID NO: 165271 - protein, 36 aa, Glycine max
  Clone ID: PAT_MRT3847_120255C.1.pep
FQSDSNSYSMSQFLILTMELMLYKQLLFTMSHTLLI

SEQ ID NO: 165272 - protein, 80 aa, Glycine max
  Clone ID: PAT_MRT3847_120256C.1.pep
AQGLFGLASLQALRMFMLTNFAFTESAYGGSSFSILCRNPLRSLNKQVALCWWLWRDSIARRLRLCQERGIRFYPSTVCC

SEQ ID NO: 165273 - protein, 65 aa, Glycine max
  Clone ID: PAT_MRT3847_120257C.1.pep
MEESEGSGSGNNQSYSRSCSSCGSAISNMAQDYLFTILLLLPIDAILSLSMTCKRFRALSSSHTL

SEQ ID NO: 165274 - protein, 60 aa, Glycine max
  Clone ID: PAT_MRT3847_120258C.1.pep
RLYLYRSSLSSRAGVLYQMGSEVWHDKNARGASSSPCPCWCKESYSLVIRPLSLLSPKHL

SEQ ID NO: 165275 - protein, 58 aa, Glycine max
  Clone ID: PAT_MRT3847_120259C.1.pep
VSQRKILTLELTSAFFPVSVWLYRYRLHIPRLSFLQWILCNPQRVRLSHIITGRLIAL

SEQ ID NO: 165276 - protein, 85 aa, Glycine max
  unsure (1)..(85): unsure at all Xaa locations
  Clone ID: PAT_MRT3847_12025C.1.pep
RPYGCEKTTEGGDISRRDLEGGGFLTVGGTVGFRLNKPNTCGNRSHKMXKLGLNIDEDACEVCAXMPQLEEAEADAVGIKMEEVD

SEQ ID NO: 165277 - protein, 184 aa, Glycine max
  Clone ID: PAT_MRT3847_120260C.1.pep
AQKVLKYLKSAPAKGLFFSATSTLKISAFSNSDWASCLDTRRSVSGYCVLIVSSLISWKSKKQSTVSRSSSEAEYRALAALTCELQWLYFLFKNLQAAITARALVYCDNRFAIHIAHNPIFHERTKHIANDCHVLWEKLQSGLIHLLPIPSSKQPADIFTKALHSSSFHTNIHKLGLLNIMAPT

SEQ ID NO: 165278 - protein, 262 aa, Glycine max
  unsure (1)..(262): unsure at all Xaa locations
  Clone ID: PAT_MRT3847_120261C.1.pep
PRVREQMPLRLSKGLKGIDSEFWGLKSLAGKSVNHDSLKVSEDISSMGKAIISNNAHLISSITQSTSSAYNYPQLIVKQTRKGKGVICEDLNKSFSIGGALKSQEDEKLGFAAKFQSETLVRSNVDENNKPLLEGTFMSGCNGLNLRDWLKFKGHKMXKSGRIHIFKQVLELVDFEHSQGLVLLDFRPSCFTLLPSSKNKYIGSFGQQELDYEVMTCNVTRKRPLEQNTCACQSLSTKQKKLCEETGSSRQQHHGPVFMAAG

SEQ ID NO: 165279 - protein, 49 aa, Glycine max
  unsure (1)..(49): unsure at all Xaa locations
  Clone ID: PAT_MRT3847_120262C.1.pep
VKPDGYSLPDFENENPEHCLDNDFXVVDKGIELSSNESVKLEESIIKAS

SEQ ID NO: 165280 - protein, 37 aa, Glycine max
  Clone ID: PAT_MRT3847_120263C.1.pep
ELSYPIGQTKKGALKEKCNTLNQLQLGFKPLEKPQGW

SEQ ID NO: 165281 - protein, 125 aa, Glycine max
  Clone ID: PAT_MRT3847_120264C.1.pep
QNSARPASSSEPNRLEFSSDSTKSTVRDSITQLPLSLPILFNFFFSFLTKKPSIFLSLANYENHSSSIYPLTKETWFYFPGKKLLTDWWANLTSLISFLVKLAVEFQFPRLSINHMDPPIAIWGN

SEQ ID NO: 165282 - protein, 418 aa, Glycine max
  Clone ID: PAT_MRT3847_120265C.1.pep
MNRESVDILQSETRNPKTVFGQIESEDSISHIHIVTRVNESSEISRVKGDISETGSFENTALCSHCGCCYEVTNQAEKNIGLCPECKITLLRVVIPETTLAVSENSSLITTNMPKEEKSLPGTNQLMIASELPQETNVGNLRFPHGEQNAEESQTSCSILNPNHSLNLELMNALKFQVPKVTFLKLVVFQSRVAYKKPDNEFGDQHHHNDLPNLNMDPMEGTGISVLLKRSSSNKGPVVQGRTFTATTISYDDLSLARDSVSSFRSSTRPGSYSASSSIDLSSSRQTEFRVQRQLSGRKLDVDCGYDSRIKPPSTASSFSGASIHSRQELGLATRETSGSTECGSVEEVPRVLQEMQASENTVADVIDASSTDLVVEEDKFEHDDSSRVNNACSSEFLSQAADVQSDDSLVASFQNHE

SEQ ID NO: 165283 - protein, 93 aa, Glycine max
  Clone ID: PAT_MRT3847_120266C.1.pep
LCLCAPVSPLSLSGVSGSLSVCGDFVPWRRLCLALRVFFSPACFASQAWLRLLPVLFRAWRACFGFRFFGTPPCLCSRSGCYYAGRVGRPGPS

SEQ ID NO: 165284 - protein, 321 aa, Glycine max
  Clone ID: PAT_MRT3847_120267C.1.pep
MSSSSADVFPAIQEVMLEFRAGKMFLEEKRVVPDTRKGLVRIARGEEGLVHFQWLDRTQNVVEDDQIIFPNEAIFEKVNQTSGRVYILKFNSDDRKFFFWMQESNADGDSQLCSSVNDYINRPLELLGEEEPDGSLPLQISEDMTEDDISSRAANLGIPNLGVEATSDVTSSGPVKLEDLQRILSNIGPADSIVDPDGGLGLGDILKPDLIMPLMDMLPLEQRLAPYLPEGKWSPEEILELLQSPPFRQQVDSFTYVLRTGQIDLSQFGIDPSKYKFTVLSFLEALEDSVSKSVESEEARQDDRDLRSQSCNRHDPMDESQ

SEQ ID NO: 165285 - protein, 131 aa, Glycine max
  Clone ID: PAT_MRT3847_120268C.1.pep
QFSCIFLLGLGLGDILKPDLIMPLMDMLPLEQRLAPYLPEGKWSPEEILELLQSPPFRQQVDSFTYVLRTGQIDLSQFGIDPSKYKFTVLSFLEALEDSVSKSVESEEARQDDQDLRSQSCNRHDPMDESQ

SEQ ID NO: 165286 - protein, 128 aa, Glycine max
  unsure (1)..(128): unsure at all Xaa locations
  Clone ID: PAT_MRT3847_120269C.1.pep
ITNPRPPLNFGPDTRSFXQFPIGLLDGGIIVAKTGDWIALIQDSPIRNLARVADWKTGXLTFDLGMPRNATVKRRDWAITGQVFLTYRGCTDDFDTXKWSKSEPHAWELIFSIEVXXPNNGFEISSSQ

SEQ ID NO: 165287 - protein, 135 aa, Glycine max
  Clone ID: PAT_MRT3847_12026C.1.pep
MYNVRSLGYTFSDLLDTANQDSSDKPGARDMPKLFTVGAAIALARTLDQGLCTKAVIFGVGPRSAQMGGNPVVKHCVFCFARLPGFGSRVSKCHVASCFGASVCSPSRWQPWFKNRCYYSVLACIIYMRRLIYWQ

SEQ ID NO: 165288 - protein, 63 aa, Glycine max
  Clone ID: PAT_MRT3847_120270C.1.pep
HLVAINVHTSLDECKKELPFSSLSSSFSFPLCSRRLLGPRIPSTTIGAFIAYAMAEATRLKAN

SEQ ID NO: 165289 - protein, 105 aa, Glycine max
  Clone ID: PAT_MRT3847_120271C.1.pep
MTVEVTSAVRSRRTGGFRVGVGRGKGGGLGGGFGRRAAGPECYNCGRIGHLARDCYHGQGGGGGVDGDGRNRRRGGGGGGGGRGCFNCGEEGHFVRECPDVGERK

SEQ ID NO: 165290 - protein, 57 aa, Glycine max
  Clone ID: PAT_MRT3847_120272C.1.pep
NFEKEILSLLNNFIFSFHYFKLQRGFKTLIKVISYATYSDNCLITFGSISFLDTRPW

SEQ ID NO: 165291 - protein, 88 aa, Glycine max
  Clone ID: PAT_MRT3847_120273C.1.pep
GKTPIGPGGILWGELSPRKKKIRPPLGSLRPRVKTPPFFPSGEPLFLGREVSPPFFFFFPPNIEKFPLLARGERGPRFSKAQKTGAPF

SEQ ID NO: 165292 - protein, 139 aa, Glycine max
  Clone ID: PAT_MRT3847_120274C.1.pep
SSTRSATRPATRSKTGNVGEGHQNSNWNTTKASEGESSGWNNIQKSNETSSAGWGGGNGFKSGSDEGNLNSTWSGWKSGSSGVKQAGNPAGTSDIDANQDAGWKNKPNKDGSESSGWETKNNWNAPVSSSNDKVEKGND

SEQ ID NO: 165293 - protein, 118 aa, Glycine max
  unsure (1)..(118): unsure at all Xaa locations
  Clone ID: PAT_MRT3847_120275C.1.pep
MALTYKPKNIVIKGYSLYIAXSHVCGKILLNYPDYRGXTLTRLYYCSTVNNIIPSRSCSNIMFITGDIEESXVLNYMLLTQSIDSIMHYTAPTPVHQAFSHSGEITTNCAYGTHELLQ

SEQ ID NO: 165294 - protein, 40 aa, Glycine max
  Clone ID: PAT_MRT3847_120276C.1.pep
RAGLIFGGGGFDIGPFSGVVFHPRYLTLILLSRSVKLLEI

SEQ ID NO: 165295 - protein, 152 aa, Glycine max
  Clone ID: PAT_MRT3847_120277C.1.pep
MSSVCISNCINDARDPRVPVRASYVNLYKWPESDAEFVRSRSCNREKGSQILYGHPRVVDSISCRQMFLRSYTFSREEENEHEKTHKCFGRAKMKKKKDIGSETLKPNDKAKKTKCCLVWSKAKEVSCSALSGILRRVLSCSASVDVVDEKY

SEQ ID NO: 165296 - protein, 58 aa, Glycine max
  Clone ID: PAT_MRT3847_120278C.1.pep
AFFLSSFCSEYFPSSCLTQAACFSREFVYSERYSCFSRQKFGECRLFALRVRSCILFL

SEQ ID NO: 165297 - protein, 106 aa, Glycine max
  Clone ID: PAT_MRT3847_120279C.1.pep
RGGHWFSRRGVPLAWEPCSFFYKGGGPQGPGSGLIVLLGATPVVEGLIGCSLNIFGVLNVLGAKKKNEMPEKNKRLLKKEGINIKTQAKKKNCIKKKKKKKKKKRT

SEQ ID NO: 165298 - protein, 56 aa, Glycine max
  Clone ID: PAT_MRT3847_12027C.1.pep
EGVWREALAIERNFFKYLMDAMNTLQLAAEMYAHTSRPCCHFSEGVHSLRNGLLEA

SEQ ID NO: 165299 - protein, 208 aa, Glycine max
  unsure (1)..(208): unsure at all Xaa locations
  Clone ID: PAT_MRT3847_120280C.1.pep
MKMIRILFIFALLSFTSHASNVNDFCVADLKGPDSPTGYHCKPPKTVTSHDFVFHLGPGNTSNVFKSAITSAFVKDFPAVNGLSLSVARIDIAQGGVVPMHTHPGANEIVMMVAGEINAGFITTDAVYQNTLKPGDVMVIPQAQIHFLVNSGKGNAIXYAAYSSANPRVQPISILLFGNNLSSNTVAQTTIIDDSEVRKLKAIFGGSG

SEQ ID NO: 165300 - protein, 65 aa, Glycine max
  Clone ID: PAT_MRT3847_120281C.1.pep
EGQTELKKPNHKKPKKKKEKKKKKKKKKKKKKKKKKKKMGGGPFKGPNFKPGGGEGNIFFWGPQN

SEQ ID NO: 165301 - protein, 181 aa, Glycine max
  Clone ID: PAT_MRT3847_120282C.1.pep
ATGIDRGLLKHDKTGKIVLVPQPSDSPNDPYNWPRWKKEMFTVVIAYGCGCVGAIGPLPGSAFVPLAEQFGVPLQRFVLGCNGSCIAAIAVGSLTWNSLAVKFGKRPVYIVTTLGLAVSCFWAAEAKSFGSLAAARTIQGLCMAPFEALIPASVADIWHVHERGFRMAMFNLGVLGGINLA

SEQ ID NO: 165302 - protein, 66 aa, Glycine max
  Clone ID: PAT_MRT3847_120283C.1.pep
NLFWVLCCGMDAIYIDQARHSDLYCHAIIAHQHGDTRSCLVILGHLPLLECGCACIHGRPKPDTLT

SEQ ID NO: 165303 - protein, 176 aa, Glycine max
  unsure (1)..(176): unsure at all Xaa locations
  Clone ID: PAT_MRT3847_120284C.1.pep
RPAINVGISVSRVGSAGPIXALEPVXAGKLKLELAPFAELEGFAQFGFGFDKAPQNQLARGPRLGELVXQFQSGPLSVEEQIITFFSGTNGYLDSLEIGQVREFFVEVRGYFNPNKPPFKEIIFFSQTFPGEAEVLFKEAIQGGVTFFSPGTGRKKLFYPFTELKFPLPIFIIRIF

SEQ ID NO: 165304 - protein, 68 aa, Glycine max
  unsure (1)..(68): unsure at all Xaa locations
  Clone ID: PAT_MRT3847_120285C.1.pep
PSYKVSVFQSPTVQSMVQPLTLSVGGLNXKQNYAVTFPSSSKRYASNNCAYVKWSNGQHKVTSPIAIS

SEQ ID NO: 165305 - protein, 66 aa, Glycine max
  Clone ID: PAT_MRT3847_120286C.1.pep
AFLSGCCRVNCKHCHVALLVLSIERVLKLCTIGLQFFSSFQIDSNMVRHFHKIFHWYLILSATVFL

SEQ ID NO: 165306 - protein, 93 aa, Glycine max
  Clone ID: PAT_MRT3847_120287C.1.pep
STVKGKKNRWQCIHKIHNSMGEGGNLSFPTNPGGSREENTSSEPCAITTLTRKDNLLSPRTGILSRKSPDKTKNSQTFDALLAMVLQSLSKPS

SEQ ID NO: 165307 - protein, 101 aa, Glycine max
  Clone ID: PAT_MRT3847_120288C.1.pep
ATEYDAPEEQGIDEGRAISKTGQRTGAVDAQKKRMLPLGGDKPESEKNEQSDRKRKRVAGSTRTAAAQQALDDRLTSYDNDLQRMREEDENSSLKKTEDAL

SEQ ID NO: 165308 - protein, 104 aa, Glycine max
  Clone ID: PAT_MRT3847_120289C.1.pep
LESCDFFFMQMASRKRKATASRPREPYDTTQFISEGAWERYSQNVHSRNILPERNVVLYVNEYDEFRRELERRCWHKALTRQLDGHIDVALVKVFYANLYDPED

SEQ ID NO: 165309 - protein, 154 aa, Glycine max
  Clone ID: PAT_MRT3847_12028C.1.pep
RCRHSQSLLAILPFPQQNAKHYKELEAAVDVVRRACRLCLNVKSSLFSTDEKVLEKNDQTPVTVADFGVQALISLELNKLFPSIPLVAEEDSAVLLSRNLADTGLNEGTDTLRSTCKPLTQDDVLEAIDRGGKDAFVFGSKPATYWVGISKQFN

SEQ ID NO: 165310 - protein, 179 aa, Glycine max
  Clone ID: PAT_MRT3847_120290C.1.pep
VSSEFGSSLFWGFATPKVLFLWGCFPFQLGLNAIPTLTHLAPLSIFADFVDIVAKSVVMVDDVFVFMKNRPPLKAFGGWSVFLYGLGVAVYAFEGIGLVLPLEAEAKDKEKFGGVLGVRMFLISLLYASFAALGYLAFGEGTQEIITTNLGQGVVSALVQLGLCINLFFTFPLMMNPVY

SEQ ID NO: 165311 - protein, 46 aa, Glycine max
  Clone ID: PAT_MRT3847_120291C.1.pep
YSIPLFKFILICLSKLIRMHLFQICFIPRRLKNFILIFITTYKVIK

SEQ ID NO: 165312 - protein, 71 aa, Glycine max
  Clone ID: PAT_MRT3847_120292C.1.pep
KFYNYRESKLGIVREASLKKVCVLLIVKVGGVSVIVVTTKKISSDLRMFEGCLWGKLVCDRWYGKMGVELL

SEQ ID NO: 165313 - protein, 43 aa, Glycine max
  Clone ID: PAT_MRT3847_120293C.1.pep
KQFKNGHYASCFSYLVMIFIATISFRHKFILIIHFHSVMDEFY

SEQ ID NO: 165314 - protein, 75 aa, Glycine max
  Clone ID: PAT_MRT3847_120294C.1.pep
ECDFCVLNYQATSSDLSEWGKHYREFTVSVSDTFNSHSLLLSSPLVSHCIASLSFPPLHSFCSFPRFRLLYLYNI

SEQ ID NO: 165315 - protein, 38 aa, Glycine max
  Clone ID: PAT_MRT3847_120295C.1.pep
SSSIHACAAHVSFSCCSKRALSQIICFYKKFNNIERVD

SEQ ID NO: 165316 - protein, 159 aa, Glycine max
  Clone ID: PAT_MRT3847_120296C.1.pep
MLNLLREEVLLVVQKYYYDLSMVALFTIGVTYLASKAWKRATTNNREEIPGRLGLPFIGETFSFLSATNSTRGCYDFVRLRRLWNGRWFKTRLFGKIHIFIPSPEGARTIFANDFVLFNKGYVKSMADAVGQKSLLCVPVESHKRIRGLLSEPFSMTSL

SEQ ID NO: 165317 - protein, 159 aa, Glycine max
  Clone ID: PAT_MRT3847_120297C.1.pep
RDVQMEPEMTDLGKKIVAKCGGLPSQILDLSKFFSDKDVTKEEWLRLQEQWLRDQGQGQGQNPWSETLNAIVSDFNLPSYESHLKCLSYFKLFPANFGIPARRLVALWVAGDVVPHREEEQEPPEQVAERYLEELIDLNLVQIAKRKPNGKVKTCRLPN

SEQ ID NO: 165318 - protein, 74 aa, Glycine max
  Clone ID: PAT_MRT3847_120298C.1.pep
PTECAATVCTVYPEARVSTPTVYSDDLHTEPSPRPSRSGAAQSDPLPGASLPGSCRIYTAHVYATMHNGRRASP

SEQ ID NO: 165319 - protein, 94 aa, Glycine max
  Clone ID: PAT_MRT3847_120299C.1.pep
LLGGGGGGGGRGGGDIMKSAREEACRVRVGGVGLAVHVGEQYKRGKDKGATRIGWARRFGNGRRLGIGRKVGANAIGQLAEWSALNGWCPTDSF

SEQ ID NO: 165320 - protein, 423 aa, Glycine max
  Clone ID: PAT_MRT3847_12029C.1.pep
MDPLCEFCRVVRAVVYCKSDSARLCLHCDGCVHSANSLSRRHSRSLLCDKCNSQPAMIRCMNHKLSLCQGCDWNPNDCSALGHRRLALNCYTGCPSLAEFSRLWSFVFDANSSLGGWESVGTLPKSESCTSQCLEQTDHNGGYFGLVSDKLDEIESCVRYQPRMDQSQIIPSNPNYTPYCKDEAFFFPQDSNQPKLQECPNLGIHDGNELCEGFNVDNVQLNFEIADEIFYCSQVATRYHLEDGGMDCLLMDKNIAVTESSSLIESAMEASSSIQQDCVAFQSSRAGGSASVMQVINSNTNCALMNPSCTKNISLGFPQGLVHSNMPLQFPNIVGENNSTEYQDCGLSRVGESPWESNLEGTCPQARDKAKMRYNEKKKTRTFGKQIRYASRKARADTRKRVKGRFVKAGEAYDYDPLGTRDI

SEQ ID NO: 165321 - protein, 107 aa, Glycine max
  Clone ID: PAT_MRT3847_1202C.1.pep
MELWNRARSFAEEAAKRSQELSLGARATQFTNIIAETTKEIAAQASKHLPRPYAINDVDLHRFGITEELRDFVKGITITTFEDFPLQDDTELSDVPAVSNVRQDLTE

SEQ ID NO: 165322 - protein, 178 aa, Glycine max
  Clone ID: PAT_MRT3847_120300C.1.pep
KFTLKLPKCLFTQQQIEYLGHIVSDKGVQPVPDKIQVVQQWPPPRTARSLRGFLRLTGFYRRFIKGYAAMAAPLSHLLTKDSFVWSPEADVAFQALKNVVTNTLVLALPDFTKPFTVETDASGSDMGAVLSQEGHPIAFFSKEFCPKLVRSSTYVHELAAITNVVKKWRQYLLGHHLV

SEQ ID NO: 165323 - protein, 85 aa, Glycine max
  Clone ID: PAT_MRT3847_120301C.1.pep
CTVLARIRLGDCSRLPVSLTLCFRLLGGLSRGKRGLKRKSMHQQHRLFLLVDNLHCTKPTMLWTHMLPMRLEKRVVMTQGDMLMA

SEQ ID NO: 165324 - protein, 49 aa, Glycine max
  Clone ID: PAT_MRT3847_120302C.1.pep
VGCERTTEGDLNHNKRKRLIKKAIVIEMLTPTMRSSISSFILVHVPVTY

SEQ ID NO: 165325 - protein, 90 aa, Glycine max
  Clone ID: PAT_MRT3847_120303C.1.pep
NHIFSHAIVLVSDARNSPTQKIVFFAAERTVSDSVFKSAGPCRLTELSAVANSYGLAGPAGAGSVLPDVLDPVQSLDALCAPDILSVEPL

SEQ ID NO: 165326 - protein, 40 aa, Glycine max
  Clone ID: PAT_MRT3847_120304C.1.pep
PRNVKRKPFFKNLKPQVPKKTIPPTFFRRPFIHNLKNLSP

SEQ ID NO: 165327 - protein, 105 aa, Glycine max
  unsure (1)..(105): unsure at all Xaa locations
  Clone ID: PAT_MRT3847_120305C.1.pep
EIIQIELEMTNLNSGRKRQECAGHVTRGNAIHVRCEEQRXCVLHGNAEHVEHTCFKVRCVRQNGPWASGISRIKRNGYSRNASSLPSTWGHTXVGRVEAGIVVEW

SEQ ID NO: 165328 - protein, 78 aa, Glycine max
  Clone ID: PAT_MRT3847_120306C.1.pep
YRTRVWHHGTMAATTKQLKACSGIAHTLPIFGLKGKGLKKHHFRHHGGQGTILTANGLAPQLKDGNWDLVPGDPLVLP

SEQ ID NO: 165329 - protein, 58 aa, Glycine max
  Clone ID: PAT_MRT3847_120307C.1.pep
WGQENIFLINFGGRYLVKKTFWKRWSKWEVLTKKFLWETQKGKPSFLRAFDFQIKIPT

SEQ ID NO: 165330 - protein, 54 aa, Glycine max
  unsure (1)..(54): unsure at all Xaa locations
  Clone ID: PAT_MRT3847_120308C.1.pep
ITXXXRLXXRKPPXSHGXDLHRIXEVRVLGVXSTXXXLNLXVAXXDPREXPAXX

SEQ ID NO: 165331 - protein, 46 aa, Glycine max
  unsure (1)..(46): unsure at all Xaa locations
  Clone ID: PAT_MRT3847_120309C.1.pep
PCVRXFFFFFFLFLFFFFFSGEEFYFLNIHFKSETSLRVDKKLQVG

SEQ ID NO: 165332 - protein, 68 aa, Glycine max
  Clone ID: PAT_MRT3847_12030C.1.pep
YSILLLFILLSIFSYCQIIHLLNNWILILVNKITKDIDYSNTRCTKFLKICYPLNWYHLAFPLIGSML

SEQ ID NO: 165333 - protein, 87 aa, Glycine max
  unsure (1)..(87): unsure at all Xaa locations
  Clone ID: PAT_MRT3847_120310C.1.pep
DRTGKAVPPKGGFPPKGVVKNKXIMVQGLGVGPKKRVITWGESHVKPIFWVALEKIKLKFPATFXKFGXGGFLPPPQKQKFFGPPKE

SEQ ID NO: 165334 - protein, 46 aa, Glycine max
  Clone ID: PAT_MRT3847_120311C.1.pep
KTLSIHPFFFCFFQGETLGKTYIDYPKAFFVKNKAPHYCNFIQLFQ

SEQ ID NO: 165335 - protein, 91 aa, Glycine max
  Clone ID: PAT_MRT3847_120312C.1.pep
TSNSSRAQLINLYTQSLTGGIFITHGLLHIYHITDQKIFNILKHMLNQIHLYPNQNVHILSVTNKYNLTANKYCSSHTHNSFPYQNSIPFI

SEQ ID NO: 165336 - protein, 73 aa, Glycine max
  Clone ID: PAT_MRT3847_120313C.1.pep
TLSNGKNGLEEKKRKKLYTIMNPTKHPSFIFKNLNETLKTLPQYSPFPYHKKCSTLETTLPNKNIKNLIHNCP

SEQ ID NO: 165337 - protein, 195 aa, Glycine max
  Clone ID: PAT_MRT3847_120314C.1.pep
EAFWLCGVVVCEFVVVVVVVVVLILHGVVSFFSVLCVTQFVLLTKSILAVVEVVVDAVLIFRVESTFSVLCVTQFILLTESILAVVEVVVVVVLIFHVVVSPFSVLCVTQFILLTKSILAVVEVVAVAVLIFHIVVSYFSVLCVTQFILLTKSILAVVEVIVVVSWPEKGYDFLQLHSWRNLSSCFLQHSYHRLS

SEQ ID NO: 165338 - protein, 128 aa, Glycine max
  Clone ID: PAT_MRT3847_120315C.1.pep
STTTTINSSGVAPNYITHHQHQHFQGLVESQDHQQNPVPAVCGFSGLPLFPSQSQRNRDSNNTPTTNNIRNSGGNIVDVVASSSSSSSMDDTSAAAATSGWIDGILKDLIHSSNSVSIPQLISNVREI

SEQ ID NO: 165339 - protein, 166 aa, Glycine max
  Clone ID: PAT_MRT3847_120316C.1.pep
MEKICVAVRFRPLVSQDSSSSSVGTFWKVEDNRISLHKIHGTPLSASSYAFDHIFDERSTNASVYELLAKDIIHAALDGFNGTAFAYGQTSSGKTFTMNGSETDAGVIPRAVGDIFATMEMMSDREFLIRVSYMEIYNEEINDLLVVENQKLQIHESLERGVFVEG

SEQ ID NO: 165340 - protein, 117 aa, Glycine max
  Clone ID: PAT_MRT3847_120317C.1.pep
HNTDPPPVANGYGYASGEETNDNNNNLFSPTSVLHSCSLSEEAESVRGKDDEYSSVSMSRVKAESPFPVPSEIEFDFRSISPVPESVLFYDDDWSSEFLTACEDFGFNRNWGLFPRY

SEQ ID NO: 165341 - protein, 29 aa, Glycine max
  Clone ID: PAT_MRT3847_120318C.1.pep
MVGCRTPTYFFCSAAGVLTQHLKNIKNMG

SEQ ID NO: 165342 - protein, 66 aa, Glycine max
  Clone ID: PAT_MRT3847_120319C.1.pep
LKKQHPLLYNLSTIHPLIIIILYFTINTSSFKTCLTHYYLFILSFFPFSTTILIKSLNKSYFIIYI

SEQ ID NO: 165343 - protein, 90 aa, Glycine max
  unsure (1)..(90): unsure at all Xaa locations
  Clone ID: PAT_MRT3847_12031C.1.pep
TEPTSSDVPLMHYPEPVSFSKHECARIPVRLFAIXSNQRSGCGXDETLLNSHSNVXSNAEIFSVGEPRAXVATTXQTLNAIYNLDCLTSA

SEQ ID NO: 165344 - protein, 116 aa, Glycine max
  unsure (1)..(116): unsure at all Xaa locations
  Clone ID: PAT_MRT3847_120320C.1.pep
KVGSLDMGYGKCIMTRLVGPNKAAEKWFLPRFYDAVEAERMGIVNAVVPGKNLXKETIKWGGYXLRSSPASIRDLKAAVKALDDGKSGVHESDGNSPFFYDGEERGKQGKLYKLGR

SEQ ID NO: 165345 - protein, 853 aa, Glycine max
  Clone ID: PAT_MRT3847_120321C.1.pep
MEAQAAVVTAAAVRGASLQMPLPSRKEWRAVAEHHHSARNPDDEELDNAKLGQSDERTIYEVQQGREPLDVDFCSITVDGALDNDILQQQLHNVVRQRQDLLQMEIELKAQMIARTEIMEMRNTFDAQLKDHVSNANKFQEQLCEREQTIHELERKIEEKDRELHSIKLDNEAAWAKQDLLREQNKELATFRMERDHSEAERAQHIKQIHDQQEHIQEKDRQLNELQEQHRVAQETIMFKDEQFREAQAWIARVREMDVFQSTTNQTLQAELRERTEQYNQLWMGFQRQFAEMERVHLHAIQQLQLELADARERSGTFNDDSRMSQINSKNNVTQFGQENGSQFDLNGSNASGGNNGLLPSESTANDGPFVSTGNASIQTEHVAGVPIAPSSLIVPPSYLPHSQVTALHPFVMHQQGVPNSVASHVPQSHVGHFHPVPSMSPVQQWQNHQSVSEGSQVPVQEHSSPSQTDQHLMRSDAKFSYEMSVNGKTLHRDYLDAHIQQGEEAQTMIFSATSETQSVDKGQLVASHQDQSMQQISSQFSDALQLNSFEPNGEIKEQNSVTLSNNGPDDQVLLAEQASSAAIASSVTSHSVNHNEMIQNNSTDSVLSEVFTSSALTASTIAKTSEITLLDGKSLLACIVRTIPAGGRIRISSTLPNRLGKMLAPLHWHDYKRKYGKLDDFVASHPELFLIEGDYIQLREGAQKMVAATAAVAKVAAAAAAASTPYSSYMSTVAVTPMAQSHRMKKAPSNLGDDPLKMSVMQRQQTNGALSVAGGLSNVKILSKSKVSREMDGPESRVVQSSVQLPVGNGGSIDKSSMSSAQISGSANGRLVSSFASKQQTRATGAVYPSQR

SEQ ID NO: 165346 - protein, 156 aa, Glycine max
  unsure (1)..(156): unsure at all Xaa locations
  Clone ID: PAT_MRT3847_120322C.1.pep
MEATAAVAAAATAAAVRGASLQMPPPSRKEWRAVAEHHHSARNPDDEELDNAKLGQSDERTIYEVQQGREPLDVDFCSITVDGAVDNDILQQQLHNVVRQRQELLQMEIELKAQMIARTEIMEMQSTFDAQLRDHVNNAXQLQEQLCEREHTIHEL

SEQ ID NO: 165347 - protein, 116 aa, Glycine max
  Clone ID: PAT_MRT3847_120323C.1.pep
MRSRCCVYITDTPHTILSMAVKGSLRFVYAHFPIKASIGNNNKSIKIRNFLGEKKRHVGARSYFEKREASLVWNYYLFCLLEFGRLQARDMLQHLWTGPISNATQLKGFKSKLAPC

SEQ ID NO: 165348 - protein, 117 aa, Glycine max
  Clone ID: PAT_MRT3847_120324C.1.pep
ITFWNGELAKGMPVGGLLPFTSGVRTYPFSKHTFKLTFKRNKALGRGGLSWAGSRLTRSFRWRGFGRVPFDSFKGWPLSQASTRKTVTELCKGLHHVSRLLGLGPGIRLVIPGHAGL

SEQ ID NO: 165349 - protein, 89 aa, Glycine max
  Clone ID: PAT_MRT3847_120325C.1.pep
ITHTQITYPQYSETEAFTLTVSIAKFHSLPLSIFLLLAFNIKPLLTAVTEPVVETHGNPLDPIVRYHMWPLWTDQRRLTLRQPRNITCP

SEQ ID NO: 165350 - protein, 669 aa, Glycine max
  unsure (1)..(669): unsure at all Xaa locations
  Clone ID: PAT_MRT3847_120326C.1.pep
QHINKIHDLQEHIQEKDRXLIELQXQNRVAQETIMFKDEQFREPQAWIARVREMDVFQSTTNQTLQAELRERTEQYNQLWMGFQRQFAEMERVHLHAIQQLQLELADARERSGTFNDDSRMSQINSKNNVTQFGQENGSQFDLNGSNASGGNNGLLPNESTDNGPPFASTGNASIQTEHVAGVPIAPSSLIVPPSYLPHGQVTALHPFVMHQQGVPNSVASHVGHFHPVQSMSPVHQWQNQQSVSEGSQVPVQEHPSPSQTDQNLMRSDAKFSYEMSVNGQTLHRDYLDAHIQQGEEAQTVISSGTSETQSVDKTQFVASQQDQSMQQISSQFSEALRLNSFEPNGEHKEQNSVPLSNNEPERPVLLAEQATSAVNASSVTSHSVNHNEMIQSNSTDSVLSEVFTSSGSTASTIAKTSETALLDEKSLLACIVRTIPAGGRIRISSTLPNRLGKMLAPLHWHDYKRKYGKLDDFVASHPELFLIEGDYIQLREGAQKMVAATAAVAKVAAAAAASTPYSSYMSTVAVTPMAQTHRMKKAPSIDSKNIKSEYAVISSNPGDDPLKMSVMQHQQTSAFNVAGGLSNVKILSKSKDPREMDGPESRVVQSPVQLPVGNGGSIDRSSMSSAQISGSANGRLVSSFASKQQTRATGAVYPSRSRKRKGVLDYPV

SEQ ID NO: 165351 - protein, 107 aa, Glycine max
  unsure (1)..(107): unsure at all Xaa locations
  Clone ID: PAT_MRT3847_120327C.1.pep
VLLFYFALNSGVGLRALHGCLFAXXRTKKKPPLKKQPPKFNRVFGGGAFLGGGGKNGGSKEKILQKKNLKGNFWRKKNKKAICGGLAPLYKNYTKIVSELFFNPGAL

SEQ ID NO: 165352 - protein, 36 aa, Glycine max
  Clone ID: PAT_MRT3847_120328C.1.pep
SQCSLHTEISTFPNCFPLLILDFNLSFKEHLCSTSY

SEQ ID NO: 165353 - protein, 252 aa, Glycine max
  Clone ID: PAT_MRT3847_120329C.1.pep
MLPWWRIRRRSRLSENMVKKSNCVRELVKDECLRDFLVDKPPEPVLKELVLPRISGYPTLQDALEKTLGLLRNNKIKVIGVCGTKGVGKTTIMRNLNNNEEVAKLFEIVIFVKATTDDHMLQEKIANRLMLDIGTNKEHSDDVARRIHKELEKKKYLLILDEVEDAINLEQLGIPTGINGSKVVIATRFPRVYKLNRVQRLVKVEELTPDEAWKMFRDTVHAFNPKIDSLDIQPIAQLVCQRCSCLPLLIYN

SEQ ID NO: 165354 - protein, 107 aa, Glycine max
  Clone ID: PAT_MRT3847_120330C.1.pep
LVFILNLISWLLVCTLITSSSGLSTHCCMGFWTFILTPEYCLCIFIYRVMSIVSIIKSNISYLIINKLLFFLGFLLPFFYFFILTFLHFICHIYVSIEAMVLIVSSN

SEQ ID NO: 165355 - protein, 85 aa, Glycine max
  unsure (1)..(85): unsure at all Xaa locations
  Clone ID: PAT_MRT3847_120331C.1.pep
GPEISVTHLQLVLTLEPPTLRIPQNLPWVGNQXQGGQPPIPSTCGDGLETNPFMRVDSPKIQERVGSKSPVEALGKIRKQKPNWR

SEQ ID NO: 165356 - protein, 295 aa, Glycine max
  unsure (1)..(295): unsure at all Xaa locations
  Clone ID: PAT_MRT3847_120332C.1.pep
MGESKFVSLAFLLVCLVVQRVWSHGYHPLSKVAVHKATVSLLDLAYIKASPAVLGLQEQTAEWVTLEYSSPIPSIDDWIGVFSPANFSASTCPKENRRVYPPLLCSAPIKYQYANYSSPLYKETGKGFLKLLLINQRSDFSFALFSGGLSNPKLVAVSDKIAFANPNAPLYPRLALGKSWNEMTVTWTSGYGINDAEPFVXWGPKXGDRMHSPAETLTFTRDXSMCGAPARTVGXWRDPGYIHTSHLKELWPNKIYEYRIGHKLNNVTYIXWSGNYQFTAPPFPGQKXLQRVVIF

SEQ ID NO: 165357 - protein, 414 aa, Glycine max
  Clone ID: PAT_MRT3847_120333C.1.pep
RALPPFLTAMAAAARPLVTVQALDGDMATDASATVPIPDVMKASIRPDIVNFVHSNISKNSRQPYAVSRRAGHQTSAESWGTGRAVSRIPRVPGGGTHRAGQGAFGNMCRGGRMFAPTKIWRRWHRKINVNQKRYAVVSAIAASAIPSLVLARGHRIESVPELPLVVSDSAEGVEKTKEAIKVLKQIGAFPDAEKAKDSRSIRPGKGKMRNRRYISRRGPLVVYGTEGAKAVKAFRNVPGVEVANVERLNLLKLAPGGHLGRFVIWTKSAFEKLDSIYGSFDKPSEKKKGYLLPRSKMVNSDLSRIINSDEVQSVVRPIKKDVKRATLKKNPLKNLNSMLKLNPYAKTAKRMALLAEAQRVKVKKEKLDKKRKTVSKEEASAIKAAGKAWYHTMVSDSDYTEFDNFSKWLGVSQ

SEQ ID NO: 165358 - protein, 57 aa, Glycine max
  Clone ID: PAT_MRT3847_120334C.1.pep
VFLTRYFFVKRFIREGSPFWVHSYARNFSVGTNFSAPLRSSCHDLRSIQQTNNEGEI

SEQ ID NO: 165359 - protein, 100 aa, Glycine max
  Clone ID: PAT_MRT3847_120335C.1.pep
MSQNNKRMLEGKAMVKETDMSPKMQIHAMASASQALDLYDVYDCISIAAHIKKEFDSVYGNGWQCVVGSNFGCYFTHSSGTFIYFALETLNFLIFKGTSS

SEQ ID NO: 165360 - protein, 93 aa, Glycine max
  Clone ID: PAT_MRT3847_120336C.1.pep
MLEGKAMVKETDMSTKMQIHAMASASQALDLYDVYDCISIAAHIKKEFDSVYGNGWQCVVGSNFGCYFTHSSGTFIYFALATLNFLIFKGTSS

SEQ ID NO: 165361 - protein, 60 aa, Glycine max
  Clone ID: PAT_MRT3847_120337C.1.pep
LPCKTLVAVTKCSGNSWGQSDDLYQEIGPQYAFSSLEPPAPMTVINRSTPSDSYPILFSN

SEQ ID NO: 165362 - protein, 27 aa, Glycine max
  Clone ID: PAT_MRT3847_120338C.1.pep
VDSSHIHLPKPTYGNSHSHHHRQLRLT

SEQ ID NO: 165363 - protein, 42 aa, Glycine max
  Clone ID: PAT_MRT3847_120339C.1.pep
CKQRWLSRNRLSWFLRFQEPTRARRHGPRRQMVFTPHSVFYP

SEQ ID NO: 165364 - protein, 94 aa, Glycine max
  unsure (1)..(94): unsure at all Xaa locations
  Clone ID: PAT_MRT3847_12033C.1.pep
GPAFQQCSSLPSFPSPRPXSQTASADSLRSAVTLNKDCDTNQPHARIVNRCDYDVNLWSVYKGDGCPSSGMVTLKTGESYAENYATAEDGKTXV

SEQ ID NO: 165365 - protein, 82 aa, Glycine max
  unsure (1)..(82): unsure at all Xaa locations
  Clone ID: PAT_MRT3847_120340C.1.pep
MASADVEXRCXXVGXXWXXKXHXLXXXFXXXGEFVEXRIINDRXXGQXPRGFGFXTFASEQSMXXAXGAMNGXNWTAXNICH

SEQ ID NO: 165366 - protein, 106 aa, Glycine max
  Clone ID: PAT_MRT3847_120341C.1.pep
NSSSLPGDPLESTCRLFEDSVTSFPIHAQTFFHSLYNLLSAPHLPRVQDLTMQFPRMIIDRIPFIVDRSLQSPLPFPFFLFHILVTSGCLTYLVTNYEMCFLLMLD

SEQ ID NO: 165367 - protein, 309 aa, Glycine max
  Clone ID: PAT_MRT3847_120342C.1.pep
MASRQQFKEDRAEAAAKLAAKDIGDINRTNERDEGYDLHDEANFKQARAEAAAKLAAKDLEDANRLRDNTFNTWKEQHQHDENKPGVIGSMFRAAKEAVVGKPHHEEVYAKETKMGEYSDYATQKARETKQKAGEYTDYAAQKAKETKDYAAEKAKNAKDTTVQKAGEYKDYTAEKAKNAKDTTVQKAGEYKDYTAEKAIEGKDSAVGKLGELKESAADAAKRAMGFFTGGNKDQTREEEEETRRSMQEVRVQDKEYGTGRGTGEKLVIKMEESRPGAVADALKAANRAMDGDMEEEGVLHVERRREKM

SEQ ID NO: 165368 - protein, 80 aa, Glycine max
  Clone ID: PAT_MRT3847_120343C.1.pep
KNTNFGGDLKKTFQGFWIFWPPPKDFSFPTSKAWLVFSQRGGSLLFIGEGTFSQQEEPPPLWGCPTKKKPPRFKKHIFRL

SEQ ID NO: 165369 - protein, 237 aa, Glycine max
  Clone ID: PAT_MRT3847_120344C.1.pep
FIEVGTQETVAAIKRKIEQILGIPVPSQILTVSGWELLDGLDMEDYPIVTEGTKIDLTIKPVEPHPSKMQITVKFSARKFNIEVDRTDTVRSLKEKIHIIDSTPIKRMTLYFSGRELDEDFRNLSEYGIREFSEIVVFLKPLNRSREEPPTRKLSLVVQTSSSLLNGATIPLEMRDASTVSDLKQLLISRKILPVDDYLFIHKQRIMRDSCSLRWHGVEDGDCLYVFKGTVSRSGYA

SEQ ID NO: 165370 - protein, 39 aa, Glycine max
  Clone ID: PAT_MRT3847_120345C.1.pep
LLSRHLLGFFSRRQLDFSSEHQPKLLFSQYRLGLFFSRC

SEQ ID NO: 165371 - protein, 63 aa, Glycine max
  unsure (1)..(63): unsure at all Xaa locations
  Clone ID: PAT_MRT3847_120346C.1.pep
IXXKGGYIKLDSDTQNNLHYLKYFTKHKSKNSQKSFRSLTLTFPGQNWWHMPKPCFLQGHQSY

SEQ ID NO: 165372 - protein, 205 aa, Glycine max
  Clone ID: PAT_MRT3847_120347C.1.pep
MSSRAGKGPAVRSYRRRKTALDLDLNRVPAGENREQEGPSTQSVPREVQVEQQQQATQPPMIDVEAIDDDVVECTPRAFAEAKNNSRRVRRRTIVDVDLEDQTRRNKRRRELPNLIINCDKYINLEGGSSSMEQSFKKPPEPPKELVFNCPICMGPMVHEMSTRCGHIFCKDCIKAAISAQGKCPTCRKKVVAKDLIRVYLPSTS

SEQ ID NO: 165373 - protein, 59 aa, Glycine max
  Clone ID: PAT_MRT3847_120348C.1.pep
DTNCLFPFFHFFHMLNDRVILFSSLRNPFIMILRHLSYSRPIKMIYIRRSLLLNQNQLG

SEQ ID NO: 165374 - protein, 91 aa, Glycine max
  unsure (1)..(91): unsure at all Xaa locations
  Clone ID: PAT_MRT3847_120349C.1.pep
MGKGFLTLSLSSLCLLLLYNACFAITSHKSNEXQLXNLNTLQPYHXLESERGSYXTWNYHRNTRSALHLVTANNPTLNRNGLHLPSHSPYP

SEQ ID NO: 165375 - protein, 158 aa, Glycine max
  unsure (1)..(158): unsure at all Xaa locations
  Clone ID: PAT_MRT3847_12034C.1.pep
TRFQDQSCRRMARPGERWSETLMRRCDETELVVKIRXEQQRMGVPXRDWVGNEGLQEXEEEEEEDKEEETQEEVEVDEDRRRNSSNGXNPVERHLNEESTLSAEELEDRMNQFTYIMQQKFLLGKDPEHLDYTKIDNDEALADILLMTEQTELGHHTG

SEQ ID NO: 165376 - protein, 91 aa, Glycine max
  Clone ID: PAT_MRT3847_120350C.1.pep
QYLEDRLCIQFQLLCCRCQRSSQCPMCWQPISLKDPTSQELLEAVERERNFRFNPSRNATIFHHPTLGDFELQHLPVGASDADLEERIIQH

SEQ ID NO: 165377 - protein, 444 aa, Glycine max
  Clone ID: PAT_MRT3847_120351C.1.pep
MLYPLRARETSLSHSLSLSITLSHPLGFPFHRILSLQPRLVISMEGAGMEENNIINDDDNNNKSEAHLTSAAAFVEGGIQDACDDACSICLEAFCDSDPSTVTSCKHEFHLQCILEWCQRSSQCPMCWQPISLKDPTSQELLEAVERERNFRFNPSRNATIFHHPTLGDFELQHLPVGASDADLEERIIQHLAAAAAMGRARHIARREGQRNRSSAQGRPHFLVFSTNPNSPPMAPASSSPSQRGDDEPIPTIAVANLSPTPATGEESSQLTLVPPIQAEQVSASGSGSTALATDHQGSSYNNRRSPNQSSPSSQDRAGPSELQSFSESLKSKLNAVSTRYKESISKSTRGWKERWFSRNNTMSDLGSEVRREVNAGIATVSRMMERLETSDNNRSNSNSAPSNIEDGSVQEYNGQTLTPGNEGDGLLRDNNTKASCAAGSSSN

SEQ ID NO: 165378 - protein, 40 aa, Glycine max
  unsure (1)..(40): unsure at all Xaa locations
  Clone ID: PAT_MRT3847_120352C.1.pep
QKFFLQMKTGFGGQYISEVACATWKLGMEXYNRVKWLTVS

SEQ ID NO: 165379 - protein, 41 aa, Glycine max
  Clone ID: PAT_MRT3847_120353C.1.pep
HTPRLPLLASINYIVFSPCSYQSLAEGGDIITVRKPVCIHD

SEQ ID NO: 165380 - protein, 54 aa, Glycine max
  Clone ID: PAT_MRT3847_120354C.1.pep
IDYFKIFRNLFLTLIKNTPLNQSKFLQRSLEIKKLLGSPIRSIPQPKLLQNLEL

SEQ ID NO: 165381 - protein, 61 aa, Glycine max
  Clone ID: PAT_MRT3847_120355C.1.pep
FPGRRTRPPTRTPTRPISVNSLSYSIYTSRRILSNIYVDTHILWSANSHELQLYYVAHDDY

SEQ ID NO: 165382 - protein, 48 aa, Glycine max
  unsure (1)..(48): unsure at all Xaa locations
  Clone ID: PAT_MRT3847_120356C.1.pep
LESENMMLRSSSXAXXGXLXLHPXQIVXXRXFXQKXVMXLXTXHEXVX

SEQ ID NO: 165383 - protein, 277 aa, Glycine max
  Clone ID: PAT_MRT3847_120357C.1.pep
MELLSVSVSLSKCQTLSFPKPKAPQIHELPLNIRLPNKTNHFSLSSSSSPCCNWSITRVAAATTYPSFNPSTTQNPHWMVLMDTPPQGVNSKPHVARNSARALQTVLGSEKDAQMCIYDASWNTHFGFCCDIDEEISSQLASLPEVLLVRPDLDFNSLKKDYSLSSGEAGHLSGLRTRTNMLFPAGNSKHWLVKMDKPGVEAVTKAQIVDYYAQILTKVMGNEKDAQMCIYHVSWKTNFGFCCELDEDCAQELAGVLGVLSVQPDNNFESENKDYAS

SEQ ID NO: 165384 - protein, 45 aa, Glycine max
  Clone ID: PAT_MRT3847_120358C.1.pep
EAIFFFFRGNPFISWVARLLNSMGVFLSHFKMGLWKLRVVLSPVP

SEQ ID NO: 165385 - protein, 124 aa, Glycine max
  unsure (1)..(124): unsure at all Xaa locations
  Clone ID: PAT_MRT3847_120359C.1.pep
AFGGVPTKVDIAKRADPKAKALNKANAGKSSGQVFRTKAKTITTXVTFHMPRTLIDERNRTYPRVKATPRNTLDHYQILKFTITTECDMKKTEDNNTLDYIDDLHANTITIEDAVKNMDDIHAK

SEQ ID NO: 165386 - protein, 87 aa, Glycine max
  Clone ID: PAT_MRT3847_12035C.1.pep
KPVKKVGAYCWLFFALCLVELLICPKFGPGLFPKTKPIRGGIFWAGGGGAPFPLLLLGFWPPPPPFGAQKRRLFSHCPRCQGAFFFD

SEQ ID NO: 165387 - protein, 44 aa, Glycine max
  Clone ID: PAT_MRT3847_120360C.1.pep
WQIRRAFSHLESILARAPVVLSDDGVEYVSVTQPHDVYIWSSAG

SEQ ID NO: 165388 - protein, 115 aa, Glycine max
  Clone ID: PAT_MRT3847_120361C.1.pep
VHTILFKAYVCVYISPTDTTVAVFRCRATNSKLQGIRFYLLGPRLVTNRFIWFVTYEPLVYQRIEKAPKIYLIIPIYLFLNLPLIINGKIVNLPQKIFLSFCQFWHSIFECYTHL

SEQ ID NO: 165389 - protein, 45 aa, Glycine max
  Clone ID: PAT_MRT3847_120362C.1.pep
GKWPACIMPKSASRATENFDIHISYDIYDMILTRTIGLEVLYLRK

SEQ ID NO: 165390 - protein, 99 aa, Glycine max
  unsure (1)..(99): unsure at all Xaa locations
  Clone ID: PAT_MRT3847_120363C.1.pep
LTADAPSVPPWQKKNNEEAAYLDDMNDHIAXTINASMDEHKTCSKKTIQKMIGISKAVAKGNSNASKEVERSLPLQTTVQDYISCFRTTRLQPRRVVIP

SEQ ID NO: 165391 - protein, 90 aa, Glycine max
  unsure (1)..(90): unsure at all Xaa locations
  Clone ID: PAT_MRT3847_120364C.1.pep
VIMWAHNPCGKERTDTEVEALAKGDGFQGFRALCXAFNTYAMETPQRGLSSLPCIHRVHWSSDFQTLPGVLPYIGSPGKTSSTLTSSEKE

SEQ ID NO: 165392 - protein, 73 aa, Glycine max
  unsure (1)..(73): unsure at all Xaa locations
  Clone ID: PAT_MRT3847_120365C.1.pep
ADILMSNDERTKSRSLWNFSIRTRPKELQSNWGVRIAELETRTSRFERQALDXKEQKVDXSFXSFGCLXPQPQ

SEQ ID NO: 165393 - protein, 40 aa, Glycine max
  Clone ID: PAT_MRT3847_120366C.1.pep
SIYWKFISPRSANNGDSSPLLSLVKKVYVIEKVLTLIFAL

SEQ ID NO: 165394 - protein, 147 aa, Glycine max
  Clone ID: PAT_MRT3847_120367C.1.pep
EIRGIPPNLKTFSAMDSPALTSSSISMLLNQELHEAGDTDFSLPRVQIPQWFEHKNPGRPIRFWFRNDFPAIGACIAKSDFQGVFDYPDLNVFINGREHKHYGRTPVLEKPCTVLFHLLIEDDLDVSLLENEWNRAEIVCYGSWDEC

SEQ ID NO: 165395 - protein, 61 aa, Glycine max
  unsure (1)..(61): unsure at all Xaa locations
  Clone ID: PAT_MRT3847_120368C.1.pep
NSVSPXFTHCRSSFSCFTLSXENRXXXEDRXIVHRXPXPRYSXXXXXGRFXXLGGXAXXPR

SEQ ID NO: 165396 - protein, 74 aa, Glycine max
  Clone ID: PAT_MRT3847_120369C.1.pep
ANICWVWLSHSLFKYSLHLFLFVDRYSRKLHCFHRYYFTHIYKSMLMLFLLLLPCYILNTYLQIIHIIYLQHHS

SEQ ID NO: 165397 - protein, 669 aa, Glycine max
  Clone ID: PAT_MRT3847_12036C.1.pep
MVMASWKKLVLLLLIFLCTCKAQEEQSSTPVYLYHNCSGGNTTANSAYQLNLRTLLTSLSSNATTTEFSNNTVGLGTSPSDRVYGLFMCRGDVPSALCQQCVVNATGRLRSQCSLAKQAVIWYDECTVRYSNRSFFSTVDTRPRVGLLNTANISNQDSFMRLLFQTINRTADEAANFSVGLKKYAVNQANISGFQSLYCLAQCTPDLSQENCRSCLSGVIGDLPWCCQGKQGGRVLYPSCNVRYELYPFYRVTASPPSSSPSPPTLLPPPTSPISPGSSGISAGTIVAIVVPITVAVLIFIVGICFLSRRARKKQQGSVKEGKTAYDIPTVDSLQFDFSTIEAATNKFSADNKLGEGGFGEVYKGTLSSGQVVAVKRLSKSSGQGGEEFKNEVVVVAKLQHRNLVRLLGFCLQGEEKILVYEYVPNKSLDYILFDPEKQRELDWGRRYKIIGGIARGIQYLHEDSRLRIIHRDLKASNILLDGDMNPKISDFGMARIFGVDQTQGNTSRIVGTYGYMAPEYAMHGEFSVKSDVYSFGVLLMEILSGKKNSSFYQTDGAEDLLSYAWQLWKDGTPLELMDPILRESYNQNEVIRSIHIGLLCVQEDPADRPTMATIVLMLDSNTVTLPTPTQPAFFVHSGTDPNMPKELPFDQSIPMSVNDMSISEMDPR

SEQ ID NO: 165398 - protein, 100 aa, Glycine max
  unsure (1)..(100): unsure at all Xaa locations
  Clone ID: PAT_MRT3847_120370C.1.pep
MKDQEKKEERKTVESKNDIESAEKVAPAETLLKVIMHWEGCDSRVGMXVMGFPGVEDLYTDXKPHMAVVKGEIADPLKVVERLQMMGLPLVDLLCRIPKA

SEQ ID NO: 165399 - protein, 58 aa, Glycine max
  Clone ID: PAT_MRT3847_120371C.1.pep
QRKIKASIFNMQNITVFYSLSSTTWTTWTTLRAAMIPHVHISQISHHFPQNIHICTHT

SEQ ID NO: 165400 - protein, 44 aa, Glycine max
  Clone ID: PAT_MRT3847_120372C.1.pep
PNSSPNSFISQLISYKTTVLSWSLRQNPRSFTLKPPTYNWDSRA

SEQ ID NO: 165401 - protein, 40 aa, Glycine max
  Clone ID: PAT_MRT3847_120373C.1.pep
QTCAWEYVFLAQVTFNRTLLIIDHGLKGYTLMNNCGWDCT

SEQ ID NO: 165402 - protein, 62 aa, Glycine max
  Clone ID: PAT_MRT3847_120374C.1.pep
RRVNGWSVNRSEAYRWQVREINASYRCIHVYHACDGTAMNAGVSFNMAFFVFTFSIRKFVKG

SEQ ID NO: 165403 - protein, 62 aa, Glycine max
  Clone ID: PAT_MRT3847_120375C.1.pep
HAEFLLQPFWKVVNYTNTRGRGVVGILQADYLEPTHYKQDFVRTSLVQMLELRLEHMTWKYW

SEQ ID NO: 165404 - protein, 119 aa, Glycine max
  Clone ID: PAT_MRT3847_120376C.1.pep
GGALGPWLFYRSLWGESPFPPRFINRFRARSFRPSGCVTAGKVDRFGPLRLCSGWPMLFLLQGFLLGARRGFSGPLLVNRRPAYWLLFAVVPQVGRPLLAFVSLVPFCSAALFFFFFFF

SEQ ID NO: 165405 - protein, 70 aa, Glycine max
  unsure (1)..(70): unsure at all Xaa locations
  Clone ID: PAT_MRT3847_120377C.1.pep
PWLIQLYSSGSERCAQFSKSWNKIASLLDXFANIGMVXLGEKELAIYLADRRSTGKPFFRNGIPSLVAIP

SEQ ID NO: 165406 - protein, 70 aa, Glycine max
  Clone ID: PAT_MRT3847_120378C.1.pep
MFSLVLFLTSIQIIKSPLVQIFHLVNLCICICVLRISHVSMSVARIFINAPFELHQLVNQNRGSDYSNPR

SEQ ID NO: 165407 - protein, 62 aa, Glycine max
  Clone ID: PAT_MRT3847_120379C.1.pep
RITYYRRMDQLKLTCTARNHGAPFSTEDERMQSLAENPLCESGKCVSDTRTLVNVEKRSRSS

SEQ ID NO: 165408 - protein, 142 aa, Glycine max
  Clone ID: PAT_MRT3847_12037C.1.pep
VDTALETALLLALMLQQEFLKGFSSSYSSSSSSSSSISESSSKSLTHALKSSSNRSFNSGFHKCVHRMAPITRWVPRWGPAAVKSEIMAPILMLAHTLGPSLRSLKVEPLVHPMFHAIRNDSAFAQAMARSLARAVSMAGAV

SEQ ID NO: 165409 - protein, 71 aa, Glycine max
  Clone ID: PAT_MRT3847_120380C.1.pep
QPCNLCLNFQLLCSFEAHYSSLCVTLILLWPTQTFLESMKQKNGNSESILLLQESLHANCNLKVVVSENLE

SEQ ID NO: 165410 - protein, 259 aa, Glycine max
  unsure (1)..(259): unsure at all Xaa locations
  Clone ID: PAT_MRT3847_120381C.1.pep
MVVSGSSPLTSKRRRVTNFCSTDMDAETAKAKLAAVKERFGREIHVFETSVLSSSSKAALSNEGEETDDFYEFTAEDYYRLLATKKEDKFLKTRKLREAEEAARRXSRITKAVIRIRFPDNHTLEVTFHPSETIQSLIDLKKVINAQPEQPFYIYTTPPKKVINDMSRDFYTAGFCPGAIVYFSYNVPKGDSTVGDHTSPYLQEDILSLKDLHIAIDQGQQSEPVVQSEPEPTVAAHPPPVEERKPTEKKVVKPKWLKM

SEQ ID NO: 165411 - protein, 88 aa, Glycine max
  Clone ID: PAT_MRT3847_120382C.1.pep
LFTDSRYEQVPLPSATNYDNPIHTFPVIHQNQQIPNLRLLEKLLRWGDMMLMDDEALSSTPTRKLSCTALLRRCLFLLLAASLNRCNI

SEQ ID NO: 165412 - protein, 69 aa, Glycine max
  Clone ID: PAT_MRT3847_120383C.1.pep
TRCFTPRLIFTCIQTIADNVEVISLRRTSMKNTPWLAQTHFYRGASGRSSDSLLPTGGFAHSFGVDAAV

SEQ ID NO: 165413 - protein, 69 aa, Glycine max
  Clone ID: PAT_MRT3847_120384C.1.pep
TALKKFPALSPLMTDDLDNDHMDFPERVLERALFLAPVRAEAGEAFYGAMTEGEKKELANDAREHGRGF

SEQ ID NO: 165414 - protein, 73 aa, Glycine max
  Clone ID: PAT_MRT3847_120385C.1.pep
APSGSVDPLSSHLWGTTHHSMNSCFLGSTKEHGKPEEKYPGGFDPWILSPKTLRSSKNKGAVVLWDWSTYYPH

SEQ ID NO: 165415 - protein, 56 aa, Glycine max
  unsure (1)..(56): unsure at all Xaa locations
  Clone ID: PAT_MRT3847_120386C.1.pep
KKKKKKKFKLKKKKKKXKRRDKKKKKKKKKKKKNKNKKKKGVVILKVQILLTIACQ

SEQ ID NO: 165416 - protein, 58 aa, Glycine max
  Clone ID: PAT_MRT3847_120387C.1.pep
APQAFTFMPPARNFVWNYKRINILRSKRRLPLIAQSIKSLPKREIGQPGGSGTELSPG

SEQ ID NO: 165417 - protein, 114 aa, Glycine max
  Clone ID: PAT_MRT3847_120388C.1.pep
ESESSESLSSLYFPHHQPSQTVLKDLIMVHMLGLVCTSKGTFADCLPHVVTELCNLGIISDSSRDMASEPPCIFNKTFNRVFQKHLALSIICHFWKPDIGRLNTTFHGSPYFND

SEQ ID NO: 165418 - protein, 67 aa, Glycine max
  Clone ID: PAT_MRT3847_120389C.1.pep
MAHMGMGGYEGINAPMGMVQIHPPPFGFPPGSNKPGNYNPMMRKGGYPQHPSSGGGPPLNLYQCQSV

SEQ ID NO: 165419 - protein, 77 aa, Glycine max
  Clone ID: PAT_MRT3847_12038C.1.pep
ARVHFLGCLFPCILGPPVLPVCEFPRVLVSTADSVGCSCVVRDRATGAFPSFWVHCFYVEKSAPHHKIDNHQHMNGK

SEQ ID NO: 165420 - protein, 63 aa, Glycine max
  Clone ID: PAT_MRT3847_120390C.1.pep
HLTNPIILGSFAMDQTLVVPQKEKNHAYEDPRIFTRHSFIKPTVQRHLHGVVENLENLDNSNI

SEQ ID NO: 165421 - protein, 288 aa, Glycine max
  Clone ID: PAT_MRT3847_120391C.1.pep
HASAITDSTDHGRELEIVQRRLKEKLADKKFLLVLDDVWNESRPKWEAVQNALVCGAQGSRILVTTRSGKVSSTMGSKEHKLRLLQEDYCWKLFAKHAFRDDNLPRDPGCPEIGMKIVKKCKGLPLALKSMGSLLHSKPFAWEWEGVLQSEIWELKDSDIVPALALSYHQLPPHLKTCFAYCALFPKDYVFDRECLIQLWMAENFLNCHQCSRSPEEVGQQYFNDLLSRSFFQQASQYEEGFVMHDLLNDLAKYVCGDIYFRLGVDQAKCTQKTTRHFSVSMITERYF

SEQ ID NO: 165422 - protein, 118 aa, Glycine max
  unsure (1)..(118): unsure at all Xaa locations
  Clone ID: PAT_MRT3847_120392C.1.pep
QCGASNYYEQKIEHLELKVHDEIQNLACLQAQRNELNSRGLNIIFLTRLQMILVXADVFLIKYKVLLLHEELQMIQELCSYVGEVTKQIDKSKVLKVNHPEEKYVVDVDITKCTPIAR

SEQ ID NO: 165423 - protein, 44 aa, Glycine max
  Clone ID: PAT_MRT3847_120393C.1.pep
LGDRSLWNAFKNTGITYFNTSSFSIDSTSVAYCPCSQEVKLLGL

SEQ ID NO: 165424 - protein, 60 aa, Glycine max
  unsure (1)..(60): unsure at all Xaa locations
  Clone ID: PAT_MRT3847_120394C.1.pep
MISSWSERMISHTGTETRPRLLREAAVGNFPQWAKAXDGAMPREGRRPTGHELLFPEKKQ

SEQ ID NO: 165425 - protein, 112 aa, Glycine max
  unsure (1)..(112): unsure at all Xaa locations
  Clone ID: PAT_MRT3847_120395C.1.pep
LVLTISLAYGGLAQGGHKGAKVIXQHLAHLCVLAEECVHPDYASLVKAQCAQPNASLVSVPSAKSREQWPCLCKSRSEXSARKATGXSAVVVKDFWDVHQAYNVVLQHVSAT

SEQ ID NO: 165426 - protein, 108 aa, Glycine max
  Clone ID: PAT_MRT3847_120396C.1.pep
TQFQFGEFIKKNQLTFRTPGDLNTRENLIHYQISHTHLIPPPYRFQISRKQPNIRGQSLQTPKKGPFTGICHEKFNGALGLKPSFEMFWKNLKSPLTGLFCKNGENWI

SEQ ID NO: 165427 - protein, 233 aa, Glycine max
  unsure (1)..(233): unsure at all Xaa locations
  Clone ID: PAT_MRT3847_120397C.1.pep
TRPLLKTFSFSLISSGKYDFFKAKPSFTLICCLIINQTYSKNDRKTYIVYMGDHPKGMDSASLPSLHITMAQKVLGSDFEPEAILHSYKKSFNGFVIKLTEEEAQRMAEMDNVVSVFPNRKSRLQTTRSWDFIGVSQQIQRTSLERDIIVGVIDSGLWPESKSFSDEGFGPPPSKWKGSCHNFTCNKKIIGAKYFNIEGDYAKEDSISPRDVQSHGSHTASTIAGNLXKSSSL

SEQ ID NO: 165428 - protein, 158 aa, Glycine max
  Clone ID: PAT_MRT3847_120398C.1.pep
MISSVSFPASLPAVNFSGNAMASPSCRVKSRPIVAFATATATAEARSSWTEQPRPSYLNSSCSSLYDILGIPAGASNQEIKAAYRRLARVCHPDVAAIDRKNSSADEFMKIHAAYSTLSDPDKRANYDRSLFRRQRPLSTAAVFSGYTRRNWETDQCW

SEQ ID NO: 165429 - protein, 61 aa, Glycine max
  Clone ID: PAT_MRT3847_120399C.1.pep
SLPRPTKSQTNRGLMKMNMVVSKLSSELKEYTHSVGMQTKTHLRNGYIPIINLKEDGSGGT

SEQ ID NO: 165430 - protein, 47 aa, Glycine max
  Clone ID: PAT_MRT3847_12039C.1.pep
SRFALCSLSVMLKNFFVVDSTRLGDTYTPRVIQLKEPEPRTIAVSAL

SEQ ID NO: 165431 - protein, 212 aa, Glycine max
  Clone ID: PAT_MRT3847_1203C.1.pep
TTKEIAAQASKHLPRPYAINDVDLHRFGITEELRDFVKGITITTFEDFPLQDDTELSDVPAVSNVRQDLTEWQEKHASLVLSTVKEISGLRYELCPRVMKERKFWRIYFILVNNHTAPYENKYMEDDKLKSCEQVKDHKVMMESLNTELISNQEVQEVKKEAKPSNSSTEQDLDVFLLGEGNSDDEPDDGDGGYDDDLEKLMDNSDDEKGKS

SEQ ID NO: 165432 - protein, 59 aa, Glycine max
  Clone ID: PAT_MRT3847_120400C.1.pep
IPWHSNFSERLIVSRTFGTSFNKMPLQSSEVPRQNLLQIDYFKTGKKSFGIAANKLVIR

SEQ ID NO: 165433 - protein, 88 aa, Glycine max
  Clone ID: PAT_MRT3847_120401C.1.pep
VHRVHQHFYHVFVSHQHGCLRFAFSPCYAKRAVLHCRLKHTLIIRLNVVLVMASQGCHNLTHQLPHLPPQFSHHRQRHDYTRSIKEVP

SEQ ID NO: 165434 - protein, 67 aa, Glycine max
  Clone ID: PAT_MRT3847_120402C.1.pep
YYFQLYTHHTLHYLHIFIPPFHTYLYLFYHLTFVHTFATSLLTLIFALLTHSHSYNHICIMTTHPYL

SEQ ID NO: 165435 - protein, 90 aa, Glycine max
  Clone ID: PAT_MRT3847_120403C.1.pep
MLKQRGAREVSLLTCQAFKCTCDALAGVRMTSDGATSAASHLRKPSGKEKLNNALRQRIGRSIVPKIYYGLRAHGNYYLPKHCYNNDVLN

SEQ ID NO: 165436 - protein, 132 aa, Glycine max
  Clone ID: PAT_MRT3847_120404C.1.pep
MNDSVDKLVIFLAKRDGIDKLVKTFQYVSKLVNWHVEATHPDTSKRFKQWEVASGLSRKAFRTGRFLTGFNVLRRNPGSTLSLRLLAVLSNAGEMVYFFFDHFLWLARIGTIDASLAKKMSFISAFGESVGY

SEQ ID NO: 165437 - protein, 230 aa, Glycine max
  unsure (1)..(230): unsure at all Xaa locations
  Clone ID: PAT_MRT3847_120405C.1.pep
MRTLRSTSSTRKVNTASLQEHLPVLYPEVVLSVEVYHNVRKGTKIQELLVLGGQTLTALRDKIFCSTDQVMHKAGQHDPSGYFLIEDVFCPDLRDPSAIDLTRPILDWLRDSKEEAQKKWEYIITGELQKKQKAIXGDCTHTLVIRDMRLIHPEDVHNRAVYPIITFQLKLRFQKCNVCKIFRATKVTVDDKWTPENPCYFCDECFSLLHQADDGTLLYTDFVEYDYNHD

SEQ ID NO: 165438 - protein, 135 aa, Glycine max
  Clone ID: PAT_MRT3847_120406C.1.pep
ICQIAELYPNATFLKVNYEELKTMCHGLRIHVLPFFRFYRGSEGRVCSFSCTNATIKKFKDALAKHGSERCSFGPTKGLEESELKILASIGEINSSPLLCPKLGKLEDLVMESHDFSGVWSMESNSRGIMLDAIY

SEQ ID NO: 165439 - protein, 203 aa, Glycine max
  Clone ID: PAT_MRT3847_120407C.1.pep
TRPDQVMHKAGQHDPSGYFLIEDVFCPDLRDPSAIDLTRPILDWLRDSKEEAQKKWEYIITGELQKKQKAIMGEKSASQLPHFRSIEMHKIRFCDLSFQLGAGYLYCHQGDCTHTLVIRDMRLIHPEDVHNRAVYPIITFQLKLRFQKCNVCKIFRATKVTVDDKWTPENPCYFCDECFSLLHQADDGTLLYTDFVEYDYNHD

SEQ ID NO: 165440 - protein, 217 aa, Glycine max
  Clone ID: PAT_MRT3847_120408C.1.pep
IRHQPRRRPQSAQKIAIRLDKAPKHLQADLVALVPKLVEQSEHPLAACALLERLQNPEAEPALRIPVYGALSQLECGSEVWERILFQSFELLTDSNDEPLTATINFIFKAASQCQHLPEAVRSVRVRLKNLGLEVSPCVLDFLSKTINSWGDVAETILRDIDCDDDCGDSCSALPCGIFLFGEHGTAPSGLHVIDEQAYHASRHFSDIYILVEMLSI

SEQ ID NO: 165441 - protein, 68 aa, Glycine max
  Clone ID: PAT_MRT3847_120409C.1.pep
KLPQVAEEISGPLTSANKITLVSSGSGTMGAAKVTGEVLDILTRLPESVERLTGVSISQVNHKPLRTA

SEQ ID NO: 165442 - protein, 80 aa, Glycine max
  Clone ID: PAT_MRT3847_12040C.1.pep
MRLPTLFAHVIPACTQTCYTPKSPLLDFLFPFFTIHSPNNTPKPVNQSRTLTLTQHIEKNNSNNVTISKPKKMVPIHVHK

SEQ ID NO: 165443 - protein, 56 aa, Glycine max
  Clone ID: PAT_MRT3847_120410C.1.pep
VNNPYHNRTHFPPVRAFSARNLALNISVGLASCHGNKHNAPFPCCPTLIPFSFHPL

SEQ ID NO: 165444 - protein, 76 aa, Glycine max
  unsure (1)..(76): unsure at all Xaa locations
  Clone ID: PAT_MRT3847_120411C.1.pep
TTEKAFLKQPKGVLSSKKTGKGKKPGKGGNPFLKSXIXLDXRTPGKAIERTYIDKKCPFTGNVXIRGRILAGTCHS

SEQ ID NO: 165445 - protein, 142 aa, Glycine max
  unsure (1)..(142): unsure at all Xaa locations
  Clone ID: PAT_MRT3847_120412C.1.pep
MGKKRSTNYQKKDTKSSKSKTSSRHAAYSSDDMDDEGGAFHSPXDIXPLDINDDAEESEDEELPIFDVQDVDEDEDEDEDDEDDDDDDGDDDVAKMIRQRKYLRAKFGGGDDEMHDVDDEEDEEDHKLTLGGKKFSPGAENR

SEQ ID NO: 165446 - protein, 129 aa, Glycine max
  Clone ID: PAT_MRT3847_120413C.1.pep
SSSTNPADYKLLEEVGYGATGTVYRAIYLPFNQLVAIKSFNLDRCNVNLDDLRREAQTMSLIDHPNVVRALCSFAVDRSLWVVMPFMDQGSCLHLIKIAYSHGFHEDVIGSILKETLKGLHYLHRHGHI

SEQ ID NO: 165447 - protein, 111 aa, Glycine max
  unsure (1)..(111): unsure at all Xaa locations
  Clone ID: PAT_MRT3847_120414C.1.pep
PSKTFLHKCAWLFTALTLPRYXSYTLLSYPSTYPQTLLLQFPYLPTCLHHSPTPFVFSTFRLLRKSPSSSTKLPDSLSMRPKTLSTFYMTSSSSSHPLSPLIHSSCLPTTL

SEQ ID NO: 165448 - protein, 45 aa, Glycine max
  Clone ID: PAT_MRT3847_120415C.1.pep
MNREFSLFLLLMSSNKYMIVIVLAKSLIGILCYFNLYPNLVWEFC

SEQ ID NO: 165449 - protein, 235 aa, Glycine max
  Clone ID: PAT_MRT3847_120416C.1.pep
MYTAEVFRVFAVRGGDASPAVAPATTTNCLKIVAFNTPTFRNGLNARWAKALTLCRCSVDSKSVGDEVFSVTQSNKSDVDYLGESTKGDLNVKLEHLEAFGIDGHASLDGPIEEVARSEARDAEDLLQDLGIPSPSSSRNSPRGIFCSRTLNLRSISAIGYDMDYTLIHYNVMAWEGRAYDYCMENLKNMGFPVDGLAFDPDLVIRGLVIDKEKGNLVKADRFGYIKRAMHGTKM

SEQ ID NO: 165450 - protein, 53 aa, Glycine max
  unsure (1)..(53): unsure at all Xaa locations
  Clone ID: PAT_MRT3847_120417C.1.pep
STENSIXHGRHYSYLPKENYSFMLGNKIIILKKKVLTYTFLTKLTLLLLIIKY

SEQ ID NO: 165451 - protein, 152 aa, Glycine max
  Clone ID: PAT_MRT3847_120418C.1.pep
LSPTIDWQSCFHKWWRGELSNFEYLLILNRLAGRRWGDHTFHPVMPWVIDFSSKPDDSCDAGWRDLSKSKWRLAKGDEQLDFTYSTSEIPHHVSDECLSELAVCSYKARRLPLSVLRMAVRSVYEPNEYPSTMQRLYQWTPDECIPEFYCHA

SEQ ID NO: 165452 - protein, 123 aa, Glycine max
  Clone ID: PAT_MRT3847_120419C.1.pep
RLREDYRRGKLSSTLVILSLKMKPIENGNTVSINYQNSWLGFSLSPQMNIGVPSHLHQTQPSSAAVEAVPPNFYHHTPLHNYGLYYELEGEHVGMSSSLPIMPLKSNASLSGIEALSRSQAQA

SEQ ID NO: 165453 - protein, 61 aa, Glycine max
  unsure (1)..(61): unsure at all Xaa locations
  Clone ID: PAT_MRT3847_12041C.1.pep
IXALGNXQXPAXXFGQXXLAXPISXSRAFXHXQASQXTTFFPARTXTNSLISAXXIFQXXA

SEQ ID NO: 165454 - protein, 133 aa, Glycine max
  unsure (1)..(133): unsure at all Xaa locations
  Clone ID: PAT_MRT3847_120420C.1.pep
MTMASALNLSPNSTLLSNLNSITSPLSPSSPTNPSPNLQNSPSTPSTSPKKTRPRPLPPGYQFEKLPDDWRCPTCGAAQSFFQSKSVQTXIAGFAQNQQYGLGGNSLTSAQKTLFIYGXLFFFSLFLGGYFLQ

SEQ ID NO: 165455 - protein, 61 aa, Glycine max
  Clone ID: PAT_MRT3847_120421C.1.pep
LTEKRKWRKKVLGLKSLLSFGWAFPVGNNPDKNEKMKKRVFSEINQGDENSSSEEDRKIQT

SEQ ID NO: 165456 - protein, 102 aa, Glycine max
  Clone ID: PAT_MRT3847_120422C.1.pep
AFMNCASLWELFSDSHYTDQLRPSRRALGCQVTQPPYHSSLNDSNASCGLYQYVSCQGVRSRYIAMGNALGSPSQSPVMMAHGVGTRTGQLPMSTIYSTGQC

SEQ ID NO: 165457 - protein, 52 aa, Glycine max
  Clone ID: PAT_MRT3847_120423C.1.pep
LKDFPLLIKVTGSMNFFHPPDSLKPSFYKSSNKPKFPRNFKNSFSTILQHLL

SEQ ID NO: 165458 - protein, 110 aa, Glycine max
  unsure (1)..(110): unsure at all Xaa locations
  Clone ID: PAT_MRT3847_120424C.1.pep
PPPWEKLFFKDPQDPSPPNAVSSKPPGKENLIRQGSPLVGFFGAQWRVPLEGPKGESRPFKLPNPXKTFRSSFPPQQXKLGPFYLNVKKGVQKGAQASLYVVPPVGPQVM

SEQ ID NO: 165459 - protein, 110 aa, Glycine max
  Clone ID: PAT_MRT3847_120425C.1.pep
ARAGSLLNGALHWFVFSESREDHVIIAFDLVERTLSEIPLPLADRSTVHKDAAYGLRIMGGCLSVCCSSCGMTEIWVTKAYTVRSSRTMTFLMHTSNRISPYAQSKMVRL

SEQ ID NO: 165460 - protein, 79 aa, Glycine max
  unsure (1)..(79): unsure at all Xaa locations
  Clone ID: PAT_MRT3847_120426C.1.pep
KGKAGAXXRGDXNXKGTXTXEQENEXXPTXVWDXTGHDANAERGKHDHXXGDNTNGSTSAGPHDKPHNKTXGXPENDKR

SEQ ID NO: 165461 - protein, 222 aa, Glycine max
  unsure (1)..(222): unsure at all Xaa locations
  Clone ID: PAT_MRT3847_120427C.1.pep
EAIFASTASSFLFSSKIDLTYTQLIVNPVADTVVTDNPQPSDEYFINLTSIKINGKPLYINSSILTVDQTGFGGTKISTAEPYTVLETSIYRLFVQRFVNESSAFNLTVTEAVEPFGVCYPAGDLTETRVGPAVPTVDLVMHSEDVFWRIFGGNSMVRVAKGGVDVWCLGFVDGGTRGRTPIVIGGHQLEDNLMQFDLDSNRFGFTSTLLLQDXKCSNLKVN

SEQ ID NO: 165462 - protein, 67 aa, Glycine max
  Clone ID: PAT_MRT3847_120428C.1.pep
KTVRFKELCPFPAQGNCFFGLVVLNPLRPGSELTIALVLRPSPLQNHNPYLPDNTKYTRWWAWGTAL

SEQ ID NO: 165463 - protein, 105 aa, Glycine max
  Clone ID: PAT_MRT3847_120429C.1.pep
MKTTLSLSPLLLFLLFSLVQGLTPKCDTQDHGSTLEVFHEFSPCSPFRPSKPLSWAESVLQLQAKDPARLQFLASMVAGRSIVPIASGRAIIQSPTYIVRAQIGT

SEQ ID NO: 165464 - protein, 74 aa, Glycine max
  Clone ID: PAT_MRT3847_12042C.1.pep
SHNSARHHHCLPGPIPQTPCHHCAATPPPRPQHWRSNSILHLPNQLHHNNLNPPTQHPQIQTGELVTRREEPVT

SEQ ID NO: 165465 - protein, 48 aa, Glycine max
  Clone ID: PAT_MRT3847_120430C.1.pep
IVSQGWDNSVFFGQQMLQRQHFEASLCNGPPSHGVLIRVIMVPITLGE

SEQ ID NO: 165466 - protein, 331 aa, Glycine max
  Clone ID: PAT_MRT3847_120431C.1.pep
MQFGLRSPEVPDENTISRGSITIQFSFHLSALSMMEYENHRRVRTLSTGPFTLKMIMQINCPILAHICCVDKFKWPLTKDTVVLRVTTRTYVIALPGLLYALQFPRLCSRERLRILSNVFRKYGHFQDLRPQKLGGCSMQFDDPEMLEVLRPDFEPIAHETLLELGNIPGISRFCMEEQNSSFLRACRMSAMTKMIMESMRVKTMTSSLVEIKGTNPPEAHQGRAYAVMSTYTRLVDSAEYASLVSCGLVEELENVVSPLRFGSVDVGYQVWNLNHLGLLSFMSLLGPHVEEEVKYVSAREELWNAMAETEQEEEADEASDHDEDKGEETN

SEQ ID NO: 165467 - protein, 93 aa, Glycine max
  Clone ID: PAT_MRT3847_120432C.1.pep
VPIGPEMDSVRRNKHMFGNKLDDIQLSSLSYSTSSTPSNSGSMPDASNSDATNSSLLVDMSNSVSEPYDLTLIDLDVSSYPEEVPAADKAGGR

SEQ ID NO: 165468 - protein, 113 aa, Glycine max
  unsure (1)..(113): unsure at all Xaa locations
  Clone ID: PAT_MRT3847_120433C.1.pep
EYVLYNHSEXEEGTKKYRSRTSVPIGPEMDSVRNKHMXGDKLDDIQLSSLSSTSSTPSNSGSIPDASNSDATNSSLLVDMSNSVSEPYDLTFIDLDVSSYPEEVPAADKAGGR

SEQ ID NO: 165469 - protein, 48 aa, Glycine max
  Clone ID: PAT_MRT3847_120434C.1.pep
LKNITIRASSNRKGYFPTNHTTKINAFDVLKILNTFRYFPYKKVGKPV

SEQ ID NO: 165470 - protein, 64 aa, Glycine max
  Clone ID: PAT_MRT3847_120435C.1.pep
IIRNTAGFLKFNEGWMQRRLSWEIQVQSMRARKWEVKFCPSLIMLMNQILVPLSSHGQLLFLSH

SEQ ID NO: 165471 - protein, 212 aa, Glycine max
  Clone ID: PAT_MRT3847_120436C.1.pep
TSQTCHLNHSMHGGEPCSIWAEGFTQQRSNAKAIESLGRMLTEGIHTDITINASDGSIGAHRAVLAARSPVFRSMFSHNLQEKELSTINISDMSLESCQAFLNYLYGIIKHEEFLTHRLALLHAADKYDISDLRDVCHESLLEDIDTKNVLDRLQNASLYQLMKLKMSCIRYLVKFGKIYEIREDFNTFLQNADRDLIAEVFHEVLDAWKGF

SEQ ID NO: 165472 - protein, 300 aa, Glycine max
  Clone ID: PAT_MRT3847_120437C.1.pep
MSIAASASSHACISSIPTCIPSSSSKFSSSLTLSSPQRVGSNKRWGCRAMVQQAVQGAPAAYAKEMERLSAKESLLLAFKDAGGFEALVSGKTTEWQKIDVNERITGLERLNPTPRPTTSPFLEGRWNFEWFGSGSPGLFAARFIFEIFPSTLANLSKMDFVIKDGNAKITANMRLLNSIENKVILSTKLSVEGPLRMKEEYVEGVFVTPTIIEERVPEQLKGALGQAANALQQLPAPIRDPVASGLKVPLSGSFQRLFMISYLDEEILIIRNTAGIPEVLTRLDAAPSILGDSSPEYES

SEQ ID NO: 165473 - protein, 51 aa, Glycine max
  unsure (1)..(51): unsure at all Xaa locations
  Clone ID: PAT_MRT3847_120438C.1.pep
GLYNKAFHSWPIKLWFHXTYTNAQTKAVEINVIXSYEVKTVQRSEYSSRXM

SEQ ID NO: 165474 - protein, 544 aa, Glycine max
  Clone ID: PAT_MRT3847_120439C.1.pep
MGKQGPCYHCGVTSTPLWRNGPPEKPVLCNACGSRWRTKGTLANYTPLHARAENIDYEDQKVSRVKSISLNKNTEVKLVKRKQNYDNAASGGFVPDYSQGYQKVVDEDTSNRSSSGSAVSNSESCAQFGGPDASDLTGPAQSVVWDAMVPSKKRTCAGRPKPSSVEKLTRDLCTILHEQQSYFSASSEEDLLFESDTPMVSVEIGHGSILIRHPSSIARDEESEASSLSVDNKQCLMNEAYSFSSTIPMYSDRSGMNFSSHGVEKIKNSAGQIMQQEKLERDKSQLEKLQVHGNHDSPLCSIDLNDVVNYEEFMRNLTNEQQQQLLKYLPVVDTAKFPDSLRNMFNSFQFKENLIYFQQLLGEGVFNISLLGAKPEEWKTLERLALSNLSKSKWVEHYNFLKKCENKSGKSIGLGSTAMESSNVTTGKRMREHDSRNQNIPELKTTMRSPKRVIIKPPSCEVKEVVEEGSSFSPKSLFALPHGVGGLHMLDSFNFVGESSEDLLLEVPSNSSFPQAELLHPSLSYGARQVSTTSSSVHSPVTHP

SEQ ID NO: 165475 - protein, 69 aa, Glycine max
  Clone ID: PAT_MRT3847_12043C.1.pep
FLVQLYVTLCFGCGPQIMGHSFDCGLLSTSSSSSSLCILHPSEIHTFMNTTYASSDLHMTPTNLNTFRS

SEQ ID NO: 165476 - protein, 75 aa, Glycine max
  Clone ID: PAT_MRT3847_120440C.1.pep
SSKLLTFLFIPQVTNYSHSRSPLSYLTFFIKPHPESEPKANLAPSSIFTRAETADQETRATSPDSIAPKASRESY

SEQ ID NO: 165477 - protein, 112 aa, Glycine max
  unsure (1)..(112): unsure at all Xaa locations
  Clone ID: PAT_MRT3847_120441C.1.pep
MKKQEIYEEKKKRKIKEGWLSTMGMTIALSCLIFPLFLLTGHGGHYFPEVSCQSXWRLGGDSHXFIYWKTVPQDCQGYIWNYMLGEHSLSDSEIVNQHVDFYAGTLNITAQT

SEQ ID NO: 165478 - protein, 92 aa, Glycine max
  Clone ID: PAT_MRT3847_120442C.1.pep
SSSQPPPPLHFSLNDKSLYTWTFTPTLSTLFRETRWKFTKVSERALPNKLTNMLFKRLHKTCHLLRTLISPLCYAYRTRPTHIHLFHHGPFL

SEQ ID NO: 165479 - protein, 63 aa, Glycine max
  unsure (1)..(63): unsure at all Xaa locations
  Clone ID: PAT_MRT3847_120443C.1.pep
GPMQAKLHFGALCKGFHLYIDIFFIMIMNLWRCGQAFFYCXVWFTGVSSFIHPPSXXLXPAFK

SEQ ID NO: 165480 - protein, 377 aa, Glycine max
  unsure (1)..(377): unsure at all Xaa locations
  Clone ID: PAT_MRT3847_120444C.1.pep
MELLSLRLTPSPSTSTSSLPAALAHCSKLCEFQPRKKKKACFDAPRLAVRCVKASAERTGDTIDDGEARSGFTTPAMEVTTFNRSTFSDAADFPVWEKIGAVVRLSYGIGIYGAMAVAGSFICSITGIDSLGGFHLSLDAILEGLGYAAPPIMALLFILDDEVVKLSPHARAIRDVEDEELWSFFYGMSPWQFILMVAASSVGEELFYRAAVQGALADIFLRGSNLITDVQGMASLTGVLPPFVPFAQAFAAVLTAVLTGSLYYMAASPKDPTYVVAPVLQSRSGRQDLKKLFEAWYEKRQMKKIYSPLLEGLLALYLGFEWIQNGYVXTDNILAPIITHGIYSTVILGHGLWKINDHRRRLRQRIQQLKSEEKNSN

SEQ ID NO: 165481 - protein, 154 aa, Glycine max
  Clone ID: PAT_MRT3847_120445C.1.pep
MLHVPITSVAISEQRQILNLFFCFSFVLLVLNMELLSLRLTPSPSASTSSLPAALAHCSKLCEFQPRKKKKVCFDAPRLAVRCVKASAQRTGDTIDDGETRTGFTTPAMEVTTFNRTTFTDAADFPVWEKIGAVVRLSYGLGIYGAMAVAGSFI

SEQ ID NO: 165482 - protein, 51 aa, Glycine max
  Clone ID: PAT_MRT3847_120446C.1.pep
RYLKMQLHMLQVNEFPVEKTCKTLKNTVGRLRGKLSSLIQSILPMLSASVS

SEQ ID NO: 165483 - protein, 47 aa, Glycine max
  Clone ID: PAT_MRT3847_120447C.1.pep
HTVERCLTCVENMSEKMIDKRCLTHLYIILQRCWSFLDTNHLCIFNN

SEQ ID NO: 165484 - protein, 101 aa, Glycine max
  Clone ID: PAT_MRT3847_120448C.1.pep
KLVEFGIGGICNSCVDPANSAIVTTFGGIPLIIQCLSSPVRNTVNYALGALYYICNESNKEEILRPEVVDVIRRYAAAEEVSVSFSNLAKAFLSKHLAENY

SEQ ID NO: 165485 - protein, 123 aa, Glycine max
  Clone ID: PAT_MRT3847_120449C.1.pep
LWPPTLSSPDPACLPPTVITQPSLIGLASINTPAPATKQTWNFVTSSPSPNYSGPYSIQFTRTDGAKRSTVTVAAQFTLNLAVNSGYGNANNVLPTSLSFFGSDSDSFSGSTKTTFTSLDTIF

SEQ ID NO: 165486 - protein, 50 aa, Glycine max
  Clone ID: PAT_MRT3847_12044C.1.pep
TCWLTVQRSPLYPVCKMERISPQQRVLVSDMKAVFVFPNMNSLRGGPSRR

SEQ ID NO: 165487 - protein, 138 aa, Glycine max
  unsure (1)..(138): unsure at all Xaa locations
  Clone ID: PAT_MRT3847_120450C.1.pep
FVPWVEMQYAYLVNLANVLRELYLHSPEDARQPRRIALSRIEWLHKADAPTIAQIEELHSMQMMMHAADSNDNIDLLAXIDLLGLQGAGKAFPNTIVSDDKLAWAXTQDFCEGNFPEDSRLPIFENXLYPASHSPSEA

SEQ ID NO: 165488 - protein, 69 aa, Glycine max
  unsure (1)..(69): unsure at all Xaa locations
  Clone ID: PAT_MRT3847_120451C.1.pep
GHPDKLCDQISDAVLYACLXQDPYSKVACXTCTKTNLVIVFXEITTKANVDYYKIVRDTFMNIFFCLKP

SEQ ID NO: 165489 - protein, 101 aa, Glycine max
  unsure (1)..(101): unsure at all Xaa locations
  Clone ID: PAT_MRT3847_120452C.1.pep
MPFGLVSLSAWNKRRRSKSQDHTDPWVYKPAQLWQLEDQMPRPTKRLHGSSVYTLKEMEEATCSFSDENLLGXGGFGXVYRGTLRSGEVVAIKKMELPAIK

SEQ ID NO: 165490 - protein, 170 aa, Glycine max
  Clone ID: PAT_MRT3847_120453C.1.pep
SPHVPTITILVALLCISCLKLITMLPRNRLCISPHPCLITFTHTLLYAMRIIHVRCSRPRWILLPLHATVDYPIFWLFVAMSPSISHVSYQWRHLPSLSVALRFSLFPIPWCLRHLEPGVARTTALHVLCLVLSLVLSAYGPIPYITLITPPPPQRRRTSYSDDGKPSLE

SEQ ID NO: 165491 - protein, 94 aa, Glycine max
  unsure (1)..(94): unsure at all Xaa locations
  Clone ID: PAT_MRT3847_120454C.1.pep
MTLEVDEEEAFNRSLLVVRDESVYKIPPRNTXSGGYMCREWXPHTKIWAGPIRGWCRNILFXIRLKDPSSGEMFHPCLVXPGTRETTGEPLLNS

SEQ ID NO: 165492 - protein, 130 aa, Glycine max
  unsure (1)..(130): unsure at all Xaa locations
  Clone ID: PAT_MRT3847_120455C.1.pep
GYAKHYFRGSKSKSWLARHNMNITDGIDITSATLQSIKLADXDSLMRNSMHKLEASRVRADDKASXWTQLDAEXSNKLERQDAYVGNLVKGVRELPLLSAVDARHFSXKLSLKAYXLQLAEVPTIAHIEE

SEQ ID NO: 165493 - protein, 71 aa, Glycine max
  unsure (1)..(71): unsure at all Xaa locations
  Clone ID: PAT_MRT3847_120456C.1.pep
GSSETKLLHDLFLYTFSAILNCLGLFHXLIHSVSLFIIMAQTLSSILXIAYHLCRPLIQTNPYNDLITFDI

SEQ ID NO: 165494 - protein, 57 aa, Glycine max
  unsure (1)..(57): unsure at all Xaa locations
  Clone ID: PAT_MRT3847_120457C.1.pep
INGDKLITCCTLTINYTSKVSSTPIIGMLHSSMSEFLSKKYLIILKRSLVQXTIRSS

SEQ ID NO: 165495 - protein, 59 aa, Glycine max
  unsure (1)..(59): unsure at all Xaa locations
  Clone ID: PAT_MRT3847_120458C.1.pep
MQLTLTGLLNFIDGLWSSCXTXRIIIFITNHNERLDPLLFDAXLMDMHIHMFYCFYQGF

SEQ ID NO: 165496 - protein, 100 aa, Glycine max
  unsure (1)..(100): unsure at all Xaa locations
  Clone ID: PAT_MRT3847_120459C.1.pep
TPNPKPXPEGGSKEPGKRTGPHSDTRRATGWTATPKQDDQATTDRPRNPHEGRPRTKSAQNPQNPKGQNRRTGKPTPPQGTTRRAXRTPPPKGGGAGAKN

SEQ ID NO: 165497 - protein, 31 aa, Glycine max
  Clone ID: PAT_MRT3847_12045C.1.pep
SKKTSVLITQDHFVIDWLSSLSVSFKIPNAR

SEQ ID NO: 165498 - protein, 170 aa, Glycine max
  Clone ID: PAT_MRT3847_120460C.1.pep
TRPPTRPNAMASQNLDFAPSRRRVRAAFTEVHQQLDHFLFKTAPPGIRTEEGYERNSRGLEIFCKSWMPESGVPLKAALCFCHGYGSTCTFFFEGIAKRIAASGYGVYAMDYPGFGLSEGLHGYIPNFDDLVDDVIEHFTKIKARPEVRGLPRFILGQSMGGAIALKAHL

SEQ ID NO: 165499 - protein, 130 aa, Glycine max
  Clone ID: PAT_MRT3847_120461C.1.pep
IILHEMGWFTKLLKGSDHKILRGQYHGKYGEDRIWDNHHSSMDDLTDIEKEDIDRAIALSLSEEDHKGKKVVDEELCKIDDDEEDEHLVKVHLDEDERLAKIQQEEEERLAKIQQEDEHLAKIQQEEEDV

SEQ ID NO: 165500 - protein, 164 aa, Glycine max
  unsure (1)..(164): unsure at all Xaa locations
  Clone ID: PAT_MRT3847_120462C.1.pep
LVPSTLARPSTHLEAPFKEDLDRFPAXYLYQHCMETNGXTITSDGSFDAFTTXGPILCGEPCSNAQHSFFQRVHQCTKRIRNDFILPYKSHNPVSDNLHHRMLGSGYYDQDEALMGGKTDDHARAKGTCDELDDHKRYRGNRPTTYILGRGAIGPAELGAQIVY

SEQ ID NO: 165501 - protein, 400 aa, Glycine max
  Clone ID: PAT_MRT3847_120463C.1.pep
SSDVVTAGKHGKRTLVKILAASSAALALLLVVVTVVFFTRKNVVTRRRERRQFGALLATVNKSKLNMPYEVLEKATNYFNEANKLGQGGSGSVYKGVMPDGNTVAIKRLSYNTTQWAEHFFTEVNLISGIHHKNLVKLLGCSITGPESLLVYEYVPNQSLHDHFSVRRTSQPLTWEMRQKIILGIAEGMAYLHEESHVRIIHRDIKLSNILLEEDFTPKIADFGLARLFPEDKSHISTAIAGTLGYMAPEYIVRGKLTEKADVYSFGVLVIEIVSGKKISSYIMNSSSLLQTVWSLYGSNRLYEVVDPTLEGAFPAEEACQLLQIGLLCAQASAELRPSMSVVVKMVNNNHEIPQPAQPPFINSSSSEFSKSGLPGYNFQPGSNTQSSGNTISESQIEPR

SEQ ID NO: 165502 - protein, 154 aa, Glycine max
  unsure (1)..(154): unsure at all Xaa locations
  Clone ID: PAT_MRT3847_120464C.1.pep
MGKTHGMGSARKLKSHRRRQRWADKSYKKSHLGNEWKKPFAGSSHAKGIVLEKIGIEAKQPNSAIRKCARVQLIKNGKKIAAXFVPNDGCLNYIEENDXEVLIAGFGRKGHAVGDIPGVRFKVVGFSGVSLSGFSFKEKKEKPIGHLSCVPCSL

SEQ ID NO: 165503 - protein, 120 aa, Glycine max
  Clone ID: PAT_MRT3847_120465C.1.pep
APEYIVRGKLTEKADVYSFGVLVIEIVSGKKISSYIMNSSSLLQTVWSLYGSNRLYEVVDPTLEGAFPAEEACQLLQIGLLCAQASAELRPSMSVVVKMVNNNHEIPQPAQPPFINSSSS

SEQ ID NO: 165504 - protein, 75 aa, Glycine max
  Clone ID: PAT_MRT3847_120466C.1.pep
IILHEMGWFTKLLKGSDYKILRGQYHGKYGEDRIWDNHHSSMDDLTDIEKEDIDRAIALSLSEEDHKGKKVVGKI

SEQ ID NO: 165505 - protein, 211 aa, Glycine max
  unsure (1)..(211): unsure at all Xaa locations
  Clone ID: PAT_MRT3847_120467C.1.pep
AYSNLVVGLNDTMENLLAAVDRNEAEISPSTLYAIACVMENVPFINGSPQNTFVPGLIDLAIARNTLIGGDDFKSGQTKMKSVLVDFLVGAGIKPTSIVSYNHLXNNDGMNLSAPQTFLSKEISKSNIINNIVNINTILYKPNEHPNHIIIIKYIPYIRDSKKTIDNYTSEIFIDRKNTIILHNTYKDSLLSTPIILDLMLLTDLITRIQV

SEQ ID NO: 165506 - protein, 250 aa, Glycine max
  unsure (1)..(250): unsure at all Xaa locations
  Clone ID: PAT_MRT3847_120468C.1.pep
MGWFTKLLKGSDHKILRGQYHGKYGEDRIWDNHHSSMDDLTDIEKEDIDRAIALSLSEEDHKGKKVVDEELCKIDDDEEDEHLVKVHLDEDERLAKIQQEEEERLAKIQQEDEHLAKIQQEEEERLAKIQQEDECLAKIQQEDERLAKAQLEEDEQLARAIQESLKIGSPPQYDNGSSILSFPHLFPPGYRICAGCKTEIGQGRFLSCMGGVWHPECFCCHACHLPITDYEFCMCRNGTYHXWCCGEKGG

SEQ ID NO: 165507 - protein, 553 aa, Glycine max
  unsure (1)..(553): unsure at all Xaa locations
  Clone ID: PAT_MRT3847_120469C.1.pep
MGWFTKLLKGSDYKILRGQYHGKYGEDRIWDNHHSSMDDLTDIEKEDIDRAIALSLSEEDHKGKKVVDYDSQSEDEELCKIDDEEDEHLVKVHLEEEERLAKIQQEEEERLAKIQQERFSTRRXCLAKIQQEDERLAKAQLEEDEQLARAIQESLKIGSPPQYDNGSSILSFPHLFPPGYRICAGCKTEIGQGRFLSCMGGVWHPECFCCHACHLPITDYEFSMSSNRPYHKSCYREKHHPRCDVCKNFIPTNSSGLIEYRAHPFWLQKYCPSHELDGTSRCCSCERMEPRDTKYLLLDDGRKLCLECLDSSIMDTHECQPLYLEIQEFYEGLNMKLEQQIPMLLVERQALNEAMEGEKNGHHHLPETRGLCLSEEQTVTTISRRPRIAAGYRAIDMITEPYRLIRCCEVTAILVLYGLPRLLTGSILAHEMMHAWLRLKGYPNLSPEVEEGICQVLAHMWLESELYSGFGNDGASSSTSSLSSSSPSSSSVSTKKGKRSDFEKKLGDFFKHQIESDTSSAYGDGFRLGNQAMVKYGLKRTLDHIHMTGSFPY

SEQ ID NO: 165508 - protein, 190 aa, Glycine max
  Clone ID: PAT_MRT3847_12046C.1.pep
MGVYAKTSLRSFVEVVKNGKGGVLPCELNGLSVVSVEKEIGEFLREGGRGEKIFEHVSRLVEQCGAGVVVCFGEIEVFVGGNNEEGDVGFVVSQLTRLLGIHGGKVWLLGVAGTSEAYSKFLRLFPTVDKDWDLHLLTMTSATPSMEGLYPKSRWVAGWVCFFSFFFIAFCSLQNWKLLCTIYLVYFGRG

SEQ ID NO: 165509 - protein, 145 aa, Glycine max
  Clone ID: PAT_MRT3847_120470C.1.pep
AHDWNGDCALYSHHSGQLIVLPHNVALPVSLKVLEHEVYAVAPIKKVLGGGYSFAPLGLVNMFNAGAAVEGLVFEEDGLVRLEIKGCGKFGAYSSARPTKCLLGNHELLDFDYDADSGLLTFNIDHLPQEGHWVHLVELVYSLSC

SEQ ID NO: 165510 - protein, 66 aa, Glycine max
  Clone ID: PAT_MRT3847_120471C.1.pep
SQCVRYFIYLGYNLHIGLSWGSKNSISEFNYEDWFEYKGPKYTIQNYVLSPKGFFLPYSCRPSLPM

SEQ ID NO: 165511 - protein, 33 aa, Glycine max
  Clone ID: PAT_MRT3847_120472C.1.pep
RAPRRSSYTIPFLNSFSSFFAHEATFNFTYFNS

SEQ ID NO: 165512 - protein, 142 aa, Glycine max
  Clone ID: PAT_MRT3847_120473C.1.pep
MGKTHGMGAARKLKSHRRRQRWADKSYKKSHLGNEWKKPFAGSSHAKGIVLEKIGIEAKQPNSAIRKCARVQLIKNGKKIAAFVPNDGCLNYIEENDEVLIAGFGRKGHAVGDIPGVRFKVVKVSGVSLLALFKEKKEKPRS

SEQ ID NO: 165513 - protein, 181 aa, Glycine max
  Clone ID: PAT_MRT3847_120474C.1.pep
MATVEVVSAKVSLPEDTKEASLKADEKKNTEEVVETPTPTPENVVTEQTKEESTEAPQPAASEDKPSVEVVSGTVTEEPTVEKTEEETLKQEAPEETKENDDPTEVKTPEAAEAVTETQKETEAEAKEEANTEAPAEKSEEEKEGPAEKKDEEVIAEAEAEAEKSEEVTVTDTEAPTEKTE

SEQ ID NO: 165514 - protein, 70 aa, Glycine max
  Clone ID: PAT_MRT3847_120475C.1.pep
LKGGGKFLNGRSLLNKGGMPNFLFWIKPTNKGKKTQIPNHAEDSPFSKKLAVAWGTKKAGIRVFPAFSKF

SEQ ID NO: 165515 - protein, 286 aa, Glycine max
  Clone ID: PAT_MRT3847_120476C.1.pep
MVNKRMATTGKKEGNNLLGLPNFTELGNGRFKCLETGHEVLSKDIASYSHSKKCRLGLIDFALSNNKPPLNMFKQHPLCRSKLICKLTGDNVNKSEEHIWKHMSGKRFLNKLEQEEEEKLLCHGLEGEESLHESKSADGGKKDRMKKKKKKKNRVKEIDEEKLQVSKSADGAKKDRMKKENNKDKGIEEVISEVRKSSNENSDTEDEDFWMPPAGDRWDNDDGGDRWGSESESEQGTEEGDVIDGDAAEDCKESDELSSRTKRMSIEIGPSSFATRKKKSKKNHQT

SEQ ID NO: 165516 - protein, 31 aa, Glycine max
  Clone ID: PAT_MRT3847_120477C.1.pep
VDKGLEPLVGCNDESWCQGLNGIAGRSPAYY

SEQ ID NO: 165517 - protein, 77 aa, Glycine max
  Clone ID: PAT_MRT3847_120478C.1.pep
SPLILLKPKTTAHLWQPPTVQIRRTPPWETALTRIFPTLKIGALTKLKTTSPIHLSVNVKVIWQTANSTQAARDQNP

SEQ ID NO: 165518 - protein, 52 aa, Glycine max
  unsure (1)..(52): unsure at all Xaa locations
  Clone ID: PAT_MRT3847_120479C.1.pep
SXQHQHFKXDXXXQXLELXXXIPTLIVHWXXXQRLWWRSGXXQQRXVSFDRX

SEQ ID NO: 165519 - protein, 89 aa, Glycine max
  Clone ID: PAT_MRT3847_12047C.1.pep
FGKNIFLPFKIQFSFEKPSFLGIIDEYASAYDKALSRSYGLFNPAIIFAGTRFFSLFPEGWAFFFYKRASNGSWGVGAFFQSLVEAPVF

SEQ ID NO: 165520 - protein, 55 aa, Glycine max
  Clone ID: PAT_MRT3847_120480C.1.pep
LQFKYFSNFLRKLKIAITYIIIKSYQLFKTCYCILLKTFKLYYTTFTIYLINIKI

SEQ ID NO: 165521 - protein, 52 aa, Glycine max
  Clone ID: PAT_MRT3847_120481C.1.pep
NMIRFWVKSYTKPVHAILEIPFKVHPYDPAHNSVLSQVKYLFNTEPVAFGSR

SEQ ID NO: 165522 - protein, 60 aa, Glycine max
  Clone ID: PAT_MRT3847_120482C.1.pep
IKFKSADRWPFTFSKICTNLDLPKKTHLLQHNCESSFTKHERGFAFAIPYYPLVLDTQEP

SEQ ID NO: 165523 - protein, 141 aa, Glycine max
  Clone ID: PAT_MRT3847_120483C.1.pep
HKKKYPTENVQVTEITKKCSEKWKTMSDDEKRRFYELAQKDAERYQAEVAAYGGDDVTKKRKITKKDPNAPKRALSAFFFFSNEERPEVQRQHPEWKVGQVAQELGKFWKNLPDEEKAIYENKATEDQERYAQEMKTYRGE

SEQ ID NO: 165524 - protein, 76 aa, Glycine max
  unsure (1)..(76): unsure at all Xaa locations
  Clone ID: PAT_MRT3847_120484C.1.pep
SRPASAQTSLHGFWYNPYTLRVVWTXKLNDRPXHYIEEHRKNRSLQLLAYNPFIEQXPVPVHMGKPXCESMLTVGY

SEQ ID NO: 165525 - protein, 145 aa, Glycine max
  Clone ID: PAT_MRT3847_120485C.1.pep
VIDDKILCMHGGLSPDMESLNQIKAIERPVDVPDQGLLCDLLWADPDNEISGWGENDRGVSYTFGPDKVSEFLKKHDLDLICRAHQVVEDGYQFFADRQLVTIFSAPNYCGEFNNAGALMCVDQTLLCSFQIVKPFGTFRGKLTS

SEQ ID NO: 165526 - protein, 84 aa, Glycine max
  Clone ID: PAT_MRT3847_120486C.1.pep
LAQRRSQRHPNTTWEPFLLSFLCRFKLQYRVIFPISEEEMQVKSPPRQTLPPPHLTPPTAHCCHQFSSCYILRCEILVLFLYFC

SEQ ID NO: 165527 - protein, 59 aa, Glycine max
  Clone ID: PAT_MRT3847_120487C.1.pep
FYHCLKYYFDLGPAFTSFDKFIFLILSLLHFDLFFYALLQYFHLCFFIVTSIRYCIWYS

SEQ ID NO: 165528 - protein, 63 aa, Glycine max
  Clone ID: PAT_MRT3847_120488C.1.pep
EIIASKKKKKKKKKKKKKKKKKKKKKKKKKKKKKKKKKKKKNKNGKKKKIKNKKNKKNRGGGF

SEQ ID NO: 165529 - protein, 65 aa, Glycine max
  Clone ID: PAT_MRT3847_120489C.1.pep
RNINPKEINKTSKLCMRYQWLDLYPRYGICICYTSIINLLTVQLHNPQQEALHMDSVSHRLTYFS

SEQ ID NO: 165530 - protein, 36 aa, Glycine max
  Clone ID: PAT_MRT3847_12048C.1.pep
HSLATATNLAGLHHGAWHLYLAWWSSWSSLYQRFQS

SEQ ID NO: 165531 - protein, 122 aa, Glycine max
  Clone ID: PAT_MRT3847_120490C.1.pep
HFIKGCNMKGDGSVGSIREVTVVSGLPASTSTERLEILDDDKHVLSFRVVGGEHRLQNYRSVTSVNEFHKEGKVYTIVLESYIVDIPEGNTEEDTKMFVDTVVKLNLQKLGVVAMASSMNGR

SEQ ID NO: 165532 - protein, 94 aa, Glycine max
  Clone ID: PAT_MRT3847_120491C.1.pep
STESRGLILSKKKKKKKKKKKKKKKKPTKKKRHPPIKELGGPRLKGLVHPGNISRPPPGGAPLFPIGRGVKTWGNIRITAFPGERGIRAQFPTP

SEQ ID NO: 165533 - protein, 487 aa, Glycine max
  Clone ID: PAT_MRT3847_120492C.1.pep
MCSFEDPLDENPPALISLGGNAKLSGYNDRIPCSLLSKSRDNVPVVSRDDDENSYGCTHPINTKTKSFRLKTGIGDNRISKRLASNFQKVAEKTKDHTHSNNDGDWKRTYCSKRNCNKHQSSQMNIPFKKRKLFNYRSVSNSNGLIRSGGIYYSPENCMNQDGCGSPPGMHKDPGMPSLEACQHQTLRSRGSHVNLRIKSFRVPELFIEVPETATIGSLKRTVMDAVTAVLGGELHIGVFLQGKKVKDDSKTLLQTGISHQNELDALGFTLEPNSSQSLPIVCAAHSPGPKADITQPVIRYPSSPAVIHQRIQGNSDMLPEHQVTSLGSHFENDHDSAPSPVNASVEKGMKDSKELVTVPEMDEELAMVPVHQKSKRSEIVQRRIRRPFSVDEVEALVQAVEKLGTGRWRDVKVCAFDNAKHRTYVDLKDKWKTLVHTARISPQQRRGEPVPQELLDRVLVAHAYWSHQQTKPQHKHHPETETVFSF

SEQ ID NO: 165534 - protein, 684 aa, Glycine max
  Clone ID: PAT_MRT3847_120493C.1.pep
MVLQKRLEYGFNGYQAPAMPRASRSTRRRAKFRRAEDNQKCAFDLLATVAGKLLQERENPTMSSDTSLEKDQCGFVKECQDANKPSKSEISDEGSCDNSGFSRLSSQTNKKNCGLKEFTHLAIDGDVGIASIVTSSSCLERFIAEKMVDSNSHFKVENVTSKVNLDFSDYPKDSDFKLDGDTSKGKDELHKFEKVPIGSGIDMCNFEDPLDVNPPALISLGGNAKLSGYNDRIPCSLLSKSRDNVPVVSRDDDENSSGCTHPINTETKSFRPKTCIGKRMASNFQKVAEKTKNYALSNNDGDWKRTYLSKRNCNKHQSSQMNIPFKKRKLFNYRSVANSNGLIRRGGIYYSPENCMNQDGCDSPPGMHKDPGMSSLEACQHQTLRSIGSHVNLRIKSFRVPELFIEVPETATIGSLKRTVMDAVTAVLGGELHIGVFLQGKQVKDDSKTLLQTGISHHNELDALGFTLEPNSSQSLPIVCASHSPRPKADITEPVIRYPSSPAVIHQRIQGNSDMLPEHQVTSLGRHFESDHDSAPSPVNASVDKNMKDSKELVTVPEMDEELAMVPVHQKPKRSEIVQRRIRRPFSVDEVEALVQAVEKLGTGRWRDVKLCAFDNAKHRTYVDLKDKWKTLVHTARISPQQRRGEPVPQELLDRVLVAHAYWSQQQTKSQHKHHPETETVFSF

SEQ ID NO: 165535 - protein, 143 aa, Glycine max
  unsure (1)..(143): unsure at all Xaa locations
  Clone ID: PAT_MRT3847_120494C.1.pep
MGXIVVGFXFHXSIGXCDSENXGXXQWGFNEXCNRLLPTMRXDTLMGXSGSGRYSHGETIEGIVXXLXRSPIHPRIIHXIKXXHALXGEXRGXXEXNTFFIXTILKHLKIKECVSESNTNPGYINGEGRGXILPYHEFNNSPH

SEQ ID NO: 165536 - protein, 147 aa, Glycine max
  unsure (1)..(147): unsure at all Xaa locations
  Clone ID: PAT_MRT3847_120495C.1.pep
MVLQKRLEYGFNGYQTPAMLXASRSTRRRAKFQRAEDKQKCAFELLATVAGKLLQERENPTMSSDTSSEKDQSGFVKECQDANKHCKSVISDEGRCDTGSSVVYQSNEPSALWFDIIQDVAIDGALKTMLLNASRRNRFKPRRGNCL

SEQ ID NO: 165537 - protein, 71 aa, Glycine max
  Clone ID: PAT_MRT3847_120496C.1.pep
ERRLLSRNQGREDDNIETIRKRFKVFLESSLPVINYYDAKGKVRKIDAARPIEEVFETVKGIFGPKNEKAD

SEQ ID NO: 165538 - protein, 43 aa, Glycine max
  unsure (1)..(43): unsure at all Xaa locations
  Clone ID: PAT_MRT3847_120497C.1.pep
XSTFLXHPLHKLTQXISXLXQHXTSXSNAVKFVPXSKGLXXXF

SEQ ID NO: 165539 - protein, 208 aa, Glycine max
  unsure (1)..(208): unsure at all Xaa locations
  Clone ID: PAT_MRT3847_120498C.1.pep
MGTVEAANKDANGSLLEKNPTVVFVLGGPGSGKGTQCANIVENFGYTHLSAGDLLRAEIKSGSENGTMIQNMIKEGKIVPSEVTIKLLQKAMQEXSGNDKFLIDGFPRNKENRAAFEKVTGIEPAFVLFFDCPKKKMERRLLSRNQGREDDNIETIRKRFKVFLESSLPVINYYDAKGKVRKIDAARPIEEVFETVKAIFGPKNDKAD

SEQ ID NO: 165540 - protein, 172 aa, Glycine max
  Clone ID: PAT_MRT3847_120499C.1.pep
AREAAMAVQGKMVDSQRKKSKASLRKLEKQPEWLKGGELRDYQLEGLNFLVNSWRNDTNVILADEMGLGKTVQSVSMLGFLQNAQQIHGPFLVVVPLSTLSNWAKEFRKWLPDMNIIIYVGTRASREVCQQYEFYNEKKPGKPIKFNALLTTYEVVLKDKAVLSKIKWNYLM

SEQ ID NO: 165541 - protein, 117 aa, Glycine max
  Clone ID: PAT_MRT3847_12049C.1.pep
FFFFFFFFFFFFFFFFFFFFFFFFFFFFFFFFQKKKKDFFSRFKKNFPANQPRGTHCLFFFPKVFGPPLKSPGKIPKNPGFPVFCQKKKTPNLVGPPFFPLPPFQKGGGPKTLAPLV

SEQ ID NO: 165542 - protein, 202 aa, Glycine max
  Clone ID: PAT_MRT3847_1204C.1.pep
MDRIQPGLDDSERDLQATRHARLSKHGHEKALSVQEDATEAVVLKQKSTRRKHSKSRSTQDDASNEDAEVVRKPRSRRRDEQKRGLQILFDDERHKNDEEERVIDRLLIHYSKKPSINYRSRLVHQMDNSTRDGPDETPEMVTRPPRSVSLPREQTEAVEVKKVYARAASFQPERLNEARHVHPKLPDCDDLAARIAALRGT

SEQ ID NO: 165543 - protein, 87 aa, Glycine max
  unsure (1)..(87): unsure at all Xaa locations
  Clone ID: PAT_MRT3847_120500C.1.pep
TDKASVLRAAIDYLKQLQERVQELEKQDKKRSXESVIFNKKPDPNWNNNEDTTTFTETNLSILSENEVRMVGEGGAHGDHCEKGDGX

SEQ ID NO: 165544 - protein, 79 aa, Glycine max
  Clone ID: PAT_MRT3847_120501C.1.pep
VPNNNFGVNYFQGSRLCHKCLYSFGFGCKNRPHVDVDKPNCPKVRDIVIYSDWHSGKTRSRFDGHHTLNTRFKVNVNRL

SEQ ID NO: 165545 - protein, 46 aa, Glycine max
  Clone ID: PAT_MRT3847_120502C.1.pep
LDDSTYSWPGKATKPWNRGFLKTPEKGCPRYDIKSLNMFSSAWSLQ

SEQ ID NO: 165546 - protein, 63 aa, Glycine max
  Clone ID: PAT_MRT3847_120503C.1.pep
QWGKIFQTGVLFLASGPHSSKYPFLFIGSTLLLLNKALNNKSKLYLPGRLFKSSKTYFGLHYC

SEQ ID NO: 165547 - protein, 77 aa, Glycine max
  Clone ID: PAT_MRT3847_120504C.1.pep
RRFSLEKNGGPPIYFSKRGKQMKGPLLGGFKKNIVLGGGINVLKSKKTGARAPTQKKEPRVFFCPKAPKKSKKANFF

SEQ ID NO: 165548 - protein, 108 aa, Glycine max
  unsure (1)..(108): unsure at all Xaa locations
  Clone ID: PAT_MRT3847_120505C.1.pep
GRLTXPWSXXXTDXMHEXXQXYXXXHXXVQXXXXKSXXXSXMXESLQLXAXSFXASXVAXXRXXLRTGDRXLPLXXXVXAQXHLXXIXLSIHQHXXSSRIPSXRTRAC

SEQ ID NO: 165549 - protein, 472 aa, Glycine max
  Clone ID: PAT_MRT3847_120506C.1.pep
MNLANWLITLAGHVLFVQPGLKGPLTPTHPFIVLMLAMSSSFSIHFFLLLSIALFSVCCLAASQAPTTKSHPYILPIKKDPATNLYYTSVGIGTPRHNFDLVIDLSGENLWYDCDTHYNSSSYRPIACGSKQCPEIGCVGCNGPFKPGCTNNTCPANVINQLAKFIYSGGLGEDFIFIRQNKVSGLLSSCIDTDAFPSFSDDELPLFGLPNNTKGIIGLSKSQLALPIQLASANKVPSKFSLCLPSLNNQGFTNLLVRAGEEHPQGISKFLKTTPLIVNNVSTGAISVEGVPSKEYFIDVKAVQIDGNVVNLKPSLLAIDNKGNGGTKLSTMSPFTELQTTVYKTFIRDFIKKASDRRLKRVASVAPFEACYDSTSIRNSSTGLVVPTIDLVLRGGVQWTIYGANSMVMAKKNVACLAIVDGGTEPRMSFVKASIVIGGYQLEDNLLEFDVASSKLSFSSSLLLHNATCSRT

SEQ ID NO: 165550 - protein, 61 aa, Glycine max
  Clone ID: PAT_MRT3847_120507C.1.pep
VRNHSMIINPAITVFGTKRAQVTAALSSIGPYIIPPDIIKVSLVNNLYVLDVHAPQILYLV

SEQ ID NO: 165551 - protein, 62 aa, Glycine max
  Clone ID: PAT_MRT3847_120508C.1.pep
HILSLYVFNIVYLRDCKPLFFLLALYTPFFAFLSYPAFIIGLFYIGHFFFVTQDTYVIGDSI

SEQ ID NO: 165552 - protein, 164 aa, Glycine max; identical to SEQ ID NO: 147611
  Clone ID: PAT_MRT3847_120509C.1.pep

SEQ ID NO: 165553 - protein, 109 aa, Glycine max
  unsure (1)..(109): unsure at all Xaa locations
  Clone ID: PAT_MRT3847_12050C.1.pep
GRVIRAHCKGAGSLFNYNTHHRKGPARFLILDFGNLNFYLKGVVTDIIHYPGRGAPHXKVAIRHPFHYKKQTELFVDDKGLYTGQFVYCGMNATLMVGYVLPIQSIRKG

SEQ ID NO: 165554 - protein, 46 aa, Glycine max
  Clone ID: PAT_MRT3847_120510C.1.pep
SPIASYESKTKFHSQDVVADRESNTYRLYSIMGQRNSPWVKLDSIN

SEQ ID NO: 165555 - protein, 164 aa, Glycine max; identical to SEQ ID NO: 147611
  Clone ID: PAT_MRT3847_120511C.1.pep

SEQ ID NO: 165556 - protein, 289 aa, Glycine max
  unsure (1)..(289): unsure at all Xaa locations
  Clone ID: PAT_MRT3847_120512C.1.pep
SGKTTLLLALSGKLDKTLKVSGRVTYNGHELNEFVPQRTAAYISQHDLHIGEMTVRETLAFSARCQGVGSRYXTATEGQESNIVTDYTLKILGLDICADTMVGDEMLRGISGGQRKRVTTGEMLVGPAXALFMDEISTGLDSSTTFQIVSSLRHYVHILNGTAVISLLQPAPETYDLFDDIILISDGQVVYHGPREYVLDFFESMGFRCPERKGVADFLQEVTSKKDQAQYWVRRDQPYRFVTVTQFAEAFQSFHIGGKLGEELTVPFDRTKSHPAALTTKKYGINKKE

SEQ ID NO: 165557 - protein, 97 aa, Glycine max
  Clone ID: PAT_MRT3847_120513C.1.pep
AISYPLNSSSSNSSSSSSSLDQRSGGILVWATTAMAWIRFHKTETTPTGASACGIEQPPLLPHPSPIKSPLWTALEVSLPRWPSLSFHRDSPFAFAT

SEQ ID NO: 165558 - protein, 60 aa, Glycine max
  Clone ID: PAT_MRT3847_120514C.1.pep
LYYFLLLEMFPKKLTQTGPKLGFDKFLNNHLLQVKIFLYINLCIGLNQPLGKLSERASGK

SEQ ID NO: 165559 - protein, 90 aa, Glycine max
  unsure (1)..(90): unsure at all Xaa locations
  Clone ID: PAT_MRT3847_120515C.1.pep
XFXGQKSSXNGVRQXSXXXXXTXRXIKSXSRXVRGKNRLPCQDSVDXSGQDKYXTPXYRFXXRXSXKXIVXQIISAKHCRXFSSCYSIFT

SEQ ID NO: 165560 - protein, 117 aa, Glycine max
  unsure (1)..(117): unsure at all Xaa locations
  Clone ID: PAT_MRT3847_120516C.1.pep
VTFHHEDETIDVGTVKKIKSREIQVLPAEIDXKSIRGDEVLFRDGKSRPFDSIVFCTRFKRSTQKWLQGVXSSKYNENGFPKSSFPNHWKGRNGLYCVGLSRRGFFGANMDAQLSSK

SEQ ID NO: 165561 - protein, 103 aa, Glycine max
  Clone ID: PAT_MRT3847_120517C.1.pep
LLVAGWVPMKIILSITCALMVTCLGSAHCYHCLIQKMCLRSKILMTQVGIEFSNEIWLNTLMVYSRRVKFCSATAEMFHYDSKPLYSIMLLHVAVSTQAGIFH

SEQ ID NO: 165562 - protein, 88 aa, Glycine max
  unsure (1)..(88): unsure at all Xaa locations
  Clone ID: PAT_MRT3847_120518C.1.pep
GXGXMQIFVKXLTGKTINLEVXSPDXIDNVKAKXQDKEGIPPDQXQRLIFAXKXXEDGVXLXELQHPEXSXSLQLVLXLXGXIAXLXQ

SEQ ID NO: 165563 - protein, 78 aa, Glycine max
  unsure (1)..(78): unsure at all Xaa locations
  Clone ID: PAT_MRT3847_120519C.1.pep
YCCGGNCVCXISCKCGISFXCCKMCPDLIYTDSTTTETLVMGVVPCNAQFXGAEMGVPAKNDGCKCGPNCSCNPCTCK

SEQ ID NO: 165564 - protein, 56 aa, Glycine max
  Clone ID: PAT_MRT3847_12051C.1.pep
IARSEWHEFSLISSHLQLPVCRLVQTVTICGRLATVTISSLLSAVTFGRLLSDGTI

SEQ ID NO: 165565 - protein, 152 aa, Glycine max
  unsure (1)..(152): unsure at all Xaa locations
  Clone ID: PAT_MRT3847_120520C.1.pep
NILLSTSEPEYEGYPDQLCDQIYEALLYSCLQQDPDSKEGXETCTXTNIVIIFRKIFTQRPTGTISSIAPDXCRQYGFISADVRLDTDKCKVXGNTEQQSRDHRHCEHSLLTNRPQEVCADDHSHMYGSGTDDTPEYMRFRHVLASMLGAGL

SEQ ID NO: 165566 - protein, 119 aa, Glycine max
  Clone ID: PAT_MRT3847_120521C.1.pep
MKENVPKTMENFDILGVCLLFLSLITMSSTLDMVTTIQPIRDGKNENETLVSTNGTFEAGFFSPENFDSRYLGIWYTNIFPRTVVWVANKEKPLKDHSGVLEVDTDQGILSIKDGTGAK

SEQ ID NO: 165567 - protein, 93 aa, Glycine max
  unsure (1)..(93): unsure at all Xaa locations
  Clone ID: PAT_MRT3847_120522C.1.pep
HSHKXPTQAAAATRTHPHDRKETGREGTAQRNAKTNQAEKNAPPFFFXRGFDFIDRIKSLVENERPGAVSCVDPPPPPATDXIGATGGHYWKV

SEQ ID NO: 165568 - protein, 78 aa, Glycine max
  Clone ID: PAT_MRT3847_120523C.1.pep
YARLPLNPTEILGMRRLSPNNAYLTFQYGVSPSSLSDRRYATIRSTSTLRRCHFTYTPGLTFPHFPPHIIYFSLLGQF

SEQ ID NO: 165569 - protein, 130 aa, Glycine max
  Clone ID: PAT_MRT3847_120524C.1.pep
RPRVRPRVRGFLGAATYHTKPENAVRSISVAPFRGGRPIQVATYPNTMEQIEPDMKSRVQLRRTTTNGDYVEGEDMATDKVKVARADVGSTKSYTPTPLMETGKQKDRGTKVEDPGWHGDPWAKRYARGQ

SEQ ID NO: 165570 - protein, 86 aa, Glycine max
  Clone ID: PAT_MRT3847_120525C.1.pep
MESDEPADPKQPVTPRACLQCRKVKMKCLKATQGTKCARCSRKSLQCDFLEHRRGRKKGFKLNRTASKAGLSTQIYPSSGLQMLAM

SEQ ID NO: 165571 - protein, 57 aa, Glycine max
  Clone ID: PAT_MRT3847_120526C.1.pep
GRRIKWHFNPILTRFWVSLLPTKHQNFSNQTLPKKDMYKRATCPCVTKNVCLKFGGI

SEQ ID NO: 165572 - protein, 39 aa, Glycine max
  Clone ID: PAT_MRT3847_120527C.1.pep
KIEIYPHYKEGEDCLSKGKKICVENNNGYPLTPGTFFFF

SEQ ID NO: 165573 - protein, 54 aa, Glycine max
  Clone ID: PAT_MRT3847_120528C.1.pep
NPAVLDGLGADLEEKEKVEGEELQKWLRLVVAPTELATFVKGTQPPLLPSQTGS

SEQ ID NO: 165574 - protein, 65 aa, Glycine max
  Clone ID: PAT_MRT3847_120529C.1.pep
ALAVALSIIRANPTVLEGLGADLEEKEKVEGEELQKWLRLVVAPTELDAFVKGTQPPLLPSQTGS

SEQ ID NO: 165575 - protein, 75 aa, Glycine max
  unsure (1)..(75): unsure at all Xaa locations
  Clone ID: PAT_MRT3847_12052C.1.pep
SQNPTSQRHPKAPNFLLXCNTLYCLRPVATTLTLKAELLALPRRRSNHRKRETQRGKIRGMLQTVRFGSFFLRPI

SEQ ID NO: 165576 - protein, 89 aa, Glycine max
  Clone ID: PAT_MRT3847_120530C.1.pep
EEQHQKTQEEMLNTIRELKAFVSDLSQCLQSCRRCHTDYEEYSDHDDQYHRTQSLETYPPIIAHCIIDNFMVVDKIYGWNFYRQTRSPL

SEQ ID NO: 165577 - protein, 192 aa, Glycine max
  Clone ID: PAT_MRT3847_120531C.1.pep
AISDIGVGIENKIILHFKNVFWPNVEFLGVVAETSYGCSYFLNLHKATGRPVLVYMPAGQLAKDIEKMSDEAAASFAFMQLKKILPDTSSPIQYLVSRWGTDINTLGSYSYDAVGKPHDLYERLRVPVDNLFFAGEATSMLYTGSVHGAYSTGMMAAEDCRMRVLERYGELDLVPPVMGEDASVIPLQISRL

SEQ ID NO: 165578 - protein, 104 aa, Glycine max
  unsure (1)..(104): unsure at all Xaa locations
  Clone ID: PAT_MRT3847_120532C.1.pep
FFFQHKKVEKSHIIFSIYPIYYSNFLSYVINILLYKFKHLQFFFNFFYSTFFLLFQFIYXSLIYFIFLFFFFHYLLSFYFSFTFKYIIYSYFIFYYFYFFIFLY

SEQ ID NO: 165579 - protein, 488 aa, Glycine max
  unsure (1)..(488): unsure at all Xaa locations
  Clone ID: PAT_MRT3847_120533C.1.pep
MESRFKSNPQLRRGLCCANDDKQQERSPSVIVIGGGMAGIAAARALQDASFQVILLESRERPGGRIHTDYSFGFPVDLGASWLHGVCPENPLAPLIGKLGLPLYRTSEDNSVLYDHDLESYALFDMDGNQVPQELVTKIGKIFGAILEETNNVREEFSEDMSILRALSIVFERKPELRLEGLSHKVLQWYLCRXMEGWFATDADTISLKCWDQEXLLPGGHGLMVRGYQPVINTLAKGLDIRLGHRVTKIVRQYNEVKVTVENGKTFVADAAIVAVPLGVLKAKSIKFEPKLPDWKEAAISDIGVGIENKIILHFKNVFWPNVEFLGVVAETSYGCSYFLNLHKAMGRPVLVYMPAGQLAKDIEKMSDEAAANFAFMQLKKILPDASSPIQYLVSRWGTDINTLGSYSYDAVGKPHDLYEKLRVPVDNLFFAGEATSMLYTGSVHGAYSTGMMAAEDCRMRVLERYGELDLFPPVGDVSVIPLQISRL

SEQ ID NO: 165580 - protein, 40 aa, Glycine max
  Clone ID: PAT_MRT3847_120534C.1.pep
LSILNLLQILQLLFKLQHIPILYLHLINHHPYLFHFNFTF

SEQ ID NO: 165581 - protein, 66 aa, Glycine max
  Clone ID: PAT_MRT3847_120535C.1.pep
EGFSKQLKFYVMHCVHTACFYIFGLNRILYSLFLHFNIIIDWLDSVMFLGWFNCFLDQHSIWSFGH

SEQ ID NO: 165582 - protein, 114 aa, Glycine max
  Clone ID: PAT_MRT3847_120536C.1.pep
ARNSARGVEKKYPNRGNTCLENGSFLLNFAGCAVCSKRDFMLITNRSLKEEDGEEIVTYDHLCKNCHHVIARHEYTFSIMDEFQEYTMLCLLCGKAEDTISILPDDPRQMALLF

SEQ ID NO: 165583 - protein, 98 aa, Glycine max
  unsure (1)..(98): unsure at all Xaa locations
  Clone ID: PAT_MRT3847_120537C.1.pep
APHSARVEMTVESGEGTRISQXDAFFNQVVLPTSNDYMXALXTCDDNTNHAEELHIXNRCIESLAAKACTDPALFSSALLEHDGTSQSPWGSVLCTGI

SEQ ID NO: 165584 - protein, 100 aa, Glycine max
  Clone ID: PAT_MRT3847_120538C.1.pep
RNGRPDAEYVKWRWRPNGCIIPSLNATDFLERLRGQRLVFVGDSLNRNMWESLVCILRQSINKKKRVFEISGRREFKKKGVYAFRFEVSFLITSMMFVYV

SEQ ID NO: 165585 - protein, 84 aa, Glycine max
  unsure (1)..(84): unsure at all Xaa locations
  Clone ID: PAT_MRT3847_120539C.1.pep
MGVKVYGPTHGSPKRVLGCLIEKEIEFETVHVDLFRGENKXPESLKLQPLGPLPVIKEGDYTLYESRAIIRYLAEKYKAQGTDF

SEQ ID NO: 165586 - protein, 106 aa, Glycine max
  unsure (1)..(106): unsure at all Xaa locations
  Clone ID: PAT_MRT3847_12053C.1.pep
MVGAMLWVATYDTNPEDAYRSIFVAPLRGWRPIRLVTFSNTXIEXVEPYMNSRCQLLRTTTNGDFXQGKDLAMVKVNAACAGEGLTXSSFTPTPLLEYGLQNDRRI

SEQ ID NO: 165587 - protein, 33 aa, Glycine max
  Clone ID: PAT_MRT3847_120540C.1.pep
AGKCIWTQVYLFFILRICELTFRIPFCRLLAAV

SEQ ID NO: 165588 - protein, 264 aa, Glycine max
  Clone ID: PAT_MRT3847_120541C.1.pep
MLHESLERLASLLRGRNWPRGAKTVVTDEATHTERRLHQMMFADRDYERVNDDDDFAEKQRPNVNVVNWSDKDYSVVTIQCKDRPKLLFDTVCTLTDMQYVVFHANIDAEGPEAYQEYYIKHIDGSPVKSDAERQRVIQCLAAAIERRVSEGLKLELCTTDRVGLLSDVTRIFRENSLTVTRAEVATKGGKAVNTFYVRGASGFPVDSKTIESIRQTIGNTILKVKGSPEEMKSVPQDSPTRSLFSGLFKSRSFVNFGLVKSYS

SEQ ID NO: 165589 - protein, 61 aa, Glycine max
  Clone ID: PAT_MRT3847_120542C.1.pep
KQKDTLENKVKQQCNAKPSTKEHQSEAITMWRASKGSCKNDPITKHASLSPKNGESFLYDI

SEQ ID NO: 165590 - protein, 54 aa, Glycine max
  Clone ID: PAT_MRT3847_120543C.1.pep
IMKQHFDLEVVASAEYESEVSSKVASNISIQETYACPCSDNLTNSSNVTNPIEL

SEQ ID NO: 165591 - protein, 83 aa, Glycine max
  Clone ID: PAT_MRT3847_120544C.1.pep
LSRSNCPRSCHKDGRCGLYGLIVLGNSYSGRNICIPNISIWHRQTVHISHNRNVNSYHNQPRFFSTNRVVVFQTTVTILRFVL

SEQ ID NO: 165592 - protein, 107 aa, Glycine max
  Clone ID: PAT_MRT3847_120545C.1.pep
LKGRLAQLIEQENVKEGHHQIQIKNPELPKRIWLRDIGQPSQGFPIPGIGGKGFPFLSLKLPHEAKLGREHWTEKTGFSLKGAGTTIKGLSLVHAEVPPETKGRPGA

SEQ ID NO: 165593 - protein, 57 aa, Glycine max
  Clone ID: PAT_MRT3847_120546C.1.pep
NSLKQHTLITGYFKISLFPTSLPALTKNIKKLEVLQTSNYCFHPSQIKKFEPLGSLS

SEQ ID NO: 165594 - protein, 418 aa, Glycine max
  Clone ID: PAT_MRT3847_120547C.1.pep
MDQSFLVMVSNLLQLHNSLDPTSSLLSNADGASSLLHSSSVAPLLFFTIASVLSFVASTRPSPSSDYSVSAFRTLSTEHIWSLEAPLRDAHWRSLYGLSYPVFTTVVDKLKPHIALSNLSLPSDYAVAMVLSRLAHGLSAKTLASRYSLDPYLVSKITNMVTRLLATKLYPEFIKIPVGRRRLLETTQAFEELTSLPNMCGAIDTTPVHLRINPNPNIYRCRYGFPSLLLQVVSDHKKIFWDVCVKAPGGTDDATHFRDSLLYHRLTSGDVVWDKVINVRGHHVRPYVVGDWCFPLLPFLLTPFSPSGMGTPAQNLFDGMLMKGRSVVVEAIALLKGRWKILQDLNTGVHHAPQTIVACCVLHNLCQIAREPEPELWKEPDESGPPPRVMDSEKSFYYFGENLRQALADDLHQKLSSR

SEQ ID NO: 165595 - protein, 53 aa, Glycine max
  unsure (1)..(53): unsure at all Xaa locations
  Clone ID: PAT_MRT3847_120548C.1.pep
FVVIYFLIFIFFFFFCFFFXLTNSSNHSNNSIQKITTYRLINIYIKAVSFIGS

SEQ ID NO: 165596 - protein, 90 aa, Glycine max
  unsure (1)..(90): unsure at all Xaa locations
  Clone ID: PAT_MRT3847_120549C.1.pep
HHRITRWPGKPHVKFNKFXGFVTVDAKNQRALFFYLVEAEKDALSRPFVLGLNGGPGGSFLGVGAFXGKGPFRPKVKGWVGNQFSWTRKA

SEQ ID NO: 165597 - protein, 249 aa, Glycine max
  Clone ID: PAT_MRT3847_12054C.1.pep
MDCWYSPHPLHDEFEKLVIRMNPPRVAVDNISSGTDTVIKVDSANKRGSLLEVVQVLTDMNLSVRRAYISSDGEWFMDVFHVTDQNGKKFMQDDVADRIQQSLGPRASSFRSLRRSVGVQAEAEHTTIELTGRDRPGLLSEVFAVLADLKCNVVAAEVWTHNSRMASVVYITDEATGLSIDDPDRLAKIKQLLLYVLKGDIDKKSANTAVSVGSTHKDRRLHQLMYADRDHDVDDGDSGSTSDRNKLLE

SEQ ID NO: 165598 - protein, 44 aa, Glycine max
  Clone ID: PAT_MRT3847_120550C.1.pep
MPTESRTFLHGGVRLNNIPTPIFLCQLQIMTFYKNIFIQTQNNQ

SEQ ID NO: 165599 - protein, 102 aa, Glycine max
  unsure (1)..(102): unsure at all Xaa locations
  Clone ID: PAT_MRT3847_120551C.1.pep
MAYHGDEGHQRHVPLGGLGPLLLVGKRTAGARVASSPDSDLXAFSHNLTHCNFSPLTLXPIALTNCSNQLFLSYXGELLLLHCYHLFKTILAYDGLISAYFP

SEQ ID NO: 165600 - protein, 160 aa, Glycine max
  Clone ID: PAT_MRT3847_120552C.1.pep
GCHKCERRKIKDLSYYYGYRKAFRTALRTIASLEGYRGVTFLRTFSPAHFENAEWNKGGSCERTRPYSKEQMRFDGYIFETYKTQVEEFRTARKVARKRGLKFLMMDTTEIMLRRPDGHPNNHVWHAVNQNVTHSDCVHWCLPGPIDTWNEFLFHMLKMH

SEQ ID NO: 165601 - protein, 61 aa, Glycine max
  Clone ID: PAT_MRT3847_120553C.1.pep
EIFQIVKENLDFRPGMIPPNLDLKRGGHRFLKTTVFGPFGRGAPAFTWEVVKPPKFENPQV

SEQ ID NO: 165602 - protein, 65 aa, Glycine max
  Clone ID: PAT_MRT3847_120554C.1.pep
GSRPGDYSLGYAYCVMIHATKLFPKYWTQAIDISLLLGKKDCMTHIRPLKGLPTFSTGLQPANLS

SEQ ID NO: 165603 - protein, 60 aa, Glycine max
  Clone ID: PAT_MRT3847_120555C.1.pep
KGPPPSVFFFFSFLFCSIVCFVCLVFFFFFFFFFFFFFFFFFFFFFFFCKVEHKHIRLMK

SEQ ID NO: 165604 - protein, 122 aa, Glycine max
  Clone ID: PAT_MRT3847_120556C.1.pep
IVEANTWCVARSNAGYGALKSGLDFACSHGADCRAIQPGGSCFNPNTIQNHASYAFDSYYQRNGKNPGACNFGGAATIAVSDPSFGRCVYPPSSSTDGGVDTTITGLPMNSKTLQDQTNKED

SEQ ID NO: 165605 - protein, 118 aa, Glycine max
  Clone ID: PAT_MRT3847_120557C.1.pep
MSNFQRISHESHPPPGYGSPYPPPQPGYPSAPPHEGYPPPPPPHGYGGYPPPQPPQRPPYDSYQGYFDNGHPPPPPPPHYHYQHVDHHHHHEEPGCFSFLRGCIAALCCCCVLEECCF

SEQ ID NO: 165606 - protein, 63 aa, Glycine max
  Clone ID: PAT_MRT3847_120558C.1.pep
HRISGTALNEIESFHCASKSLCSYHCLTLTLVPLISFYTTNSSDSQCAPRTFCCELSLTIVTV

SEQ ID NO: 165607 - protein, 76 aa, Glycine max
  Clone ID: PAT_MRT3847_120559C.1.pep
TFMLFNLLFLNQTYFDWGALTLFPSSLADQTIKLAHCTPQLTLGTLIMRKTSYLTAHPTRRWDKPPPNKNKLSIIL

SEQ ID NO: 165608 - protein, 295 aa, Glycine max
  unsure (1)..(295): unsure at all Xaa locations
  Clone ID: PAT_MRT3847_12055C.1.pep
TFAPVTILEAIRILLAYAAHKHIKLYQMDVKNAFLNGFINEEVYVKQPLGFEDKERPCHVYKLIKAFYGLKQALIAWYERLSSFLVSNGFTRGITDPALFRKAQKGNLLIIHIYVDDIIFGATSKRMCKEFFELMKDGFETSMKGELKFLLGLQIIQKVYGIFIHQEKYTKSHLKRFRMDEAKPMATPMHRSTIIDKDEKGNHTSXKEYSGMIDSLSYLTSSRPDIVFVVCLCARFQSYPKISHVTAVKRILRYLVGTTNHCLWFKKRSEFDLLGYCDVYFAGDKVERKSTSRNG

SEQ ID NO: 165609 - protein, 46 aa, Glycine max
  Clone ID: PAT_MRT3847_120560C.1.pep
FMVSRIKVVPLNQGLANNRISLSKFIHSFMRNLFECMSKEGDPFVV

SEQ ID NO: 165610 - protein, 112 aa, Glycine max
  unsure (1)..(112): unsure at all Xaa locations
  Clone ID: PAT_MRT3847_120561C.1.pep
GSNLYTIIFKYAGDPVRPPADFLVGGPQPPAPALLLPRPDRENPGRTQTTRRAGQPRRAPTQTTGKARPVRPFAQXRRRPGRWAAPSGGPSSAAGGRATRRGTNTRGRGRYP

SEQ ID NO: 165611 - protein, 152 aa, Glycine max
  unsure (1)..(152): unsure at all Xaa locations
  Clone ID: PAT_MRT3847_120562C.1.pep
SCRIRHEEVPGLLPANREEFNSIDSIEPDPAEXIQRVAMLFKEWYRICELPGANDTASAHFILQLHQNGLLKGDDVTDHFFRQLMELAIAHCLSTEVINSGSLQSQPQQTMSFLAIDIYAKLVFSILKGSNKLVLLSKILAVTVRFIIKDAE

SEQ ID NO: 165612 - protein, 73 aa, Glycine max
  Clone ID: PAT_MRT3847_120563C.1.pep
TCMAAHFLQRTKSRVSIAQNKSRQDQLHEIWFDLLNINKFGYIQRTYKKVNSKIHQKPITLWTIFQKGCNLEL

SEQ ID NO: 165613 - protein, 52 aa, Glycine max
  Clone ID: PAT_MRT3847_120564C.1.pep
IPFITKSMSILLSRFAITTINRPFILSSILSPNHLSKSIYKYQFMKTPLYIY

SEQ ID NO: 165614 - protein, 78 aa, Glycine max
  Clone ID: PAT_MRT3847_120565C.1.pep
LELTMLDHYACRRLRTCLVTLHTDGTIILSRGIIKLVIDGPGEYAPSKCVKPTGLTSFKALFDHPREPPTIVDKRPVA

SEQ ID NO: 165615 - protein, 151 aa, Glycine max
  unsure (1)..(151): unsure at all Xaa locations
  Clone ID: PAT_MRT3847_120566C.1.pep
LWVEPKQCCKIELKERYASMSNIKIEIARAXDTNPGADTAELISKYQVAKFQGEILNMKQENSKVASELQAGLTLVKGMKNDVEKTLDELDEAIGVNSSVPKNNGQMKHSSSRARIPLRSFLFGVKLKKQKHHPSLFACVKSSIAKTIQCQ

SEQ ID NO: 165616 - protein, 83 aa, Glycine max
  Clone ID: PAT_MRT3847_120567C.1.pep
KKKKKKKKKKKKKKKKEKKKKKKKKKKKKKKKKKKKGGPPTRELANPGINSGPVPGGVPAFPKGRRIKAGGNKGQSGYRGKKV

SEQ ID NO: 165617 - protein, 80 aa, Glycine max
  unsure (1)..(80): unsure at all Xaa locations
  Clone ID: PAT_MRT3847_120568C.1.pep
HYHSMILPLLLIFTEYNYGYVTPPPKKNKKKKSSHFTFLHVIWHLVVLSLDVCLSSLKMLXVGEVIFIMIXMPQHLHEIS

SEQ ID NO: 165618 - protein, 47 aa, Glycine max
  Clone ID: PAT_MRT3847_120569C.1.pep
MKMDSASMTGSKRRISSNRGIGGVLREQRARLYIIRRCVVMLLCWHD

SEQ ID NO: 165619 - protein, 51 aa, Glycine max
  Clone ID: PAT_MRT3847_12056C.1.pep
TWVVVSHLSCLVNTYHVPALLPARFCDKQIPTNVMSIRGYLQKNKNSLKIF

SEQ ID NO: 165620 - protein, 47 aa, Glycine max; identical to SEQ ID NO: 165618
  Clone ID: PAT_MRT3847_120570C.1.pep

SEQ ID NO: 165621 - protein, 78 aa, Glycine max
  Clone ID: PAT_MRT3847_120571C.1.pep
PFFWDNFYLFMGGLKPLVFVWDGFWAPWGFLFTPPPLKKGGLFSPSPSSSVLGFLWGCLAPGCLKKIFFYVWELGAFG

SEQ ID NO: 165622 - protein, 134 aa, Glycine max
  Clone ID: PAT_MRT3847_120572C.1.pep
VLKFPRGPAARAFGPFFFGKKVVFVPVVPTPAGVPLSTTSFFFSKGFAPLRGFFPSPVLFGFLVPLPFFGGCSPILGLEHYARIVNFPKSLILPKRDNSPFFPKKGGFLRSFFFFFGFQCPRSTPLVLFFVGGP

SEQ ID NO: 165623 - protein, 102 aa, Glycine max
  Clone ID: PAT_MRT3847_120573C.1.pep
MKLEIEDITVYFPYDKIYPEQYSYMVELKRALDAKGHCLLEMPTGTGKTIALLSLITSYVLSKPHSPLKLLYCTRTVHEMGETLAELRLLHYYQLRHLGPGG

SEQ ID NO: 165624 - protein, 114 aa, Glycine max
  Clone ID: PAT_MRT3847_120574C.1.pep
KFPLVPYKFVRIPNRNPDRFGAPVYRLTPPPKTPPFGITGTVFPKFNLPAKDLFQRYQGKPDQCPVAAWPRLFPRVPKAAYWPEKSPQKISPPPEKGCRVSPLVSPEKIVKIFI

SEQ ID NO: 165625 - protein, 110 aa, Glycine max
  unsure (1)..(110): unsure at all Xaa locations
  Clone ID: PAT_MRT3847_120575C.1.pep
TKXXXTXXXXXXXTHXXNXXDTPXHQXTHXPQNTTXXXXKPNXTXXTQXNXPHXPXTPNQXYTFXQNXHXKPXXXKXNXHHQTXXPXXHXXTTTXLRXRNXKMXVQXNAX

SEQ ID NO: 165626 - protein, 190 aa, Glycine max
  unsure (1)..(190): unsure at all Xaa locations
  Clone ID: PAT_MRT3847_120576C.1.pep
FYSEISSVIYFYFNSDVSPIIIDFTLGNASASDYVDLESTETWLADYFNDAEMDISPEELKFSVADDVQIDGTEVSAIKPSREQNVLQHHVTQTTRNIIFKGGKSFIETPTKLAAVAYPFTFIKPCGAHEDVTLDKSAHSVSXPPLKSQQSMEDPSAYPKSAFSGKPVVGKTKIHIEGGKGSITIMRTKG

SEQ ID NO: 165627 - protein, 67 aa, Glycine max
  Clone ID: PAT_MRT3847_120577C.1.pep
ARLCTKRVLCIKHLGFLCFCWALSVLLMLSAIMSLFLNFLELRLASLLAKPMLSSLVVALSANLYLF

SEQ ID NO: 165628 - protein, 106 aa, Glycine max
  unsure (1)..(106): unsure at all Xaa locations
  Clone ID: PAT_MRT3847_120578C.1.pep
XRXHAYVSSEFGSXRLRXXXXXXXXXXXXXXXXAQHKREXXALXCXXXXXXXXXXGSXVKXXMXXXQXXVXLXVXIXXXFEXGXPEXXXXSXPXCXXXXXXMXXXX

SEQ ID NO: 165629 - protein, 75 aa, Glycine max
  Clone ID: PAT_MRT3847_120579C.1.pep
LLVVFKRHMQIQYEGVSALVDAEGRKAAAEYAGGANAAAAQAEAGDAGGASNEAWKTGAEHLIRCVVRVLSGGRS

SEQ ID NO: 165630 - protein, 84 aa, Glycine max
  Clone ID: PAT_MRT3847_12057C.1.pep
NNGVLVGLLSRNGEPRIGIKGIHIGLWHHSTSHFGNRYHTEGGFDTVGERMREARGCVSERQGSSWIEEATSERRMWQPCSNVS

SEQ ID NO: 165631 - protein, 333 aa, Glycine max
  unsure (1)..(333): unsure at all Xaa locations
  Clone ID: PAT_MRT3847_120580C.1.pep
MANHTTILKEAFNVEVPIKLPLPFPPRLGLDRTKHCRYHRSYGHNVKDSWDLKDKIKELMQAEYLAQFMKRPDNHLAGLEPKPGQCTQLSKDLTNHEYTRIVDVLHRNTNQFMWQLFDMPGIHPNIICHTLAILSPCQANVIEEKENGRRAVHGSQRGGGQATKGPVYQRNQVLYLVRKCHHGYNQIIMHALDDEKTTFITEDDLEEVFEEIRKYDMCLNPEKYTFGVSRGKFLGFMITHRGIEANPNKCTTILGLHNPTNVQEVQNLNGRLASLSREGSVVTHNLXRRLRPYFESHQVVVMMNYLIKPVLQKPQLAGRMAACEHSLSATLSG

SEQ ID NO: 165632 - protein, 39 aa, Glycine max
  Clone ID: PAT_MRT3847_120581C.1.pep
NYIRHSLLSNSEEGPKTFGNAHILVPWSMHPLPYKTFTG

SEQ ID NO: 165633 - protein, 146 aa, Glycine max
  Clone ID: PAT_MRT3847_120582C.1.pep
MEPATNNNPSPSAHASLHETKYIERVKHALIDFGVPEELRLSDRSIYKVPCYLRKVKEDAYTPQCISIGPIHFKKEELKPMQEHKLRYYQFFGRRVGVSDEQMEAYKHYLETEEKQIRQCYAEKFLDITQRYFRGHDACWTPVFHH

SEQ ID NO: 165634 - protein, 93 aa, Glycine max
  unsure (1)..(93): unsure at all Xaa locations
  Clone ID: PAT_MRT3847_120583C.1.pep
TLLREPHFKHRVAVTEXERDAHYLRGHLPPAVMPQETQVEXNVQHVRQXQVPLQKYMAMMDRQERDERLFYHXLIDQCEELLPVVDNPTGSLT

SEQ ID NO: 165635 - protein, 116 aa, Glycine max
  unsure (1)..(116): unsure at all Xaa locations
  Clone ID: PAT_MRT3847_120584C.1.pep
PIKNIGAGRPEXATHPDTSKAALAEFISTFIFVFAGSGSGISYNXLTGNGARTPAGLISASIAHAFALYVAGSVGANISGGHVTPSVAFSAFYRGNITFLRGIGYVIAQLLCYIIS

SEQ ID NO: 165636 - protein, 71 aa, Glycine max
  unsure (1)..(71): unsure at all Xaa locations
  Clone ID: PAT_MRT3847_120585C.1.pep
LSEQEWQPKNILMXXRAADGGINPIKLRSRSMTVPSVTVVSASXELXXSTKGRAWFFPSKMTAIRQYKVCK

SEQ ID NO: 165637 - protein, 79 aa, Glycine max
  Clone ID: PAT_MRT3847_120586C.1.pep
FVLSVGVEVGVLALAVVSHLFLVVAAGVGAVVCGVVVVFGFRGAALFFAPPVRRGSRARSLALALCPVLFFGWACFSPP

SEQ ID NO: 165638 - protein, 117 aa, Glycine max
  Clone ID: PAT_MRT3847_120587C.1.pep
RKPAIPLGLQKGPKRALRGGPKKPLFNRGFNLRKKKGATEKNPRAGRSPPKTTQNPQRGRGGDPRDPRPKKAGGAPPGNPPKKKLGGGPPPPDTEKPPCQNNPPPGRGKRQDPQPGG

SEQ ID NO: 165639 - protein, 80 aa, Glycine max
  Clone ID: PAT_MRT3847_120588C.1.pep
LICDTLMGKGEKQQVIYILIVSSYCLIVSFCCSIFHYICDCTTARLDSIFNCLFKIARNAYYYSFSLGPIKDTFFLVNTA

SEQ ID NO: 165640 - protein, 55 aa, Glycine max
  unsure (1)..(55): unsure at all Xaa locations
  Clone ID: PAT_MRT3847_120589C.1.pep
CNGTPSPKLQFSSPSPSHLILPVAVNXMRLELVHRHHEXXRRRRXXGSGXALQXS

SEQ ID NO: 165641 - protein, 50 aa, Glycine max
  Clone ID: PAT_MRT3847_12058C.1.pep
AGSQIFYEGGLDYLGNPNLIHAQSILAIWTVQVELMGYVYGYKVSGRPLG

SEQ ID NO: 165642 - protein, 70 aa, Glycine max
  Clone ID: PAT_MRT3847_120590C.1.pep
NQLVKEKKRFEYSRNQKTSINLPPSNHYTEQSNTLSEVNIRVPRHLSTLLLLSHHLPCLHFTIAYLYKAL

SEQ ID NO: 165643 - protein, 60 aa, Glycine max
  Clone ID: PAT_MRT3847_120591C.1.pep
VESSLADSVSVSLLNNETVMSCNRSFYPLEFALWSLILYQFPTPSSRMPHTLLDSNCEPS

SEQ ID NO: 165644 - protein, 289 aa, Glycine max
  Clone ID: PAT_MRT3847_120592C.1.pep
MCGVSLLAFLLLLSLCAEASVHDYRGEKFAAKGNAFVVHGGSEGIYASAPNLTDAYPPPNPDSYIRFERITFRRNKDFSNFSSWPIQAVIFEVEDRETIGGSAYGGQRAVCCTGDLAKLGVCTEGQVIYRPSVENPDWPQVFGVSFEMDDEVAVLPLKSIQITKTGMYNLYFIHCDTRLKGLIVEGKTVWKNPSSYLPGRMAPMKVFYQFMSFAYVLLGIFWFSQYARFWKEVFPLQNCITAVITLCMFEMALWYFDYAEFSQTVIRPTVTTIWAVTFGTDKRTVARLV

SEQ ID NO: 165645 - protein, 83 aa, Glycine max
  Clone ID: PAT_MRT3847_120593C.1.pep
MYKILVKLTSRGQIRSLICAEPIPNNILCLRGINGTNRPNSHSWFTGWQLSSASFMATSLTLAISSSSNFPFLTLAFTTFYSL

SEQ ID NO: 165646 - protein, 58 aa, Glycine max
  unsure (1)..(58): unsure at all Xaa locations
  Clone ID: PAT_MRT3847_120594C.1.pep
IPKLXPSXYEKFXXPVIVXCXKXFIYRHLIXXXXXXHXVWTRRGCVLFLCISSYXLXT

SEQ ID NO: 165647 - protein, 75 aa, Glycine max
  Clone ID: PAT_MRT3847_120595C.1.pep
KGLPLRPDQSVCSHHSRYGIRQFGPACKFPHPMSWQPVIIPGLGQLSYSNSASVQVAVIFRSTALEAHQTFQQFV

SEQ ID NO: 165648 - protein, 105 aa, Glycine max
  unsure (1)..(105): unsure at all Xaa locations
  Clone ID: PAT_MRT3847_120596C.1.pep
XQRQGXXAXGKXQPRKXPPXXXXXXXQGXHPGPXXKTGXXTGRGAGXEXXAXGRTXAXXKNHKXXGXKEXXAXGXXXXXGXPTPRXXTTXARXRPAGNXNAGAKT

SEQ ID NO: 165649 - protein, 57 aa, Glycine max
  Clone ID: PAT_MRT3847_120597C.1.pep
IFGWRLLQDRLPTKCNLRRRQVQISDALCPFCGVRDEEVSHLFFHCTKIWPIWWETI

SEQ ID NO: 165650 - protein, 71 aa, Glycine max
  Clone ID: PAT_MRT3847_120598C.1.pep
GRKAPGWNASPKSLKPIVYEELCHFLFLCWAIIFVKLIGVFPPGPPFYDIFREGGPLPVVAWIVPPLISKS

SEQ ID NO: 165651 - protein, 79 aa, Glycine max
  Clone ID: PAT_MRT3847_120599C.1.pep
CDNKQNIFFIPPKTKYIKPIKKLGAKQTTYLTRSIELTKTCPRKNRHSPPQTSVPIALVVLGTPPSPWTTCMNGHLGSL

SEQ ID NO: 165652 - protein, 63 aa, Glycine max
  Clone ID: PAT_MRT3847_12059C.1.pep
NTIKQSPSSGVTNQPYRRLISTSISNQIHAQFLTFVFLTHHIAHKIGKKEKEREREREREKEK

SEQ ID NO: 165653 - protein, 54 aa, Glycine max
  Clone ID: PAT_MRT3847_1205C.1.pep
HYLLYFYILAPEMPVKLYPVSSYCRSSTPLNILSKMVNALVFCVRYYTSALSKC

SEQ ID NO: 165654 - protein, 191 aa, Glycine max
  unsure (1)..(191): unsure at all Xaa locations
  Clone ID: PAT_MRT3847_120600C.1.pep
LEQVFFLPFSIANVVHYVYKPIRKHSDYEPIRLQRLVEDYIGVIANKYPYWNRSEGADHFLLSCHDWGPKVSYGNPKLFKNFIRVLCNANTSEGFLPNKDVSIPEVYLPKGKLGPPNLGQRPNDRSILAFFAGREHGDIRKILLNHWKGKDNDIQVHEYLPXGKNYTQLMGQSMFCLCPMRYEVASPRVVE

SEQ ID NO: 165655 - protein, 54 aa, Glycine max
  unsure (1)..(54): unsure at all Xaa locations
  Clone ID: PAT_MRT3847_120601C.1.pep
MARYVRAITLFSPVGHLFQVEYALEAVRKGYAAVLVRGSDNVVLGVXKKSTAKL

SEQ ID NO: 165656 - protein, 60 aa, Glycine max
  Clone ID: PAT_MRT3847_120602C.1.pep
HSWNAGTHGGAGPESTDAPIRAFAGLPHPTESLTNRTGYTSIHKRLCTITGAEHSNRSTY

SEQ ID NO: 165657 - protein, 356 aa, Glycine max
  unsure (1)..(356): unsure at all Xaa locations
  Clone ID: PAT_MRT3847_120603C.1.pep
CTFTASTEITEWVEVARKNLTKQNSTVSSNVSTESAAGNSSEENNESVQTDSGVNKTSNISSEEQAAAEPATEKKLKKRTFRVPLKIVEKITXGFGMSLSQDFLAEAKRKLQVLDKKDADRKRTAELKNNLEGYIYTTKEKIETLEEFEKVSTSEERQSFIEKLDQVQDWXLYTDGEDANATEFQERLDQLKAVGDPIFFRLKELTARPAAVEHANKYIDELKQIVEEWKAKKSWLPQERVDEVIKSSEKLKNWLDEKEAEQTKTSGFSKPAFTSEEVYLKVLDLQTKVASINRIPKPKPKVQKPVKNETESSEQNTENSDSNSADSSSSSDSSVNSSEGTSEETVTEQTEGHDEL

SEQ ID NO: 165658 - protein, 64 aa, Glycine max
  Clone ID: PAT_MRT3847_120604C.1.pep
NKLPLVYCISNKERLYVFPRVDVALIKGEPRKSVCSFSSLSPFQFAAKSVCTAFLFCCIYCCCS

SEQ ID NO: 165659 - protein, 43 aa, Glycine max
  Clone ID: PAT_MRT3847_120605C.1.pep
MVIIKETDRPDGRTPNQLIPMACLCGILHRAHGSSSRAQRETT

SEQ ID NO: 165660 - protein, 254 aa, Glycine max
  Clone ID: PAT_MRT3847_120606C.1.pep
MLGGGVRWLRSSERFKFLTTSFSTNAKTTYYSFCTSSANKNNNKNMIVDERYRQLENLDMVTAAKILFSDPPKKRKFGFDFHLVQFFFACLPSVAVYLVAQYARYEMRKMEVEVEQKRKLKEEEEAKEKEKEMELNPPEEKEEKSDPQLAQVKVRLEKLEEAVKEIVVETKKHSGSNLGENQATDDEKKRLNSSAPRDPSTTDSASNKAVDEDHSGKHDILKSKPKLREETKGSVATPNPSLQDPKGNQSGGAS

SEQ ID NO: 165661 - protein, 91 aa, Glycine max
  unsure (1)..(91): unsure at all Xaa locations
  Clone ID: PAT_MRT3847_120607C.1.pep
XXYILVLCXSTIXGPTVQNVRXLXXMXFXVLELQXFRXTSFRLQIFLSXITXSGSXXHCGVFXYEIEVNRFGXRXAQVXXLXCAXXNWXIC

SEQ ID NO: 165662 - protein, 121 aa, Glycine max
  Clone ID: PAT_MRT3847_120608C.1.pep
YGRLQRGVKKKNGFLCGGPPKGHPFFPAKKKGIFFWGRKPPHPFCYGFTQKKAPPFLRLPQSNPPKRGISKKTPFPKFLFLKPPFSPSGENGVFFLSGSGFRPPKTSLPRGQPLSGKGFPF

SEQ ID NO: 165663 - protein, 258 aa, Glycine max
  unsure (1)..(258): unsure at all Xaa locations
  Clone ID: PAT_MRT3847_120609C.1.pep
GGAAANAVRDYQRKIQEMNEERKTLDRELARAKVTANRVAVVVANEWKDANDKVMPVKQWLEERRFLQGEMQQLRDKLAIVERAAKYEAQLKEKYHLRLKEKYQLRLKVLQESLRETSNSINRGTSEGRCVSNGPSRRQSLGGADNISKLTSNGFLKRSPSTQIRSSVSSSTVLKHAKGTSKSFDGGTRSLERSKILLNGKPPSYSFNQSSEGTKVREEKDKWKGNSDDKPNDFPTVDTDDSVPGVXYDLLQKEVLAL

SEQ ID NO: 165664 - protein, 67 aa, Glycine max
  unsure (1)..(67): unsure at all Xaa locations
  Clone ID: PAT_MRT3847_12060C.1.pep
LEPIHFERARALECSSRYYIYLETSSXLXAWCKALHLASSDKKEKHEWFAQLQDGFHSYLSSLNTEH

SEQ ID NO: 165665 - protein, 142 aa, Glycine max
  Clone ID: PAT_MRT3847_120610C.1.pep
YRCQKNKKRNLTHNFLEKGNLKERIQIIHKLSGHIFQLSQHKFASNVVEKCLEYGDATDRQLLIAEIVGHDKQNDNLLTMMKDQFANYVIQKVFEICSENQRATLLSRIRLHAHALKKYTYGKHIVARFEQLLGEENQTNGS

SEQ ID NO: 165666 - protein, 70 aa, Glycine max
  Clone ID: PAT_MRT3847_120611C.1.pep
SNAASSSNPCLLNKSIRCLQPQLLLKHVASNVSIASQASDVGALRRLQITYKNMTSEAASISSDSNLCRF

SEQ ID NO: 165667 - protein, 69 aa, Glycine max
  Clone ID: PAT_MRT3847_120612C.1.pep
MWGGVSFHYNFFKSSVQICLKKRRTPAYSGFALNQNNNPELNRRKDMKKIILLPGGGRTIFRGTLFATL

SEQ ID NO: 165668 - protein, 110 aa, Glycine max
  unsure (1)..(110): unsure at all Xaa locations
  Clone ID: PAT_MRT3847_120613C.1.pep
MRRGGSRCGHNGGNSRTCANRGGRVFGGRVTEGXIRKSAXVGNLTHYAGSGAGHSIRGXSNPGAAGETPDHAGGXGDGDLCEDFVPGASSTSRERKRGVPWTEEEHRMCL

SEQ ID NO: 165669 - protein, 137 aa, Glycine max
  unsure (1)..(137): unsure at all Xaa locations
  Clone ID: PAT_MRT3847_120614C.1.pep
LGVIKSPFDFTVNISLNLKGDEYKYVHYFWGGTIYFFFKSNPLHXKFPVFFTNHNPIAKXLVIVQYIDETWNNNPILPSNPYQTAXARIGTKFIHNNIVGAASNPLLTVHQKHPPKNAGETSDGLTFLDNEITAHNF

SEQ ID NO: 165670 - protein, 67 aa, Glycine max
  Clone ID: PAT_MRT3847_120615C.1.pep
KIYPSPICRLEQFGGRAHNFIQSLTDEHENDFVKKKECTKIGEETEFQTDFNFKQLKVLETDAEYTM

SEQ ID NO: 165671 - protein, 94 aa, Glycine max
  unsure (1)..(94): unsure at all Xaa locations
  Clone ID: PAT_MRT3847_120616C.1.pep
KYLNVVFLKLHCNQDSRPLAIXLGIKVVPPFKILKVNKVVNKVAGAXYDDLVNAIYKVRSTLQYIKVFSLSVKILCFTPFVSILSNCNLLMFGK

SEQ ID NO: 165672 - protein, 38 aa, Glycine max
  Clone ID: PAT_MRT3847_120617C.1.pep
VHEKCLIDCTIEKAPITSLNVKLNGYKEYNHDIRVHAN

SEQ ID NO: 165673 - protein, 57 aa, Glycine max
  Clone ID: PAT_MRT3847_120618C.1.pep
TLANLVSTGPFSATTLVFNRRLSRLGSKSYRLWRWPRRFRFRLWARMVVGAGGKGPR

SEQ ID NO: 165674 - protein, 43 aa, Glycine max
  Clone ID: PAT_MRT3847_120619C.1.pep
CNYLNGVATPLPILSAIVVPFNHSLPHLNGSRTSTSRTLPKFW

SEQ ID NO: 165675 - protein, 84 aa, Glycine max
  unsure (1)..(84): unsure at all Xaa locations
  Clone ID: PAT_MRT3847_12061C.1.pep
REIHYSSIFINSIIYILSQCISYYFTHIFVFTPSLYFYIFLDTLYYFFFLQYSPFLXCYTHSYPFFYPTYSLTYSLIPFFSPFF

SEQ ID NO: 165676 - protein, 886 aa, Glycine max
  unsure (1)..(886): unsure at all Xaa locations
  Clone ID: PAT_MRT3847_120620C.1.pep
MDDEVVQRVFHEGGRDYFQQQPSTSSSSSSILQSLPLHVSFDHGYYLVVKSIQELREKKDGLVTVGIGGPSGSGKTSLTEKVASVIGCTVISMENYRDGVDEGNDVDSIDFDTLIKNLEDLTKGNDTSIPEFDYQQKRRVGYKAIKSPSSVVVIVDGTYALHAKLRSLLDIRVAVVGGVHFSLLSKVRYDIGDSCSLDYLIDSIFPLFRKHIEPDLHHAQIRINNSFVSSFREAVYKVKCRSMTEDGHSGSAFQENEAQTDNFIEMYLRPPXASEEARINDWIXVRQSGIRYYLLLGDQRFVDKNFIIRPKAEFEVVRMTLGGLLVLGYIDEVSHKCASTTVNNGKISLFDEIIDILGETFIVVTRTNKLTVVTKAXSIGINELWFTKKYLEMFIAIKSVPRLSTPRLGYISTAPSSQGTVMDVRKAIRVTPNLVTGPDDLPQPWTRSPTKSKMEPVVAGWHFISSDSSLPDNSVLDPSSFRDSVRLASMPDSFDLDRGLLLAVQAIQALLENKGVPVIVGIGGPSGSGKTSLAHKMANIIGCEVVSLESYYKQVKDFKYDDFSALDLSLLSKNIDDIRNGQRTKVPIFDLESGARSGFKELEVSEDCGVIIFEGIYALHPDIRISLDLWIAVVGGVHSHLISRVQRDKSRVGLTKNSVQKFIDIYIRLPGIPSNGQLRDSDCIRVRICEGRFALLIREPIKEGNFIIQPKVDFDIGISTVAGLLNLGYQAVAYIEASAFIYQDGKILIEVDHLQDVPGPYIQIKGVNKDAVAAAGSMLKLDGSYTTKSYLEIILERLPAIERTSGGIHSQQSARLLEIVEFIQSQGCSSASESSSSRVVSPIEGVIEEMQSRIRRLERWLAINTVLWTFLMSALVGYSLYQRKRQ

SEQ ID NO: 165677 - protein, 111 aa, Glycine max
  Clone ID: PAT_MRT3847_120621C.1.pep
SAFIYQDGKILIEVDHLQDVPGPYIQIKGANKDAVAAAGSMLKLDGSYTTKGCSSASDSSSSRVVSPIEGVIEEMQSKIRRLERWLAINTVLWTFLMSALVGYSLYQRKRQ

SEQ ID NO: 165678 - protein, 125 aa, Glycine max
  Clone ID: PAT_MRT3847_120622C.1.pep
GSMLKLDGSYTTKSYLEIILERLPAIERTSGGIHSQQSARLLEIVEFIQSQGCSSASDSSSSRVVSPIEGVIEEMQSKIRRLERWLAINTEAPIMIFGNFQDHVLPFWLSYFVYRSQFFKWQVQS

SEQ ID NO: 165679 - protein, 393 aa, Glycine max
  Clone ID: PAT_MRT3847_120623C.1.pep
IGCEVVSLESYYKQNIDDIRNGQRTKVPIFDLESGARSGFKELEVSEDCGVIIFEGIYALHPDIRISLDLWIAVVGGVHSHLISRVQRDKSRVGCFISQNEIMMTVFPMFQQLIEPHLVHAHLKIRNDFDPVLSPESSLFVLKSNKKVAYQDIVAILDSAKFCSSVQKFIDIYIRLPGIPSNGQLRDSDCIRVRICEGRFALLIREPIKEGNFIIQPKVDFDIGISTVAGLLNLGYQAVAYIEASAFIYQDGKILIEVDHLQDVPGPYIQIKGVNKDAVAAAGSMLKLDGSYTTKSYLEIILERLPAIERTSGGIHSQQSARLLEIVEFIQSQGCSSASESSSSRVVSPIEGVIEEMQSRIRRLERWLAINTVLWTFLMSALVGYSLYQRKRQ

SEQ ID NO: 165680 - protein, 471 aa, Glycine max
  unsure (1)..(471): unsure at all Xaa locations
  Clone ID: PAT_MRT3847_120624C.1.pep
SFVSSFREAVYKVKCRSESSDGHSGSAFQGNEAQTDNFIEMYLRPPSASEEARINDWIKVRQSGIRYYLSLGDQRIVDKNFIIRPKAEFEVGRMTLGGLLALGYIVVVSYKRASTTVNNGKVSMSFETIDVLGETFMVMRGTNRKTVRTEALRMGINGPWITKSYLEMILQRKGVPRLSTPPLVSNTTVAGSQETVIAAPKPIRVTPNLVTGIDDLPQPWTRSPTXSKMEPVAAEWHFISSDSSQPDNSVLDPSSFRDSIRLASMPDSFDLDRGLLLAVQAIQEPIKEGNFIIQPKVDFDISISTVAGLLNLGYQAVAYIEASAFIYQDGKILIEVDHLQDVPGPYIQIKGANKDAVAAAGSMLKLDGSYTTKSYLEIILERLPAIERTSGGIHSQQSARLLEIVEFIQSQGCSSASDSSSSRVVSPIEGVIEEMQSKIRRLERWLAINTVLWTFLMSALVGYSLYQRKRQ

SEQ ID NO: 165681 - protein, 120 aa, Glycine max
  unsure (1)..(120): unsure at all Xaa locations
  Clone ID: PAT_MRT3847_120625C.1.pep
LPSPPLSTPSPLYPSPPPPASLSSVHPPSSPNLSPSSSQPPXLKSKPSDDIDTSFFDNINPQDDITFNPPEPPEGFVAPPSFDDCPLETEDEIAAAYEELYXPGYSGVSVLGNDVYVMDA

SEQ ID NO: 165682 - protein, 72 aa, Glycine max
  unsure (1)..(72): unsure at all Xaa locations
  Clone ID: PAT_MRT3847_120626C.1.pep
VLCHLHNPRSPKPEIKLIGHVHPXKDKLLDYALIERSXKHGPLSSMYCGFMPTVIAFTRELFKLFLQTHNAT

SEQ ID NO: 165683 - protein, 58 aa, Glycine max
  Clone ID: PAT_MRT3847_120627C.1.pep
ELGHWRGGTSLPPRERKCCLLKGKQVFSSHIMRRVNITRRLLIEHLQPAHLEKTMDLF

SEQ ID NO: 165684 - protein, 52 aa, Glycine max
  unsure (1)..(52): unsure at all Xaa locations
  Clone ID: PAT_MRT3847_120628C.1.pep
IKSTSSLQPLKKAQFLQPLISPLLNQRLLNPYYIYSFGNIXLYIYIYYIFSP

SEQ ID NO: 165685 - protein, 208 aa, Glycine max
  unsure (1)..(208): unsure at all Xaa locations
  Clone ID: PAT_MRT3847_120629C.1.pep
MRDMHRNSTGSTNTNKISSSAIRLPSPQQSLRRLGLCSQIATGEHSSPIVFPEKRGKVKATSRKTSVPPTTIRPDDQDITKNFEHRIDIAGAGGGGGDEKSDLLGYVVFSGKLILDKRKLATKNNAAADAQQTXDITNQDAVDAKLTSKALAWGSHVLHLYDVISVSYNAGLRHFTVHSYPLKEASCGLSCFIKSRRSRTLLLQHSPD

SEQ ID NO: 165686 - protein, 90 aa, Glycine max
  unsure (1)..(90): unsure at all Xaa locations
  Clone ID: PAT_MRT3847_12062C.1.pep
YCLPATELVLWRSLDFPTXTWLPGMNRTRSKSGTSWRTQTDPTPGLYSMRLKPPFLGEIELVFXATVSYWSTGNRSDGKFLRIPEMGKLY

SEQ ID NO: 165687 - protein, 62 aa, Glycine max
  Clone ID: PAT_MRT3847_120630C.1.pep
GSKPPYKKPPHKTPPYGKPPPVEATPPRLKQAMRSIIHLINKRTRFVFSTHCDSHLRRNAYS

SEQ ID NO: 165688 - protein, 92 aa, Glycine max
  Clone ID: PAT_MRT3847_120631C.1.pep
ATIIDSKAITQTIQSKIANEVHQLSQKYDKVPGLAIVIVENRKDSQSYIGIKRKACAELGIKSFDIDLAEQVCQAKLIKQVHRVNTNPNVHS

SEQ ID NO: 165689 - protein, 84 aa, Glycine max
  Clone ID: PAT_MRT3847_120632C.1.pep
GQFCFLINDHESFPAQRKPGRSSATPQCHHIFSPFHRQKVMRSFTKQGTENTLSGTKLIAVVVHRSFTNIMRESLRWDLQVVNV

SEQ ID NO: 165690 - protein, 50 aa, Glycine max
  unsure (1)..(50): unsure at all Xaa locations
  Clone ID: PAT_MRT3847_120633C.1.pep
FCTSIDDSSCVDIVAPIDRXGNRPLILTLYQNHPLLVQFQPFEVYVSSIA

SEQ ID NO: 165691 - protein, 71 aa, Glycine max
  unsure (1)..(71): unsure at all Xaa locations
  Clone ID: PAT_MRT3847_120634C.1.pep
ISSVGTRKTISLPNFLHLQDWENSGVAKLKGLAAHPPFPNWXYNLKGQNDPPFQKILNPDGEXWDPPCGPL

SEQ ID NO: 165692 - protein, 375 aa, Glycine max
  unsure (1)..(375): unsure at all Xaa locations
  Clone ID: PAT_MRT3847_120635C.1.pep
RVLSWLPTSSFFRLTSVCKRWKSAAASVSFKLACSRVPLRDPWFLMVAPNLNQSIVFDTAENSWKRLNHPHFRSXDSNISCMPVAASGGLVCYRKLLGNFVVCNPVTGSCSELPPLHFALENQSLNAVVMSTTFNDQMSYKIVLVFGELPNLLFKVYNSGSSCWEDEAALRRNVDDNSMDCDSTDDDNVVYFLSKAGTVVVSSMQRSPSKQYSSVITNKDGQEIVYFLSSSGTVVACNLTSRCFLEYPRLLPVFSEYSIDIVECGGEMVVVLLSEFLESTSLRVWKYDXANRCWQQIAAMPAAMSQEWYGKKADINCVGASGRIFICLNSPKLCTYVLCDLVTNKWTELPKCCLNGEVMEFMSAFSFEPRIEASV

SEQ ID NO: 165693 - protein, 283 aa, Glycine max
  unsure (1)..(283): unsure at all Xaa locations
  Clone ID: PAT_MRT3847_120636C.1.pep
MTRPFGVKGGRKRKHAEPKYDAHDEEEEEETQPKKTVVEVEHNQEEEEETPAPAPEDDGLSGIPIAPSANNTNKPNVIFILEKASLEVAKVGKTYQLLNSDDHANFLRKNNKNPGDYRPDITHQSLLSILDSPLNKAGRLRSVYIRTDKXRTEKGVLIEVKPFVRIPRTFKRFAGVMLELLQKWSIYAVGKREKLLRTIKNPVTQYLPINSRKIGLSYSSEKLVDMDDYVSTVPSNMDLVFVVHGKIEADYTEDYVAISXYPLSAAYCITRITGALERKWKIL

SEQ ID NO: 165694 - protein, 63 aa, Glycine max
  Clone ID: PAT_MRT3847_120637C.1.pep
RVRETRGSCLSVHLTFYHENVVVGYGLTEEKKKVELPGMGVPSEIWDTNYWEVESMGIIECAG

SEQ ID NO: 165695 - protein, 279 aa, Glycine max
  unsure (1)..(279): unsure at all Xaa locations
  Clone ID: PAT_MRT3847_120638C.1.pep
MTRPYGVKGGRKRKHAEPKYDEEDQETQPKKAVVEVEHNKEEEQQQQTPEGDELSGIPITPSENNTNKPNVIFILEKASLEVAKVGKTYQLLNSDDHANFLRKNNKNPGDYRPDITHQSLLSILDSQLIXAGRLRSVYIRTEKGVLIEVKAFGRIPRTFKRFAGVMLELLQKLSISAVGKREKLLRTIKNPVTQYLPINSRKIGLSYLQAFLNYMIDLXSEKLVDMDDYVSTVTSNMDLVFVVGAMAHGKIETDYTEDYVAISGYPLSAAYCITRITGA

SEQ ID NO: 165696 - protein, 80 aa, Glycine max
  Clone ID: PAT_MRT3847_120639C.1.pep
SPKRADEKPRFFSLERNHRRITGSRGTLIAGPVYTVEAAKRISGAGFKFYPSVRGLSPFPFSVVSPFSFIKYNAIPTNLY

SEQ ID NO: 165697 - protein, 58 aa, Glycine max
  Clone ID: PAT_MRT3847_12063C.1.pep
QERLFYPEEGYLVRGKHTLWISVSHQQSLGIKTQSLVRMISLFVYRINSSLALGPKKN

SEQ ID NO: 165698 - protein, 168 aa, Glycine max
  unsure (1)..(168): unsure at all Xaa locations
  Clone ID: PAT_MRT3847_120640C.1.pep
MIYSPSVTTVNRAGADMGATFTDLNSMAGFPIIKTNNDITSIDTNNGRXQCIQVWPPIGNKKFETLSYLPYLDDAQLAKEVEYLLKKGWIPCLEFKSEHGFLCREHNKTPGYYYRRYCTMWKLPIEGCTDANNVVEEDKHDKTAXPNWLISIFRNDNEMQVHCISVNY

SEQ ID NO: 165699 - protein, 47 aa, Glycine max
  Clone ID: PAT_MRT3847_120641C.1.pep
RGPKIFSNSARGKQKLGAPNPENPQIPGPRGPQPGTPPNQGGPQEPR

SEQ ID NO: 165700 - protein, 90 aa, Glycine max
  Clone ID: PAT_MRT3847_120642C.1.pep
PGRPTRPRTESEMERVIMKRYLGMKEPTKVEFYKDHIFNHMSEFLSKQEVVSAILHDVQHLIKQDLSLKSSFSSARFVLAGNGSWQQPSR

SEQ ID NO: 165701 - protein, 38 aa, Glycine max
  Clone ID: PAT_MRT3847_120643C.1.pep
LLWYVLDVKAVPVRIVRSFFMLLFFFLFVNIHLNRWIP

SEQ ID NO: 165702 - protein, 69 aa, Glycine max
  Clone ID: PAT_MRT3847_120644C.1.pep
STWSRESDFLEWCLARTVPARVHCHSHSCCCFWSSEYLPVLSGVFTFCAHSNCTLPSTMCTGSYMLTCN

SEQ ID NO: 165703 - protein, 23 aa, Glycine max
  Clone ID: PAT_MRT3847_120645C.1.pep
LNKCTNDYYMTDIVKLMSKHRKV

SEQ ID NO: 165704 - protein, 81 aa, Glycine max
  unsure (1)..(81): unsure at all Xaa locations
  Clone ID: PAT_MRT3847_120646C.1.pep
ELHTKFWAPKLNFNNYYRYTTKAPTVXAHKIVYLFIKNPAQNPKPSAVSSSSPDINHQLSKYYGPDKRIYLPDNLFYRSEV

SEQ ID NO: 165705 - protein, 121 aa, Glycine max
  unsure (1)..(121): unsure at all Xaa locations
  Clone ID: PAT_MRT3847_120647C.1.pep
SSAHCVXADAWEKKKKKKKKKKKKKKKKKKKKKKKRETRFKKKKVGAAFLKDPSFFMVASKFFFFFLGYQNSIGGPFFFTDLIGIALGSPFLMGLKNIPFWPVGFLEKGPALFAFSNISST

SEQ ID NO: 165706 - protein, 235 aa, Glycine max
  Clone ID: PAT_MRT3847_120648C.1.pep
MEKEKEKEKKSKLKNKIFKILPKAAAMSVTFQNPPFSPGRDHKCKHYGGKGFFSGPMIPDEARRKAKNGHGVETQEPTSPKISCMGQIKHKKGGAKNMSMSMPTPRDPEVKKHASKFQRMMLFHAKKPKQSDADVESERAPAPPLNHMRRFASGRETLSNFDRKAQIAPTHQERDHDDVDRLDDEIIIPFSAPLTLGGATALNLNVQPRKEINLWKRRTMAPPRPLKLNPLLTAK

SEQ ID NO: 165707 - protein, 66 aa, Glycine max
  unsure (1)..(66): unsure at all Xaa locations
  Clone ID: PAT_MRT3847_120649C.1.pep
SSDAGPIEAFSRFVKILKDMERXVIEQDNVIPLSTRDGPVKMPYTELQPXREEGGSFKVFPPSISI

SEQ ID NO: 165708 - protein, 63 aa, Glycine max
  unsure (1)..(63): unsure at all Xaa locations
  Clone ID: PAT_MRT3847_12064C.1.pep
PTPHQRLXSPVQHPTPSSTKQLQLNTERQYSVKALSPWFRVENAHTKEQCAFVHSPDAGLTRN

SEQ ID NO: 165709 - protein, 75 aa, Glycine max
  unsure (1)..(75): unsure at all Xaa locations
  Clone ID: PAT_MRT3847_120650C.1.pep
GRQXDKKAXTEANXKKXGXHTXEQXXXKXPXXXXPXAXXXKXAXREXXXRQGXRXXGXXGDQXSXXXGDHRGESR

SEQ ID NO: 165710 - protein, 103 aa, Glycine max
  Clone ID: PAT_MRT3847_120651C.1.pep
MSKRGRGGSAGNKFRMSLGLPVAATANCADNTGAKNLSIISVKGIKGRWNRLPWACVANMVMATVKKGNPDLRKKALPADIVRQHRPWRQRDGVYMHFKDNAG

SEQ ID NO: 165711 - protein, 63 aa, Glycine max
  unsure (1)..(63): unsure at all Xaa locations
  Clone ID: PAT_MRT3847_120652C.1.pep
KXXXSXERLXXKRSTARXEXXXXXHWDXDTVLXXTDAXMAIXVKRHRXWCCXVLCFLCCVVKV

SEQ ID NO: 165712 - protein, 89 aa, Glycine max
  Clone ID: PAT_MRT3847_120653C.1.pep
VVHIMHDLLNMRNTNFIIKKIMKDRPVRTLEGFANWSLSLGAAFPSKCHFAKCGLDMRESHDLHTNLKLGRDFTGNLNRISIIISCGRN

SEQ ID NO: 165713 - protein, 105 aa, Glycine max
  unsure (1)..(105): unsure at all Xaa locations
  Clone ID: PAT_MRT3847_120654C.1.pep
MHIFLKTLSGKTITLEVXEASDPIDNAKARGQDKEGVPPDQRRLIFAGGGLEDGRTIAGYYIQKEGTLLLGLCVRGGASTRKKRTYPTPGGIDLGRNMVWLGILP

SEQ ID NO: 165714 - protein, 359 aa, Glycine max
  Clone ID: PAT_MRT3847_120655C.1.pep
MGSSTNGGVPPGFRFHPTDEELLHYYLKKKVSFQKFDMDVIREVDLNKMEPWDLQERCRIGSTPQNEWYFFSHKDRKYPTGSRTNRATNAGFWKATGRDKCIRNSFKKIGMRKTLVFYKGRAPHGQKTDWIMHEYRLEDGNDPQGSANEDGWVVCRVFKKKNLFKIENEGGSTHKPDHQINNSSNTNARSYRENHYLLHQQQNPRNSSGLELDKPELALHYPPPHLQNPPYSLFQSQPLLQTQKPMVYDYSYTSDTPIMAKQLMTNPRDCESGSDGLRYQVSESGMEVGSCEPNQEMGTGRGEGINEWGVLDRLVTSHLAGNEDSSKGVRFEEANPQSVHQINQLSLRGEMDFWAYGKQ

SEQ ID NO: 165715 - protein, 302 aa, Glycine max
  Clone ID: PAT_MRT3847_120656C.1.pep
MAVELMGFPQMDEQKAIEEAAAEGLKGMEHLLRLLSHQPSHLRTHHTDATVSNFKKLISLLNRRTGHARFRRAPLPSTSNSLAPSPPLANPVTFAPSQSQSLTLDFSKPNMFNTTNAKSMDLEFSKETFSVSSNSSFMSSAITGDGSVSNGKLGSSLFLTPPPVSAGKPPLSFAPIKKRCHDHREHSDDISGKLSGSSKCHCTKRRKNRVKKTVRVPVISSKIADIPPDEYSWRKYGQKPIKGSPYPRGYYKCSSVRGCPARKHVERAPDDPTMLIVTYEGEHRHSMQENISGGVGLGFEST

SEQ ID NO: 165716 - protein, 48 aa, Glycine max
  Clone ID: PAT_MRT3847_120657C.1.pep
AENIITEDVLLIYTRPKNTVYSRLENGFHDRAKQICYALLFAGLPARR

SEQ ID NO: 165717 - protein, 73 aa, Glycine max
  Clone ID: PAT_MRT3847_120658C.1.pep
GQTILFYFGIKGEGLPWLSLVLSFQLQVLSSVPRGSGGRMDQAGGFLMEGNLRCKKDEQQLADDLWALQRALL

SEQ ID NO: 165718 - protein, 229 aa, Glycine max
  Clone ID: PAT_MRT3847_120659C.1.pep
MSCREGFMSPQTDTKASVGFKAGVKDYKLTYYTPDYETKDTDILAAFRVTPQPGVPPEEAGAAVAAESSTGTWTTVWTDGLTSLDRYKGRCYGLEPVAGEENQYIAYVAYPLDLFEEGSVTNMFTSIVGNVFGFKALRALRLEDLRIPTAYIKTFQGPPHGIQVERDKLNKYGRPLLGCTIKPKLGLSAKNYGRAVYECLRGGLDFTQKKKKKKKKKSGRTRGSKHTYA

SEQ ID NO: 165719 - protein, 58 aa, Glycine max
  Clone ID: PAT_MRT3847_12065C.1.pep
SEYDSALSMDEAMPSCIRSVTHWCQLQYIQFHSYEHEHDACSMQIDLTVLSERHHQLK

SEQ ID NO: 165720 - protein, 32 aa, Glycine max
  Clone ID: PAT_MRT3847_120660C.1.pep
TPGILERPIIHISRSLLESFDDYAREYCRTRL

SEQ ID NO: 165721 - protein, 53 aa, Glycine max
  Clone ID: PAT_MRT3847_120661C.1.pep
EIHFFILIFKANENHLNYFFICKEGQIITHTHPYIGSISSEKHHSYMSEKNKY

SEQ ID NO: 165722 - protein, 149 aa, Glycine max
  Clone ID: PAT_MRT3847_120662C.1.pep
KQLLNLMANGEGSDIDEVNYEEEENTAQEEDDNVMEEEEDEEDEYTFRFKNGMNPLDFVDDNDDSGIQPYQRFVRFEQEALADKKRKAIDHCHIEEPPSKMAREGDVTGAKIAEIMRAIDYYGERKRSRKPNKRGRRKGSKNKDDPKLT

SEQ ID NO: 165723 - protein, 143 aa, Glycine max
  unsure (1)..(143): unsure at all Xaa locations
  Clone ID: PAT_MRT3847_120663C.1.pep
PSTTAKLQCLLLQLVNLIKRGGDLSTACPTPLVSQADGLMQSSLAVAQQPVPVFRPNGVHIYNYPTNYITYSPYFSPFYVLPPAIHXXTGDGAFTQQPPARTVYTSPPTFCSAGMKYTLSQFKPGANAGNPTHLVMPNAHGVY

SEQ ID NO: 165724 - protein, 76 aa, Glycine max
  Clone ID: PAT_MRT3847_120664C.1.pep
MVFHMLAEAVHTQQCIVLSVPSCLNSFQAQGMFGMADSDVRDRPQHGLVIPSAAKVLRHVRCTCSIQGEKEHSVPS

SEQ ID NO: 165725 - protein, 83 aa, Glycine max
  Clone ID: PAT_MRT3847_120665C.1.pep
RGLSLMQNNWVRTMFYSECRCEGKGDRINLVGTIEKLLRWVCAAVRFDFFNCGALFSLGGSISMFSLLFFLSKLSSQICHNNE

SEQ ID NO: 165726 - protein, 45 aa, Glycine max
  Clone ID: PAT_MRT3847_120666C.1.pep
LELYGIMCNRRNCSRPGCCQMTRQSLSHSIGTLPFCPCSHAQSQL

SEQ ID NO: 165727 - protein, 177 aa, Glycine max
  unsure (1)..(177): unsure at all Xaa locations
  Clone ID: PAT_MRT3847_120667C.1.pep
TSSRNLCFPCQHKCLSSTWFRQYGLWERYAELYPNEDLVYTVGISDYRKDWFFAQVNRKKDNGTDIGTTWQINFKLDSVNTNXTYTLRVALASVHSAELEFLIYNFKSNPPLFSSGVIGKENAIARHGIHGLYWLFSIHIQGTLFVQGNNTIFLTQTRDTSPFIGIMYDYIRLEYKR

SEQ ID NO: 165728 - protein, 369 aa, Glycine max
  Clone ID: PAT_MRT3847_120668C.1.pep
MWVAAATKPFIKFQFHRHTTSLPLLLMANQASLSFSSSVSPVHAPLKRVGTHNGSFHCDEALGCFMIRLTNKFNSAEIVRSRDPQVLEVLDAVLDVGGVYDPARDRYDHHQKGFEEVFGHGFSTKLSSAGLVYKHFGKEIIAKELEVDEEHRDVHHIYLAVYKSFMEAIDAIDNGINQYDTDQPPRYVNNTHLSSRVGRLNLDWTDPDQSPEKENEAFQRAMALAGSEFLDSVRFHVNSWLPARSIVMETLAARHTVDPSGEILVLTKFCPWKLHLFELEGELKNDPAVKYVLYQDERSKHWRVQAVAVSPDSFQSRKALPSQWRGLRDEELSKKSGIPGCVFVHISGFIGGNQNFDGALAMAKAALKM

SEQ ID NO: 165729 - protein, 38 aa, Glycine max
  Clone ID: PAT_MRT3847_120669C.1.pep
EKVPLGEATPPSKKFGEPGPQQSYRAPPKGNLGPKKRG

SEQ ID NO: 165730 - protein, 116 aa, Glycine max
  unsure (1)..(116): unsure at all Xaa locations
  Clone ID: PAT_MRT3847_12066C.1.pep
MENPRRGRLVVGLWFNDECAKDVIQGWILXVXSLLPVXPFGEECAKRNRLPMLTQAWEQLFSEGRQDVHVHNALGKTIIDGNKPSVHXLTTNPFYHRLHVGRYXRNRDPTLPGCCT

SEQ ID NO: 165731 - protein, 135 aa, Glycine max
  unsure (1)..(135): unsure at all Xaa locations
  Clone ID: PAT_MRT3847_120670C.1.pep
NCKPILLDIQHSELQWSKGEGNIDXNRISSIQKKLNEVEDLASNRILTDQELKIRNSLQQELWNVSNVVESLLRQKSRISWLKEGDCNSGYFHRIIKFRRAFNAIPXISIDGVWVQQPNTVKNAAGNYFQNQISE

SEQ ID NO: 165732 - protein, 86 aa, Glycine max
  unsure (1)..(86): unsure at all Xaa locations
  Clone ID: PAT_MRT3847_120671C.1.pep
GKMENGLIENHGFQPQYGVSELSEKNFWRMFDAGLYEPFRGKYGAVGPFMSVYFKSKKGRKTXKEVQKAEQGPLETAYAKVVQPVD

SEQ ID NO: 165733 - protein, 405 aa, Glycine max
  Clone ID: PAT_MRT3847_120672C.1.pep
MVEMKGICNVLHGLKPVLLMVLVQIAYTAVNVLFKLAINDGMSVKVATAYRLTFGSAFTVPLALISERNKRPEMTSTRPYGCEKTTEGGGSLFQNLFYESLALTSATFASALYNLIPAITFVLAISCGFERLNLRVAAGRAKVLGTLLGIGGAMLLTFIKGAEINIWPFHINLMHPDQHQNSHVASLNTDSGNNKLLGAICSLASCFSFALWLTIQAKMSKEYPCHYSSTALMSTAGAIQATAFGFCFERDLTQWKLGWNIRLLAVAYSGIVASGIVVIITAWCIQMRGPLFASVFNPLMLVLVAIAGSLMLNENLYVGSVVGAVLIVCGLYMVLWGKSKEMKNITQLVPSETIREAEAIEVVVMSISTPIDYEKCDQNNQGERNVDKEDCDDLTKNKEEDDIGI

SEQ ID NO: 165734 - protein, 245 aa, Glycine max
  Clone ID: PAT_MRT3847_120673C.1.pep
AYHNILTYPSLSMENNTTSRSSICWKIRQALATNPAFRVIHHRIKHYYQEPRPVPTHPNSPSLTPSTHLPQNMMKAKNIKGEGEIPIKFDNSIPTSTPMVHGQVSKVASPQVGISAKVEPEPWHVQGSRVGVFKGEHNNGKDTSTTGPLKEQHGLGMQQGKKTVVDINDTFTEYIERARHRIRTVSNVGRGQSHSVSDETSGNKNNKMENHTDQFSDFIQHSKKKMRTTTSNVGKTSTLKRGYKS

SEQ ID NO: 165735 - protein, 33 aa, Glycine max
  Clone ID: PAT_MRT3847_120674C.1.pep
LKNYSCSLIKISLKIILHLFLYGSFIVFNAKHS

SEQ ID NO: 165736 - protein, 81 aa, Glycine max
  Clone ID: PAT_MRT3847_120675C.1.pep
PSRRSKILLLIAKMSPAPGMSFVVGIGEDQSTCFDPHYINMAPVIRHSQIALAIMYETCNLLVKQVHLVKHKYSRAEIPSR

SEQ ID NO: 165737 - protein, 47 aa, Glycine max
  Clone ID: PAT_MRT3847_120676C.1.pep
VVQTSNNRYHSFMPINKRDIIETIIVSVFISLKIGSAIRANWFILSC

SEQ ID NO: 165738 - protein, 59 aa, Glycine max
  Clone ID: PAT_MRT3847_120677C.1.pep
SKFPDLVWPIGGTYGGSTKEKKEHARDGAQTIKEGFLYIECLTQFYNISKESQYNTNYS

SEQ ID NO: 165739 - protein, 79 aa, Glycine max
  Clone ID: PAT_MRT3847_120678C.1.pep
HSGKKGPWTWASKTPITSKGNIIINPSHSDLTLGTPYLENDGLLRRLKERTESKETRTRPNQRNGSKETRTRPNQLFGI

SEQ ID NO: 165740 - protein, 43 aa, Glycine max
  Clone ID: PAT_MRT3847_120679C.1.pep
GSGQLSNSYLGYFRSQHLTWDGNNFSHLMVKDASSDPPFFSRS

SEQ ID NO: 165741 - protein, 73 aa, Glycine max
  Clone ID: PAT_MRT3847_12067C.1.pep
GGLNTFSILVNILLVFTFNLCNFLSFVYNPNNVETFCFYSSITKKCLCDSFEVLPHRNATLQIAYIATLDGTK

SEQ ID NO: 165742 - protein, 31 aa, Glycine max
  Clone ID: PAT_MRT3847_120680C.1.pep
ARGCEKTTEGLIYNNLKFQVNQIFKQLFSLL

SEQ ID NO: 165743 - protein, 39 aa, Glycine max
  Clone ID: PAT_MRT3847_120681C.1.pep
LHLSGHSTMLVNIILQCVTDCHLMDRTRVTSYDDVYDQF

SEQ ID NO: 165744 - protein, 442 aa, Glycine max
  unsure (1)..(442): unsure at all Xaa locations
  Clone ID: PAT_MRT3847_120682C.1.pep
HASGGNYLGQYTEGAVKQGLLDEASINNAXSKQFCPLMRLGFFDGDPSKQTYGNLGPNDVCTSENRELAREAARQGIVLLKNSLGSLPLNAKAIKSLAVIGPNANATRVMIGNYEGIPCNYISPLQALTALVPTSYAAGCPNVQCANAELDDATQIAASADATVIIVGASLAIEAESLDRINILLPGQQQLLVSEVANASKGPVILVIMSGGGMDVSFAKSNDKITSILWVGYPGEAGGAAIADVIFGFYNPSGRLPMTWYPQAYVNKVPMTNMNMRADPATGYPGRTYRFYKGETVFSFGDGISFSSIEHKIVKAPQLVSVPLAEDHECRSSECMSLDIADEHCQNLAFDIHLGVKNTGKMSTSHVVLLFFTPPDVHNAPQKHLLGFEKVHLPGKSEAQVRFKVDVCKDLSVVDELGNRKVPLGQHLLHVGNLKHPLSLRV

SEQ ID NO: 165745 - protein, 85 aa, Glycine max
  Clone ID: PAT_MRT3847_120683C.1.pep
LYQEVEPCPYMRSLIYYIFFVGRTISIMLWLNDLLPDCALLCKQNVYFCGTINAGDMGEVLMPQIMSCDTAKTQGPGADCLAHTT

SEQ ID NO: 165746 - protein, 293 aa, Glycine max
  unsure (1)..(293): unsure at all Xaa locations
  Clone ID: PAT_MRT3847_120684C.1.pep
KINILLPGQQQLLVSEVANASKGPVILVIMSGGGMDVSFAKSNDKITSILWIGYPGEAGGAAIADVIFGSYNPSKSFTASLVXKKFQSYNDTSLTLMDNXPNAGGRLPMTWYPQSYVNKVPMTNMNMRADPATGYPGRTYRFYKGETVFSFGDGISFSSIEHKIVKAPQLVSVPLAEDHECRSSECMSLDVADEHCQNLAFDIHLGVKNMGKMSSSHVVLLFFTPPDVHNAPQKHLLGFEKVHLPGKSEAQVRFKVDICKDLSVVDELGNRKVPLGQHLLHVGNLKHQLSVSV

SEQ ID NO: 165747 - protein, 126 aa, Glycine max
  Clone ID: PAT_MRT3847_120685C.1.pep
MGKRGLGKHQKRLSAPSHWLLDKLSGAYAPKASPGPHKLRDSLPLIIFLRNRLKYALNAREVNSILMQRLVKVDAKVRTDSTFPTGLMDVISIEKTGENFRLIYDTKGRFTVHRITDEEAQYKLGK

SEQ ID NO: 165748 - protein, 61 aa, Glycine max
  Clone ID: PAT_MRT3847_120686C.1.pep
PMLLYTSLCALRAPFISIVAMSFDSILVFGIRRFSFCMKCPRLGSISVPSPNFFRFLTTLD

SEQ ID NO: 165749 - protein, 105 aa, Glycine max
  Clone ID: PAT_MRT3847_120687C.1.pep
KLGGFSGQIRETGYVPDTKYVLPALYEGEKKKALQFHSERLAIAYGFLRSPPRGSLRILKNLRFCGGCPHAIQILSNIVGRGLIVWDNKRFPPFKNGKCSCGDFW

SEQ ID NO: 165750 - protein, 59 aa, Glycine max
  Clone ID: PAT_MRT3847_120688C.1.pep
KYRFRVKQSKTNGYFVTFQKIPSLTVLHPEIYSLLSSGIVLRIHTRSVSISFILEHLHC

SEQ ID NO: 165751 - protein, 100 aa, Glycine max
  Clone ID: PAT_MRT3847_120689C.1.pep
YLLSIKSSPTMKAILVFILLLASIFFLPSSTLARQLEVVTGGTQNPNNPAFKCSRGGSYRPCAPSNSPPRPPCNGYIRSCHIASPPRPPCNQYSREGCLP

SEQ ID NO: 165752 - protein, 36 aa, Glycine max
  Clone ID: PAT_MRT3847_12068C.1.pep
WCRRRMFLALPLYVPPVETSFSHYVSSGYKSVGRVG

SEQ ID NO: 165753 - protein, 88 aa, Glycine max
  Clone ID: PAT_MRT3847_120690C.1.pep
RGDKEAPETAPLQHRFFQPLLSTNYYSYVITMVNLQKVEQHVTTEGQRKKNKRKKQVLVPRPACSWVYFSKEFIKEYIASHPESPGLK

SEQ ID NO: 165754 - protein, 115 aa, Glycine max
  Clone ID: PAT_MRT3847_120691C.1.pep
VKSPKLSGGKPGPHKNQGNGAGFTPGVLDVGLLRKVVPISSEKALETAKLLSFKKGFLVGKSSGATAAAAIKIAKRPENAGKLINAVFPSFGERYLSSGLFETLKPKTKSMVFQP

SEQ ID NO: 165755 - protein, 90 aa, Glycine max
  Clone ID: PAT_MRT3847_120692C.1.pep
ENILYVLINRLCFMASNVQCYITLSKGPESVLVPVCTSPQYNRTVTASESRMSAHETQSTAVRCAHHLFKVASSYHPAVPPCHLPNMPCP

SEQ ID NO: 165756 - protein, 125 aa, Glycine max
  Clone ID: PAT_MRT3847_120693C.1.pep
RVKLIPYYTGRGKTQNYISHGSPHEVHIRVQSYPPNHFRNRTNDVLTHRPSLMLDRFWCITKTVLPTLNGVDFINDTTLRRHWLSPNKGTTLNILHLKLHNGQGGRRNYSRNGLTSLLMKILART

SEQ ID NO: 165757 - protein, 42 aa, Glycine max
  Clone ID: PAT_MRT3847_120694C.1.pep
YPCCRCPSPGKKSYWQKRRLPCWALKDQWIIKLTCHKPLDIL

SEQ ID NO: 165758 - protein, 72 aa, Glycine max
  Clone ID: PAT_MRT3847_120695C.1.pep
FKNQGKGFFFFLTKRKGWFLQSYPCWLQREGKVTCFFPLPGSGGFPPQAKGLGVKKGPGFPISQFFCKNIPQ

SEQ ID NO: 165759 - protein, 73 aa, Glycine max
  unsure (1)..(73): unsure at all Xaa locations
  Clone ID: PAT_MRT3847_120696C.1.pep
EPKDLWKKIPQTQGVYKWRPXFRKSFKXKKGPLFNKKTSPSFQPQGLILKNPILNVPLFKKSLPLVCVCFKWK

SEQ ID NO: 165760 - protein, 81 aa, Glycine max
  Clone ID: PAT_MRT3847_120697C.1.pep
PRFRFKKKKKKKKKKREKKKKKKKKKKKKKKKKKKKKKREKKKKKKKMGGPFKRTKIFFPWVPNFKIFLREIKMDFKGKNF

SEQ ID NO: 165761 - protein, 57 aa, Glycine max
  Clone ID: PAT_MRT3847_120698C.1.pep
VHDSGKLQSLSLYAQMVRVHVTVNNKFSGRHSPIMGRRLGSSFFYSTILSFQFIHTA

SEQ ID NO: 165762 - protein, 172 aa, Glycine max
  Clone ID: PAT_MRT3847_120699C.1.pep
MDLDPRQYENLAVNDNDIHNIVLSYLIHNCYKESVESFIACTGAKQPTDYLEDMDKRKRIFHFALEGNALKAIELTEQLAKDILENNKDLQFDLLSLHFVELVCSRKCTEALEFAQTKLGPFGKEPKYMEKLEDFMALLAYKEPEKSPMFHLLSLEYRQQVADSLNRAILDT

SEQ ID NO: 165763 - protein, 49 aa, Glycine max
  Clone ID: PAT_MRT3847_12069C.1.pep
CVCALVVGKLENSKILIFLFERLVQQGVCVCVCVCVYEWYIYYIILKEN

SEQ ID NO: 165764 - protein, 92 aa, Glycine max
  unsure (1)..(92): unsure at all Xaa locations
  Clone ID: PAT_MRT3847_1206C.1.pep
REGSLYYLKKVGYNPDKIPVVPISGFEGDNMTERSTNXLDWYKGSTLLDALDQISERKKSSDKPLRVPLQDVYKIGGTGTAPAGRVETGVLK

SEQ ID NO: 165765 - protein, 73 aa, Glycine max
  Clone ID: PAT_MRT3847_120700C.1.pep
KKMVGFTFFFIASFPLQSIPNGGKNRFSLFPLFPIPFIDIHSAHFKQSIRCYYKKKKLFLSYSHLTFQHLQIM

SEQ ID NO: 165766 - protein, 82 aa, Glycine max
  unsure (1)..(82): unsure at all Xaa locations
  Clone ID: PAT_MRT3847_120701C.1.pep
XYKXXPILTWXFDMXIVSXVXLSSAXAXQSLAXXCXSXCXXXXRIPSTXDVHTSKSLRRDXXXXXWQXTNHXLQDAFHPSKM

SEQ ID NO: 165767 - protein, 81 aa, Glycine max
  unsure (1)..(81): unsure at all Xaa locations
  Clone ID: PAT_MRT3847_120702C.1.pep
IFRTDGIXEQDIVKXVDTFPGQSIDFFXALRXRVYDDEVRKWIXRXXVDSVXKXLXNSKDGXPTXSSPRLWESSREQAPQG

SEQ ID NO: 165768 - protein, 145 aa, Glycine max
  unsure (1)..(145): unsure at all Xaa locations
  Clone ID: PAT_MRT3847_120703C.1.pep
MQTKALLPKKKPQKCSTGLAPGEYXCPTTTTKLLIYXCCDNEYPXTYDDYMLNNGGIGLFPKLIDEPNAKSSPAKEEPSRILTLNRDMSLDSVEVDYSKELSAAVDHHAHLQIDASTNVTXKQYANXISSPTRREQEIWDRATKA

SEQ ID NO: 165769 - protein, 56 aa, Glycine max
  unsure (1)..(56): unsure at all Xaa locations
  Clone ID: PAT_MRT3847_120704C.1.pep
CTRTEASILKSGRPRCFLXLSVQLPDAQRKDRKNKIQLLHKRRGKKCQNSTKPYEN

SEQ ID NO: 165770 - protein, 68 aa, Glycine max
  Clone ID: PAT_MRT3847_120705C.1.pep
SLNFLLVRSPLLHHGSPIEAQVQAHLRDFKDRRPTHRSTPEQYLTQNSHIGAYHGLTLETQLTVPLNT

SEQ ID NO: 165771 - protein, 57 aa, Glycine max
  Clone ID: PAT_MRT3847_120706C.1.pep
IPKSTFKKETPNLMTKLSINHINNPSINYRIPYSKTSILSHTSITDTSSTISTTVLF

SEQ ID NO: 165772 - protein, 94 aa, Glycine max
  unsure (1)..(94): unsure at all Xaa locations
  Clone ID: PAT_MRT3847_120707C.1.pep
MKLGKLDLNNNHFMGPIPXFKAATVSYDVNNFCVSKPGVPCAFEVMALLGFLGGLNYPLNLVDSWTGNDPCGGNWLWIKCNADGKVIMINWPNL

SEQ ID NO: 165773 - protein, 418 aa, Glycine max
  Clone ID: PAT_MRT3847_120708C.1.pep
MITLFLYSKRYLIQLMDSAPSSSWLQAFSFLALVWLFNCGCVHGASPAVKVGNFSKVEDAGNFHIYYGQTFKVIKNSADGQSYLLLQNNSRIASRTKYCTSRIKSFVIPLSNYSVDTTFFPVSFVELLGLVESLKGITSDYVASPCVLKLYQGGQLEMFNNSDYQKLAEFSSYFLSDTDQQPACNFATFVPFIEDIPLQRAEWIKFMGAFANVEARANQVYTAVKANYLCLAKIATSRTTFKPTVAWMRYKNGLWSFTQEKYQLKYVQDAGGEILGANKNTYNVSDPDDLEEFHAILCTVEVVIDETLTSDPVNYTFSTFIQNLNVEDRSCFSFISNTSLWRYDKRVYNSVALDWYNGAVSQPQLALADLIEVLFPTENYTMTYFRNIAKGEVPINIGPEMCDRDTSTAMEPTIVACG

SEQ ID NO: 165774 - protein, 53 aa, Glycine max
  Clone ID: PAT_MRT3847_120709C.1.pep
MIRAPFPLLLLQIVVLASDAVSLGIAHWAKENPKQNRSLQSCNIEIGSYRQQA

SEQ ID NO: 165775 - protein, 54 aa, Glycine max
  Clone ID: PAT_MRT3847_12070C.1.pep
QVSSSQLCVITSREYGKSLSFRYGVWIVQCSHIHTPLVKVVNNHVRVRKRLCCV

SEQ ID NO: 165776 - protein, 53 aa, Glycine max
  unsure (1)..(53): unsure at all Xaa locations
  Clone ID: PAT_MRT3847_120710C.1.pep
MKPAMASSCAFSSIAAFAIYTPISHKNGSLLXSTKASFLSGRKLNVNNFTLPI

SEQ ID NO: 165777 - protein, 47 aa, Glycine max
  Clone ID: PAT_MRT3847_120711C.1.pep
THCMFYQWSIFFLNYNKFCTVRRTCDACHLIELKTNHPLLSCGTGSF

SEQ ID NO: 165778 - protein, 61 aa, Glycine max
  Clone ID: PAT_MRT3847_120712C.1.pep
KESTTRSERLKANNWTHTPLKWRKNTPQKVGPQGGQIRPRSHRCDRVPTKLWRGAMGIWPL

SEQ ID NO: 165779 - protein, 79 aa, Glycine max
  unsure (1)..(79): unsure at all Xaa locations
  Clone ID: PAT_MRT3847_120713C.1.pep
LXEHLXMXSPXXSXAXRXSHPAXXXTXLPXTXSPXPTXXHPXPPNXXYDXRXPXXXRXXXXXXXXSSXIPXLRXRAGXX

SEQ ID NO: 165780 - protein, 56 aa, Glycine max
  unsure (1)..(56): unsure at all Xaa locations
  Clone ID: PAT_MRT3847_120714C.1.pep
CTSIHSKARFSPTCVEVVLNKTKLVSKFEARWNVYFVEXNGLHLICFQCGTYGHKA

SEQ ID NO: 165781 - protein, 81 aa, Glycine max
  Clone ID: PAT_MRT3847_120715C.1.pep
TNLFKQLHTFSRGNDKKVLTNPEFNSNLCHIIKSISNSNLFRPGMLAHRTTFFFLRMQNVMRVSVPHSLTSFLITKTVHML

SEQ ID NO: 165782 - protein, 182 aa, Glycine max
  Clone ID: PAT_MRT3847_120716C.1.pep
MSNKSPVFPIPDPQHFSDYGFDPQINYFQVLEEAMKHKRETARSIDSIHFKLQKPISKDDSRSKAHRPRKKRWWRSALLFFKWRWAHHHHNNDDHDIHQARARAFRASISGPVYWTEARSGSATPYRSTSRPSSGPLAGTVTPPAKDDVDTPYLSLRELNMEQQQQLQQRMSTSAMPIYLVT

SEQ ID NO: 165783 - protein, 127 aa, Glycine max
  Clone ID: PAT_MRT3847_120717C.1.pep
NSLSGELFAHDGMPYLDNLEVFDASNNQLEGNLPSFTFVVSLRILRLACNQLTGLLPEALLKESSMMLSELDLSQNKLEGPIGIITSVTLQKLNLSSNKLYGPLPLRVGHCSIIDLSNNTLSGNFSR

SEQ ID NO: 165784 - protein, 59 aa, Glycine max
  Clone ID: PAT_MRT3847_120718C.1.pep
SKNKWQCSLSTTTKVGWLQMLCKFFNDLEAWGLVGDQDDALHLAERVGVRVDGRVAVRV

SEQ ID NO: 165785 - protein, 62 aa, Glycine max
  Clone ID: PAT_MRT3847_120719C.1.pep
PSLNIPSHSPPLSDTPLKLYFHLNKNFPLYYINHHYISFHQNPITSSSYHLPFLLPSSIFSI

SEQ ID NO: 165786 - protein, 71 aa, Glycine max
  Clone ID: PAT_MRT3847_12071C.1.pep
TGLKKQNVCVSLSLLVFERLQFIWHLMYILQCKDLLLSLFSVFNLTPIIKLWVLGVIGGDIWGILIRRILV

SEQ ID NO: 165787 - protein, 374 aa, Glycine max
  unsure (1)..(374): unsure at all Xaa locations
  Clone ID: PAT_MRT3847_120720C.1.pep
HLSESPGSLSCQEFQNNQHDNCTHLPFHPRRVEVELPVRVDFVGGWSDTPPWSIERAGCVLNMAISLEGFQPIGTIIETTKTEGILFTDDAENQLFVEDYTSICAPFDGDDPFRLVKSALHVTGIIHDNILVDMGMHIKTWANVPRGSGLGTSSILAAAVVKGLLXVIDGDDSTENVARLVLVLEQLMGTGGGWQDQIGGLYPGIKCTSSFPGIPLRLQVVPLLASPQLISELQQRLLVVFTGQVRLAHKVLQKVVVRYLRRDNLLVSSIKRLAELAKIGREALMNCDVDELGEIILEAWRLHQELDPYCSNEFIDRLFSFATPYCCGYKLVGAGGGGFALLLAKDAQLAKELRRRLEDEKHFEVKVYDWQIFL

SEQ ID NO: 165788 - protein, 70 aa, Glycine max
  Clone ID: PAT_MRT3847_120721C.1.pep
IVSVLLGYCWRPPVPMTLLSEPPGSRVKRSLRGAHHFSSELANEFCCRRRRGLEVGSAHGWVSLSQSIRV

SEQ ID NO: 165789 - protein, 42 aa, Glycine max
  Clone ID: PAT_MRT3847_120722C.1.pep
FKNPIENFFKRIVQETNDPLFNSLYQGDHETYFSLLIRESYS

SEQ ID NO: 165790 - protein, 127 aa, Glycine max
  unsure (1)..(127): unsure at all Xaa locations
  Clone ID: PAT_MRT3847_120723C.1.pep
MTLRRYHCNINDHSSWTCPTREVGRDKLSYVTITDGSIIMTSASMANLNLSSDIEHNQFHASAXVATSETTHHTPIEAPYAATLRKVTQADDPAHVSTYANRRGARRKGVPWTEEEHQLYLIGLQKL

SEQ ID NO: 165791 - protein, 69 aa, Glycine max
  Clone ID: PAT_MRT3847_120724C.1.pep
FNRLYDSNFFFYSLAPTLWAVHCFTVEHVSIFYLPILFYFGSKTLNTFPESHAWWSPYLIKNTLALSEI

SEQ ID NO: 165792 - protein, 66 aa, Glycine max
  Clone ID: PAT_MRT3847_120725C.1.pep
GPFTTLTSPYKGDRVYLPLDLGPYIPPSLQRPRNVLLNATLILNVLIDYTSLPMASTINLASKTIS

SEQ ID NO: 165793 - protein, 85 aa, Glycine max
  Clone ID: PAT_MRT3847_120726C.1.pep
GVHKLQNCILQMSMAIVLVYFLFLALNALVLVEVLPIAIEVDTIMSAFLYALHEFQFLMPSHDLKSCHDIIVYESISKGGLHVRE

SEQ ID NO: 165794 - protein, 58 aa, Glycine max
  Clone ID: PAT_MRT3847_120727C.1.pep
MYSIHNHLSIGLNKLHTRTSSFWGPSDLHKPASGTLFVGTLTFRIKKTTKKEGIASGS

SEQ ID NO: 165795 - protein, 160 aa, Glycine max
  Clone ID: PAT_MRT3847_120728C.1.pep
MLDMSNNSINEDISNVMLNSSFIKLRHNNFSGRLPQLSNVQYVDLSYNSFTGSIPPGWQNLNYLFYINLWSNKLFGEVPVELSNLTRLEVMNLGKNEFYGTIPINMPQNLQVVILRYNHFEGSIPPQLFNLSFLAHLDLAHNKLSGSIPQVTYNITQMGR

SEQ ID NO: 165796 - protein, 66 aa, Glycine max
  Clone ID: PAT_MRT3847_120729C.1.pep
GKRIGELMNTKWDIQCTCALQGEGLYENWDRMSTAVKDILYTRSHSIQTKNSILVTYKRVLIAMDE

SEQ ID NO: 165797 - protein, 129 aa, Glycine max
  unsure (1)..(129): unsure at all Xaa locations
  Clone ID: PAT_MRT3847_12072C.1.pep
EANFSSDINSRCRLENVTSTNTQFVSGKTCKSDLIGAGPHAAEEVPEKEDQAQPKTIAARLRHTIDPQSNEVHAQMETNSLKXSLDDVETPKGSMLDLKISQSKIALPINTVGGTILRRDLLANFLTEG

SEQ ID NO: 165798 - protein, 63 aa, Glycine max
  Clone ID: PAT_MRT3847_120730C.1.pep
THHLVEQPYPLVQQSLCLAPQSLIQQFILLLFTLNSLPIPYSYPFVAFSMVYVTVSFPPYHFS

SEQ ID NO: 165799 - protein, 65 aa, Glycine max
  Clone ID: PAT_MRT3847_120731C.1.pep
IVSWSLCQWYNEGFIHINISEFFGWAFQCNVCHSRTPTHIQHQCSQSSPLCICEYHGPRAMSPIG

SEQ ID NO: 165800 - protein, 117 aa, Glycine max
  Clone ID: PAT_MRT3847_120732C.1.pep
YFQHLACMASFCVGYRLSYAVSVLRPGHSDLGVCPSGCQWRPPAVIAPIGSSPLPSREPLAPLLAAPPICQPPYGCPMFPPPLRRPSPPSFVWSTMHPSFLIGSVALPTKCVCHPSS

SEQ ID NO: 165801 - protein, 350 aa, Glycine max
  Clone ID: PAT_MRT3847_120733C.1.pep
MGSSSYFFTSLLLVVVFNLAKGQPLVPALFIFGDSVVDVGNNNHLYTIVKANFPPYGRDFKNHNPTGRFCNGKLASDYTAENLGFTSYPPAYLNLKAKGNNLLNGANFASAASGYYDPTAKLYHAIPLSQQLEHYKECQNILVGTVGQPNASSIISGAIYLISAGNSDFIQNYYINPLLYKVYTADQFSDILLQSYATFIQNLYALGARRIGVTSLPPMGCLPAAITLFGSDSNRCVVKLNNDSVNFNKKLNTTSQSLQKSLSGLKLVILDIYQPLYDLVTKPSENGFFEARKACCGTGLLETSVLCNQKSIGTCANASEYVFWDGFHPSDAANKVLSDDLLAAGISLIS

SEQ ID NO: 165802 - protein, 154 aa, Glycine max
  Clone ID: PAT_MRT3847_120734C.1.pep
VTFIQNIYALGARKIGVTTLPPMGCLPATITLFGSDSNQCVVKLNNDAINFNKKLNTTSQSLQKSLSGLKLAILDIYQPLYDLVTKSSENGFFEARKACCGTGLLETSVLCNQKSIGTCANASEYVFWDGFHPSEAANKVLSDDLLAAGISLIS

SEQ ID NO: 165803 - protein, 141 aa, Glycine max
  unsure (1)..(141): unsure at all Xaa locations
  Clone ID: PAT_MRT3847_120735C.1.pep
MPAAARALRISRAALVNNRNKHPARWCCRSSHNTYTALVGEAEFLTTDAGILNATSSSDSFRKYDRLLPCPSHKTPPRIEHLVVSEGGPVLEHICKALDLPPLYVSDLIQFGAEYYAIDCPQPSTNATEXQIMVFKEVTEP

SEQ ID NO: 165804 - protein, 123 aa, Glycine max
  Clone ID: PAT_MRT3847_120736C.1.pep
SKEGHNKVAFFSYFYLAFNIGQLFSNTILVYFEDEGMWALGFWLSAGSAFAALVLFLVCTPRYRHFKPSGNPLSRFSQVLVAASRKSKVQMSSNGEDLFNMDAKEASNNANRKILHTHGFKFL

SEQ ID NO: 165805 - protein, 140 aa, Glycine max
  unsure (1)..(140): unsure at all Xaa locations
  Clone ID: PAT_MRT3847_120737C.1.pep
MEEEQELKIPETIIYDTIGPLALSXVDDSPLSDHLEPIAVFRNEISLETPQRASPASAAVDFFSLDVAADASARDPFPRLLAAAPEPKXPASAPVPNLENGWFHGNCKFKNPMLQLHKXKXDFCAFLSPTGRXKXARNLA

SEQ ID NO: 165806 - protein, 33 aa, Glycine max
  Clone ID: PAT_MRT3847_120738C.1.pep
MPGKPVLHYFDGRGRMEPIRWLLAAAGVEVSSA

SEQ ID NO: 165807 - protein, 46 aa, Glycine max
  Clone ID: PAT_MRT3847_120739C.1.pep
SFLSHHMSTYSQTLRVLIPESRKLPDAKIVTQGNIYKTPHAKLYWS

SEQ ID NO: 165808 - protein, 71 aa, Glycine max
  unsure (1)..(71): unsure at all Xaa locations
  Clone ID: PAT_MRT3847_12073C.1.pep
RVMLNXRILGGPTGAKDKESRRRKEVNTPVCQTMFSKSSTHPSLHKRAKMQDIVTLGNMIEEFSESRNKTN

SEQ ID NO: 165809 - protein, 37 aa, Glycine max
  Clone ID: PAT_MRT3847_120740C.1.pep
PSPLLLPWLDYYGGTYQPSGFSPLRWSHGMERNRELR

SEQ ID NO: 165810 - protein, 174 aa, Glycine max
  Clone ID: PAT_MRT3847_120741C.1.pep
MEYKFFVFFPMMLKQMGEGGAASNPALQVSVSFGRFENDSLSWERWSSFSPNKYLEEVEKCATPGSVAQKKAYFEAHYKKVAARKAELLAQEKQREQDSFGSQDHSGIDLSGNTGAEHDVSNNTQGSNEGVEQEASSVCEIHRTHVNESVEEVQFQEITKVRQLRSRTRITKVH

SEQ ID NO: 165811 - protein, 131 aa, Glycine max
  Clone ID: PAT_MRT3847_120742C.1.pep
MGEGAAAFNPALQVSVSFGRFENDSLSWERWSSFSPNKYLEEVEKCATPGSVAQKKAYFEAHYKKVAARKAELLAQEKQREKDSFGSEEHSGIDLSGNTDADHEISNNINAMIFLFSKQQRSNLLVKYRIL

SEQ ID NO: 165812 - protein, 140 aa, Glycine max
  Clone ID: PAT_MRT3847_120743C.1.pep
MSSTGGSTKGGRGKPKASKSVSRSQKAGLQFPVGRIARFLKAGKYAERVGAGAPVYLSAVLEYLAAEVLELAGNAARDNKKNRIVPRHIQLAVRNDEELSKLLGSVTIANGGVLPNIHQTLLPKKAGKGKGEIGSASQEF

SEQ ID NO: 165813 - protein, 47 aa, Glycine max
  Clone ID: PAT_MRT3847_120744C.1.pep
IRLPDLTSTMQQHSVLYYKHIGYALFFLFSSSSIHHIYSICSLERIT

SEQ ID NO: 165814 - protein, 76 aa, Glycine max
  Clone ID: PAT_MRT3847_120745C.1.pep
KKSCAERGPPINKLSSGGGLPGGEILIPLRGGFSGGGFLKKRILKTIIFFTEPPWLFCCPPQMKGRNYVYRGPTPG

SEQ ID NO: 165815 - protein, 31 aa, Glycine max
  Clone ID: PAT_MRT3847_120746C.1.pep
RKIMFLGIFIYINSHRHQHSHLHDHQLLLQT

SEQ ID NO: 165816 - protein, 50 aa, Glycine max
  Clone ID: PAT_MRT3847_120747C.1.pep
IKLTSVSKIILFIEGSIIYIDIIVFIIQLINDDREPVSSWSCIIIYHMGA

SEQ ID NO: 165817 - protein, 54 aa, Glycine max
  unsure (1)..(54): unsure at all Xaa locations
  Clone ID: PAT_MRT3847_120748C.1.pep
MASKTCSSLALFLALNLLSFSLVSACGSYSCPSPXAKXPKXXKGGXPXXKKNXP

SEQ ID NO: 165818 - protein, 42 aa, Glycine max
  Clone ID: PAT_MRT3847_120749C.1.pep
KFNYQLLSSKLSLLLFFSLPIYIQYLLIYIYILLIRYCDCSS

SEQ ID NO: 165819 - protein, 65 aa, Glycine max
  Clone ID: PAT_MRT3847_12074C.1.pep
GISVFQVVVFGDSIPRQDIVVLRSIGWWNRWLFFLGKIVSQGRGGNHMSLICCVLYERHCQRTCA

SEQ ID NO: 165820 - protein, 258 aa, Glycine max
  Clone ID: PAT_MRT3847_120750C.1.pep
MLKRGYKPKPWSGAQNCRVSVFLMFFTLVLMLVVFLLVFRYDSDGANPILAYELPKQKWNSFDSLVHLHPTKEFRNETDLIWQVPESPKGVLFLAHGCNGRAINFWDKSPKCPDCIGLPEERLLVLHGLAQGFAVITISSAQRCWTFGKEVLVVKDIIEWWIGRKKLEKLPLVALGASSGGYFVSVLATAMKFSSTVLMIAEGMFEQIDVKGDYPPTLFVHMPKDLYRQQTIDEYVEVLKDKGIEAGVVACVAVYIVT

SEQ ID NO: 165821 - protein, 36 aa, Glycine max
  Clone ID: PAT_MRT3847_120751C.1.pep
VAQRIMANHEAYVKRNAKKTRSEQRYYEEKKYVSGD

SEQ ID NO: 165822 - protein, 58 aa, Glycine max
  Clone ID: PAT_MRT3847_120752C.1.pep
FFFFFFFFFFFFFFFFFFFFFFFFFWGGKFLQIFWREQKLLKPFFPLNFGAKNFYFQR

SEQ ID NO: 165823 - protein, 66 aa, Glycine max
  unsure (1)..(66): unsure at all Xaa locations
  Clone ID: PAT_MRT3847_120753C.1.pep
FXHIKMSVTKEPSRQKLRRLKILNSYXINKNSTYKYFDIIPIDLPDTTIRNYPIINVVSNPIHNHR

SEQ ID NO: 165824 - protein, 147 aa, Glycine max
  Clone ID: PAT_MRT3847_120754C.1.pep
SYPVTGFMCLVPIPSWVFIIVCPLGSFLCSIWGSVPHFPVFSCPRYPGIEPFRGPGAWALGGALGRRVFGSVGPVFVPSFGPVAGFPFCPFLWGYGRCDCVTLPVGPWWPFCLSLFQCSVSHFGFPGAPSFWVFLFFFFCIFSGFHG

SEQ ID NO: 165825 - protein, 136 aa, Glycine max
  unsure (1)..(136): unsure at all Xaa locations
  Clone ID: PAT_MRT3847_120755C.1.pep
RRLRTTDXNRMAQPCGAVIVNRPHELQXSDVGTGAGLFEVKKIADEYFAFIVECKNHKACTVLLRGASKDLLNEVERNLQDAMSVARNIIKNSKLVPGGGATELTISATLKQKSSSVQGIQKVSVILIVCTLHTSS

SEQ ID NO: 165826 - protein, 38 aa, Glycine max
  Clone ID: PAT_MRT3847_120756C.1.pep
DLKKHTAYSSKHHQSTLHPNFTFLRTCAVTIQCALTML

SEQ ID NO: 165827 - protein, 45 aa, Glycine max
  Clone ID: PAT_MRT3847_120757C.1.pep
MPICCDINCTKSLTTCPTREYTSFTDHRKKLPRLPCLDTMDGSFI

SEQ ID NO: 165828 - protein, 203 aa, Glycine max
  unsure (1)..(203): unsure at all Xaa locations
  Clone ID: PAT_MRT3847_120758C.1.pep
TRPLRSNAEKFEFQAEVSRLMDIIINSLYSNKDIFLRELISNASDALDKIRFLSLTDKEVLGEGDNTKLDIQIKLDKEKKILSIRDRGIGMTKEDLIKNLGFVEKMQTSGDLNLIGQFGVGFYSVYLGADYVEVISKNNDDKQYVWESKADGAFAISEDTWNEPLGRGTEIRLHLKEEAGEYFGEAXPERNDDCEKTTEGGKR

SEQ ID NO: 165829 - protein, 92 aa, Glycine max
  unsure (1)..(92): unsure at all Xaa locations
  Clone ID: PAT_MRT3847_120759C.1.pep
ASFSAWAFLSTILFGNIVIFYADSIAEDRLHMVFSSPRHLAAAGACMELXFRKQFLNPKRIYEATSLEHNRKDSIRNSDLSNGEFDDEQSQS

SEQ ID NO: 165830 - protein, 40 aa, Glycine max
  unsure (1)..(40): unsure at all Xaa locations
  Clone ID: PAT_MRT3847_12075C.1.pep
CCILWLSSKIHSSIINYEYVXTLLVTSISLTNLRASELEF

SEQ ID NO: 165831 - protein, 105 aa, Glycine max
  Clone ID: PAT_MRT3847_120760C.1.pep
HSSPPSHFTLHTMPPGARKRKAARKKKAKENNINPSTNNPQGNDGLKSRDGKGSDRGEGNSPAFHEHGDHRNPFNDGSEDLEERPSATQPCASDVETLEELPNDT

SEQ ID NO: 165832 - protein, 87 aa, Glycine max
  unsure (1)..(87): unsure at all Xaa locations
  Clone ID: PAT_MRT3847_120761C.1.pep
HGPQRALDKPISWPPPLVEQSFKARAVIRQLLRDNTTMCTSAIPSPSGDEIKESSQHPPCXIGXPPSPGGFLFLFSFRIIWVLCGLP

SEQ ID NO: 165833 - protein, 43 aa, Glycine max
  Clone ID: PAT_MRT3847_120762C.1.pep
AYNTAEEKRKQCCTDKRHQVVNKTHSYFWFGLISIFFLKLVPS

SEQ ID NO: 165834 - protein, 163 aa, Glycine max
  unsure (1)..(163): unsure at all Xaa locations
  Clone ID: PAT_MRT3847_120763C.1.pep
LGPPPGPFRSGPTRPIAWSLRWTSSLRGRARSDINTICSQDXRIMVSCLTTAMLCIYXPVAEHELDTVGPIYWIYLCTGWTATPLQDDQATIDWEIHCEECVHSTYCVGNPHNPFEINRWMXKRTFSQGTSRSDKRMPLSIRGGSCAKNAILMNMPNAVLSMW

SEQ ID NO: 165835 - protein, 143 aa, Glycine max
  Clone ID: PAT_MRT3847_120764C.1.pep
GRVEEAYNVYKKKFPDPVLDVLGIILDACRANNNNELGDTIANDILMLRPMDAGNFVQLAHCYASINKWEEVGEAWTHMRSLGLKKIPGWSFIDIHGTITTFFTDHNSHPQFQEIVCTLKILRKEMIKMEEVEIYLESSHISQ

SEQ ID NO: 165836 - protein, 57 aa, Glycine max
  Clone ID: PAT_MRT3847_120765C.1.pep
NYSRTLSLYVIKSLNIGLLVHNWMLRNNVDGHMSRFYWIMTITCHILICPSVVFSQP

SEQ ID NO: 165837 - protein, 54 aa, Glycine max
  Clone ID: PAT_MRT3847_120766C.1.pep
LITEICSLRAKMRSYDFKALPAQKKRQNGTQNFILCNFLEDKQSQGPIRHLPMF

SEQ ID NO: 165838 - protein, 98 aa, Glycine max
  Clone ID: PAT_MRT3847_120767C.1.pep
VYDLSLDENLNFMCASAYVQQLISALYFNVSFICKGCVSVTDLSFPSITLANVGLKPLTLSSTVANVVPPASYAANVFLQCWIYHCRCVRILHLQEHW

SEQ ID NO: 165839 - protein, 106 aa, Glycine max
  Clone ID: PAT_MRT3847_120768C.1.pep
FLKKKKEVSLALGKVEFLKSRLWFPFPNPLVPPPKLIRLGSPPPVKKPLLNFLWNPKKIRAEGMIFCFFKNPPQFFFSNPLLCQKISKRFVFQIFFKKVFFQKNPG

SEQ ID NO: 165840 - protein, 339 aa, Glycine max
  unsure (1)..(339): unsure at all Xaa locations
  Clone ID: PAT_MRT3847_120769C.1.pep
RNPGRPRVRGRRGFRNDGKITXALELQILINAGIYVDISAVMPHHIVCALKKYDWGALSFDIKVCRTNHPNRSAMRGPGEVQGSFIAEAIIENVAATLSMDVDSVRSINLHTYKSLQSFYEYSHGEPYEYTLPSIWSKLAVSANYDQRNKLVQEFNRVNTWKKRGISRVPVVIQLMLRPTPGKVSIFSDGSIVVEVGGIEVGQGLWTKVKQMAAYALGAIQCDGTEGLLDKVRVVQSDTVSLTQGGFTAGSTTSESSCEAVRLCCNILVERLKPLKEKLQEEMDSIKWEALILQAYMQAVNLSASSFYVPSNDSMGYLSYGAAVSEVEIDLLNGETRFL

SEQ ID NO: 165841 - protein, 119 aa, Glycine max
  unsure (1)..(119): unsure at all Xaa locations
  Clone ID: PAT_MRT3847_12076C.1.pep
GELTPCHSRQSVVLTRALPLLSSPTTAQIDTTPTPAPSPAPHLANISSLLSVAGPLQTFLNYLXQTTVIETFQNQPNNTNQRITIFLPKDSDFSSLIKPSLANLTQDQLKSLLLIHAFP

SEQ ID NO: 165842 - protein, 63 aa, Glycine max
  unsure (1)..(63): unsure at all Xaa locations
  Clone ID: PAT_MRT3847_120770C.1.pep
VHSLCMXLLTISVFGSKYITVYYLPIMGLNCGRSCVALVRKPLYCGKMWLMRPQLRLRRIKIP

SEQ ID NO: 165843 - protein, 38 aa, Glycine max
  Clone ID: PAT_MRT3847_120771C.1.pep
IVLSTPFHTKRSIIQKIRFHKVLCTIRTVVGRYQIRLY

SEQ ID NO: 165844 - protein, 58 aa, Glycine max
  Clone ID: PAT_MRT3847_120772C.1.pep
IKEPNLTHSHYPHQNTYTPVSIFIHSTPPHHPLKQYNSKTLPYQTIPLTPHLHLITNH

SEQ ID NO: 165845 - protein, 48 aa, Glycine max
  Clone ID: PAT_MRT3847_120773C.1.pep
GFSTDRINDTVRKAGMGKHIVNSGQGIKVGTPKKNVAQSFEVAKSVRY

SEQ ID NO: 165846 - protein, 82 aa, Glycine max
  Clone ID: PAT_MRT3847_120774C.1.pep
LPYRKYREGIKWFMRPTFPPNLHTHNVNISDKSTLLDKGQSDHFNGRSNQTKKGEGATLLKQCMSPNKGSDDSLNPLFFFFL

SEQ ID NO: 165847 - protein, 137 aa, Glycine max
  unsure (1)..(137): unsure at all Xaa locations
  Clone ID: PAT_MRT3847_120775C.1.pep
MGGLSQHLCSFSCGVFFKFKDQTGKFNERLANDIQGMLSLYEAAQLRFHGEEILEEVHDFTLTQLTKSPTTQLSHFLAAQVKHSLWQSLRKGMPRLETRYYMSFYQDDPSHNESSLTLAKLDXNMLQKLHQIEVSSM

SEQ ID NO: 165848 - protein, 52 aa, Glycine max
  unsure (1)..(52): unsure at all Xaa locations
  Clone ID: PAT_MRT3847_120776C.1.pep
AXXXXXPNXAXXRRXPPPPHDXXXLLLNLTLLLVIIXXPXGTGLXHVLLLKA

SEQ ID NO: 165849 - protein, 89 aa, Glycine max
  Clone ID: PAT_MRT3847_120777C.1.pep
FVRTILITNLICYLCEPTYQQFAYIGYDYEISDALYTVYNQITQQGLMKEKEEYKQKTKVANPNCCCLCGSWCVNLIYNIHIHFLNFFY

SEQ ID NO: 165850 - protein, 178 aa, Glycine max
  Clone ID: PAT_MRT3847_120778C.1.pep
MFRSLLRRPFSTTSARALKHCENHEFLSKNSFLGSWDAPRDPKEAEAKLARLRREYALQVKEVRKEYIREMEVMKIEKERKDEARREALRVANEERKKLKAQAAQLRAQERDIERQQFRETLLKERAEKLENWKMKVKMHEEKKAEKKEFLHRQSSAWIEEGNLEKKVVEAMVEIMHL

SEQ ID NO: 165851 - protein, 41 aa, Glycine max
  Clone ID: PAT_MRT3847_120779C.1.pep
MIRHILDCDLYVTGGLRKCYSFVVGEMKGPAPRQCDSSCHA

SEQ ID NO: 165852 - protein, 80 aa, Glycine max
  unsure (1)..(80): unsure at all Xaa locations
  Clone ID: PAT_MRT3847_12077C.1.pep
FCTEGKSIIKTFLINYMIVCTHFXDNCKCSLCFSKDEYCDYLFGYVIXIPNIDXVLNILEXLMSLSIHYVSQLFLTGTLS

SEQ ID NO: 165853 - protein, 95 aa, Glycine max
  unsure (1)..(95): unsure at all Xaa locations
  Clone ID: PAT_MRT3847_120780C.1.pep
MDHLQHQEMVDIESQTVEIPDILHKGKRQVILKFDNVVYKIKTKKGGVFVKNKETDEKEILKGVKGXVEPGENATLLGPFWSGKTTVLTVLGRKA

SEQ ID NO: 165854 - protein, 38 aa, Glycine max
  Clone ID: PAT_MRT3847_120781C.1.pep
YFVDCKSTFFHPGLSLQTLLQLYPGFQESLSCDLFMQG

SEQ ID NO: 165855 - protein, 98 aa, Glycine max
  Clone ID: PAT_MRT3847_120782C.1.pep
AEHNFYYIRLSCLTSTKKRKKNNLPMGINDLLRAKRKRNTQLVYLFAGQNLTLNKKKKVVINLFLFLIKEHRWKNNSLFKYYIHDPLEHHMKGACSGT

SEQ ID NO: 165856 - protein, 82 aa, Glycine max
  unsure (1)..(82): unsure at all Xaa locations
  Clone ID: PAT_MRT3847_120783C.1.pep
VCXLLXXPFLLXWVRVTTQXQTRWCVDQXLFSLFPFDVSPXQTVGHRWFLPVAATPYEKGQVPXPXXKXYSXXVLXXXFKTL

SEQ ID NO: 165857 - protein, 45 aa, Glycine max
  Clone ID: PAT_MRT3847_120784C.1.pep
AGVWNLKSSQLDRWDLRQCYHGQKRGFSSSCKNKNTAVDIKVVFN

SEQ ID NO: 165858 - protein, 91 aa, Glycine max
  Clone ID: PAT_MRT3847_120785C.1.pep
TQNTRPKTHLKTCFSSLLCSPVFNIKMVKIHIKNGFMLQKKIGGLTEKTIELLQYNVYHLRQIFHTANKKAITPSSLITLNQSSHFGPKSI

SEQ ID NO: 165859 - protein, 75 aa, Glycine max
  unsure (1)..(75): unsure at all Xaa locations
  Clone ID: PAT_MRT3847_120786C.1.pep
KKKKVKGWEGIRPREKDNWXKEKIFLAGPRPVKDRSPSPPEGTGRGGGPGNSRPTPTGGPDLQIGRGIKGGGNNG

SEQ ID NO: 165860 - protein, 110 aa, Glycine max
  Clone ID: PAT_MRT3847_120787C.1.pep
VSLVNREPVFCPVFLNPLFSRIDLVFCAAGQAFFSLERLIVMGTAKGVRWFPFETIWNLRWNLFYPFYGACLIWKTKTHRKPWSARFCQDLLVILNRFPSFSPWIPSWIC

SEQ ID NO: 165861 - protein, 64 aa, Glycine max
  Clone ID: PAT_MRT3847_120788C.1.pep
SYCKTNTIYLEMCGAIRTVILHYLTLLLRIEFIPLQLFTLDYIKLLYRYITLRFYHFIDCIIYY

SEQ ID NO: 165862 - protein, 74 aa, Glycine max
  Clone ID: PAT_MRT3847_120789C.1.pep
SLPLHLGIFSLHQKHWHYSECNTHVPSQLLTLGSVQPSRTEILTCQVCFASNSGTDERIPVPSILVSISKCCLP

SEQ ID NO: 165863 - protein, 302 aa, Glycine max
  Clone ID: PAT_MRT3847_12078C.1.pep
MAAKENEVTHKFRFFRVYKDGTVELYKPTIQKVAPFDDPITGVRSKDAVVSTHPPVSVRIFLPPISDPTRKFPIFFYIHGGGYCMQSAFSPDYHSLVATTAAEANVIAVSVEYGLFPTRPIPACYEDSWTALKWVAAHATGNGSEQWLNNHADPDRVFISGDSAGGNITHTLLTRVGKFGLPGARVVGAVLVHPYFAGVTKDDEMWMYMCPGNEGSEDPRMKPGAEDLARLGCEKVLVFAAEKDELFQCGRNYAEELKKSGWDGSVDLVENWGLGHCFHVFKPQHEKAKEMLQKIVTFIQQD

SEQ ID NO: 165864 - protein, 44 aa, Glycine max
  Clone ID: PAT_MRT3847_120790C.1.pep
YQNDFSISIKTNLNLPFNRIKNYFNYNIILSPLMNEFLSIFSLS

SEQ ID NO: 165865 - protein, 73 aa, Glycine max
  Clone ID: PAT_MRT3847_120791C.1.pep
PRIRTRVREKTTERGYDHEVHHYNEQKHHKHLEHLGDLSAASPPGYSLHDKDSAENHPLHALLHMIQFQVPAA

SEQ ID NO: 165866 - protein, 84 aa, Glycine max
  Clone ID: PAT_MRT3847_120792C.1.pep
SSLMIDQKEKKHGFHPIALKLHGKKKMIIVEWNEMHSFLSLTIQIIKLIIISFHHVLFHSILFHQSMYSILMLLAMTPTLFYTQ

SEQ ID NO: 165867 - protein, 50 aa, Glycine max
  Clone ID: PAT_MRT3847_120793C.1.pep
VVNRGAPPPWCSFFFSFQPPKKKRTPRLVPLGVHIHASMLNITMVISKYQ

SEQ ID NO: 165868 - protein, 216 aa, Glycine max
  unsure (1)..(216): unsure at all Xaa locations
  Clone ID: PAT_MRT3847_120794C.1.pep
MTSMPLGIRLEASKVSENHKIYFRTPEKPESVIRFFRDHGFSDSQINNMVRRVPRLISCNPCKRVLPKFEFLLSKGVSSSEIVDLISKYPPTRPRSLKNFIVPTYELVYRFLQSDKNTVACMFANSSVFGSGYLVAHNVSVMLKNGLSESNIARLLRYRSKAVFRATDILKVVREVKDLGFDPSKVAFVMALLAIKTXDQNLWKEKVDVFKKWCWS

SEQ ID NO: 165869 - protein, 47 aa, Glycine max
  Clone ID: PAT_MRT3847_120795C.1.pep
RYVYTTPNRSGFNSLRSTQRSSKYQELSSPFWHLTSLTTKPNYFQPS

SEQ ID NO: 165870 - protein, 59 aa, Glycine max
  unsure (1)..(59): unsure at all Xaa locations
  Clone ID: PAT_MRT3847_120796C.1.pep
SNPKFQSWIRRNYGKDQNTPIPLLXPHTPLVXHGDLYSNSYHKSIXSKSNCDQIQPSNF

SEQ ID NO: 165871 - protein, 139 aa, Glycine max
  unsure (1)..(139): unsure at all Xaa locations
  Clone ID: PAT_MRT3847_120797C.1.pep
VGLKFSDVWAFSGRALERINVRLAMFRFVFAMAVGVAKGPGVLPPMSHGGIPWFLGXSVVLTLASLIPLFQGXRVSXSKGFLSAGAVVWNGGFGTLGLVVLAFPECVTGCSLVSSVFWPPSMVLFSFVFREPKDNMNLE

SEQ ID NO: 165872 - protein, 52 aa, Glycine max
  Clone ID: PAT_MRT3847_120798C.1.pep
GRDNNKQERTKVNVQPRWYRMGQKYNMAHRTKKNSPGTISIWTRLATDLTYS

SEQ ID NO: 165873 - protein, 111 aa, Glycine max
  unsure (1)..(111): unsure at all Xaa locations
  Clone ID: PAT_MRT3847_12079C.1.pep
MRGHDWINSCFPDELIVEIFSRLHSKSTRDACSLVCRRWFRLERRTRTTLRIGATHLFLHRLPSRFSNIRNLYIDERLSIPXPPREKTPERRRGRSRFSLFIKCWSICSWR

SEQ ID NO: 165874 - protein, 135 aa, Glycine max
  unsure (1)..(135): unsure at all Xaa locations
  Clone ID: PAT_MRT3847_1207C.1.pep
SAKSDVFSFGVVLLEXLSGRRACGQEIDPPGKPNLVEWAKPYLSNKRKLLRVLDNRLEGQYELDEACKVATLSLRCLAIESKLRPTMDEVATDLEQLQVPHVKQNRRKSADHFTHGRIATASASPLSRDIANTHP

SEQ ID NO: 165875 - protein, 155 aa, Glycine max
  Clone ID: PAT_MRT3847_120800C.1.pep
GLIINNFSDNVLDYINFVSSIAEIDRSMENSLTMEERIKLFEEEKMRFVQLQDDYVKTKALLEASYRHRQLLCEQVSNLKAMLNEKQKQLKHRELETLKIETHLRDLKRNILETDATLKERAEQTEVARKHSEERQAKQIAAKEALAKAKLELEN

SEQ ID NO: 165876 - protein, 77 aa, Glycine max
  unsure (1)..(77): unsure at all Xaa locations
  Clone ID: PAT_MRT3847_120801C.1.pep
XXHAYVKHGFGSXARARADSNKDLXXXXXXGXXXEXXXKQNXVXMXHQVKXSKSIQXXPLLRGKSSTXHLNVYXEEG

SEQ ID NO: 165877 - protein, 175 aa, Glycine max
  Clone ID: PAT_MRT3847_120802C.1.pep
MVLHEVLCGVGHREWHTQDDNAAKHIEENETLKSEMNNCSKAREEVAAEVEQVRAAEREALMKLGIVMEEADKSNKKAARVAEQLEATQAANSEMEAELRRLKVQSDQWRKAAEAAAVMISTGNNNGRLTERTVSLDNNNYKGSPYAEDMDDDFQRKKNGNMLKKIGVLWKKPQK

SEQ ID NO: 165878 - protein, 242 aa, Glycine max
  Clone ID: PAT_MRT3847_120803C.1.pep
MILTQRKMKTLLFLPLEQVTNLCINALFSYRKFCATVSSSGQLILPVAIKLLPLYTLALTKSTGLRTEGKIDERSFWINYVSSISAPLAIPLVYPRMMAIHDLDSKEDDDSVIPPFLPLSSEHISDDGIYLLENGHDCLIYVGDSVNPDIVQKLFGVATVDKVPTLFVLQQYDNPLSKKLNEVVNEIRRQRCSYFRFKLCRKGDPSGMLFFSYMIEDKSAGGFSYVEFLIHVHRQIQNKMSS

SEQ ID NO: 165879 - protein, 243 aa, Glycine max
  unsure (1)..(243): unsure at all Xaa locations
  Clone ID: PAT_MRT3847_120804C.1.pep
MLDGRSCVVPRMFSGTCQAENDWSYMKCLLELDIKNGKRPMEIDDVEEDEPHQPRKCTKKLDSCHRVEMARISFQRQSIEAKDSVVPPMDQDTIEPLSVCQGVVGEEGALTDRLLCEKEHEGDGDLMDFGDHQSDKQQQAQPGDLSDFGVRLFDEDQLQHDDNLLNLSEQQSEGRQQQHHHGGDSSDSSSLLPRMNRDSSITCLSRCSRSDYGSLALLNXSFRNIIRRGELYQWKRLNGIMEH

SEQ ID NO: 165880 - protein, 184 aa, Glycine max
  Clone ID: PAT_MRT3847_120805C.1.pep
MLEGRSCVVPRLFPSSCQADNKWSFMTYLPDLDIKNGKRPLDTDGEEEPQPRKVNRRDQSEDSSDSGVQQSNEQQMEQEVEGDLLDASDQQPLEDQEEHHGGDSSDSGSLLPCMNWDNSIACLSRCSRSDYGSLASLNRSFRNTIRSGELYRWRRLNGIIEHWIYFSCALLEWEAYDPIRERWM

SEQ ID NO: 165881 - protein, 358 aa, Glycine max
  unsure (1)..(358): unsure at all Xaa locations
  Clone ID: PAT_MRT3847_120806C.1.pep
SGRASGGDSSDSGSLLPRMNRDSSIACLSRCSRSDYGSLASLNRSFRNTIRSGELYRWRRLNGIIEHWIYFSCALLEWEAYDPIRERWMHLPRMASNECFMCSDKESLAVGTELLVFGREMRSHVIYRYSLLTNSWTSGMRMNAPRCLFGSASFGEIAILAGGCDSEGHILDSAELYNSENQTWEILPSMKKPRKMCSGVFMDGKFYVIGGIGGKESKLLTCGEEYNLQTRTWTEIPNMSPGRSSRGPEMPATAAPPXVNDELYAADYADMEVKKYDKERSVWFTIGRLPERAVSMNGWGLAFRACGDKLIVIGGPRTHGEGFIELNSWVPSEGPPQWDLLARKRSGNFVYNCAVMGC

SEQ ID NO: 165882 - protein, 53 aa, Glycine max
  unsure (1)..(53): unsure at all Xaa locations
  Clone ID: PAT_MRT3847_120807C.1.pep
XHFVCPSPYTHSIXIITLFSXXGXVSLXHFXXLTMVLASPQPXXXXIXRPXFX

SEQ ID NO: 165883 - protein, 201 aa, Glycine max
  unsure (1)..(201): unsure at all Xaa locations
  Clone ID: PAT_MRT3847_120808C.1.pep
MPQNCIAPKPEFCNSHNSVEGPPEMTEPHNSTVLSYPMQANEQQQQPFPKLIMYPITLKFEELVYKVKLEQKGGCWGSTWTCKEKTILNGITGVVCPGEILAMLGPSGSGKTTLLTALGGRLNGKLSGKITYNGQPFSGAMKRRTGFVAQDDVLYPHLTVTETLVFTALLRLPNTLXETKKFSMLREVITELRLTRCXSSM

SEQ ID NO: 165884 - protein, 44 aa, Glycine max
  Clone ID: PAT_MRT3847_120809C.1.pep
RVTQACYVEYPYKTNQFLYVLAHNNAENLENYCFASNIIPHFFQ

SEQ ID NO: 165885 - protein, 166 aa, Glycine max
  Clone ID: PAT_MRT3847_12080C.1.pep
VLRFIVFHPLVVFLSIENIMNFAASLCRRLNIKELATNVPVYKSTSDVSGEGLSFTFRRWASKKTAGSTKNGRDSKPKNLGVKKFGGERVIPGNIIVRQRGTRFHPGNYVGLGKDHSLFALKEGWVKFERNKLTGRKWVHVEPKEGHVLHPLYAADASASELKVAV

SEQ ID NO: 165886 - protein, 153 aa, Glycine max
  Clone ID: PAT_MRT3847_120810C.1.pep
MLSSTLSFQKSVPLNSQRSGTSFGSSFLFSRENGSVVPPLVVCHAKKKLSFMEQILDYIEGGPKLRKWYGAPDILEKDGTAIEDNEDDYPEDEVRDAVLVTDGDSEMGQMVILSLIVKKARVKTLVKDKRVALEAFGSYVEEIQVTNDLSRKL

SEQ ID NO: 165887 - protein, 119 aa, Glycine max
  Clone ID: PAT_MRT3847_120811C.1.pep
MVLLLHLLSCVMLRRNSVLWSKFSITLKDALKLLMMWLQSWSRTDLVSTFLFSLLCSLPLIFCSFSGGPKLRKWYGAPDILEKDGTAIEDNEDDYPEDEVRDAVLVTDGDSEMGQMVIL

SEQ ID NO: 165888 - protein, 55 aa, Glycine max
  Clone ID: PAT_MRT3847_120812C.1.pep
GPCEAGLGLYRGFQTAGSEPGLFKACMFLRFMFRSCVFVVSAVCLICVYGFLCTF

SEQ ID NO: 165889 - protein, 65 aa, Glycine max
  unsure (1)..(65): unsure at all Xaa locations
  Clone ID: PAT_MRT3847_120813C.1.pep
FFFFVFHPFFPAFLFXECQFIFLLHYCFVESISSHGMMTSRCLKYCFQQKNYGRKSEPRSGCLLL

SEQ ID NO: 165890 - protein, 55 aa, Glycine max
  unsure (1)..(55): unsure at all Xaa locations
  Clone ID: PAT_MRT3847_120814C.1.pep
PTEFLGRPLXTGDDTLSGRPGVGLETGAKVLSCLYAGTDSGITAHHSEWGHRKTL

SEQ ID NO: 165891 - protein, 46 aa, Glycine max
  Clone ID: PAT_MRT3847_120815C.1.pep
HIQHRFCQKQMLYTTFNIDFFITDVENTSEYAILAIFLHRFQAELM

SEQ ID NO: 165892 - protein, 92 aa, Glycine max
  unsure (1)..(92): unsure at all Xaa locations
  Clone ID: PAT_MRT3847_120816C.1.pep
SLSISTCYSLTKYWESPLQILHPTXQLINVLLSYNLNYLSLSIFSYFFRTPYQTIIAILLACLLYYLHANTTMFFVTICLIKNLISSYHMLM

SEQ ID NO: 165893 - protein, 126 aa, Glycine max
  Clone ID: PAT_MRT3847_120817C.1.pep
GDDVRSRSSNRRVNTNRNRNLRKKLQIKSTNEKINHDRVMQNLANIFGTRVQIGSNYRIEIKALGALASPLVMVADPREWVPTLSPMAGATAPRLAPVFVAKLECPAGYVAEGPASPVAFAPHNLV

SEQ ID NO: 165894 - protein, 83 aa, Glycine max
  Clone ID: PAT_MRT3847_120818C.1.pep
DYRFTFIHFIRTVNKIQITQIVHHYMNIQILGSYIMMLYIHRSKLVYDKSFVILVFIIHLFPFKWKVMQLVFVFLVVCFKDVS

SEQ ID NO: 165895 - protein, 334 aa, Glycine max
  Clone ID: PAT_MRT3847_120819C.1.pep
MRGSCCCWNRRTEQRFRLLAISTVKSLKIKLLLFCCVAFTLLAFSTSASSFVLWINNQTPPPPPPRFPDSGKGYSIVMNTWKRYDLLKQSIKHYSSCPRLESVHIVWSEPDPPSDILLKFLHHVVKSKSKDGRYVKLRFDINKEDSLNNRFKEIKDLETDAVFSIDDDVIFPCSTVEFAFDVWQSAPDTMVGFVPRVHWVDSLEGNDSKFIYGGWWSVWWTGTYSMVLSKAAFFHKKYFNIYTNEMPSSIREYVTKNRNCEDIAMSFLVANATGAPPIWVKGKILEIGSTGISSLGGHSERRTECVNRFVAAYGRMPLVSTSVKAVDSRNIWFW

SEQ ID NO: 165896 - protein, 109 aa, Glycine max
  unsure (1)..(109): unsure at all Xaa locations
  Clone ID: PAT_MRT3847_12081C.1.pep
LIFKKGSKPDDQIWFLEIDTQYVRQQQKILGTEAGGWSKGVIGNAEKPAAISGSCGACKGTLMSXLMKESPSMXGCHRSHTNRATQGVGIEGEYYHFTVKSIGHQEIIH

SEQ ID NO: 165897 - protein, 103 aa, Glycine max
  Clone ID: PAT_MRT3847_120820C.1.pep
GAQLERPPRPPRSFSFGLRVYVGPFPWEVANARLDQIFSDHGKVEDARVVYAKKTGRSRCFGFVPMFSEPDMNDAIPALNGQSLAGRAIKVNVAQDRPTPSSF

SEQ ID NO: 165898 - protein, 73 aa, Glycine max
  Clone ID: PAT_MRT3847_120821C.1.pep
GSMPIAQPISDFIYWLQGSRLQNTQWTRRKPIGAWRWQTLITGLCQFYGVPCTSRKGIRPPSNRAFIKKDCAP

SEQ ID NO: 165899 - protein, 100 aa, Glycine max
  unsure (1)..(100): unsure at all Xaa locations
  Clone ID: PAT_MRT3847_120822C.1.pep
MASADVEFRCFGGGLAWGTXDDALEKAFGMYGDVGEWKVMNDRETGRGRGLGLGSLGWEGGVEDAMGGMNGHDLGGRGVGWGTKGRRGATLSFGLRGGVS

SEQ ID NO: 165900 - protein, 89 aa, Glycine max
  Clone ID: PAT_MRT3847_120823C.1.pep
PPAPLAVSSGPACFMVCCMQVLACIFFSIRPVFLGTADFQREAAPASSWAAAHGLTRATSVRSIFNLCGSPCVRERVGRPPDTGAGPAR

SEQ ID NO: 165901 - protein, 53 aa, Glycine max
  Clone ID: PAT_MRT3847_120824C.1.pep
LSNSRSITNRDSTTLHTCKKDTLRFRYMMHNSFMAHKMHHLTIYLDLASDIYM

SEQ ID NO: 165902 - protein, 119 aa, Glycine max
  Clone ID: PAT_MRT3847_120825C.1.pep
RPPDTANRALPGGPTASGFLGGDQLAAAAARAIQNQGRGRKKSHAQIDRRRERNRILARRTRLRKKFFFESLQKEIMDLQRENLVLKELVKVNISGEEGKKILEGCNAVENLPLSVLEA

SEQ ID NO: 165903 - protein, 78 aa, Glycine max
  unsure (1)..(78): unsure at all Xaa locations
  Clone ID: PAT_MRT3847_120826C.1.pep
ACMPNCTPDEVSLVKKPVXYVPAKRAPPMELFQGKCFSEEPLPVPISEYNEVDSDSALEEFGPLNIPPTGFDLSIQIP

SEQ ID NO: 165904 - protein, 39 aa, Glycine max
  Clone ID: PAT_MRT3847_120827C.1.pep
QPEFMNLCPGCYLWPIYFLLLGVMQAKYGLFVWTRNFVG

SEQ ID NO: 165905 - protein, 138 aa, Glycine max
  Clone ID: PAT_MRT3847_120828C.1.pep
LKKLVEKKEEIDSLAHKQVRHILWSGLGFGVITVGLFFRLTFWEFSWDVMEPITYFTTSTGLVVGYAYFLFTSRDPTYQDFMKRLFFSRQRKLHMRYNFDVDRFKELQCKCKTPLNAKTILKNRKGLELDLEDALNKD

SEQ ID NO: 165906 - protein, 69 aa, Glycine max
  Clone ID: PAT_MRT3847_120829C.1.pep
LAQQSKAHSNRLAYYTQDSANSESNHHEPALHLNVNNSSLNITCGIHLDWGSIKLLNTLLVPQNLRCCS

SEQ ID NO: 165907 - protein, 227 aa, Glycine max
  Clone ID: PAT_MRT3847_12082C.1.pep
LINFTLFEIFQCYLFVLRLREDDRRGKRRRLRTTTKKGFWFWTLKETQSDAFHRSFAQTLTSSSCIHSPRSGVFLSIANSMNFAASLCRRLNIKELVTYVPVYRSTSGVSGEGLNLAFRRWASKKTAGSTKNGRDSKPKNLGVKKFGGERVIPGNIIVRQRGTRFHPGNYVGLGKDHSLFALKEGWVKFERNKLTGRKWVHVEPKEGHVLHPLYAADASASELKVAV

SEQ ID NO: 165908 - protein, 75 aa, Glycine max
  unsure (1)..(75): unsure at all Xaa locations
  Clone ID: PAT_MRT3847_120830C.1.pep
EPXXIDLLNTXXRFKASEMETKXFVXKLSSLMNXLKPXLKXXPCXGXXKXXSQIFKXLLLFLKKQTXXEEPNSXA

SEQ ID NO: 165909 - protein, 90 aa, Glycine max
  unsure (1)..(90): unsure at all Xaa locations
  Clone ID: PAT_MRT3847_120831C.1.pep
FQFTGSRHFGWLQLLLVFNTSYLCPVLNRGLFFPHLXSHSISQHTFPQMMYWPAFTHNYIKLLIHMITSNIDIDNTFFFTTTIVNFSITI

SEQ ID NO: 165910 - protein, 54 aa, Glycine max
  Clone ID: PAT_MRT3847_120832C.1.pep
EGKRKKTRNHNYQWSLLLNLQTTTRPPVLRHRRSPETATAPSSREKIFPRRGLR

SEQ ID NO: 165911 - protein, 46 aa, Glycine max
  Clone ID: PAT_MRT3847_120833C.1.pep
RYPKCDLLMNNLSEAFNSTILVAREKPIITLFEWIRSYLMARFVTQ

SEQ ID NO: 165912 - protein, 84 aa, Glycine max
  Clone ID: PAT_MRT3847_120834C.1.pep
VFDSFRLLYPFLAVPVFFLLIYSLLQRRGLFIRPTPSQIAPSLAKHISIVPLSHLLLPRPYSTFSCPPPPPPPSRWYCYTCSRQ

SEQ ID NO: 165913 - protein, 283 aa, Glycine max
  unsure (1)..(283): unsure at all Xaa locations
  Clone ID: PAT_MRT3847_120835C.1.pep
ASTDTQVAIWRDSARRRLVVAFRGTEQTQWKDLRTDLMLVPAGLNPERIGGDFKQEIQVHSGFLSAYDSVRTRIISLIRLAIGYVDDHSGPQHKWHVYVTGHSLGGALATLLALELSSNQLAKRGAISITMYNFGSPRVGNKRFAEVYNERVKDSWRVVNHRDIIPTVPRLXMGYCHVERPVFLAAGVLRHALENKDILGDGYEGDVLGESTPDVIVSEFLKGEKELIEKLLQTEINIFRSIRDGSALMQHMEDFYYITLLENVRSNYHQAVSRSEQDQNYRL

SEQ ID NO: 165914 - protein, 30 aa, Glycine max
  Clone ID: PAT_MRT3847_120836C.1.pep
NMLNAECQKRSSNCKPNGITYPYYRLIPKT

SEQ ID NO: 165915 - protein, 72 aa, Glycine max
  Clone ID: PAT_MRT3847_120837C.1.pep
PFSNRVYASIYNTCVLIFLNCLLTTSLQRQPHTFSFDPFHPKETKQKSEGRNKNGNGSTTIILYLRTSKADA

SEQ ID NO: 165916 - protein, 55 aa, Glycine max
  Clone ID: PAT_MRT3847_120838C.1.pep
LVPRSYTRLLLNIACSKGMRHRECPARSSEGTYPRDIIMVGGQCTTTWSLCARVG

SEQ ID NO: 165917 - protein, 85 aa, Glycine max
  unsure (1)..(85): unsure at all Xaa locations
  Clone ID: PAT_MRT3847_120839C.1.pep
LNSSRKMISFVIYRKILGVKTEKRGLSASQMSNFGIYRGGCVLXXXDICFLIQRNFKTYPIIKEIEKEGCFMLICWEGXXWXFSF

SEQ ID NO: 165918 - protein, 186 aa, Glycine max
  unsure (1)..(186): unsure at all Xaa locations
  Clone ID: PAT_MRT3847_12083C.1.pep
AKGLAYLHEDCDSKIIHCDIKPENVLLDDNFMVKVSDFGLAKLMTREQSHXFTTLRGTRGYLAPEWITNCAISEKSDVYSYGMVLLEIIGARKNYDPSETSEKSHFPSFAFRMMEEGNLREILDSKVETYENDERVHIAVKVALWCIQEDMSLKPXMTKVVQMLEGLCIVHKPXICSVLGSPVYST

SEQ ID NO: 165919 - protein, 124 aa, Glycine max
  Clone ID: PAT_MRT3847_120840C.1.pep
AIIEVNVGAVIVASVLVNEPITHDEGTGHPVHGGLHRLDYVIFWISGVQALPVSCGLLAQHLVISVTSHASDIFIIRFTCRILALLVDVHRHTYVITNQRYERNTRNNFLSRHLCKTRMIVPAL

SEQ ID NO: 165920 - protein, 92 aa, Glycine max
  Clone ID: PAT_MRT3847_120841C.1.pep
GGRDRNSSFSPFFKPPNLPGNRVCTVARSPYIPPFLLQGLNRNHTNPRDVLFHPNFPVALTNHSHTKTLVMHGPNSLLLITLKEIHIHTAKD

SEQ ID NO: 165921 - protein, 62 aa, Glycine max
  Clone ID: PAT_MRT3847_120842C.1.pep
YTKSDFCFQISIILFCVLVRIQVHREMGKWRRSICPGSVCRFILNNCFCQFCVSKFQILIYF

SEQ ID NO: 165922 - protein, 94 aa, Glycine max
  unsure (1)..(94): unsure at all Xaa locations
  Clone ID: PAT_MRT3847_120843C.1.pep
XMVEGKLXXGXRFXXRDEEXGGDYFFFLXXXNDXIXLIDVDFXKWEGGEVXEKVWVGGKEWYFXMKRRGKDGRGLGXSXGSGVRXWKGXGKGRG

SEQ ID NO: 165923 - protein, 77 aa, Glycine max
  Clone ID: PAT_MRT3847_120844C.1.pep
GTMGSGDTKVRATGEPTPQSEEHAFEINGSKVMHGKLLPTITCGLRYALNAGKWTFNLDTYGLEWSIMLTEKLNIET

SEQ ID NO: 165924 - protein, 101 aa, Glycine max
  Clone ID: PAT_MRT3847_120845C.1.pep
IAPAFAMSFAAMNGATGASGLDLSSIAQNNHSIMQSNHNYHIMAAQAASAQLKKSYHAAEEGKSVVNPSNLDEDRKAISAGKIPATMGQSMAFGRPNVSDP

SEQ ID NO: 165925 - protein, 58 aa, Glycine max
  Clone ID: PAT_MRT3847_120846C.1.pep
MPVSVSVLVGVADCSYKNAKKQKREAFLFEHGESNCLPDLVAINSLILNKLCGNPLFM

SEQ ID NO: 165926 - protein, 42 aa, Glycine max
  Clone ID: PAT_MRT3847_120847C.1.pep
RSNNFCSSYQFKLYIMNIQKSLFFPIHTLNPLKLVYKSIVSE

SEQ ID NO: 165927 - protein, 63 aa, Glycine max
  Clone ID: PAT_MRT3847_120848C.1.pep
PKRFTSVARKGLTIFMSKTTFSVSTASLPHDKFIFYELMCMISKKKLKKNKPKRIFFLKTHKN

SEQ ID NO: 165928 - protein, 39 aa, Glycine max
  Clone ID: PAT_MRT3847_120849C.1.pep
KTMEFAPILLFQASRPTSRYLPYVSKTILTNAGSVCARA

SEQ ID NO: 165929 - protein, 42 aa, Glycine max
  unsure (1)..(42): unsure at all Xaa locations
  Clone ID: PAT_MRT3847_12084C.1.pep
TIRHGPKXTYCDSNTSIYVXDIXYXXTVDVXXXGXVGPSXIX

SEQ ID NO: 165930 - protein, 82 aa, Glycine max
  Clone ID: PAT_MRT3847_120850C.1.pep
NLYSDVAQRILTGTTYYYACPGGHRTISLYSLAIHAHSPAVYYHLLVCNTPAQPHYFRRCNHTLLYTWFHSEYVDTNSLLYA

SEQ ID NO: 165931 - protein, 202 aa, Glycine max
  Clone ID: PAT_MRT3847_120851C.1.pep
MSTTSHPIVHHSLFDEQDQIPTQMGFFSFPTNLTFPPLGCHQSSLKAFSSIAPSSLAISQQDSASNLTAETLFSTTAQKSREDLTSSFGGGQFLSLHRSSVNPWALGEVAECFSSKRSGFDDHHFRISAMKMKKIKARRKVREPRFCFKTMSDVDVLDDGYKWRKYGQKVVKNTQHPSYFRSSLDSCPLLVSPVRLSLIKEY

SEQ ID NO: 165932 - protein, 83 aa, Glycine max
  Clone ID: PAT_MRT3847_120852C.1.pep
QKKSLKKKKKKKKKEGEKKKKKKKKKKKNKKKKRGGPPLSKLFNPEINSGPVPGGVPIFLIGGRFKAWRNNGNSFFLGKIFFP

SEQ ID NO: 165933 - protein, 42 aa, Glycine max
  Clone ID: PAT_MRT3847_120853C.1.pep
GKKLLVYPFFTRLRPKRKNYISYNFSWILINIYMKFLNNYIN

SEQ ID NO: 165934 - protein, 38 aa, Glycine max
  unsure (1)..(38): unsure at all Xaa locations
  Clone ID: PAT_MRT3847_120854C.1.pep
FFFFXDTFIIVQMYLPNIILFSLQFAKTGPWLALHSCT

SEQ ID NO: 165935 - protein, 119 aa, Glycine max
  Clone ID: PAT_MRT3847_120855C.1.pep
LVSLDMLIHFFPVLLSLLIYYYLFCLMCFSCSTRSGIGTGSTGFTPTLFGTLHNWTNSSEGCKLCLWWRWNLCDHHDIETHSSAHYNISQHYNFIKSFVLFINISPTNFGVMVTNLLLY

SEQ ID NO: 165936 - protein, 67 aa, Glycine max
  unsure (1)..(67): unsure at all Xaa locations
  Clone ID: PAT_MRT3847_120856C.1.pep
YQDHLQGPRWGRLLGGFNGFWEYQPSGDGWHXLYKILRKGGLKKQNNIGVMDEDIGFNGENPRPGVI

SEQ ID NO: 165937 - protein, 49 aa, Glycine max
  Clone ID: PAT_MRT3847_120857C.1.pep
YAKIKIQLESFPTILFFPKHSFQPIKYPSEKKDIYSYNRISVIFKFIII

SEQ ID NO: 165938 - protein, 447 aa, Glycine max
  Clone ID: PAT_MRT3847_120858C.1.pep
MDFRIYGVTILLFLFPTLTFSISQGQINSNSILVALLDSHYTELAELVEKAMLLQTLENTVMNNSNNITIFAPRNEALERDLDPDFKRFLLEPRNLHSLQTLLLSHIVPKRITKPEFKTGSTRHRTLASHHHLTLQALNLTHWNVESSRVINPNSVTRPDGVIHGIDTLLIPRSVQDEFNRRRNLISIAAVKPEPSPEVDPRTHRLKKPAPASPAGAPPALPIYDAMAPGPSLAPAPAPGPGGSHKHFNGEKQVKDFIETLLHYGGYNEMADILVNLTSLATEMGRLVSEGYVLTVLAPNDEAMAKLATEQLSEPGSPEQIMYYHLIPEYQTEESMYNAVRRFGKVRYDTLRLPHKVTAQEADGSVKFGHGDTSAYLFDPDIYTDGRISVQGIDGVLFPPQEEEAAGPVTRAQPAKVVVKQRRGKLLETACWMLGSFGQNSRFISCQ

SEQ ID NO: 165939 - protein, 365 aa, Glycine max
  Clone ID: PAT_MRT3847_120859C.1.pep
GACRYPTRNSRVRPTRPQTLLLSHIVPKRITKPEFKTGSTRHRTLASHHHLTLQALNLTHWNVESSRVINPNSVTRPDGVIHGIDTLLIPRSVQDEFNRRRNLISIAAVKPEPSPEVDPRTHRLKKPAPASPAGAPPALPIYDAMAPGPSLAPAPAPGPGGSHKHFNGEKQVKDFIETLLHYGGYNEMADILVNLTSLATEMGRLVSEGYVLTVLAPNDEAMAKLATEQLSEPGSPEQIMYYHLIPEYQTEESMYNAVRRFGKVRYDTLRLPHKVTAQEADGSVKFGHGDTSAYLFDPDIYTDGRISVQGIDGVLFPPQEEEAAGPVTRAQPAKVVVKQRRGKLLETACWMLGSFGQNSRFISCQ

SEQ ID NO: 165940 - protein, 102 aa, Glycine max
  Clone ID: PAT_MRT3847_12085C.1.pep
PYYLYLSTWPLVVYITVLLSFSSRLVYLLYKLTVYTATRYGVILFVIFYSFTRLKLKPTPVLYFTYQPYRSPARTSVTATAMFPPAHASYVALACSLGFLLA

SEQ ID NO: 165941 - protein, 64 aa, Glycine max
  Clone ID: PAT_MRT3847_120860C.1.pep
IRLERISVQGIDGVLFPPQEEDAGPVTRSKPAKVVVKQRRGKLLETACWMLGSFGQNSRFISCQ

SEQ ID NO: 165942 - protein, 128 aa, Glycine max
  Clone ID: PAT_MRT3847_120861C.1.pep
MLKFLSRVKIEFNALDPRTASCIEFLAQCNSRRAKESNPTCEVDVKRVREERAPQITVTFVNGVEEVFDATATPAQSIRNLILEKGQHLETEQMFREAGEPWPVIIPDEELSQIALPTKPRKAEDKKQ

SEQ ID NO: 165943 - protein, 80 aa, Glycine max
  Clone ID: PAT_MRT3847_120862C.1.pep
IKLFRIFRLVSKPIYRPSHFMNNIGYFPMLLISLIFLQVLPISIFYFTKYFQQHELWYTLVCCMHTSMQYRTFLGMKYKA

SEQ ID NO: 165944 - protein, 108 aa, Glycine max
  Clone ID: PAT_MRT3847_120863C.1.pep
NFWIYERRTTAKAFAKDVFFNQERKLGARRRSNTVLVSTINDAAQGSADVAFRTPLAPYEKSKSLGSGGSMVPRLKLKGIDGRAFCEGMSGCWGKEMSENVLCYDFFC

SEQ ID NO: 165945 - protein, 304 aa, Glycine max
  unsure (1)..(304): unsure at all Xaa locations
  Clone ID: PAT_MRT3847_120864C.1.pep
KTHISCFYCFVIALSSFSFLFIFPSFPVSVSHTIPFIVIHGIGFQFSNRDVKKFTKHLSSFSVAEGHCVEVGNLSWDSWFERLEQQAXSVCVQIXHLRSINRNDGSFLDVLNXIVCWAVVEDCVGGPPVXNFISLAGPHVRSPSVLLGCSGIFYIPADTLXRQRFTXQYLTTIGSFWLPNAIDCHFKKCRFLPVLNNEIPDKRNSTYKERFSSLQNLVLIMFEHDTVLIPKETSWFGYYPDGYFKPVLPPQSTELYIEDWIGLRTLDEAGRVHFISVPGDHLGISQEDMKKHIVSYSKEHIFLF

SEQ ID NO: 165946 - protein, 164 aa, Glycine max
  Clone ID: PAT_MRT3847_120865C.1.pep
AFAFRPSNPSIKTTSSLGFYMEQSPPLKLKQCDQPHLACQATTQDDAVSLRNDESPVHGLTEVVVGVLGGGQLGRMICQAASQMAIKVMVLDPQENCPASSLSYDHMVGSFDDSTTVEEFAKRCGVLTVEIEHVDVDTLEKLEKQGVDCQPKASTVRIIQDKYQ

SEQ ID NO: 165947 - protein, 109 aa, Glycine max
  unsure (1)..(109): unsure at all Xaa locations
  Clone ID: PAT_MRT3847_120866C.1.pep
LELRCSIHLRWFCRTTRKGYLHYRAVTPREEIMYMAKLVVPAQRYEEMVGYKEIGLRLKXSEELTVEERNLLFVXLRNVIWARRAFWRIITSTVQKGESRGDEEPLLQL

SEQ ID NO: 165948 - protein, 128 aa, Glycine max
  Clone ID: PAT_MRT3847_120867C.1.pep
AISTSLYPPRLVQRTPPNLLFGLLRIFPILYLYTTNHSLFSYLQVKTSHLHLVSAAQVTINFFILVFQLVLFSKPYPLITPNTPNPSHACSSYSSSFSNSLLYLRSALLCCVSPPPPQRRRTSYSDDG

SEQ ID NO: 165949 - protein, 150 aa, Glycine max
  Clone ID: PAT_MRT3847_120868C.1.pep
GSGNNQSNHIAETRDRDSFSRARNNDAELDNQPKRSDRKEMTKRWHDDDDDKFEGRENNSRREEKRSRRHEDDDKFEGRENNSKRELNRSRRHEDDDKFDGRENNSRREEKRSRRHEDDEFEHKFREYRYKREEKGSRRDDYDGMKLEPK

SEQ ID NO: 165950 - protein, 72 aa, Glycine max
  Clone ID: PAT_MRT3847_120869C.1.pep
PTRPNTCTSFPSLSSITLGSGEFELHCTFDDYCGVRETCVCTSFSCVSCIWILVVHLLSVLLLYCVCCPPGV

SEQ ID NO: 165951 - protein, 80 aa, Glycine max
  Clone ID: PAT_MRT3847_12086C.1.pep
RQGAHVSTLLENTRRSVMKTKVLVNSTDSLSAAWKGQANNMCLLNMNTNCWAMLQKVKNSLCRHTPKKHLIRSLLTTDLN

SEQ ID NO: 165952 - protein, 48 aa, Glycine max
  Clone ID: PAT_MRT3847_120870C.1.pep
PSEGTPHYKQELLSCDPPRFCNSSLVRPYPKLVVRNLPELITELLPLS

SEQ ID NO: 165953 - protein, 83 aa, Glycine max
  unsure (1)..(83): unsure at all Xaa locations
  Clone ID: PAT_MRT3847_120871C.1.pep
GVKGFGEGGIASIIAGCATHPLDLIKGRMPLQGENNLPKPAQNLRPXLAFQTGSPAHAAAAFPHPRGGPIAAARPGQQHASRP

SEQ ID NO: 165954 - protein, 134 aa, Glycine max
  unsure (1)..(134): unsure at all Xaa locations
  Clone ID: PAT_MRT3847_120872C.1.pep
MGVFENSTLSLWCHSNQHCLQLAKEHMGSVRETASFLLGLISVIVWVVAEIPQILTNYRTKSAEGLSVTFLITWIIGDLFNLSGCLXEPATLPTQLYMAMLYTIITIALGAQTXYYGHIYPQLKYKRQLKIETF

SEQ ID NO: 165955 - protein, 155 aa, Glycine max
  Clone ID: PAT_MRT3847_120873C.1.pep
KLLSVCFRCKKCYTATHSSFTSFRDKSLLPINKISCTRVTTDMGSGSVHWNVFDGVKIITATPEALMAEIDSAISNLEYSRATALLEADEGYDAHMADEAYKAGCAALARGKLDEALRSLNLSLSKCPPDKTAALSKLNSLITLTSHHLLQVSST

SEQ ID NO: 165956 - protein, 124 aa, Glycine max
  unsure (1)..(124): unsure at all Xaa locations
  Clone ID: PAT_MRT3847_120874C.1.pep
LFTTIKIYNKAPQKPGTTGEHKKPQSPXNTTRQQNATQTQKPTGKKPKNTTKRTPTTEQTTHSTGQKPPXKPTTKKKKRPKTTPRPNTTSTERTTNTRRASPGEKPRHTTAGAATDAGTNKPTT

SEQ ID NO: 165957 - protein, 95 aa, Glycine max
  Clone ID: PAT_MRT3847_120875C.1.pep
ISQMDHGNHLLVFTLLSFLLRGESWGWFSSSKETPSSGKTHAANEGNFSAEFSIESFNDHKGVKLIENAKKRMISLNSCGKMLTNIFLLDVLKSW

SEQ ID NO: 165958 - protein, 52 aa, Glycine max
  Clone ID: PAT_MRT3847_120876C.1.pep
KSLYSLVNHIVIKSPMNIDRDAKKLVIDSGVVYKCGNCSIYLINSSYVSSSK

SEQ ID NO: 165959 - protein, 57 aa, Glycine max
  Clone ID: PAT_MRT3847_120877C.1.pep
LVDEYSAHSQLLCSRTQLRGFVTYSVTRPYVHYHFLAVNAVFMIGFISILAEDRITV

SEQ ID NO: 165960 - protein, 286 aa, Glycine max
  unsure (1)..(286): unsure at all Xaa locations
  Clone ID: PAT_MRT3847_120878C.1.pep
RVRLSLDIDTITKLRFTKTTPNYTAPDQVYRSLRNMGPDSSKNLRFNLTWQLPIDSGFTYLLRLHFCELDPGVNKPGDLSFYIFVMISWLKMXXDVLGWSXTEGVPVVRQYAVFIQGNQHQRAYLSLKMHPNPTSLAKDAKLNGIELFKINDSTGNLAGPNPDPLRAQTPEVPHHSSEKKSNGTTRTLFAAIAGAVSGVVLLSLIVVFFLVKRKKNVAVDDKKEGTSRGSGSSSLPTNLCRYFSIAEVRAATNNFDKLFMVGAGGFGNVYKGYIDDGATCVAIKRL

SEQ ID NO: 165961 - protein, 77 aa, Glycine max
  Clone ID: PAT_MRT3847_120879C.1.pep
HSFKPHLYNSYSFRWTHMQLNAWLTCILNTCGTSQMLRIYDIIFIKYILTLISIVNILLNTGDMKKDIKYKKNLIKS

SEQ ID NO: 165962 - protein, 109 aa, Glycine max
  Clone ID: PAT_MRT3847_12087C.1.pep
DPPLFPPAFAPIGGPKKSPKEKSHDEFMRTSPGGSGTYLCTKKQCYWGQFCFFARHQFLKRLAPKVKGLHKGPTLVLKSPHERFPQIRLGGPKNFSFFSTKKMVHPLNR

SEQ ID NO: 165963 - protein, 57 aa, Glycine max
  Clone ID: PAT_MRT3847_120880C.1.pep
ICHSHNFTCECASNRDTFHLQMVHITGSKYTLAGSSLVEHNPLDLTHIYIDHISRKL

SEQ ID NO: 165964 - protein, 163 aa, Glycine max
  Clone ID: PAT_MRT3847_120881C.1.pep
MPRTNWNRSKIRKAIVDFHGEMVLLVNYSNINYTGLAKILKKYDKRTGGLLRLPFIQKVLEQPFFTTDLISKLVKECESIIDAVFPAEEEAERAKEAKEAITVAGKGIFRNTVAALLTLQEIRKGSSTESPFSLPPLNLPDSDLIQSIQLNACSSYCLGKMMM

SEQ ID NO: 165965 - protein, 62 aa, Glycine max
  Clone ID: PAT_MRT3847_120882C.1.pep
ARDKILLTSCCCCVEHQFTAIEDGSSQRSWWWKWWWPWWLCSLRTTLQCTIDVQVSPFAYQE

SEQ ID NO: 165966 - protein, 160 aa, Glycine max
  Clone ID: PAT_MRT3847_120883C.1.pep
MSITTFLLLLLLSPAITATPTAYEMLESFHFPAGILPKGVTGYELDPSSGKFSADLNGSCSFSLEGSYQLSYQKTITGYVSEGRLTELRGISVKILFFWLNILDVVRVGEDLDFSVGVASASFPLDNFFVSPQCGCGLDCDDFRIRKLDLGNRKPSLSSV

SEQ ID NO: 165967 - protein, 44 aa, Glycine max
  Clone ID: PAT_MRT3847_120884C.1.pep
SGLSINFPSLPIFKNYIECDNLLSKQSRETWVSSLLSSTRVPGL

SEQ ID NO: 165968 - protein, 88 aa, Glycine max
  Clone ID: PAT_MRT3847_120885C.1.pep
TTKMVKDDEWVWGAMTNDTVVVEILLKANHTFHTNLSSLYLNFSFLGSNTSRSRSRLTISFSCYDAAFSTRCSPTIPLFWSADDSYED

SEQ ID NO: 165969 - protein, 98 aa, Glycine max
  unsure (1)..(98): unsure at all Xaa locations
  Clone ID: PAT_MRT3847_120886C.1.pep
LVKRVAVLVMQLPVELPLVKAVFIFVSSASMVRSCLWCLGDLILYSVYFAVLLRIFFEHLSGIGGSXLVRHSLRERRTQKVRVVPLVSYPSLVSDWFQ

SEQ ID NO: 165970 - protein, 224 aa, Glycine max
  Clone ID: PAT_MRT3847_120887C.1.pep
GSRIHHLLYFVLGSCSYTWGLGNMGQLGHSSLQYGDKELLPRRVVTLDGIFIKDVACGGVHTCSVTQGGALYAWGGGRSGQLGLGPQTGLFSCGLNDSQTFFRNILVLKIPVLVVPKGVRYSATGLSMTLISMSDCRIHGWGYNNYGQAAYARCPYPFDSCVVDWCVLAAGGGHSAVLTYAYSLKRLCVSVRAAGAPVSSAALRALTACRTASGPLPRLCGRLK

SEQ ID NO: 165971 - protein, 52 aa, Glycine max
  Clone ID: PAT_MRT3847_120888C.1.pep
ILSVNERKMALTQDPKNRETNMLDIDLGICNHRIYIQMNKPIIWLTYQKKQF

SEQ ID NO: 165972 - protein, 77 aa, Glycine max
  unsure (1)..(77): unsure at all Xaa locations
  Clone ID: PAT_MRT3847_120889C.1.pep
CRKGYGKFPLDPRNSQWAQRVGRLCXLPIRYGLVLGGNSSFGIPPPRTRVWELRSPGPWVRLFLGCFNKKDFKALAP

SEQ ID NO: 165973 - protein, 72 aa, Glycine max
  Clone ID: PAT_MRT3847_12088C.1.pep
INQTMIQRHHQLNLGFSFQNIAVNRVLGYVTFSYSVFSYKYKSLRLAKLSKVNGQGNGCDPEIFPISQDKCQ

SEQ ID NO: 165974 - protein, 68 aa, Glycine max
  Clone ID: PAT_MRT3847_120890C.1.pep
LIDAEKKLEELTNEQETLIDVFAEERDRRDAEEKKLRNKLEEASNTIKELLEKIRKLERKSSSGKLDR

SEQ ID NO: 165975 - protein, 73 aa, Glycine max
  Clone ID: PAT_MRT3847_120891C.1.pep
GPTSESGPLQFSKTLSCPQESLPLPPSEAGSLPSISNKIGSNRGTSFPLPCSPCGSPQPCKSTSRGLFFLSRL

SEQ ID NO: 165976 - protein, 93 aa, Glycine max
  Clone ID: PAT_MRT3847_120892C.1.pep
ERLQRKEEDILGEVLHALQHEKDRCKSLETQLIDAEKKLEELNNEQETLIDVFAEERDRRDAEEKKLRNKLEVLLLPNALSKSGGIKYYQRVA

SEQ ID NO: 165977 - protein, 53 aa, Glycine max
  Clone ID: PAT_MRT3847_120893C.1.pep
SHQEKSYEEKTLLLLLYLRIHIKCLIQGSGEGLCPKKHVAGNTTYSPTNEWDP
